United States Patent Application Publication US 2008/0229439 A1 - sequence listing, part 8

SEQ ID NO: 15415 - DNA, 2424 bp, Oryza sativa
  Clone ID: TFbOSC417635j.C1.o8.gm
atgcagtgcttctatgtttcacggggtaaacgaagtgaaccacctctttctcctaaggaagagactaagttcgaggcttcggattgcctgttccgtggagcattgatcagtgtactcgctgacaacatagtggacgtgtacatgcacatgccttctgggaaggacatgtgggatgcacttgaggccaagttcggagtttctgacgccggcagtgagctgtatgtcatggagcagttctatgactacaagatgcacaagagacaagagttcagtgttcctgatctcattggctctttgggtgttgaggagaaggcgagggcaaacgacgtccggggcaaaaaggttgagggaggttctagtgccaatatggtacagaagaagaaccctcatgcatcccacaacaacaagaaagtcaagcctgatgtcaaacccaaggctgcaaccaattttaagaagaaaggcaagggaaaggcaaagggagactgctttgtgtgtggcaagtctgggcattgggccaaggactgtcctgagcgcaaagacaggaagtctgccaacatgatcattagcgagggcggaggaacatcgggagatgctactttctttgagaatgaatttcctatgaaatatacacctagcacttctagtaaagaaactgtcatgccccatgagcactttgcaccgatagaacacaatgatcaaacgcctgagaaaaatcctgaggaggacaacattgtagatactcgcaagagtaagagacaaagggttgcaaaatcctttggagatgactacattgtatacctcgtggatgacaccccaagaaccatagaagaggcatattcatctcctgacgctgactactggaaggaagcagtacgcagtgaaatggactcgattatgtctaatggtacttgggaagtcgttgagcgtccatatggatgtaagcccgtaggatgcaaatgggttttcaagaaaaagcttaggcctgatggtacaatcgaaaagtataaggcaaggcttgtggccaagggttatacccaaaaggaaggcgaggatttcttcgacacatattcaccagttgctcgcttgactacgattcgagtactacttgctctggcagcctctcatggtcttctcgtccatcagatggacgttaagacagctttcctaaacggagagctggaggaggagatctatatggatcaaccagacgggtatgtactagaaggtcaggagggaatggtgtgtaaactattgaaatccttgtatggcctcaagcaagcacctaagcaatggcatgagaagtttgacaccacgcttacatctgcaggctttgttgtgaacgaagctgataaatgtgtatactatcgctatggtgggggagaaggggtgatcttatgcttgtatgtcgatgacatactgatctttgggaccagccttaatgtgattgaggaggtcaaagactatctgtccaagagttttgaaatgaaggatttgggagaggctgatgttattcttaacatcaaactgcaaagaggagatgagggtttttggggagtgcctcctgcacgactgctcatcgccatgtctggagttgctgccgccgctattggcggaggtggtgcgtcgccgccgacaggagctgcgccgctgccgacgccgacaggagctgcgccgctgccgatgccgacaggagctggatccggagctggtgcgccaggaggaggtgccgtgaacgactacaacaacggaggcaattctgcctcaccatccagcggagggccattctcggggcggatagaggagtacgagctgaggcgagaggaggctgatcggagaactagagctgatatacggtctctcatagatgtggttgaagcatgcacaccggaagttgggaagaaggcaaaagacttgccagcgtcaattaagaaagagcagtcaaaggtgacgcccaccacatgttcgacgaaatgctctagtcccgacatcgagcccaatctcaccgtggttgcggtggacaaatgtgccaccactgccatggcctccatgaagttggtagctgatgatggtgcaaccagcaccaccaaaattcccaccactgactattccaaggagacgcacgccaagtgttcgatgttgggcttcgatgtcaagtgggacgccaacaaagccgacatcacgttcctgaccaagacggttgtacttgaaaccgttccagcatccattgcatcattgagcgccttctcaccaaggatgatcgccgacatcaagcagtacacattgatgcccaccagaaaggacaactgctacttaagttggagacacttacttcttgcaagagtgatggttgtggagctgagcagtactgggcaatttggttctgagaacatttccatcaaaggaaaacatgttgacaagctgtga

SEQ ID NO: 15416 - DNA, 3261 bp, Oryza sativa
  Clone ID: TFbOSC420545j.C1.o5.fg
atggcccttttctgctaccgccgcgcatccgacttcctccccgatcacgccgcgcacgcctatgggatacagaccgcgccgctgctggccttctacgccttggctaattcggcgctcgtcacgctgtatgcgatgtgttggaaggggcggcggcgtttgctcgccggagaagaagctggtggtgccggagagcgtgtgcgggcggccgctggggctgcagttccaccacgcctccggcgacctgtacgtggccgacgcgtacctaggcctcctgagggcgccggcgcgcagcgggctggccgagaggtggtgacgacggaggccgccggcgtgccgttcaacttcctcaacggccttgacatcgaccagaggaccagcgacatctacttcaccgatagcagcagcacgtactggaggagacctctggtgaacttattcctttccaagtcaaattattatccttcacctaagttccttttctcatgggccgattcacatgagccaacccttctcaaaccgaagtccaatatacctacccctcaaaacacagtatcagtactggatcttcccatggacccattccaacaaaatgtctctcctgctttacccccaaagcccaaaaggagggctgggaaggtgatcttgatggatttagaaaggaggagaagtgcaagtatcaacaaactttctgatggatttatgtcccctgatccaaacttgggtgtgggaaagccaaggggaaaggatagggcaaagagtaccaagaagcttaaaatgttggctcaagaaagtggtatcttactctctcttaaccctttgcctctggaacttaacgatcctaatgcttcagatgatgagattgatgcccctctcgccgattgttctatacggctccttcaacagattggcactgagcgatgcaatgtttcatggggaaaacgaagtgaaccacctttctctcctgaggaagaggttaagttcgaggcttcggatttcctgttccgtggagcattgatcagtgtactcgctgacaatatagtggacgtgtatatgcacacgccttcagggaaggacatgtgggatgcacttgaggccaagttcggagtttccgacgccggcatggaacaagctcatgagattcagatgttggctaaggaacttgagaacaacaactgtgagttgccggacaagtttgtggcgggaggcattattgccaaattgccaccttcttggtcagattttgccacttctttgaagcacaagagacaagagttcagtgtatctgatctcattggctctttgggtgttgaggagaaggcgagggcaaaggacaacggggcaaaaaggtcgagggagaaagtcaagcctgatgtcaaacccaaggctacaaccaattttaagaagaaaggcaagggaaaggcaaagggagactgctttgtgtgtggcaagtctgggcattgggctaaggactgtcctgagcgcaaagacaggaagtctgccaacatggtcatttgcgaggcggaggaatattggggtacggatttacagttgacacctccctattcaccccaatcaaatggggcagccgaaagaaagaactgtactctaactgagatggtgaatgccatgttagacactgcgggactttccaaggaaaggtggggtgaggcaattttgactgcttgtcatgtcctgaataaaattccaacgaagcataaagaagtaacaccattcgaggaatgggaaaggaagaaattaaatctctcatacttacgaataaggggctgtttggccaaggtaaatgtacctatagccaaaaagcgtaaacttggaccgaatactgttgattgtgtgttccttagttatgctattcacagcgtgggttatagattcttaatagtaaactctggagtacccgacatgcgagttggtacaattattgagtctagagatgctacattctttgataatgaatttcccatgaaaaatatacctagcacttctagtcaagaaactgtcataccccatgagcactttgcaccgatacaacataatgatcaagcgcctgagggaaatcctgaggaggataacattgcagatactcgtaagagtaagagacaaagggttgcaaaatcctttggagatgactacattgtatacttcgtggatgacactccaagaacaatagaagaggcatattcatctcctgatgctgactactggaaggaagcagtacgcagtgagatggactcaattatgtctaatggtacttgggaagtcgttgagcgtccatatgggtgcaagcctgtaggatgcaaatgggttttcaagaaaaagcttaggcctgatggtacaattgaaaagtacaaggcaaggcttgtggccaagggttatacccaaaaagaaggcgaggatttttttgacacctactcaccagttgctcgcctgaccacgattcgagtactacttgctctggcagcctctcatggtcttctcgtccatcagatggacgttaagacagctttccttaacggagagctagacgaggagatctatatggaccaaccagacgggtatgtactagaaggtcaggagggaatggtgtgtaaattgttgaaatccttatatggccttaagcaagcacctaagcaatggcataagaagtttgacaccacacttacatctgtcggctttgttgtgaacgaagctgacaaatgtgtgtactatcgctatggtgggggagaaggagtgatcttgtgtttatatgtcgatgacatattgatctttgggaccagcctcaatgtgaatgaggaggtcaaggactttctgtccaagagttttgaaatgaaggatttgggaaaggctgatgttattcttaacattaagctactgaaaggagatgagggggggattacacttgtgcaatcccactatgtagacaaggttttaagtggctttggatacagtgactgcaagccagctcctactccttatgatcccaacgtgctattaaggaaaaaccgaagaatagcaagggatcaactgagatactcccaaatcattggttcattgatgtacttggctagtgcaacgaggcctgatatctcatttgctgtaagcaagctgagccggtttgtctcaaatccgggagatgatcattggcaggctctggaaagagtaatgcgctatctaaagggcactatgagctatggaattcactataccgggtatccaaaagtactggaagggtatagtgactaa

SEQ ID NO: 15417 - DNA, 4371 bp, Oryza sativa
  Clone ID: TFbOSC420787j.C1.o19.gm
atgcagtgcttctatgtttcacggggcaaacgaagtgaaccacctctttctcctgaggaagaggctaagttcgaggcttcggattgcttgttccgtggagcattgatcagtgtactcgctgacaacatagtggacgtgtacatgcacatgccttctgggaaggacatgtgggatgcacttgaggccaagttcggagtttctgacgccggcagtgagctgtatgttatggagcagttctatgactacaagatggtcgatgaccgttctgtagttgaacaagctcatgagattcagatgctggctaaggaacttgagaacaacaactgtgagttgccggacaagtttgtggcaggtggcattattgccaaactaccaccttcttggtcggactttgccacttctctaaagcacaagagacaagagttcagtgttcctgatctcattggctctttgggtgttgaggagaaggcgagggcaaaggacgtccggggcaaaaaggttgagggaggttctagtgccaatatggtacagaagaagaaccctcatgcatcccacaacaacaagaaagtcaagcctgatgtcaaacccaaggctgcaaccaattttaagaagaaaagcaagggaaaggcaaagggagactgctttgtgtgtggcaagtctgggcattgggccaaggactgtcctgagcgcaaagacaggaagtctgccaacatgatcattagcgagggcggaggaacatcgggagatgctacattctttgagaatgaatttcctatgaaatatacacctagcacttctagtaaagaaactgtcatgccccatgagcactttgcaccgatagaacacaatgatcaaacgcctgaggaaaatcctgaggaggacaacattgtagatactcgcaagagtaagagacaaagggttgcaaaatcctttggagatgactacattgtatacctcgtggatgacaccccaagaaccatagaagaggcatattcatctcctgacgctgactactggaaggaagcagtacgcagtgaaatggactcgattatgtctaatggtacttgggaagtcgttgagcgtccatatgggtgcaagcccgtaggatgcaaatgggttttcaagaaaaagcttaggcctgatggtacaatcgaaaagtacaaggcaaggcttgtggccaagggttatacccaaaaggaaggcgaggacttcttcgacacatactcaccagttgctcgcttgaccacgattcgagtactacttgctctggcagcctctcatggtcttctcatccatcagatggacgttaagacagctttcctaaacggagagctggaggaggagatctatatggatcaaccagacgggtatgtactagaaggtcaggagggaatggtgtgtaaactattgaaatccttgtatggcctcaagcaagcacctaagcaatggcatgagaagtttgacaccacgcttacatctgcaggctttgttgtgaacgaagctgacaaatgtgtatactatcgctatggtgggggagaaggggtgatcttgtgcttatatgtcgatgacatactgatctttgggaccagccttaatgtgattgaggaggtcaaagactatctgtccaagagttttgaaatgaaagatttgggagaggctgatgttattcttaacatcaaactacaaagaggagatgaggacgggcgggcgatcaggtttttggggagcgcaaggcgcgactactcactgttcgtcaatatctacttcatcttcaccaacatgtcgaacactggagacaaggagaaggagactcccgtcaacaccaacggaggcaatactacctcaaactccagcggaggaccattcttggggactattcatttccacttgtttgagtcggggttcatgccaagctataattgttggacatcccacggagagcaaggtgttgaaatggaagaggatgaagtggaagacgacaatattccggactttgctcagtatgttggatttgaaggaaatcaaacgggcgaggaggaaatagctgctgatggtaacgacgttgcggatgatcttggtcagatgttgcaggacgccagggaagacagcgaaagtgaaaaggaggcccataaattggacaagatgttggaggaccacagaacttcgttgtacccaggttgcgagcaggggcacaaaaagttggataccactctggatttgttgcaatggaaggcaaaaaatggggacgggatcctgagacaccccgccgatggttcgcagtggcgaaacatcgacagaaaatttaaagaatttggaaaggacgcacgaaacatacggtttggccccaagcaacctggtaacgacatcgacgtgtacctaagaccactggtcgaagatcttaaacagttgtggaagaaggaaggtgtccccgtgtgggacgaggacaaacaggaggagtttaacctacgagcgctgctgttcgtaaccatcaacgattggcctgcacttagcaacctatccggacagtccaacaagggttacaaggcttgcactcactgtatggatgaaacagaaagtacgtatcttaagcactgtaggaaggttgtatacatgggtcatcgtcgattccttgcagcaaaccacccggtacggaagaaagacaagcacttcgaacataaggccgaccaccgtacgaagcctaaacatcgcagcgggaaaacagtgtttgctatggttaaagatcttaaagtagtgttcggaaaggggcctggaagccagcatatagagagcgaagatggtcacgcggcgatgtggaaaaagaactctatattttgggagttaccatattgggaattcttggacgtacgccacgcaatcgacgtgatgcacctcactaagaacctttgcgtaaaccttcttggcttcctaggtgtatacggaaagtcgaaagatacactggaagcacgtaatgatctgaagcatatggaacaacgtagcgaccttcacccggaaccaaaggagaaaggaagccattacttgagtccagccagctacactcttagcaaggcagagaaggaaagtatgtttgaatgcttggagagcataaaggtaccgtctggatactccacgaatatcaagcgaataataagcacgaaggagaagaagttcacaaacctaaagtctcatgactgtcacgtgttgatgacacaactgctaccagttgtaataaggggtatccttccagacaatgtccgggcaacaataacaaagctatgtgcattcatgaacgcaatttcgcagaaggtcatcgatccggatagattagaagcccttcagaatgaagtggtgcaatgtctcgtcagttttgagttgatatttccaccttcatttttcaatataatgacgcatctgctttgtcaccttgtgaaagagatccgtattctcggacctatgtacctacacaacatgtttcctttcgagaggtacatgggcgttctgaagaagtatgttcgtaaccgtgctcgtccagaggcaagcatcgccaagggttatggaacagaggaggtcatcgaattttgcgtagaatttatcgaagaccttcgcccaatcggggtacctaaatcacgccatgaagggagactacagggaaagggaactctcggaaggaaagcaataacgacggtagacaacaatttattccgtaaagcccatttcactgttctgcaacactcttcattggtagctccttacatcgaggagcacttggctctagttcgcgcaaggaacatcggtaagtccgatgcatggattacacggcatcacattgatactttccccgcgtggctacgacaacatctcatgggtaacgagtcgatcaaccaacaacttgccttcctggcgtggggaccgtctgggtcgatcgcgacattccagggatatgagatcaatgggtacacattctacacgagagcccaagacatgaagagcacgaaccaaaacagcgctgttcgtgtcgatgccatgggacacgatggaacaactgccacgtattacggttccatcgaggacatatgggaacttgactatggtcctctcaaggttcctctgttccggtgccaatgggttaggttgactggtggaggcgtaatgattgatgacagtgggatgacaactgttgaccttaacaaggttggatactcggacgaaccttttgtccttgccaatgatgtaacgcaagtctttttcgtgaaggacatgtctagcaaaggaaagaagggcagagggcctgatgagcctaagcgtcaagtggttctcccaggcaaaagaaaaatcgtcggagttgaggacaagactgacgaggattacgattag

SEQ ID NO: 15418 - DNA, 1077 bp, Oryza sativa
  Clone ID: TFbOSC423002j.C1.o1.fg
atggcgatgatcttcctcctggccgcgctctccaccacccacctcgcctcctccctccgccccggcgccgtcgccggcggcgcgtgccgtcccagcggctacctcccggggaagtcctacgggcgggcgatcatgtttttggggagcgcaaggcgcgactactcactgttcgtcaacatctacttcatcttcaccaacatgtcgaacactggagacaaggagaaggagactcccgtcaacaccaacggaggcaatactgcctcaaactccagcggaggaccattcttgggtgtactcgctgacaacatagtgaaggtgtacatgcacatgccttctgggaaggacatgcgggatgcacttgaggccaagttcggagtttctgacgccggcagtgagctgtatgttatggagcagttctatgactacaagatggtcgatgaccgttctgtagttgaacaagctcatgagattcagatgctggctaaggaacttgagaacaacaactgtgagttgccggacaagtttgtggcaggtggcattattgccaaactaccaccttcttggtcggactttgccacttctctaaagcacaagagacaagagttcagtgttcctgatctcattggctctttgggtgttgaggagaaggcgagggcaaaggacgtccggggcaaaaaggttgagggaggttctagtgccaatatggtacagaagaagaaccctcatgcatcccacaacaacaagaaagtcaagcctgatgtcaaacccaaggctgcaaccaattttaagaagaaaagcaagggaaaggcaaagggagactgctttgtgtgtggcaagtctgggcattgggccaaggactgtcctgagcgcaaagacaggaagtctgccaacatgatcattagtgagggcggaggaacatcggggtacggtcgggagaggttcctccttgttgatgggaaacgggtcgcttgcggctgttcatggtgttggtacggtcgatctgaagtttacttcgggaaagaccgtgcagctgaagaatgtgcagcatgtcccttcaataaagaagaatctagttag

SEQ ID NO: 15419 - DNA, 2368 bp, Oryza sativa
  Clone ID: TFbOSC423019j.C1.o2.np
atatcatgattattatcttgttattttggattaaaatatgccgaattatgaccaaatttccaacattccaaaaacctgataggtcattttcggtagttggctttgctgctgcactgaaaccacatgcttttgatggttcaaactataagagatggaaagcacgtgcactattgtggttgacagcgatgcagtgcttctatgtttcacggggcaaacgaagtgaaccacctctttctcctgaggaagaggctaagttcgaggcttcggattgcctgttccgtggagcattgatcagtgtactcgctgacaacatagtggacgtgtacatgcacatgccttctgggaagaacatgtgggatgcacttgaggccaagttcggagtttctgatgccggcagtgagctgtatgttatggagcagttctatgactacaagatggtcgatgaccgttctgtagttgaacaagctcatgagattcagatgctggctaaggaacttgagaacaacaactgtgagttgccggacaagtttgtggcaggtggcattattgccaaactaccaccttcttggtcggactttgccacttctctaaagcacaagagacaagagttcagtgttcctgatctcattggctctttgggtgttgaggagaaggcgagggcaaaggacgtccgggggaaaaaggttgagggaggttctagtgccaatatggtacagaagaagaaccctcatgcatcccacaacaacaagaaagttaagcctgatgtcaaacccaaggctgcaaccaattttaagaagaaaagcaagggaaaggcaaagggagactgctttgtgtgtggcaagtctgggcattgggccaaggactgtcctgagcgcaaagacaggaagtctgccaacatgatcattagcgagggcggaggaacatcggggtacggtaaaatactacctacagttctctctgtttttcattcacctgattggtgggtggacactggtgctaatattcatgtatgtgctgacatttctctattttcttcttatcaggtcgggagaggttcctccttgttgatgggaaacgggtcgcttgcggctgttcatggtgttggtacggtcgatctgaagtttacttcgggaaagaccgtgcagctgaagaacgtgcagcatgtcccttcaataaagaagaatctagttagcggctctctattgtgtagagaaggttttagacttgtgtttgagtccaataaatgtgtcgtatctaaatatgggacttttgttggaaaaggttatgacagcggaggcttgttccgcttttctttgaatgacatgtgtaataatcataatgctgtgaaccatattagcgagaatgatgagtctaatgtgtggcattcgcgactctgtcatgtgaatttcggttgtatgacgcgcttagctaacatgagtttaattccaaaattcactttggtaaaaggttccaagtgccatacttgtgttcaatcgaaacaacctcgcaagcctcacaaggcatctgaggcgaggaatttggcacctctagaacttgttcattccgatttgtgcgaaatgaacggcgtgttgactaaagggggaaagaaatatttcatgacactgatagatgattgcactagattttgctatgtgtatctattgaaaacaaaggatgaggcattgcatttctttaaaatctataaagctgaggtagaaaaccaacttgaaaggaaaatcaaacggttgaggtctgatagaggtggggagtatttttccaatgagtttgcatccttttgcgaagagtttggaattattcatgagatgacgcctccctattcaccccaatcaaatggggtggccgaaagaaagaaccgtactctaactgagatggtgaatgccatgttagacagtgcggggctttccaaggaatggtggggtgaggcagttttgactgcgtgtcatgtcctgaataaaattccaatgaagcataaggaagtaacaccattcgaggaatgggaaaggaagaaattaaatctctcatacctacgaacatggggctgtttggccaaggtaaatgtacctatagccaaaaagcggaaacttggaccaaaaactgttgattgtgtgtttcttggttatgctatccacagtgtgggttatagattcttaatagtaaactctagagtacccgacatgcatgttggtacaattcttgagtccagagatgctacattctttgagaatgaatttcctatgaaatatacacctagcacttctagtaaagaaactgtcatgccccatgagcactttgcaccgatagaacacaatgatcaaacgcctgaggaaaattctgagaaggacaacat

SEQ ID NO: 15420 - DNA, 2082 bp, Oryza sativa
  Clone ID: TFbOSC7439j.C1.o3.fg
atgtctgcgcctggagccggagctgccgccgccgccgctgctgctggagctggagatggcgtgcctggagctggagccggagccgttgcgaacgtcaacaccaacagaggcaattctgcctcacaatccagcggagggccattctcggggtatatccttctcctgctgttaactcattcgtttatagcgctgttagtcctgttagtcgcaagtcaattgcagcttttggggagtgcttcccgtacgattgctcgtccaccatgtatgcgcctggagccggagctgccgccggtgccactgctgctggagctagagatggcgcgcctggagctggagccggagctgttgcgaacgtcaacaccaacggaggcaattctgcctcacaatccaacggagggccattctcgggttggctttgctgctgcactgaaaccacatgcttttgatggttctaactataagagatggaaagcacgtgcactattgtggttgacagcgatgcaatgcttctatgtttcacggggcaaacaaagtgaaccacctctttctcctgaggaagaggctaagttcgaggcttcggattgcctgttccgtggagcattgatcagtgtactcgctgacaacatagtggacgtgtacatgcacatgccttctgggaaggacatgtgggatgcacttgaggccaaattcggagtttccgacgccggcagtgagctgtatgtcatggagcagttctatgactacaagattgtcgatgaccgttctgtagtagaacaagctcatgagattcagatgctggctaaggaacttgagaacaacaactgtgagttgccagacaagtttgtggcgggtggcattattgccaaattgccaccttcttggtcggacttggccacttctctaaagcacaagagacaagagttcagtgtttctgatctcattggctctttgggtgttgaggagaaggcgaggacaaaggacgtccggggcaaaaaggttgagggaggttctagtgccaatatggtacagaagaagaaccctcatgcatcccacaacaacaagaaagtcaagcctgatgtcaaacccaaggctgcaaccaactttaagaacaaaggcaagggaaaggcaaagggagactgctttgtgtgtggcaagtctgggcattgggccaaggactgtcctgagcgcaaagacaggaagtctgccaacatggtcattagcgagggcggaggaacatcggggtacggtcgggagaggttcctccttgttgatgggaaacgggtcgcttgcggctgttcatggtgttggttttgctatgtgtatctattgaaaacaaaggatgaagcattgcatttctttaagacctataaagctgaggtagaaaaccaacttgaaaggaaaatcaaacggttgaggtctgatagaggtggggagtatttttccaatgaatttgcatccttttgcgaagagtttggaattattcatgagaggacgcctccctattcaccccaatcaaatggggtggccgaaagaaagaaccgtactctaactgagatggtgaatgccatgttagacactgcagggctttctaaggaatggtggggtgaggcagttttgactgcgtgtcatgtcctgaataaaattccaatgaagcataaggaagtaacaccattcgaggaatgggaaaggaagaaattaaatctctcatacctacgaacatggggctgtttggccaaggtaaatgtacctatagccaaaaagcggaaacttggaccaaatactgttgattgtgtgttccttggttatgctattcacagtgtgggttataaattcttaatagtaaactctagagtacccgacatgcatgttggtacaattattgagtccagagatgctacattctttgagaatgaatttcccatgaaacatacacctagcacctctagtcaagaaactatcatgccccatgagcactttgcaccgatagaacacaatgatcaaacgcctgaggaaaatcctgaggaggacaacattgtagatactcgtaagagtaagagacaaagggttgcaaaatggagatga

SEQ ID NO: 15421 - DNA, 3381 bp, Oryza sativa
  Clone ID: TFbOSC900014j.C1.o10.fg
atgcagtgcttctatgtttcacggggcaaacgaagtgaaccacctctttctcctgaggaagaggctaagttcgaggcttcggattgcctgttccatggagcattgatcagtgtactcgctgacaacatagtggacgtgtacatgcacatgccttctgggaaggacatgtgggatgcacttgaggccaagttcggagtttctgacgccggcagtgagctgtatgtcatggagcagttctatgactacaagatggtcgatgaccgttctgtagtagaacaagctcatgagattcagatgctggctaaggaacttgaaaacaacaactgtgagttgccggacaagtttgtggcgggtggcattattgccaaactaccaccttcttggtcggactttgccacttctctaaagcacaagagacaagagttcagtgttcctgatctcattggctctttgggtgttgaggagaaggcgagggcaaaggacgtccggggcaaaaaggttgagggaggttctagtgccaatatggtacagaagaagaaccctcatgcatcccacaacaacaagaaagtcaagcctgatgtcaaacccaaagctgcaaccaattttaagaagaaaggcaagggaaagacaaagggagactgctttgtgtgtggcaagtctgggcattgggccaaggactgtcctgagtgcaaagacaggaagtctgccaacatgatcattagcgagggcggaggaacatcggggtatggtaaaatattacctacagttctctctgtttttcattcacctgattggtgggtggatactggtgctaatattcatgtcgggagaggttcctccttgttgatgggaaacgggtcacttgcggctgttcatggtgttggtacggtcgatctgaagtttacttcgggaaagaccgtgcagctgaagaacgtgcagcatgtcccttcaataaagaagaatctagttagcggctctctattgtgtagagaaggttttagacttgtgtttgagtccaataaatgtgtcgtatctaaatatgggacttttgttggaaaaggttatgacagtggaggcttgttccgcttttctttgaatgacatgtgtaataatcataatgctgtgaaccatattagcgagaatgatgagtctaatgtgtggcattcgcgactctgtcatgtgaatttcggttgtatgacgcgcttagctaacatgagtttaattccaaaattcactttggtcaaaggttccaagtgccatacttgtgttcaatcgaaacaacctcgcaagcctcacaaggcatctgaggcgaggaatttggcacctctagaacttgttcattccgatttgtgcgaaatgaacggcgtgttgactaaagggggaaagaaatatttcatgacactgatagatgattgcactagattttgctatgtgtatctattgaaaacaaaggatgaggcattgcattactttaaaatctataaagctgaggtagaaaaccaacttgaaaggaaaatcaaacggttgaggtctgatagaggtggggagtatttttccaatgagtttgcatccttttgcgaagagtttggaattattcatgagatgacgcctccctattcaccccaatcaaatggggtggccgaaagaaagaaccgtactctaactgagatggtgaatgccatgttagatactgcggggctttccaaggaatgcacttctagtaaagaaactgtcatgccccatgagcactttgcaccgatagaacacgatgatcaaacgcctgaggaaaatcctgaggaggacaacattgtagatactcgcaagagtaagagacaaagggttgcaaaatcctttggagatgactacattgtataccttgtggatgacaccccaagaaccatagaagagacatattcatctcctgacgctgactactggaaggaagcagtacgtagtgaaatggactcgattatgtctaatggtacttgggaagtcgttgagcgtccatatgggtgcaagcccgtaggatgcaaatgggttttcaagaaaaagcttaggcctgatggtacaatcgaaaagtacaaggcaaggcttgtagccaagggttatacccaaaaggaaggcgaggacttcttcgacacatactcaccagttgctcgcttgaccacgattcgagtactacttgctctggcagcctctcatggtcttctcgtccatcagatggacgttaagacagctttcctaaacggagagctggaggaggagatctatatggatcaaccagacgggtatgtactagaaggtcagaagggaatggtgtgtaaactattgaaatccttgtatggcctcaagcaagcacctaagcaatggcatgagaagtttgacaccacgcttacatttgcaggctttgttgtgaacgaagctgacaaatgtgtatactatcgctatggtgggggagaaggggtgatcttgtgcttatatgtcgatgacatactgatctttgggaccagccttaatgtgattgaggaggtcaaagactatctgtccaagagttttgaaatgaaggatttgggagaggctgatgttattcttaacatcaaactacaaagaggagatgagggtgggattacacttgtgcaatcccactatgtggacaaggttttgagtcgctttggatatagtgactgcaagccagctcctactccttatgatcccagcgtgctattaaggaaaaaccgaagaatagcaagggatcaactgagatactctcaaatcattggttcattgatgtacttggctagcgcaacgaggcctgacatctcatttgctgctctggaaagagtaatgcgctatctaaagggcactatgagctatggaattcactataccgggtatccaaaagtactagaagggtatagtgactcaaactggatatctgatgctgatgagataaaagccacaagtggatatgcgttcacacttggaggtggcgctgtttcctggaagtcttgcaagcagaccatcttaacgaggtcaacaatggaagcagaacttacagcactagatactgcgacagttgaggccgagtggcttcgtgaactcctgatggatttgccggtggttgaaaaaccagtgccagctatcctaatgaactgcgataatcaaacagtgattattaaagtgaacagttcaaaggacaacatgaagtcatctagacacatcaagagaagactgaaatctttcagaaagcagaaaaactccggagtgatagcattggactatgtccaaacggctagaaatctggcagatcagtttaccaaggggctaccacgtaatgtgatagacagtgcatcgagggaaatgggcttgatacccacctaa

SEQ ID NO: 15422 - DNA, 3723 bp, Oryza sativa
  Clone ID: TFbOSC900017j.C1.o7.fg
atgcagtgcttctatgtttcacggggtaaacgaagtgaaccacctctttctcctgaggaagaggctaagttcgacgcttcggattgcgtgttccgtggagcattgatcagtgtactcgctgacaacatagtggacgtgtacatgcacatgccttctgggaaggacatgtgggatgcacttgaggccaagttcggagtttctgacgccggcagtgagctgtatgtcatggagcagttctatgactacaagatggtcgatgaccgttctgtagtagaacaagcttatgagattcagatgctggctaaggaacttgagaacaacaactgtgagttgccggacaagtttgtggcgggtggcattattgccaaactaccaccttcttggtcggactttgccacttctctaaagcacaagagacaagagttcagtgttcctgatctcattggctctttgggtgttgaggagaaggcgagggcaaaggacgtccggggcaaaaaggttgagggaggttctagtgccaatatggtacagaagaagaaccctcatgcatcccacaacaacaagaaagtcaagcctgatgtcaaacccaaggctgcaaccaattttaagaagaaaggcaagggaaaggcaaagggagactgctttgtgtgtggcaagtctgggcattgggccaaggactgtcctgagcgcaaagacaggaagtctgccaacatgatcattagcgagggcggaggaacatcggggtacggtaaaatattacctacagttctctctgtttttcattcacctgattggtgggtggatactggtgctaatattcatgtatgtgctgacatttctcagttttcttcttatcaggtcgggagaggttcctccttgttgatgggaaacgggtcgcttgcggctgttcatggtgttggtacggtcgatctgaagtttacttcgggaaagaccgtgcagctgaagaacgtgcagcatgtcccttcaataaagaagaatctagttagcggctctctattgtgtagagaaggttttagacttgtgtttgagtccaataaatgtgtcgtatctaaatatgggacttttgttggaaaaggttatgacagcggaggcttgttccgcttttctttgaatgacatgtgtaataatcataacgctgtgaaccatattagcgagaatgatgagtctaatgtgtggcattcgcgactctgtcatgtgaatttcggttgtatgatgcgcttagctaacatgagtttaattccaaaattcactttggtcaaaggttccaagtgccatacttgtgttcaatcgaaacaacctcgcaagcctcacaaggcatctgaggcgaggaatttggcacctctagaacttgttcattccgatttgtgcgaaatgaacggcgtgttgactaaagggggaaagaaatatttcatgacactgatagatgattgcactagattttgctatgtgtatctattgaaaacaaaggatgaggcattgcattactttaaaatctataaagctgaggtagaaaaccaacttgaaaggaaaatcaaacggttgaggtctgatagaggtggggagtatttttccaatgagtttgcatccttttgcgaagagtttggaattattcatgagatgacacctccctattcaccccaatcaaatggggtggccgaaagaaagaaccgtactctaactgagatggtgaatgccatgttagacactgcggggctttccaaggaatggtggggtgaggcagttttgactgcgtgtcatgtcctgaataaaattccaatgaagcacaaggaagtaacaccattcgaggaatgggaaaggaagaaattaaatctctcatacctacgaacatggggctgtttggccaaggtaaatgtacctatagtcaaaaagcggaaacttggaccaaaaactgttgattgtgtgtttcttggttatgctatccacagtgtggtttatagattcttaatagtaaactctggagtacccgacatgcatgctggtacaatttttgagtccagagatgctactttctttgagaatgaatttcctatgaaatatacatctagcacttctagtaaagaaactgtcatgccccatgagcactttgcaccgatagaacacaatgatcaaacgcctgaggaaaatcctgaggaggacaacattgtagatactcgcaagagtaagagacaaagggttgcaaaatcctttggagatgactacattgtatacctcgtggatgacaccccaagaaccatagaagaggcatattcatctcctgacgctgactactggaaggaagcagtacgcagtgaaatggactcgattatgtctaatggtacttgggaagtcgttgagcgtccatatggatgtaagcccgtaggatgcaaatgggttttcaagaaaaagcttaggcctgatggtacaatcgaaaagtataaggcaaggcttgtggccaagggttatacccaaaaggaaggcgaggatttcttcgacacatattcaccagttgctcgcttgactacgattcgagtactacttgctctggcagcctctcatggtcttcttgtccatcagatggacgttaagacagctttcctaaacggagagctggaggaggagatctatatggatcaaccagacgggtatgtactagaaggtcaggagggaatggtgtgtaaactattgaaatccttgtatggcctcaagcaagcacctaagcaatggcatgagaagtttgacaccacgcttacatctgcaggctttgttgtgaacgaagctgacaaatgtgtatactatcgctatggtgggggaaaaggggtgatcttatgcttgtatgtcgatgacatactgatctttgggaccagccttaatgtgattgaggaggtcaaagactatctgtccaagagttttgaaatgaaggatttgggagaggctgatgttattcttaacatcaaactacaaagaggagatgagggtgggatcacacttgtgcaatcccactatgtggacaaggttttgagtcgctttggatatagtgactgtaagccagctcctactccttatgatcccagcgtgctattaaggaaaaaccgaagaatagcaagggatcaactgagatactctcaaatcattggttcattgatgtacttggctagcgcaacgaggcctgacatctcatttgctgtaagcaagctgagccggtttgtctcaaatctgggagatgatcattggcaggctctggaaagagtaatgcgctatctaaagggcactatgagctatggaattcactataccgggtatccaaaagtactagaaggatatagtgactcaaactggatatctgatgctgatgagataaaagccacaagtggatatgcgttcacacttggaggtggcgctgtttcctggaagtcttgcaagcagaccatcttaacgaggtcaacaatggaagcagaacttacagcactagatactgcgacagttgaggctgagtggcttcgtgaactcctgatggatttgccggtggttgaaaaaccagtgccagctatcctaatgaactgcgataatcaaacagtgattattaaagtgaacagttcaaaggacaacatgaagtcatctagacacatcaagagaagactgaaatctgtcagaaagcagaaaaaactccggagtgatagcattggactatgtccaaacggctag

SEQ ID NO: 15423 - DNA, 2490 bp, Oryza sativa
  Clone ID: TFbOSC900088j.C1.o24.fg
atgtctgcgcctggagccggagccgccggcgtggctgttggaggagatggcgtgcctggagctggagccggaggtggtgcgctaggagctagagccggtgccacgaacaacaacatcaacggaggcaattttgcctcacaatccagtggagggccattctcggggtatatccttctcctgttcctattgttagcgctttaccgctatgttcctgttcctgatattcatgatgcctttagcatgctagcgctttactgctatgttcctgttcctgatattcatgatgcctttagcgtgctactgcgttactgctatgttattcatgatgcctttagtatgctactggttatgttgtcactagattaccctacactgagatggaaagcacatgcactattgtggttgacagcgatgcaatgcttctttgtttcacggggcaaacgaagtgaaccacctctctctcctgaggaagaggctaagttcgaggcttcggattgcctgttccgtggagcattgatcagtgtactcgctgacaacatagtggacgtgtacatgcacatgccttccgggaaggacatgtgggatgcacttgaggccaagttcggagtttccgacgccggtagtgagctgtatgtcatggagcagttctatgactacaagatggtcgatgaccgttctgtagtagaacaagctcacgagattcagatgctggctaaggaacttgagaacaacaactgtgagttgccagacaagtttgtgcacaagagacaagagttcagtgtttctgatctcattggctctttgggtgttgaggagaaggcgagggcaaaggacaaccggggcaaaaagaagaagaaccctcatgcatcccacaacaacaagaaaatcaagcttgatgtcaaatccaaggctgcaaccaaatttaagaagaaatgcaagggaaaggcaaagggagactgctttgtgtgtggcaagtctgggcattgggccaaggactgtcctgagtgcaaagacaggaagtctgccaacatggtcattagcgagggcggaggaacatcggggtacggtaaaatattacctacagttctctctgtctttcactcacctgattggtgggtggatactggtgctaatattcatgcatgtgctgacatttctctgttttcttcttatcaggtcgggagaggttcctccttgttgatgggaaacaggtcgcttgcggctattcatggtgttggtacggtcgatctgaagtttacttcgggaaagaccatgcagctgaagaacgtgcagcatgtcccttcaataaagaagaatcttgttagcggctctctattgtgtagagaaggttttagacttgtgtttgaatccaataaatgtgtcatatctaaatatggaacttttgttggaaaaggttatgacagtggaggcttgttccgcttttctttgaatgacatgtgtaataatcataatgttgtgaaccatattagcgagaatgatgagtctaatgtgtggcattcgcgactctgtcatgtgaatttcggttgtatgacgctcttagctaacatgagtttaattccaaaattcactttggtcaaaggttctaagtgccatacttgtgttcaatcgaaacaaccttgcaagcctcacaagacatctgaggcgaggaatttggcacctctagaactcgttcattccgatttgtgcgaaatgaacggcgtgttgactaaagggggaaagaaatatttcatgacactgatagatgattgcactagattttgttatgtgtatctattgaaaacaaaggatgaagcattgcatttctttaagacctataaagctgaggtagaaaaccaacttgaaaggaaaatcaaactgttgaggtctgatagaggtggggagtattttttcaatgagtttgcatccttttgcgaagaatttggaattattcatgagaggacgcctccctattcaccccaatcaaatggggtggccgaaagaaagaaccgtactctaactgagatggtgaatgccatgttagacactgcggggctttccaaggaatggtggggtgaggcagttttgactgcgtgtcatgtcctgaataaaattctaatgaagcataaggaagtaataccattcgaggaatgggaaaggaagaaattaaatctctcatacctacgaacatggggctgtttggccaaggtaaatgtacctatagccaaaaagcggaaacttggaccaaatactgttgattgtatgttccttggttatgctattcacagtgtgggctatagattcttaatagtaaattctggagtacctgacatgtatgttggtacaattattgagtccagagatgctacattctttgagaatgaatttcccatgaaacatacacctagcacttctagtcaagaaactgtcatgccccatgagcactttgctatgttcctgttcctaatattcataatgcctttagcatgctag

SEQ ID NO: 15424 - DNA, 3933 bp, Oryza sativa
  Clone ID: TFbOSC900094j.C1.o6.fg
atgtcgaacactggagacaaggagaaggagactcccgtcaacaccaacggaggcaatactgcctcaaactccagcggaggaccattcttggggtataaccttattacattatttcaattagaagttttactgttaatgttcatcgcaatgtcaacattgtgtcattatgtgattgttgatgcttattcaacgttaagcatgctcatgttgattacattcaccactatcactggatcaaatcctattgtaaatatcatgtttattatcttgttattttggattaaaatatgccgaattatgaccaaatttccaacaatccaaaaacctgaaaggtcattttcggtagttggctttgctgctacactgaaaccacatgcctttgatggttcaaactataagagatggaaagcacgtgcactattgtggttgacagcgatgcagtgcttctatgtttcacggggcaaacgaagtgaaccacctctttctcctgaggaagaggctaagttcgaggcttcggattgcctgttccgtggagcattgatcagtgtactcgctgacaacatagtggacgtgtacatgcacatgccttctgggaaggacatgtgggatgcacttgaggccaagttcggagtttctgacgccggcagtgagctgtatgttatggagcagttctatgactacaagatggtcgatgaccgttctgtagttgaacaagctcatgagattcagatgctggctaaggaacttgagaacaacaactgtgagttgccggacaagtttgtggcaagtggcattattgccaaactaccaccttcttggtcggactttgccacttctctaaagcacaagagacaagagttcagtgttcctgatctcattggctctttgggtgttgaggagaaggcgagggcaaaggacgtccggggcaaaaaggttgagggaggttctagtgccaatatggtacagaagaagaaccctcatgcatcccacaacaacaagaaagtcaagcctgatgtcaaacccaaggctgcaaccaattttaagaagaaaagcaagggaaaggcaaagggagactgctttgtgtgtggcaagtctgggcattgggccaaggactgtcctgagcgcaaagacaggaagtctgccaacatgatcattagcgagggcggaggaacatcggggtacggtaaaatattacctacagttctctctgtttttcattcacctgattggtgggtggacactggtgctaatattcatgtcgggagaggttcctccttgttgatgggaaacgggtcgcttgcggctgttcatggtgttggtacggtcgatctgaagtttacttcgggaaagaccgtgcagctgaagaacgtgcagcatgtcccttcaataaagaagaatctagttagcggctctctattgtgtagagaaggttttagacttgtgtttgagtccaataaatgtgtcgtatctaaatatgggacttttgttggaaaaggttatgacagcggaggcttgttccgcttttctttgaatgacatgtgtaataatcataatgctgtgaaccatattagcgagaatgatgagtctaatgtgtggcattcgcgactctgtcatgtgaatttcggttgtatgacgcgcttagctaacatgagtttaattccaaaattcactttggtaaaaggttccaagtgccatacttgtgttcaatcgaaacaacctcgcaagcctcacaaggcatctgaggcgaggaatttggcacctctagaacttgttcattccgatttgtgcgaaatgaacggcgtgttgactaaagggggaaagaaatatttcatgacactgatagatgattgcactagattttgctatgtgtatctattgaaaacaaaggatgaggcattgcatttctttaaaatctataaagctgaggtagaaaaccaacttgaaaggaaaatcaaacggttgaggtctgatagaggtggggagtatttttccaatgagtttgcatccttttgcgaagagtttggaattattcatgagatgacgcctccctattcaccccaatcaaatggggtggccgaaagaaagaaccgtagtctaactgagatggtgaatgccatgttagacactgcggggctttccaaggaatggtggggtgaggcagttttgactgcgtgtcatatcctgaataaaattccaatgaagcataaggaagtaacatcattcgaggaatgggaaaggaagaaattaaatctctcatacctacgaacatggggctgtttggccaaggaaaatcctgaggaggacaacattgtagatactcgcaagagtaagagacaaagggttgcaaaatcctttggagatgactacattgtatacctcgtggatgacaccccaagaaccatagaagaggcatattcatctcctgacgctgactactggaaggaagcagtacgcagtgaaatggactcgattatgtctaatggtacttgggaagtcgttgagcgtccatatgggtgcaagcccgtaggatgcaaatgggttttcaaggaaaagcttaggcctgatggtacaatcgaaaagtacaaggcaaggcttgtggccaagggttatacccaaaaggaaggcgaggacttcttcgacacatactcaccagttgctcgcttgaccacgattcgagtactacttgctctggcagcctctcatggtcttctcgtccatcagatggacgttaagacagctttcctaaacggagagctggaggaggagatctatatggatcaaccagacgggtatgtactagaaggtcaggagggaatagtgtgtaaactattgaaatccttgtatggcctcaagcaagcacctaagcaatggcatgagaagtttgacaccacgcttacatctgcaggctttgttgtgaacgaagctgacaaatgtgtatactatcgctatggtgggggagaaggggtgatcttgtgcttatatgtcgatgacatactgatctttgggaccagccttaatgtgattgaggaggtcaaagactatctgtccaagagttttgaaatgaaagatttgggagaggctgatgttattcttaacatcaaactacaaagaggagatgagggtgggattacacttgtgcaatcccactatgtggacaaggttttgagtcgctttggatatagtgactgcaagccagctcctactccttatgatcccagcgtgctattaaggaaaaaccgaagaatagcaagggatcagctgagatactctcaaatcattggttcattgatgtacttggctagcgcaacgaggcctgacatctcatttgctgtaagcaagctgagccggtttgtctcaaatccgggagatgatcattggcaggctctggaaagagtaatgcgctatctaaagggtactatgagctatggaattcactataccgggtatccaaaagtactagaagggtatagtgactcaaactggatatctgatgctgatgagataaaagccacaagtggatatgtgttcacacttggaggtggcgctgtttcctggaagtcttgcaagcagaccatcttaacgaggtcaacaatggaagcagaacttacagcactagatactgcgacagttgaggccgagtggcttcgtgaactcctgatggatttgccggtggttgaaaaaccagtgccagctatcctaatgaactgcgataatcaaacagtgattattaaagtgaacagttcaaaggacaacatgaagtcatctagacacatcaagagaagactgaaatctgtcagaaagcagaaaaactccggagtgatagcattggactatgtccaaacggctagaaatctggcagatcagtttaccaaggggctaccacgtaatgtgatagacagtgcatcgagggaaatgggcttgatacccacctaa

SEQ ID NO: 15425 - DNA, 4515 bp, Oryza sativa
  Clone ID: TFbOSC900136j.C1.o6.fg
atggcgcgccgggaaccggagccgttgcgaacgtcaacaccaacggaagcaattctacctcacaatccagcggagggccattctcgggtcgtgctagtcgcaagtcaattgcgtccttggtatgtgcatgatgcttatgataccttaagcatattactggttatgctacatgttatcactagatcaccccacattgttcatgccatggttattgtcttaatattttggattaaaatatgccgatatatgaccatatttccaacaatccaaaaacctgataggtcattttcggtagttggctttgctgctgcactgaaaccacatgcatttgatggttctaactataagaggtggaaagcacgtgcactattgtggttgacagcgatgcaatgcttctgtgtttcacagggcaaacgaagtgaaccatctctctctcatgaggaagaggctaagttcgaggcttcggattgcctgttccatggagcactgatcagtgtactcgctcacaacatagtggacgtgtacatgcacatgccttccgggaaggacatgtgggatgcacttgaggccacgttcggagtttccgacgccggcagtgagctgtatgtcatggagcaattctatgactacaagatggtcgatgaccgttctgtagtagaacaagctcatgagattcagatgctggctaaggaacttgaggacaacaactgtgagttgccggacaagtttgtggcaggtggcattattgccaaattgccaccttcttggtcggactttgccacttctctaaagcacaagagacaagagttcagtgtttctgatctcattggctctttgggtgttgaggagaaggcgagggcaaaggacaaccggggcaaaaaggttgagggaggttctagtgccaatatgaacaacaagaaagtcaagcctgatgtcaaacccaaggctgcaaccaactttaagaagaaaggcaagggaaaggcaaagggagactgctttgtgtgtggcaagtccgggcattgggccaaggactgtcctgagcgcaaagacaggaagtctgccaacatggtcattagcgagggcggaggaaaatcggggtacggtaaaatattacctacagttctctctgtttttcactcacctgattggtgggtggatactggtgctaatattcatgtcgggagaggttcctccttgttgatgggaaacgggtcgcttgcagctgttcatggtgttggtacggtcgatctgaagtttacttcgggaaagaccgttcagctgaagaacgtgcagcatgtcccttcaataaagaagaatcttgttagcggctctctattgtgtagagaaggttttagacttgtgtttgaatccaataaatgtgtcgtatctaaatatggaacttttgttggaaaaggttatgacagcggaggcttgttccgcttttctctgaatgacatgtgtaataatcataatgttgtgaaccatattagcgagaatgatgagtctaatgatgaagcattgcatttctttaagacctataaagctgaggtagaaaaccaacttgaaaggaaaatcaaacggttgaggtctgatagaggtggggagtatttttcgaatgagtttgcatccttttgcgaagagtttggaattattcatgagaggacgcctccctattcaccccaatcaaatggggtggccgaaagaaagaaccgtactctaactgagatggtgaatgccatgttagacactatggggctttccatggaatggtggggtgaggcagttttgactgcgtgtcatgtcctgaataaaattccaatgaagcataaggaagtaacaccattcgaggaatgggaaaggaagaaattaaatctctcatacctacgaacatggggctgtttggccaaggtaaatgtacctatagccaaaaagcggaaacttggaccaaatactgttgattgtgtgttccttggttatgctattcacagtgtgggttatagattcttaatagtaaactctggagtacccgacatgcatgttggtacaattattgagtctagagatgctacattctttgagaatgaatttcccatgaaacatacacctagcacttctagtcaagaaactgtcatgccccataagcactttgcaccgatagaacacaatgatcaaacgcctgaggaaaatcctgaggaggacaacgttgtagatactcgtaagagtaagagacaaagggttgcaaaatcctttggagatgactacattgtatacctcgtggatgacaccccaagaaccatagaagaggcatattcatctcctgacgctaactactggaaggaagcagaagtcgttgagcgtccatatgggtgcaagcctgtaggatgcaaatgggttttcaagaaaaagcttaggcctgatggtacaattgaaaagttcaaggcaaggcttgtggccaagggttatacccaaaaggaaggcgaggattttttcgacacatactcaccagttgctcgcttgaccacgattcgacaagcacctaagcaatggcatgagaagtttgacacaacgcttacatctgtaggctttgttgtgaacgaagctgataaatgtgtgtactatcgctatggtgggggagaaggagtgatcttgtgcttatatgtcgatgacatattgatctttgggaccagcttcaatgtgattgaggaggtcaaggactatctatccaagagttttgaaatgaaggatttgggagaggctgatgttattcttaacattaagctacaaagaggagatgagggtgggattacacttgtgcaatcccactatgtggacaaggttttgagtcactttggatatagtgactgcaagccagctcctactccttatgatcccagcgtgctattaagaaaaaaccgaagaatagcaagggatcaactgagatactctcaaatcattggttcattgatgtacttggttagtgcaacgaggcctgacatctcatttgctataagcaagctgagccggtttgtctcaaatccgggagatgatcattggcaggctctggaaagagtaatgcgctatctaaagggcactatgagctatggaattcactatactgggtatccaaaattactagaagggtgtagtgactcaaactggatatctgatgctgatgagataaaagccacaagtggatatgtgtttacacttggaggtggcactgtttcctggaagtcgttcaagcagaccatcttaacgaggtcaacaatggaagcagaacttacaacactatatactgcgacagttgaggccaagtggcttcgtgaactcctgatggatttgtcggtggttgaaaaaccagtgccagctatcctaatgaactgtgataatcaaatagtgattattaaagtgaacagttcaaaggacaacatgaagtcatctaggcatatcaagagaagactgaaatctgtcagaaagcagaaaaactccggagtgatagcattggactatgtccaaacggctagaaatttggatggctcataccttaatgtgatccgagtggctttttcaagcagagatgttgacctgcagaacatctcagaaggaacacacctatatgagttcgactgctactcatatcctaggtggaagttcaacttaacagtctccaccaaaacacagaaggagcagggcctccggaactacaccttcgccagagatctgcaccagaaatgtacatcgtactactgctgcttccatgttttttttacttcaattttggcacagcaacagtcatccgtggtggaaattgttgcagccgtcatgcacggggaggaagtcaccaggcagcgatgcagacgtccagccgtcctgcgcggggagcggatcacccggcggcagcgtagccggctggctcgaaggtgcaaacctccggtcggcaacgcagtagccatcctacgcggggagcggatcacccagaggcggcgtatgcggtcggcacgaaggtgcaaggctccggtcggcaacgcagtagccgtcctgcgcggggagcgtatcacccggtggtggcgtatgcggtcggctcggaggtgcaagccttcggtcggcaacgcagtagccatcctgcgcggggagcggatcacccggcggcggtgtatgcggtcggctcggtgcaagcgttcggtcggcgatgaagtagccatcctgcgcggggagcggatcacttggtggtggcgagtagtacccaggcagcgaggggtgtcaagcccccgagcccgtggcaaggtcggtgaagagcacccggacgacgcgggaggcgaagcccccgagtccgtggcgaggtcgacgaataatgcccaggcaacgagggaggtgaagcctccgagtccgtggcgagtcggtgtagagcacccggacgacgcgggaggtgaagcccccgagtccatggtgaggtcggcgaaaaatgcccagacaacgaggaagcgaagcccccgagtccgtggtaagtcggtgtag

SEQ ID NO: 15426 - DNA, 2994 bp, Oryza sativa
  Clone ID: TFbOSC900169j.C1.o29.gm
atggcgcgccgggagccggagccgttcgagccggagctgccgctggcgccgttgctgcctctggagatggcacgccgggagccggaggcgttgcgaacgtcaactccaacggaggcaattctgcctcacaatccagcggagggccattctcgggcgatgcaatgcttctatgtttcacggggcaaacgaagtgaaccacctctttctcctgaggaagaggctaaattcaaggcttcggattgcctgttccgtggagcattgatcagtgtactcgctgacaatatagtggacgtgtacatgcacatgcctttcgggaaggacatgtgggatgcacttgaggccaagttcggagtttccgacgccggcagtgagctgtatgtcatggagcagttttatgactacaagatggtcgatgaccgttctgtagtagaacaagctcatgagattcagatgctgactaaggaacttgagaacaacaactgtgagttgccggacaagtttgtggcgggtggcattattgccaaattgccaccttcttggtcggactttgccacttctctaaagcacaagaggcaagagttcagtgtttctgatctcattggctctttgggtgttgaggagaaggcgagggcaaaggacaactggggcaaaaaggttgagggaggttctagtgccaatatggtacagaagaagaaccgtcatgcatcccacaacaacaacaagaaagtcaagcctgatgtcaaacccaaggttgcaaccaactttaagaagaaaggcaagggaaaggcaaagggcgactgctttgtgtgtggcaagtctgggcattgggccaaggactgtcctgagcgcaaagacaggaagtgtgccaacatggtcattagcgagggcggaggaacatcgggagatgctacattctttgagaatgaattttccatgaaacatacacctagcacttctagtcaagaaactgtcatgccccataagcactttgcaccgatagaacacaatgatcaaacgcctgaggaaaatcctgaggaggacaacattgtagatactcgtaagagtaagagacaaagggttgcaaaatcctttggagatgactacattgtatacctcgtggatgacaccccaagaaccatagaagaggcatattcatctcctgacgctgactactggaaggaagcagtacgcagtgagatggactcgattatgtctaatgatacttgggaagtcgttgagcgtccatatgggtgcaagcctataggatgcaaatgggttttcaagaaaaagcttagccctgatggtacaatcgaaaagtacaaggcaagacttgtggccaagggttatacccaaaaggaaggcaaggattttttcgacacatactcaccagttgctcacttgacaatgattcgagtactacttgctctggcagcctctcatggtgttctcgtccatcagatgaacgttaagacagctttcctaaacggagagctggaggaggagatctatatggatcaaccagacgggtatgtactagaaggctttgttgtgaacggagctgacaaatgtgtgtactatcgctatggtgggggagaaggagtgatcttgtgcttatatgtcgatgacatattgatctttgggaccaacctcaatgtgattgagggggtcaaggactatctgtccaagagttttgaaatgaaggatttgggagaggctgatgttattcttaacattaaactacaaagaggagatgagggtgagattacacttgtgcaatcccactatgtggacaagattttgagtcactttggatatagtggctgcaagccagcttctactccttatgatcccagcgtgctattaaggaaaaaccgaagaatagcaagggatcaactgagatactcccaaataattggttcattgatgtacttggctagtgcaacgaggcctgacatctcatttgctgtaagcaagctgagccggtttgtcttaaatccgggagatgatcattggcaggctctggaaagagtaatgcgctatctaaagggcattatgagttatggaattcactataccaggtatccaaaagtactagaagggtatagtgactcaaactggatatctgatgctgataagataaaagccacaagtggatatgtgttcgcacttggaggtggcactgtttcctggaagccttgcaagcagaccatcttaacgaggtcaacaatggaagtagaacttacagcactagatactgcgacagttgaggccgagtggcttcgtgaactcctgatggatttgccggcgggtgatcaggtttttggggagtgcttcccgcacgactgctcagttcatccaccatgtctgcgcctggagccggagctgccgccggcgccgctgctgcctctggagatgacgcgccaggagccggagccgttgcgaacgtcaacaccaacagaggcaattctgcctcacaattcagcggagggccattctcggggctctgtgaggagcctaagataccttaacctctctggaataccgttttcggacaaggtgcctcctcagcttggctctatcactggactaagagatcttcgccatttgaatcttgcggaaaatcggttatctggcgggcaacttgaaacactgtacacgtataacccattgatgtatagtggtaacaatggtctttgtgggtttcctcttcaaaggagttgccccggcaatagcacatcaaaggatggtgatctttctaatgaaaagcatggggatcagcagatacctgaactacattctgatgaccaaatgttcttcctctttggctgtggcgttggtttcgtggttggttcctgggttgtgttcttttctctgctgttcgtgaaaacttggaggattgcttattttcgcctcttcgacagtgtttatgacaaagtatatgtgtttgtggttgttaattggggtagcctaactggaatgaaagttgcaagttaa

SEQ ID NO: 15427 - DNA, 3945 bp, Oryza sativa
  Clone ID: TFbOSC900172j.C1.o12.fg
atgtctggagttgccgccgccactgctggcggaggtggtacgccgccgacaggagctggatccggagctggtgcgccaggaggtgccgtgaacgacaacaacaacggaggcaattctgcctcaccatccagcggagggccattctcagggtataatcttctcctcctgctactgttgttagcgctatcgctatactatgtgcgctatgttcttgttcctgttctacatggtgcctctagcatgttatcgcgttactgttatgttcctgttcctgacattcaggatgcgcatagtatgctactggttatgttaagatcaccctacactgcttatgccatgatcattgctttaaccttttggattaaaatatgccgattaatgactatatttccaacaatccaaaaacctgataggtcattttcggtagttggctttgctgctgcactgaaaccacatgcttttgatggttcaaactataagagatggaaagcacgtgcactattgtggttgacagcgatgcagtgcttctatgtttcacggggcaaacgaagtgaaccacctctttctcctgaggaagaggctaagttcgaggcttcggattgcctgttccgtggagcattgatcagtgtactcgctgacaacatagtggacgtgtacatgcacatgccttctgggaaggacatgtgggatgcacttgaggccaagttcggagtttctgacgccggcagtgagctgtatgttatggagcagttctatgactacaagatggtcgatgaccgttctgtagtagaacaagctcatgagattcagatgctggctaaggaacttgagaacaacaactgtgagttgccggacaagtttgtggcaggtggcattattgccaaactaccaccttcttggtcggactttgccacttctctaaagcacaagagacaagagttcagtgttcctgatctcattggctctttgggtgttgagaagaaggcgagggcaaaggacgtccagggcaaaaaggttgagggaggttctagtgccaatatggtacagaagaagaaccctcatgcatcccacaacaacaagaaagtcaagcctgatgtcaaacccaagactgcaaccaattttaagaagaaaggcaagggaaaggcaaagggagactgctttgtgtgtggcaagtctgggcattgggccaaggactgtcctgagcgcaaagacaggaagtctgccaacatgatcattagcgagggaggaggaacatcggggtacggtaaaatattacctacagttctctctgtttttcattcacctgattggtgggtagacactggtgctaatattcatgtatgtgctgacatttctctgttttcttcttatcaggtcgggagaggttcctccttgttgataggaaacgggtcgcttgcggctgttcatggtgttggtacggtcgatctgaagtttacttcgggaaagaccgtgcagctgaagaacgtgcagcatgtcccttcaataaagaagaatctagttagcggctctctattgtgtagagaaggttttagacttgtgtttgagtccaataaatgtgtcgtatctaaatatgggacttttgttggaaaaggttatgacagcggaggcttgttccgcttttctttgaatgacatgtgtaataatcataatgctgtgaaccatattagcgagaatgatgagtctaatgtgtggcattcgcgactctgtcatgtgaatttcggttgtatgacgcgcttagctaacatgagtttaatttcaaaattcactttggtaaaaggttccaagtaccatacttgtgttcaatcgaaacaacctcgcaagccacacaaggcatctgaggcgaggaatttggcacctctagaacatgttcattccgatttgtgcgaaatgaacggcgtgttgactaaagggggaaagaaatatttcatgacactgatagatgattgcactagattttgctatgtgtatctattgaaaacaaaggatgagacattgcattactttaaaatctataaagctgaggtagaaaaccaacttgaaaggaaaatcaaacggttgaggtctgatagaggtggggagtatttttccaatgagtttgcatccttttgcgaagagtttggaattattcatgagatgacgcctccctattcaccccaatcaaatggggtggccgaaagaaagaaccgtactctaactgagatggtgaataccatgttagacactgcggggctttccaaggaatggtggggtgaggcagttttgactgcgtgtcatgtcctgaataaaattccaatgaagcataaggaagtaacaccattcgaggaatgggaaaggaagaaattaaatctctcatacctacgaacatggggctgtttggccaaagtaaatgtacctatagccaaaaagcggaaacttggaccaaaaactgttgattgtgtgtttcttggttatgctatccacagtgtggattatagattcttaatagtaaactctggagtacccgacatgcatgttggtacaattcttgagtccagagatgctacattctttgagaatgaatttcctatgaaatatacacctagcacttctagtaaagaaactgtcatgccccatgagcactttgcaccgatagaacacaatgatcaaacgcctaaggaaaatcctgaggaggacaacattgtagatactcgcaagagtaagagacaaagggttgcaaaatcctttggagatgactacattgtatacctcgtggatgacaccccaagaaccatagaagaggcatattcatctcctgacgctgactactggaaggaagcagtacgcagtgaaatggactcgattatgtctaatggtacttgggaagtcgttgagcgtccatatgggtgcaagcccgtaggatgcaaatgggttttcaagaaaaagcttaggcctgatggtacaatcgaaaagtacaaggcaaggcttgtggccaagggttatacccaaaaggaaggcgaggacttcttcgacacatactcaccagttgctcgcttgaccacgattcgagtactacttgctctggcagcctctcatggtcttctcgtccatcagatggacgttaagacagctttcctaaacggagagctggaggaggagatctatatggatcaaccagacggatatgtactagaaggtcaggagggaatggtgtgtaaactattgaaatccttgtatggcctcaagcaagcgcctaagcaatggcatgagaagtttgacaccacgcttacatctgcaggctttgttgtgaacgaagctgacaaatgtgtatactatcgctatggtgggggagaaggggtgatcttgtgcttatatgtcgatgacatactgatctttgggaccagccttaatgtgattgaggaggtcaaagactatctgtccaagagttttgaaatgaaggatttgggagaggctgatgttattcttaacatcaaactacaaagaggagatgagggtgggattacacttatgcaatcccactatgtggacaaggttttgaatcactttggatatagtgactgcaagccagctcctactccttatgatcccagcgtgctattaaggaaaaaccaaagaatagtaagggatcagctgagatactctcaaatcattggttcattgatgtacttggctagtgcaacgaggcctgacatctcatttgctgtaagcaagctgagccggtttgtctcaaatccgggagatgatcattggcaggctctggaaagagtaatgcgctatctaaagggcactatgagctatggaattcactataccgggtatccaaaagtactagaagggtatagtgactcaaactggatatctgatgctgatgagataaaagccacaagtagatatgtggtcatacttggaggtggcgctgtttcctag

SEQ ID NO: 15428 - DNA, 3906 bp, Oryza sativa
  Clone ID: TFbOSC900209j.C1.o26.gm
atgcagtgcttctatgtttcacggggcaaacgaagtgaaccacctctttctcctgaggaagaggctaagttcgaggcttcggattgcctgttccgtggagcattgatcagtgtactcgctgacaacatagtggacgtgtacatgcacatgccttctgggaaggacatgtgggatgcacttgaggccaagttcggagtttctgacgccggcagtgagctgtatgtcatggagcagttctatgactacaagatggtcgatgaccgttctgtagtagaacaagctcatgagattcagatgctggctaaggaacttgagaacaacaactgtgagttgccggacaagtttgtggcgggtggcattattgccaaactaccaccttcttggtcggactttgccacttctctaaagcacaagagacaagagttcagtgttcctgatctcattggctctttgggtgttgaggagaaggcgagggcaaaggacgtccggggcaaaagggttgagggaggttctagtgccaatatggtacagaagaagaaccctcatgcatcccacaacaataagaaagtcaagcctgatgtcaaacccaaggctgcaaccaattttaagaagaaaggcaagggaaaggcaaagggagactgctttgtgtgtggcaagtctgggcattgggccaaggactgtcctgagcgcaaagacaggaagtctgccaacatgatcattagcgagggcggaggaacatcggggacggtcgggagaggttccttcttgttgatgggaaacgggtcgcttgcggctgttcatggtattgccaaaaagcggaaacttggaccaaaaactgttgattgtgtgttccttggttatgctatccacagtgtgggttatagattcttaatagtaaactctggtgtacccgacatgcatgctggtacaattcttgagtccagagatgctacattctttgagaatgagtttcctatgaaatatacacctagcacttctagtaaagaaactgtcatgccccatgagcactttgcaccgatagaacacgatgatcaaacgcctgaggaaaatcctgaggaggacaacattgtagatactcgcaagagtaagagacaaagggttgcaaaatcctttggagatgactacattgtatacctcgtggatgacaccccaagaaccatagaagaggcatattcatctcctgacgctgactactggaaggaagcagtacgcagtgaaatggactcgattatgtctaatggtacttgggaagtcgttgagcgtccatatgggtgcaagcccgtaggatgcaaatgggttttcaagaaaaagcttaggcctgatggtacaatcgaaaagtacaaggcaaggcttgtggccaagggttatacccaaaaggaaggcgaggacttcttcaacacatactcaccagttgctcgcttgaccacgattcgagtactacttgctctggcagcctctcatggtcttctcgtccatcagatggacgttaagacagctttcctaaacggagagctggaggaggagatctatatggatcaaccagacgggtatgtactagaaggtcaggagggaatggtgtgtaaactattgaaatccttgtatggcctcaagcaagcacctaagcaatggcatgagaagtttgacaccacgcttacatctgcaggctttgttgtgaacgaagctgacaaatgtgtatactatcgctatggtgggggagaaggggtgatcttgtgcttgtatgtcgatgacatactgatctttgggaccagccttaatgtgattgaggaggtcaaagactatctgtccaagagttttgaaatgaaggatttgggagaggctgatgttattcttaacatcaaacttcaaagaggagatgagggtgggattacacttgtgcaatcccactatgtggacaaggttttgagtcgctttggatatagtgactgcaagccagctcctactccttatgatcccagcgtgctattaaggaaaaaccgaagaatagcaagggatcaactaagatactctcaaatcattggttcattgatgtacttggctagcgcaacgaggcctgacatctcatttgctgtaagcaagctgagccggtttgtctcaaatccgggagatgatcattggcaggctctggaaagagtaatgcgctatctaaagggcactatgagctatggaattcactataccgggtatccaaaagtactagaagggtatggtgactcaaactggatatctgatgctgatgagataaaagccacaagtggatatgtgttcacacttggaggtggcgctgtttcctggaagtcttgcaagcagaccatcttaacaaggtcaacaatggaagcagaacttacagcactagatactgcgacagttgaggccgagtggcttcgtgaactcctgatggatttgccggtggttgaaaaaccagtgccagctatcctaatgaactgcgataatcaaacagtgattattaaagtgaacagttcaaaggacaacatgaagtcatctagacacatcaagagaagactgaaatctgtcagaaagcagaaaaactccggagtgatagcattggactatgtccaaacggctagaaatctggcagatcagtttaccaaggggctaccacgtttttggggagtgcctcctgcacgactgctcatcgccatgtctggagttgctgccgccgctactggcccgccgacaggagctggtggtacgccgccgccgacaggagctggatccggagctggtgcgccaggaggaggtgccgtgaacgactacaacaacggaggcaattctgcctcaccatccagcggagggccattctcgggggacggctatgcatttgcatccacagagaacagcatggttatctacaacattaatgtggctcctctgataaaaagtaacaaatacacgcttttggctgagcggacgaggaagtgggaggaggagaagaggcaggagcgccgtgagggcaaggccccggcggctcccgccggcaaccggcgaggtgaggccaagcagaaggccaccgccgaggacatcgacgatggcgacgaggacttggggttccaggagcctgaggccaccgtcgccaccgtcgatgggggagcgtgcgctcacgcttctcgctggagcctcaaggccatgaagcgcgagcttctggccgcggcccctacccatgaggcgacgcggcgggcgcggtggtcggaggttgccctcaccttcgaccagaccgaccacccgccgtgcgttgcccggggaggacagatcgcgatggtggtttcccccaccgtttgcaatgtgaagttggggcgtgtcctcatagacgggggtgcagccctcaacatcctttcccccgtagcctttgacgccatcaaggccctggggatggtgctccggccgtcccagccgatcatcggtgtgacgctggggcacacctggccgctgggtcatatcgacctcccggtcaccttcggtggttccgccaacttccgcacggagcgggtggacttcgatgtggcggacctcagtctgccctacaacgcggtcctggggaggcccgcgttggtgaagttcatggcggcggtccactacgcctatctccagatgaagatgccgggccccggtggccccatcaccgtccatggcgacctcaaagttgcgcttgcttgtatggagcagcacgcggaccacctcgccgcggcgtccaagcccgcgggtggcgacgagaggctcagcgcctccgtcccggccgccccgaggcagcggatggtcacgtgcgacgaggtcccggtcaaggaggttgccctgggcgacggcccgtccaagaccacacgaatcggtggtcttctggacgacaaatag

SEQ ID NO: 15429 - DNA, 4515 bp, Oryza sativa
  Clone ID: TFbOSC900299j.C1.o21.fg
atggcgcgccgggaaccggagccgttgcgaacgtcaacaccaacggaagcaattctacctcacaatccagcggagggccattctcgggtcgtgctagtcgcaagtcaattgcgtccttggtatgtgcatgatgcttatgataccttaagcatattactggttatgctacatgttatcactagatcaccccacattgttcatgccatggttattgtcttaatattttggattaaaatatgccgatatatgaccatatttccaacaatccaaaaacctgataggtcattttcggtagttggctttgctgctgcactgaaaccacatgcatttgatggttctaactataagaggtggaaagcacgtgcactattgtggttgacagcgatgcaatgcttctgtgtttcacagggcaaacgaagtgaaccatctctctctcatgaggaagaggctaagttcgaggcttcggattgcctgttccatggagcactgatcagtgtactcgctcacaacatagtggacgtgtacatgcacatgccttccgggaaggacatgtgggatgcacttgaggccacgttcggagtttccgacgccggcagtgagctgtatgtcatggagcaattctatgactacaagatggtcgatgaccgttctgtagtagaacaagctcatgagattcagatgctggctaaggaacttgaggacaacaactgtgagttgccggacaagtttgtggcaggtggcattattgccaaattgccaccttcttggtcggactttgccacttctctaaagcacaagagacaagagttcagtgtttctgatctcattggctctttgggtgttgaggagaaggcgagggcaaaggacaaccggggcaaaaaggttgagggaggttctagtgccaatatgaacaacaagaaagtcaagcctgatgtcaaacccaaggctgcaaccaactttaagaagaaaggcaagggaaaggcaaagggagactgctttgtgtgtggcaagtccgggcattgggccaaggactgtcctgagcgcaaagacaggaagtctgccaacatggtcattagcgagggcggaggaaaatcggggtacggtaaaatattacctacagttctctctgtttttcactcacctgattggtgggtggatactggtgctaatattcatgtcgggagaggttcctccttgttgatgggaaacgggtcgcttgcagctgttcatggtgttggtacggtcgatctgaagtttacttcgggaaagaccgttcagctgaagaacgtgcagcatgtcccttcaataaagaagaatcttgttagcggctctctattgtgtagagaaggttttagacttgtgtttgaatccaataaatgtgtcgtatctaaatatggaacttttgttggaaaaggttatgacagcggaggcttgttccgcttttctctgaatgacatgtgtaataatcataatgttgtgaaccatattagcgagaatgatgagtctaatgatgaagcattgcatttctttaagacctataaagctgaggtagaaaaccaacttgaaaggaaaatcaaacggttgaggtctgatagaggtggggagtatttttcgaatgagtttgcatccttttgcgaagagtttggaattattcatgagaggacgcctccctattcaccccaatcaaatggggtggccgaaagaaagaaccgtactctaactgagatggtgaatgccatgttagacactatggggctttccatggaatggtggggtgaggcagttttgactgcgtgtcatgtcctgaataaaattccaatgaagcataaggaagtaacaccattcgaggaatgggaaaggaagaaattaaatctctcatacctacgaacatggggctgtttggccaaggtaaatgtacctatagccaaaaagcggaaacttggaccaaatactgttgattgtgtgttccttggttatgctattcacagtgtgggttatagattcttaatagtaaactctggagtacccgacatgcatgttggtacaattattgagtctagagatgctacattctttgagaatgaatttcccatgaaacatacacctagcacttctagtcaagaaactgtcatgccccataagcactttgcaccgatagaacacaatgatcaaacgcctgaggaaaatcctgaggaggacaacgttgtagatactcgtaagagtaagagacaaagggttgcaaaatcctttggagatgactacattgtatacctcgtggatgacaccccaagaaccatagaagaggcatattcatctcctgacgctaactactggaaggaagcagaagtcgttgagcgtccatatgggtgcaagcctgtaggatgcaaatgggttttcaagaaaaagcttaggcctgatggtacaattgaaaagttcaaggcaaggcttgtggccaagggttatacccaaaaggaaggcgaggattttttcgacacatactcaccagttgctcgcttgaccacgattcgacaagcacctaagcaatggcatgagaagtttgacacaacgcttacatctgtaggctttgttgtgaacgaagctgataaatgtgtgtactatcgctatggtgggggagaaggagtgatcttgtgcttatatgtcgatgacatattgatctttgggaccagcttcaatgtgattgaggaggtcaaggactatctatccaagagttttgaaatgaaggatttgggagaggctgatgttattcttaacattaagctacaaagaggagatgagggtgggattacacttgtgcaatcccactatgtggacaaggttttgagtcactttggatatagtgactgcaagccagctcctactccttatgatcccagcgtgctattaagaaaaaaccgaagaatagcaagggatcaactgagatactctcaaatcattggttcattgatgtacttggttagtgcaacgaggcctgacatctcatttgctataagcaagctgagccggtttgtctcaaatccgggagatgatcattggcaggctctggaaagagtaatgcgctatctaaagggcactatgagctatggaattcactatactgggtatccaaaattactagaagggtgtagtgactcaaactggatatctgatgctgatgagataaaagccacaagtggatatgtgtttacacttggaggtggcactgtttcctggaagtcgttcaagcagaccatcttaacgaggtcaacaatggaagcagaacttacaacactatatactgcgacagttgaggccaagtggcttcgtgaactcctgatggatttgtcggtggttgaaaaaccagtgccagctatcctaatgaactgtgataatcaaatagtgattattaaagtgaacagttcaaaggacaacatgaagtcatctaggcatatcaagagaagactgaaatctgtcagaaagcagaaaaactccggagtgatagcattggactatgtccaaacggctagaaatttggatggctcataccttaatgtgatccgagtggctttttcaagcagagatgttgacctgcagaacatctcagaaggaacacacctatatgagttcgactgctactcatatcctaggtggaagttcaacttaacagtctccaccaaaacacagaaggagcagggcctccggaactacaccttcgccagagatctgcaccagaaatgtacatcgtactactgctgcttccatgttttttttacttcaattttggcacagcaacagtcatccgtggtggaaattgttgcagccgtcatgcacggggaggaagtcaccaggcagcgatgcagacgtccagccgtcctgcgcggggagcggatcacccggcggcagcgtagccggctggctcgaaggtgcaaacctccggtcggcaacgcagtagccatcctacgcggggagcggatcacccagaggcggcgtatgcggtcggcacgaaggtgcaaggctccggtcggcaacgcagtagccgtcctgcgcggggagcgtatcacccggtggtggcgtatgcggtcggctcggaggtgcaagccttcggtcggcaacgcagtagccatcctgcgcggggagcggatcacccggcggcggtgtatgcggtcggctcggtgcaagcgttcggtcggcgatgaagtagccatcctgcgcggggagcggatcacttggtggtggcgagtagtacccaggcagcgaggggtgtcaagcccccgagcccgtggcaaggtcggtgaagagcacccggacgacgcgggaggcgaagcccccgagtccgtggcgaggtcgacgaagaatgcccaggcaacgagggaggtgaagcctccgagtccgtggcgagtcggtgtagagcacccggacgacgcgggaggtgaagcccccgagtccatggtgaggtcggcgaaaaatgcccagacaacgaggaagcgaagcccccgagtccgtggtaagtcggtgtag

SEQ ID NO: 15430 - DNA, 2382 bp, Oryza sativa
  Clone ID: TFbOSC900307j.C1.o13.gm
atgcagtgcttctatgtttcacggggcaaacgaagtgaaccacctctttctcctgaggaagaggctaagttcgaggcttcggattgcctgttccgtggagcattgatcagtgtactcgctgacaacatagtggacgtgtacatgcacatgccttctgggaaggacatgtgggatgcacttgaggccaagttcggagtttctgacgccggcagtgagctgtatgttatggagcagttctatgactacaagatggtcgatgaccgttctgtagttgaacaagctcatgagattcagatgctggctaaggaacttgagaacaacaactgtgagttgccggacaagtttgtggcaggtggcattattgccaaactaccaccttcttggtcggactttgccacttctctaaagcacaagagacaagagttcagtgttcctgatctcattggctctttgggtgttgaggagaaggcgagggcaaaggacgtccggggcaaaaaggttgagggaggttctagtgccaatatggtacagaagaagaaccctcatgcatcccacaacaacaagaaagtcaagcctgatgtcaaacccaaggctgcaaccaattttaagaagaaaagcaagggaaaggcaaagggagactgctttgtgtgtggcaagtctgggcattgggccaaggactgtcctgagcgcaaagacaggaagtctgccaacatgatcattagcgagggcggaggaacatcgaggtacggtcgggagaggttcctccttgttgatgggaaacgggtcgcttgcggctgttcatgtgtgggttatagattcttaatagtaaactctggagtacccgacatgcatgttggtacaattcttgagtccagagatgctacattctttgagaatgaatttcctatgaaatatacacctagcacttctagtaaagaaactgtcatgccccatgagcactttgcaccgatagaacacaatgatcaaacgcctgaggaaaatcctgaggaggacaacattgtagatactcgcaagagtaagagacaaagggttgcaaaatcctttggagatgactacattgtatacctcgtggatgacaccccaagaaccatagaagaggcatattcatctcctgacgctgactactggaaggaagcagtacgcagtgaaatggactcgattatgtctaatggtacttgggaagtcgttgagcgtccatatgggtgcaagcccgtaggatgcaaatgggttttcaagaaaaagcttaggcctgatggtacaatcgaaaagtacaaggcaaggcttgtggccaagggttatacccaaaaggaaggcgaggacttcttcgacacatactcaccagttgctcgcttgaccacgattcgagtactacttgctctggcagcctctcatagtcttctcgtccatcagatggacgttaagacagctttcctaaacggagagctggaggaggagatctatatggatcaaccagacgggtatgtactagaaggtcaggagggaatggtgtgtaaactattgaaatccttgtatggcctcaagcaagcacctaagcaatggcatgagaagtttgacaccacgcttacatctgtaggctttgttgtgaacgaagctgacaaatgtgtatactatcgctatggtgggggagaaggggtgatcttgtgcttatatgtcgatgacatactgatctttgggaccagccttaatatgattgaggaggtcaaagactatctgtccaagagttttgaaatgaaagatttgggagaggctgatgttattcttaacatcaaactacaaagaggagatgagggtgggattacacttgtgcaatcccactatgtggacaaggttttgagtcgttttggatatagtgactgcaagccagctcctactccttatgatcccagcgtgctattaaggaaaaaccgaagaatagcaagggatcagctgagatactctcaaatcattggttcattgatgtacttggctagcgcaacgaggcctgacatctcatttgctgtaagcaagctgagccggtttgtctcaaatccgggagatgatcattggcaggctctggaaagagtaatgcgctatctaaaggacgggcgggcgatcaggtttttggggagcgcaaggcgcgactactcactgttcgtcaacatctacttcatcttcaccaacatgtcgaacactggagacaaggagaaggagactcccgtcaacaccaacggaggcaatactgcctcaaactccagcggaggaccattcttggggccagacgccgccatcgtcttcctcgctgacctcggcctctccgccgccgacatcgccaccaccgtcgcctacgaccactgctactga

SEQ ID NO: 15431 - DNA, 3255 bp, Oryza sativa
  Clone ID: TFbOSC900361j.C1.o9.fg
atgatgtaccgggagaccttcgccgacgaggtcggacacatcaggaagtcgttcgagatgctcgagggagctaatgtccagcaagttattcctgaagctgctggaggctatgctcaagaccgggaacaggatgaacgttgggacctcctgcggcggcgccatggcgttcaagctcgaagcgctgctcaaattcacctatgtcgagggcaccgacgggaagccacgctgctccacttcgtagtgcaggagatgaccctgtcgagcgccgccgaggcggcggacattgccgcggggctcgccgccgagctcaccaatgtcaggaagacggcgaccgtggacctggacgtgcttaccacctcggtgtccggcccgtcgcacggcctgtcccaaatcaaggagctgattgggagtgacctgtccggctatgagaggaaccagtgcttcgcgcgtggccttcatgtgactacactgttcacattatttgcctttccgctgttgaagttagactttggatctgaatctatacggaagagtggtagatccagtgaaccacctctttctcctgaggaagaggctaagttcgaggcatcggattgtctgttccgtggagcattgatcagtgtactcgctgacaatatagtggacgtgtacatgcacatgccttctgggaaggacatgtgggatgcacttgaggccaagttcggagtttctaacgccggcagtgagctgtatgtcatggagcagttctatgactacaagatgttgccggacaagtttgtggcgggtggcattattgccaaattgccaccttcttggtcggactttgccacttctctaaagcacaagagacaagagttcagtgtttctgatctcattggctctttgggtgttgaggagaaggcgagggcaacggacatccgggaaaaaaaggttgagggaggttctagtgccaatatggtacagaaaaagaaccctcatgcatcctacaacaacaagaaagtcaagcctgatgtcaaacccaaggctgcaaccaactttaagaagaaaggcaagggaaaagcaaagggagactgctttgtgtgtggcaagtctgggcattgggccaaggactgtcctgagcgcaaagacaggaagtctgccaacatggtcattggcgagggcggaggaacatcggggtacggtaaaatattacctacagttctctctgtttttcactcacctgattggtgggtggacactggtgctaatattcatgtcgggagaggttcctccatgttgatgggaaacgggtcgcttgcggctgttcatggtattggtacggtcgatcagaagtttacttcgggaaagaccgtgcagctgaagaacgtgcagcatgtcccttcaataaagaagaatcttgttagcggctctctactttgtagagaaggttttagacttgtgtttgagtccaataaatgtgtcgtatctaaatatgggacttttgttagaaaaggttatgacagcggaggcttgttccgcttttctttgaatgacatgtgtaataatcataatgttgtgaaccatattagcgagaatgatgagtctaatgtgtggcattcgcgactctgtcatgtgaatttcagttgtatgacgcgcttagctaacatgagtttaattccaaaattcactttgatcaaaggttccaagtgccatacttgtgttcaatcgaaacaacctcgcaagcctcacaaggcatctgaggcgaggaatttggcacctctagaacttgttcattccgatttgtgcgaaatgaacggcgtgttgactaaagggggaaagaaatatttcatgacactgatagatgattacactagattttgttatgtgtatatattgaaaagaaaggatgaagcattgcattactttaaaatctataaagctgaggtagaaaaccaacttgaaaggaaaatcaaacggttgaggtctgatagaggtgaggagtatttttctaatgagtttgcatccttttgcgaagagtttggaattatttatgagaggatgcctccctattcaccccaatcaaatggggtggccgaaagaaagaaccgtactctaactgagatggtgaatgccatgttagagactgcggggctttccaaggaatggtggggtgaggcagttttgactgcgtgtcatgtcctgaataaaatttcaatgaagcataaggaagtaacaccattcgaggaatgggaaaggaagaaattaaatctctcatacctacgaacatggggctgtttggccaagcactttgcaccgatagaacacaatgatcaaacgcctgagaaaaatcctgaggaggacaacattgtagacactcacaagagtaagagacaaagggttgcaaaatcctttggagatgactacattgtataccttgtggatgacaccccaagaaccatagaagagacatattcatctcctgacgctgactactggaaggaaataatggatgttaagacagctttcttaaacggagagctggaggaggagatctatatggatcaaccagacggccttaatgtgattgaggaggtcaaggactatctgtacaagagttttgaaatgaaggatttgggagaggctaatgttattcttaacatcaaactacaaagaggagatgagggtgggattacacttgtgcaatctcactatgtggacaaggttttgagtcgctttggatatagtgactgtaagccagctcctactccttgtgatcctagcgtgctattaaggaaaaaccgaagaatagtaagggatcaactgagatactctcaaatcattggttcattgatgtacttggctagtgcaacgaggcctgacatctcatttgctgtaagcaagctgagccggtttgtctcaaatccgggagatgatcattggcaggctctggaaagagtaatgcgctatctaaagggcactatgagctatggaattcactataccgggtattcaaaagtactagaagggtatattgactcaaactggatatctgatgctgatgagataaaagtcacaagtggatatgtgttcacacttggaggtggtgttgtttcctggaagtcttgcaagcagaccatcttaacaaggtcaacaatggaagcagaacttacagcactagatactgcgacagttgaggccgagtggcttcgtgaactcctgatggatttgccggtggttgaaaaaccagtgcgcgccagctatcctaatgaactatga

SEQ ID NO: 15432 - DNA, 4260 bp, Oryza sativa
  Clone ID: TFbOSC900380j.C1.o15.fg
atgtctggagttgctaccgccgctattggcggaggtggtgcgccgccaccgacaggagctgcgccgccgccgacgccgacaggagctggatccggagctggtgcgccaggaggaggtgctgtgaacgactacaacaacggaggcaattctgcctcaccatccagcggagggccattctcggggtataatcttctccttctactgctgttagcgctactcctgttcccattgttagcgctatactgtgtgcgctatgttcttgttcctgttctacatgatgcctctagcatgttatcgcattactggtatgttcctgtttctgacattcatgatgtgcatagtatgctactggttatgttaagatcaccctacactgcttatgccatgatcatagtttcaatttcttggattaaaatatgccgaataatgactatattttcaacaatccaaaaacctgataggtcattttcggtagttggctttgctgctgcactgaaaccacatgcttttgatggttcaaactataagaaatggaaagcacgtgcactattgtggttgacagcgatgcagtgcttctatgtttcacggggtaaacgaagtgaaccacctctttctcctgaggaagaggctaagttcgaggcttcggattgcctgttccgtggagcattgatcagtgtactcgctgacaacatagtggacgtgtacatgcacatgccttctgggaaggacatgtgggatgcacttgaggccaagttcggagtttctgacgccggcagtgagctgtatgtcatggagcagttctatgactacaagatggtcgatgaccgttctgtagtagaacaagctcatgagattcagatgctggctaaggaacttgagaacaacaactgtgagttgccggacaagtttgtggcgggtggcattattgccaaactaccaccttcttggtcggactttgccacttctctaaagcacaagagacaagagttcagtgttcctgatctcattggctctttgggtgttgaggagaaggcgagggcaaaggacgtccggggcaaaaaggttgagggaggttctagtgccaatatggtacagaagaagaaccctcatgcatcccacaacaacaagaaagtcaagcctgatgtcaaacccaaggctgcaaccaattttaagaagaaaggcaagggaaaggcaaagggagactgctttgtgtgtggcaagtctgggcattgggccaaggactgtcctgagcgcaaagacaggaagtctgccaacatgatcattagcgagggcggaggaacatcggggtacggtaaaatattacctacagttctctctgtttttcattcacctgattggtgggtggatactggtgctaatattcatgtcgggagaggttcctccttgttgatgggaaacgggtcgcttgcggctgttcatggtgttggtacggtcgatctgaagtttacttcgggaaagaccgtgcagctgaagaacgtgcagcatgtcccttcaataaagaagaatctagttagcggctctctattgtgtagagaaggttttagacttgtgtttgagtccaataaatgtgtcatatctaaatatgggacttttgttggaaaaggttatgacagcggaggcttgttccgcttttctttgaatgacatgtgtaataatcataacgctgtgaaccatattagcgagaatgatgagtctaatgtgtggcattcgcgactctgtcatgtgaatttcggttgtatgatgcgcttagctaacatgagtttaattccaaaattcactttggtcaaaggttccaagtgccatacttgtgttcaatcgaaacaacctcgcaagcctcacaaggcatctgaggcgaggaatttggcacctctagaacttgttcattccgatttgtgcgaaatgaacggcgtgttgactaaagggggaaagaaatatttcatgacactgatagatgattgcactagattttgctatgtgtatctattgaaaacaaaggatgaggcattgcattactttaaaatctataaagctgaggtagaaaaccaacttgaaaggaaaatcaaacggttgaggtctgatagaggtggggagtatttttccaatgagtttgcatccttttgcaaagagtttggaattattcatgagatgacgcctccctattcaccccaatcaaatggggtggccgaaagaaagaaccgtactctaactgagatggtgaatgccatgttagacactgcgaggctttccaaggaatggtggggtgaggcagttttgactgcgtgtcatgtcctgaataaaattccaatgaagcacaaggaagtaaatgtacctatagtcaaaaagcggaaacttggaccaaaaactgttgattgtgtgtttcttggttatgctatccacagtgtgggttatagattcttaatagtaaactctggagtacccgacatgcatgctggtacaatttttgagtccagagatgctactttctttgagaatgaatttcctatgaaatatacatctagcacttctagtaaagaaactgtcatgccccatgagcactttgcaccgatagaacacaatgatcaaacgcctgaggaaaatcctgaggaggacaacattgtagatactcgcaagagtaagagacaaagggttgcaaaatcctttggagatgactacattgtatacctcgtggatgacaccccaagaaccatagaagaggcatattcatctcctgacgctgactactggaaggaagcagtacgcagtgaaatggactcgattatgtctaatggtacttgggaagtcgttgagcgtccatatggatgtaagcccgtaggatgcaaatgggttttcaagaaaaagcttaggcctgatggtacaatcgaaaagtataaggcaaggcttgtggccaagggttatacccaaaaggaaggcgaggatttcttcgacacatattcaccagttgctcgcttgactacgattcgagtactacttgctctggcagcctctcatggtcttcttgtccatcagatggacgttaagacagctttcctaaacggagagctggaggaggagatctatatggatcaaccagacgggtatgtactagaaggtcaggagggaatggtgtgtaaactattgaaatccttgtatggcctcaagcaagcacctaagcaatggcatgagaagtttgacaccacgcttacatctgcaggctttgttgtgaacgaagctgacaaatgtgtatactatcgctatggtgggggagaaggggtgatcttatgcttgtatgtcgatgacatactgatctttgggaccagccttaatgtgattgaggaggtcaaagactatctgtccaagagttttgaaatgaaggatttgggagaggctgatgttattcttaacatcaaactacaaagaggagatgagggtgggatcacacttgtgcaatcccactatgtggacaaggttttgagtcgctttggatatagtgactgtaagccagctcctactccttatgatcccagcgtgctattaaggaaaaaccgaagaatagcaagggatcaactgagatactctcaaatcattggttcattgatgtacttggctagcgcaacgaggcctgacatctcatttgctgtaagcaagctgagccggtttgtctcaaatccgggagatgatcattggcaggctctggaaagagtaatgcgctatctaaagggcactatgagctatggaattcactataccgggtatccaaaagtactagaaggatatagtgactcaaactggatatctgatgctgatgagataaaagccacaagtggatatgcgttcacacttggaggtggcgctgtttcctggaagtcttgcaagcagaccatcttaacgaggtcaacaatggaagcagaacttacagcactagatactgcgacagttgaggctgagtggcttcgtgaactcctgatggatttgccggtggttgaaaaaccagtgccagctatcctaatgaactgcgataatcaaacagtgattattaaagtgaacagttcaaaggacaacatgaagtcatctagacacatcaagagaagactgaaatctgtcagaaagcagaaaaactccggagtgatagcattgtactatgtccaaacggctagaaatctggcagatcagtttaccaaggggctaccacgtaatgtgatagacagtgcatcgagggaaatgggcttgatacccacctaa

SEQ ID NO: 15433 - DNA, 3807 bp, Oryza sativa
  Clone ID: TFbOSC900383j.C1.o22.fg
atgcagtgcttctatgtttcacggggcaaacgaagtgaaccacctctttctcctgaggaagaggctaagttcgaggcttcggattgcctgttccgtggagcattgatcagtgtactcgctgacaacatagtggacgtgtacatgcacatgccttctgggaaggacatgtgggatgcacttgaggccaagttcggagtttctgacgccggcagtgagctgtatgtcatggagcagttctatgactacaagatggtcgataaccgttctgtagtagaacaagctcatgagattcagatgctggctaaagaacttgagaacaacaactgtgagttgccggacaagtttgtggcgggtggcattattgccaaactaccaccttcttggtcggactttgccacttctctaaagcacaagagacaagagttcagtgtttctgatctcattggctctttgggtgttgaggagaaggcgagggcaaaggacgtgcggggcaaaaaggttgagggatgttctagtgccaatatggtacagaagaagaaccctcatgcatcccacaacaacaagaaagtcaagcctgatgtcaaacccaaggctgcaaccaattttaagaaaaaaggcaagggaaaggcaaagggagactgctttgtgtgtggcaagtctgggcattgggccaaggactgtcctgagcgcaaagacaggaagtctgccaacatggtcattagcgagggcggaggaacatcggggtacggtaaaatattacctacagttctctctgtttttcattcacctgattggtgggtggatactggtgctaatattcatgtatgtgctgacatttctctgttttcttcttatcaggttgggagaggttcctccttgttgatgggaaacgggtcgcttgcggctgttcatggtgttggtacggtcgatctgaagtttacttcgggaaagaccgtgcagctgaagaacgtgcagcatgtcccttcaataaagaagaatctagttagcggctctctattgtgtagagaaggttttagacttgtgtttgagtccaataaatgtgtcgtttctaaatatgggacttttgttggaaaaggttatgacagcggaggcttgttccgcttttctttgaatgacatgtgtaataatcataatgctgtgaaccatattagcgagaatgatgagtcaaatgtgtggcattcgcgactctgtcatgtgaatttcggttgtatgacgcgcttagctaacatgagtttaattccaaaattcactttggtcaaaggttccaagtgccatacttgtgttcaatcgaaacaacctcgcaagcctcacaaggcgtctgaggcgaggaatttggcacctctagaacttgttcattccgatttgtgcgaaatgaacggcgtgttgactaaagggggaaagaaatatttcatgacactgatagatgattgtactagattttgctatgtgtatctattgaaaacaaaggatgaggcattgcattactttaaaatctataaagctgaggtagaaaaccaacttgaaaggaaaatcaaacggttgaggtctgatagaggtggggagtatttttccaatgagtttgcatccttttgcgaagagtttggaattattcatgagatgacgcctccctattcaccccaatcaaatggggtggccgaaagaaagaaccgtactctaactgagatggtgaatgccatgttagacactgcggggctttccaaggaatggtggggtgaggcagttttgactgcgtgtcatgtcctgaataaaattccaatgaagcataaggaagtaacaccattcgaggaatgggaaaggaagaagttaaatctctcatacctacgaacatggggctgtttggccaaggtaaatgtacctatagccaaaaagtggaaacttggaccaaaaactgttgattgtgtgtttcttggttatgctatccacagtgtgggttatagattcttaatagtaaactctggagtacccgacatgcatgctggtacaattcttgagtccagagatgctacattctttgagaatgaatttcctatgaaatatacacctagcacttctagtaaagaaactgtcatgccccatgagcactttgcaccgatagaacacaatgatcaaacgcctgaggaaaatcctgaggaggacaacattgtagatactcgcaagagtaagagacaaagggttgcaaaatcctttggagatgactacattgtatacctcgtggatgacaccccaagaaccatagaagaggcatattcatctcttgacgctgactactggaaggaagcagtacgcagtgaaatggactcgattatgtctaatggtacttgggaagtcgttgagcgtccatatgggtgcaagcccgtaggatgcaaatgggttttcaagaaaaagcttaggcctgatggtacaatcgaaaagtacaaggcaaggcttgtggccaagggttatacccaaaaggaaggcgaggacttcttcgacacatactcaccagttgctcgcttgaccacgattcgagtactacttgctctggcagcctctcatggtcttctcgtccatcagatggacgttaagacagctttcctaaacggagagctggaggaggagatctatatggatcaaccagacgggtatgtactagaaggtcaggagggaatggtgtgtaaactattgaaatccttgtatggcctcaagcaagcacctaagcaatggcatgagaagtttgacaccacgcttacatctgcaggctttgttgtgaacgaagctgacaaatgtgtatactatcgctatggtgggggagaaggggtgatcttgtgcttatatgtcaatgacatactgatctttgggaccagccttaatgtgattgaggaggtcaaagactatctgtccaagagttttgaaatgaaggatttgggagaggctgatgttattcttaacatcaaactacaaagagaagatgaggatgggattacacttgtgcaatcccactatgtggacaaggttttaagtcgctttggatatagtgactgcaagccagctcctactccttatgatcccagcgtgctattaaggaaaaaccaaagaatagcaagggatcaactgagatactctcaaatcattggttcattgatgtacttggctagcgcaacgaggcctgacatctcatttgctgtaagcaagctgagccggtttgtctcaaatccgggagatgatcattggcaggctctggaaagagtaatgcgctatctaaagggcactatgagctatggaattcactataccgggtatccaaaagtactagaagggtatagtgactcaaactggatatctgatgctgatgagataaaagccacaagtggatatgtgttcacacttggaggtggcgctgtttcctggaagtcttgcaagcagaccatcttaacgaggtcaacaatggaagcagaacttacagcactagatactgcgacagttgaggccgagtggcttcgtgaactcctgatggatttgccggtggttgaaaaaccagtgccagctatcctaatgaactgcgataatcaaacaatgattattaaagtgaacagttcaaaggacaacatgaagtcatctagacaaatcaagagaagactgaaatctgtcagaaagcagaaaaactccggagtgatagcattggactatgtccaaaaggctagaaatctggcagatcagtttaccaaggggctaccacgtaatgtgattgacagtgcatcgagggaaatgggcttgatacccacctaa

SEQ ID NO: 15434 - DNA, 943 bp, Oryza sativa
  Clone ID: TFbOSC9356j.C1.o1.fg
atgtcgaacactggagacaaggagaaggagactcccgtcaacaccaacggaggcaatactgcctcaaactccagcggaggaccattcttggggtcattttcggtagttggctttgctgctacactgaaaccacatgcctttgatggttcaaactataagagatggaaagcacgtgcactattgtggttgacagcgatgcagtgcttctatgtttcacggggcaaacgaagtgaaccacctctttctcctgaggaagaggctaagttcgaggcttcggattgcctgttccgtggagcattgatcagtgtactcgctgacaacatagtggacgtgtacatgtacatgccttctgggaaggaaatgtgggatgcacttgaggccaagttcggagtttctgacgccggcagtgagctgtatgttatggagcagttctatgactacaagatggtcgatgaccgttctatagttgaacaagctcatgagattcagatgctggctaaggaacttgagaacaacaactgtgagttgccggacaagtttgtggcaggtggcattattgccaaactaccaccttcttggtcggactttgccacttctctaaagcacaagagacaagagttcagtgttcctgatctcattggctctttgggtgttgaggagaaggcgagggcaaaggacgtccggggcaaaaaggttgagggaggttctagtgccaatatggtacagaagaagaaccctcatgcatcccacaacaacaagaaagtcaagcctgatgtcaaacccaaggctgcaaccaattttaagaagaaaagcaagggaaaggcaaagggagactgctttgtgtgtggcaagtctgggcattgggccaaggactgtcctgagcgcaaagacaggaagtctgccaacatgatcattagcgagggcggaggaacatcggggtacg

SEQ ID NO: 15435 - DNA, 2415 bp, Oryza sativa
  Clone ID: TFbOSC400690j.C1.o14.fg
atggctgacaatgagaaaggcaataaggtcagaagtcaggacattggtacctcgagctcccgagtgaatgaagcaccagacaccagttgtgtgacactggtccaacacctgattaaccagaaccgattgcttatagagatactacagcagcatcagacaccaattctgaacctgagtcagatacaacctcaagtgcagttggaggcagtccaagcactcacaccacgagtcagcatgccgccagcatcccgaaggacccatggtgacgtgccacatgttgactcaaaagaagcaagtatcatttgttttatgtgtgatgagcaagggcactatgcaagggagtgtcctcagcagaaaaaaaaaacaccaatgcgaaccgaagatgaagtccgtaagatgagcattaccagcacagaatggcctccaccaggaatgacaaaacgtcagagaagaaataccttccgaggtgcgccacagttgacagagcatcttttagctaatggaggtagagtgtctgataatgaagattcagatcaagtctcctcagatgatgaagatgagaagtctccccaaggtttcaaccagaataaaatggaacgtaaggcatgctctcgttgtggagaaatcggtcatgttgccagctcgtgtgccactacatgcgttcattgtgaggaagaccatccacccgacaggtgtccaacgagcaggatcacttgtttcttttgtgaaggaactgatcatgtaccaaaagattgtcaattcagttttttgctgacgaagaaaatggccaaccaacccgccagttccaacggagagaagcatcaaggcaacacaaatcctcgccaagattacagtttcagcctgactccagtgccaggacagaggaatcaaaatgagaaaagaaaatgccgagtccgggaagatatctgttgcttcaattgtcaaggaatgggtcatttcgccgacaagtgcccaaaaccgagaaacatagctgccagcacgtcagtccacgcaactccctgcaatcagaagcttgctcctcagcgaactgtcatccatgcatcccgaagcagtcctatagcccgcgttgcaacagctccaactccagcgagtgcattaccacaaggtgtcaatgcccaatttcagccccagccatcagttgacaagaccgaggccagtatcggcattgtacctttggatgttcgagcacagcagccaagaaatcaaaattggaacaacccagcagggacaaccaacgttcaagtacctacagtccagcaacagtgcaagttatcagaatttctcaaaactgagcctccaacctttgccattgccgtcgatcctatggaagccagtgattggttgcgcacaatcgagaagaagctagggttgattcagtgcaccgaccaggagcgggttggcttcgcaactcctcagctggttggaccggcttcagagtggtgggatagctacgaagcatcacagccagaaggacataccatcacctggaacgagttttcatctgtattcaggagatcacatgttcccgcaggaatgatcacattaagaaaacgagagtttcgctatctgaagcaagcagatttgaccgtcacaaagtacctgcacgagttctatcgtttggctcactatgcaccagaagatgtggaaacggatgaagacaaacaagagaagtttctccaggggttaaaagatgagcttgcagtgcaactccttctagaggattatgaagattttgagaaacttgtggacaaagccatgcaactcgaaagtgagcataatcggatgacgaactgcaagaggaggattgtcaacatcccagtatttccatgtggtaaccaaagacagcgcactgagccacttcagatcaccggatcttctgttgtgcatcaagagttcctgccccaagaagatggacgcaatgcagacaacaacactagcaatactaatgatgatgataccaccaacaaccatggttcttgcctcattagcgaccactcgaataaagcgtgcaatgtcagtagcattcaccaagatgtcaacgatagtatcaatgttggaatccagaatgacaaccttagcaattttgacactgagaaagactccaatggtgatagcaactatggtaccactgatgccaatgttagcaaggatttccaaccaccaattccaactccaagtcaaaatgatcgtccccagatggacagctcaacaaagaagacgttgatttgttacaactgcaaagaaccaggtcatttctctagagattgtccacagccgaagcgtaacctacgccatcactccggccattatgcaagaagaagacaagtcactcgccttgtggtcactggagcaaacgccatacctgtgaggcctcatgttaatcctaacctatag

SEQ ID NO: 15436 - DNA, 1992 bp, Oryza sativa
  Clone ID: TFbOSC900144j.C1.o22.np
atggacgaagtcgggggtcgatggacatctctaggacaaatgaaggctacacgagctgcggcccggtagtcgagatgtcatggcacagggctggtgtcctgctgctaggggctcaatcctgcctacctgtcccggaggttccggccgtaggtggggttgggtcggtactcttgtctatggctaggatgggttggaaactatgtcacgtcttccgtccgtataccgtggtggtattttgctcaataactaaaatgtcgaatggttagcctgggttggcttgggacgagctgggacccagggtcgggttgccagttcggtcttgatcatcgtaggccttgggttaaggcagtactagatggtcaggtcagtgaagaagaagacatcgtcagttgtttgccgaagctccggaagactgcaggatccgctagcgaagtggaggaagcagtgaagccagctgtgaagcaggacaaaagacttagatctgttaaggtcctatccttagtttctaatctgtctctcccctttgttttccctctcttcctctccaaacctttgcaacagatggctgacaatgagaaaggcaataaggtcagaagtcaggacattggtacctcgagctcccgagtgaatgaagcaccagacaccagttgtgtgacactggtccaacacctgattaaccagaaccgattgcttatagagatactacagcagcatcagacgccaattctgaacctgagtcagatacaacctcaagtgcagttggaggcagtccaagcactcacaccacaagtcagcatgccgccagcatcccgaaggacccatggtgacgtgccacatgttgactcaaaagaagcaagtatcatttgttttatgtgtgatgagcaagggcactatgcaagggagtgtcctcagcagaaaagaaaaacaccaatgcgaaccgaagatgaagtccgtaagatgatcattaccagcacagaatggcctctaccaggaatgacaaaacgttagagaagaaataccttccgaggtgcaccacagttgacagagcatcttttagctaatggaggtagagtatctgatagtgaagattcagatcaagtctcctcagatgatgaagatgagaagtctccccaaggtttcaaccagaataaaatggaacgtaaggcatgctctcgttgtggagaaatcggtcatgttgccagctcgtgtgccactacatgcgttcattgtgaggaagaccatccacccgacaggtgtccaacgagcaggatcacttgtttcttttgtgaaggaactgatcatgtaccaaaagattgtcaattcagttttctgctgacgaagaagatggccaaccaacccgccagttccaacggagagaagcatcaaggcaacacaaatcctcgccaagattacagtttcagcctaactccagtgccaggacagaggaatcaaaatgagaaaagaaaatgccgagtccgggaagatatctgttgcttcaattgtcaaggaatgggtcatttcgccgacaagtgcccaaaaccgagaaacatagctgccagcacgtcagtccacgcaactccctgcaatcagaagcttgctcctcagcgaactgtcatccatgcatcccgaagcagtcctatagcccgcgttgcaacagctccaactccagcgagtgcattaccacaaggtgtcaatgcccaatttcagccccagccatcagttgacaagaccgaggccagtatcggcattgtacctttggatgttccagcacaacagccaagaaatcaagtacaagataaagaaccctcaacaaagaagacgttgatttgttacaactgcaaagaaccaggtcatttctctagagattgtccacagccgaagcgtaacctacgccatcactccggccattatgcaagaagaagacaagtcactcgccttgtggtcactggagcaaacgccatacctgtgaggcctcatgttaatcctaaccta

SEQ ID NO: 15437 - DNA, 4715 bp, Oryza sativa
  Clone ID: TFbOSC900371j.C1.o5.np
atggctagccgcccccgccgtgcagctcgtgcaccagcccgctttggttttgaggatggtagagttgaagcagaagcaaatcacgaaccagctaatgagcattctcaccacagcaaccgttcgcaccgtactgtttcccgcaacgcagaggttgagcaacctcgccgcagcagccgctcgcatcgcacagtttcccgtgaagcagagttggagcagtctcaccgccctcaccgcactgccagtcacaattctagagaagaacgcctcccttccccacctcatgtggaaaacaacatgcaacacataatggcagttcagacacaaatcttgcaaggtctaaccacagccatagccaactttcagcataacgcgcatggaaatggccaccctcacgtgggcaacaatagatccaagctgacagacttcctgaggtcacgtccaccagagttctctcagaccgtcgagcccgtcgaggctgacgattggttgaaagatgttgatagaaaactcaacttagtgcagtgtactcctgttgagaagacgctctacgcctctcaccagctaagaggacctgccgcagattggtgggagaattactgcaatgcacaccctgaacccactaacattgcttgggatgagtttgctacggctttccgtgcagctcatgtgcctgaaagcactattgacatgaagaaagaagaattcaacagacttaagcaaggcaacagcagtgtcaatgagtacctaagtcagttcaacaagttagctcggtacgcccctgaagaagtggacacagataagaagaagatcaggaaattcttgaaagggattgcagttggaatgagactccagttgcttgctcatgacttccccacttttcaacatatgatcaacaaggctcttctacttgaggatgccagaaaagaggctaccgaagaatacaagaaacacaagtctaaccatcagggaaattcttcccgaggcgcacctcgcccacgctatggtcaacccatgcaatatcaccagtcggtaactcaggctaaccaccagccaggctacgcccctcgtcctcagatgaaccgtccggcacctcagccacagcagcgtgcccctagtggcaataccgcgccaaacagtgttacctctttcaagtcaccacagggaccgtcagcagttcagtgtttccggtgcaactagatgggacactatgccagacagtgtcctcagaatcctaccaacaccaactcagggtatgctaatggcagcactgccagaactcctgctccagcggcagctcagtctcgtcctagctctcaggcaagtggacaaggttctcgtgcgtccaaccactttggtcgaggacgtgtgaatcacattcaagctgaaaccgctcaggatgctccagacgttgtgatgggtatgttctctgtcaactccatacccgcaatagttctgtttgattcaggagcttctcattctttcatatcgcaagcttttgtgaaaagaaatggttggaaaacccaaaatttgcatgtaccgatgatagtacattcccctggaaggaatataagggcaactcaaatatgcccggaagttaaccttagaattgaggaagttgacttcctagccaaaccgatagtcctagactcgcaaagcttggacatcattctagggatggattggttggctaagcacaaaggacagatagattgtgccgaaaagtccatcaccttgcaaggacctggaggaaaacaagtccgctttacccctaacacccctaccgcaagtcggtctatcctaacctgtttacaagtcacctccttggagtcggtgcccatagtctgtgaatatcccgacgtatttccggaagaattaacaagaatgccaccagaccgagagatcgagttcgccatagaactggcaccaggcacagctccaattgcaaaaagaccctaccgaatggcagctaatgagttagcagaagttaaaagacaaatcgaagaactggaaagtaaaggttatgtgcgacctagctcatccccttggggagccccagtgcttctggttaagaaaaaggatggctctgagagaatggtaatcgactatagagccctaaatgaagtaactataaagaacaagtacccgttgccccggattgacgatttattcgatcaacttaaaggagcaagagttttctcaaaaattgacttgaggtcaggttaccaccaactgaaaatcagatctgaagatatcccgaagaccgctttctcaacgcgttatggtctatatgagttcacagttatgtccttcggactcaccaatgctccagcattcttcatgaacttaatgaataaaatcttcatggaatacctggaccagtttgtcgtggtgttcatcgatgacatcctgatatactctaagaacgaggaagaacatgctgaacacctaaggctgataatggaaaagctcagagatcatcaactattcgctaaattctcgaaatgcgaattctggttagaccgagtagcatttcttggacacgtgatctcctccaacggtgtcgaagtagatcccagcaaggttgaagctgtacttgcttggaacccgcccaagaatgtgtcagagattcgcagcttccttggcttagcgggatattatcgaagattcattgaaggattctctaagctagccagacctatgaccgagctgttaaagaaggaaaagaaatttcaatggtctgcagcctgtgaagacagcttccaagaattgaagaaaaggttgaccactgccccaattctcacttgccagatatccgaaaagatttcgagatcttctgtgacgcatcaagacaaggcttaggatgtgtcctaatgcaagaacgaaaggttgtggcctatgcatccaggcagctcaggcctcatgaagtcaattatcccacccatgatctcgagttggcagccgtgattcatgctcttaagatctggaggcactacttaatagggaacagatgtgaagtatacaccgatcacaaaagtcttaaatatatcttcacacagaccgagttaaatatgaggcagagaagatggttggaactaatcaaggattacgatcttggaatccactatcatcctggtaaagccaacgtggtcgctgatgcgctaagtcgcaaggcctattgcaatgtagctcaaatacggcctgaccaagatcatctgtgcagagaattggagaagttaaggctgaccgtggtacagacaggagtcccagccagcttgacagtacagcctaccctagagtcgcaaatccgggaggctcagaaagatgacgaagggataaaagagttaataaaaagaatacaggagaagaaagacaccaatttctccatagacgatcaaggcacagtttggtgcgattcacgcatctgtgtaccggccaagaaggagttaagagatctcatcctaaaggaagctcatgagtccgcttactccattcatccgggaagtacgaagatgtaccaggatatcaaggcatacttttggtgggctggaatgaagcgagatgtcgctgaatacgtagccttgtgtgacatttgccaaagagtcaaggcagagcatcagaggccagctggtctgctgcaacccctaccgattcccgagtggaaatgggaagagatcggaatggatttcatcaccggtttgccaagaacccccagcgggtacgactctatttgggtaatcgtggaccgactcacgaaatcagctcatttcgtgccagtgaaaaccacctatgatggaaggaaactggcagaactctacatgacccatgtcgtatgtagatttggctgccccaagaaaattgtgtcagaccgaggcactcagttcacctcaaggttctggaagcagttgcatgaagccctcgggactgatctaaactttagtacagcctaccatccgcagaccgatggtcagacgaaaagggtaaaccaaatcctagaagacatgttgcgtgcgtgtgccttggatttcgaaggcacttgggatcgttgtttgccatatgctgagttctcatacaacaacagttatcaggccagcattcagatgtcgccgaatgaggcaatgttcggaagaaagtgtcgcacccccttgtgctggaacgaggtgggcgaagccctggtattcggtcctgacatactcaagtcagcagaagaacaagttaagctaatccgagaatgattaaagacagcgcaggaccgtcagaagaattacgctgacaatcggaggcatgaccttgagttcgaaaaaggagatcatgtatacctgcgggtatcacccctccgtggtatgagaaggtttgggatgtccggcaagttagcaccccgctacatcggcccctacctcataaccgccagacgtggcgaagtggcttatcagcttgagctacctgaaggtctcgcagatgtgcacaacgtgtttcacgtatcccagttaaagaaatgtcttcgagttccagaagagcaagttcccctgggtaatatcgagctggaaaagaatctgacctacaaggaaagaccgatcaaggttcttgaagaagcagaacgtcagactcgaaggaagacaatcaagttctacaaagtccaatggagcaatcattctgaagatgaagcaacctgggaacgagaagatcttctccgcgccgagtttccggagctgctccct

SEQ ID NO: 15438 - DNA, 5295 bp, Oryza sativa
  Clone ID: TFbOSC401219j.C1.o40.fg
atggcagtgaacgccagcttcagttcccacggttttagtgagggtcaccacgtcgctcagcttcgtgacctcgcctgtttccttggcttctcgtgtcccgagtacacggggtactccgtggaccgtgttccccctcactgtgagctctccgtgtacctctaccctcgtgaaggtatacacggagctggccttcgcccccaccacttcaccgtggccaggcccactctccagatcgcgtaccaggacctttcctggactgcgcttcgtcgcctggcccacgactacagccaccgtctcggaggctccgccttccggcagcttccacgccttccttctggccactcagacgccaggtacccttgtccgtacagcgagtctcagccagtgctgactcgcatggttgagctttcggaggctcaggccactcagcacgacctactccttgaggcttaccgctccctggcccgctgctacaccgctttggaggcccgtctggccgaggagggtgtcacctcagttgacactatctcctgggactcaggccgcctctgccacgccagccacctgtcctcccacagctcccgcggctctgcctgcactcccagtggcccgcgctcccccagctcgcgtgcgccgtactcaccagtgtactccccctacccacacccagttagcccttcctacacccccggacacaccccagttgcttcctcccgccgtggtccacgctttatccgcactgcgcggaagcgtgttgttggttcttccaccgtgttccgtttccaccacccagctcccccaccgccagcggcccgcgctgctgccggccctcgacagatggctagccgcccccgccgtgcagctcgtgcgccagcccgcttcggttttgaagaaggtagagccgaaccagaagcaaatcatgaatcagctaatgagcagtctcaccgcagcaaccgttcgcaccgtactgtttcccgcaacgcagaagttgagcaaccccgccgtagcaaccgctcgcatcgcacagcttcccgtgatgcagagatggaacagtctcaccgctctcaccgcactgccagtcacaattctggagaagaacgcctcccttccccacctcatgtggaaaacaacatgcaacacttaatggcagttcagacacaaatcttgcaaggaatagccgcagccgtagccggttatcagcataatgctcatggaaatggccaccctcacatgggcaacaatagatccaagctgacggattttctgaggtcacgtccgccagagttctctcagaccgtcgagcccgtcgaggctgacgattggttgaaagatgttgatagaaaactcaacttagtgcagtgtactccagtcgagaagacgctctacgcctctcaccagctaagaggacctgctgcagattggtgggagaattactgcaatgcacaccctgaacccactagcattgcttgggatgagtttgccacggctttccgtgcagctcatgtgcctgaaagcaccattgacatgaagaaagaggaattcaatagacttaagcaaggcaacagcagtgtcaatgagtacctaagtatgttcaacaagttggctcggtacgcccctgaggaagtggactcagataagaagaagatcaggaaattcttgaaaggaatcgcagttggaatgagactccagttgctagcacatgacttccccacttttcaacatatgatcaacaaggcacttctacttgaggatgccagaaaagaggctaccgaagaatacaagaaacgcaaatctaaccaccaagggaattcctcccgaggcgcacctcgccctcgctacggtcaacccatgcaataccaccagtcggtcactcaggctaaccgccagccaggctacgcccctcgtcctcagatgaaccgcccggcaccccagccacagcagcgtgcccctagtggcaatactgcgccaaacagtgttacctctttcaagtcaccacagggaccgtcagcaattcagtgtttccggtgcaaccagatgggtcactatgctagacagtgccctcagaatcctaccaacaccaactcagggcatgctaatggcagcactgccagaactcctactccagcggcagctcagtctcgtcctagcactcaggcaagtggacaaggttcacgtgcttccaaccactttggtcgaggccgtgtgaatcacattcaagctgaaaccgctcaggatgctccagacgttgtgatggtacattcccctggaaggaatataagggcaactcaaatatgcccggaagttaaccttagaattgaggaagttgacttcctagccaaaccgatagtcctagactcgcaaagcttggacatcatcctagggatggattggttggctaagcacaaaggacagatagattgtgccgaaaagtccatcaccttgcaaggacctggggaaaagcaagtccgctttacccctaacactcctaccgcaagtcggtctatcttaacctgtttacaagtcacctccttggagtcggtgcccatagtttgtgaatatcccgacgtatttccggaagaattaacaagaatgccaccagaccgagagattgagttcgccatagaactggcgccaggcaccgcaccaattgcaaaaagaccctaccgaatggcagctaatgagttagcagaagttaaaagacaaatcgaagaattagagagtaaaggttatgtgcgacctagctcatccccttggggagccccagtgctcctggttaagaaaaaggatggctctgagagaatggtaatcgactatagagccctgaatgaagtaactataaagaacaagtacccgttgccacggattgacgatttgttcgaccaacttaaaggagcaagagttttctcaaaaattgacttgaggtcaggttaccaccaactgaaaatcagatctgaagatatcccaaagaccgctttctcaacgcgttatggtctatatgagttcacagtaatgtccttcggactcaccaatgctccagcattcttcatgaacttaatgaacaaaatcttcatggaatacctggaccagtttgtcgtggtattcatcgatgacatcctaatatactccaagaacgaggaagaacatgctgaacacctgaggttgataatggaaaagctcagggatcatcaactattcgcaaaattctcgaaatgcgaattctggttagaccgagtagcatttcttggacacgtgatttcctccaatggtgtcgaagtagatcccagcaaggttgaagctgtacttgcttggaacccgcccaagaatgtgtcagagattcgcagcttcctcggcttagctagatattatcgaagattcattgaaggattctctaagctaaccagacctatgaccgagctgttaaagaaggaaaagaaatttcaatggtctgcagcctgtgaagacagcttccaagaaatgaagaaaaggttgaccactgccccagttctcaccttgccagatatccgaaaagatttcaagatcttctgtgatgcatcaaggcaaggcttaggatgtgtcctaatgcaagaacgaaaggttgtggcctatgcatccaggcagctcaggcctcatgaagtcaattatcccacccatgatctcgagttggcagccgtggttcatgctcttaagatctggaggcactatttaatcgggaacagatgtgaagtatacaccgatcacaaaagtcttaagtatatcttcacacagaccgagttaaatatgagacagagaagatggttggaactaatcaaggattacgatcttagaatccactatcaccctggtaaagccaacgtggtcgctgatgcgctaagtcgcaaggcctattgcaatgtagctcaaatacggcctgaccaagatcacctgtgcagagaattggagaagttaaggctgaccatggtacagccaggtgtccctgccagtttgacagtacagcctaccctagagtcgcaaatccgggaggctcagaaagacgacgaagggataaaagaattaataaaaagaatacaggagaagaaagacaccaatttctccatagacaaccaaggcacagtttggtgcggtccacgcatctgtgtaccggccaagaaggagttaagagatctcatcctaaaggaagctcatgagtccgcctattccattcatccaggaagtacgaagatgtaccaagatatcaaggcatacttctggtggactggaatgaagcgagatgtcgcagaatacgtagccctgtgtgacgtttgccaaagagtcaaggcagaacatcaaaggccagctgctcatttcgtgccagtgaaaaccacctatgatggaaagaaactagcagaactctacatgacccatgtcgtatgtagatttggctgtcccaagaaaattgtgtcagaccgaggcactcagttcacctcaaggttctggaagcagttgcatgaagccctcggaaccgatctaaattttagtacagcctaccatccgcagaccgatggtcagactgaaagggtaaaccaaatcctagaagacatgctacgttcgtgtgccctggatttcgaaggcacttgggatcgttgtttgctgtatgctgagttctcatacaacaacggttatcaggccagcattcagatgttgccaaatgaggcaatgttcggaagaaagtgccgcactcccttgtgctggaatgaggtgggcaaagcactggtattcggtcctgacatactcaagtcagcagaagaacaagttaagctaacccgagaacgtttaaagacagcgcagaaccgtcagaaaaattatgctgacaatcggaggcgtgaccttgaattcgaaaaaggagatcatgtgtacctgcgggtatcacctctccgtggtatgaggaggtttgggatgtccggcaagttagcaccccgctacatcggcccctacctcataaccgccagacgtggcgaagtggcttatcagcttgagttacctgaaggtctcgcagatgtgcataacgtgtttcacgtatcccagttaaagaaatgtcttcgagttccagaagagcaagttcccctgggtaatatcgtgctggaaaagaatctgacctacaaggaaagaccgatcaaggttcttgaagaggcagaacgtcagactcgaaggaagaccatcaagttctacaaagtccaatggagcaatcattctgaagatgaggcaacctgggagcgagaagatcttctccgcgccgagtttctggagctgctcctttag

SEQ ID NO: 15439 - DNA, 413 bp, Oryza sativa
  Clone ID: TFbOSC11188j.C1.o2.np
atgaaggcaaggagtgaaatcttcaactcagtatcagatgctacacggagtgaaaactgcaagcaccggttaccaggcaatgccatgtcttgggagatgatccaatgggaaggaactcatcaaggtcaaaggtgtaaaggaatacggtgaatgctaaataatgacaacctgaagataatagttgccacatcccagtcgaagtcagctagaggtgcaaccagggaaaagtcaggtgaagagaagattccatttgcaacaggagatcgagccaagcagtccagagtggagaagttttgttaggcaagtttgttatagaagatggagcggaagaagtcagacaagaagagaagaccacccaacctatcttcatgctagcctcctcgaatctcggggacgagattcctgtaaggggg

SEQ ID NO: 15440 - DNA, 1052 bp, Oryza sativa
  Clone ID: TFbOSC11867j.C1.o3.np
ttggatttattgcgtcagccgaggggaggggcgcgcggaccgggtccacgggagtggggcccacgcggcagcctcacggtccacggtggaccgggtgctcccggctcacaccggccggcgccgtgggtcccacgcatcagccgcacccgagggcgcgggcggctgacggccgggccccacatggcagccgcggggcgcgcccgaaggcggccacgccggcacagccgacgggaggcggcgcacccgcgccccgatggggagggaagggggaaacgaatcggcggtccacagctcaccccgggtcgacggcgacgacgggaacggcgaccggagcggaggaaggcggcggcgcggctcgggtagacggggacggcggcgttccggcggtcggcgggcgaaacggaggggtggacgaggtcggcgaggttgcggcgaaaccaaaggaggcggcgccgaagcgggagaaggtccggggcgacgacggcggcaaaccggagctcggtggtgacggcggagagagagagcgacggcgcgagctcgattccggcggagagagagagcggcgagtggcggaaacggtggagggaggcacggggagtgtttatatagggttgggagtgagagagggcggccggatgagggggaaacgggcgcggaagatccggccgccattgatgcgccggcgaggtttagggggaaagattccgaacgaatccgaggaagagagggagggaaaaatggggggaaagagggagggaatcacggggaatatttcccccctcttgattgcacgcggggcggacgggagcggcgggatttgcggcggcggcggcgctagggcacgggcgagacggcgggagcggcgggaggaaggggatgacgggtgggccccacccgtcagcgagggtggcgggcgggcccgcccgtcagcggcgcgcgcgcggggaggaggccgaatgggccgcggggaggaggagagagagggaaggagatgggccgagccggcccaagagggggaggggggaaaagactttttaggatttttcttttta

SEQ ID NO: 15441 - DNA, 1368 bp, Oryza sativa
  Clone ID: TFbOSC401126j.C1.o41.fg
atggttggcctgggttggcttgggacgagctgggacccagggtcgggttgccagttcggtctgaatcatcgtaggccttgggttaaggcaggtttacccttttcttccttcttcaaatttcaactagtactagatggtcagatgtttaacagagaaaaaggaaagaatgtcagcgggtatgcctcaagtaactcaagttttcaactcaatccaccactggcctcaagagagttaaccagggcacacccttggtccattccgagcatgctgcttggttcacagctaccattggttggaagtcaagaccaaaatcagtatgtgtttgatcgagcatttgccacccaggtcgatgagcttccaatgccagaagaggatgtccccttttgtcacgattgtagagagcaaggacactatgccctgaattgtccatgggtatatgccaaagaagctccttcctttggtttagcagggcaggcatcgctaaaccagcctcctcgcaccaagtcaagcttgcagcctagtgtgccaagtagagagcccaatggagagaatccattgaatcccgagaattgctttcctcctagcctttcgtaccacgtggggtcacgtactaagcaagccaaaggcaagaagagtaagaatcagaagagaaaagcaccgatgcgaactgaagaagaagtacgtaagatgactattaccagcaccgaatggcctccagcagggataactattcctagacatcaaagaggaaataccttccgaggtgcacgacagttgacccagcacctcctaagccatggtggcagagtatctgatagtgaagggtcagatcaagtctcctcggatgatgaagatgagtctccccgacatctcggcgaggaagaaatggaatcaaaggcatgcacccgttgtggagaaattggacacgttgctagcatgtgtcttacactctgccctcattgtgaggaagaccatccaccaggtgaatgtcccacccgcaaggtgacatgttttctgtgcgaaggtacaaaccatgtgcccaaggattgccaactcagtgtgttgttgaccaagaccgcagaaatccaacgaacaaccctacggttgtctcatcagctagtcagctccaatagcaacatcgacaatatcatccacaacaccaatgctcctcctgctccacctgactctgcaataaatcatagcaataataccttcagcaccaaccattctctgcaccgacagcctcagcaaagaattgttgtcgatggaagaagttgtgtctctccccgacctactccaggccgagcaaagggcaatcaatctcaggagggcgataccaagcagaagaccgttctctgcttcaaatag

SEQ ID NO: 15442 - DNA, 1024 bp, Oryza sativa
  Clone ID: TFbOSC6416j.C1.o1.np
agatgtccccttttgtcacgattgtagagaacaaggacactatgccctgaattgtccatgggtatatgccaaagaagccccttcctttggtttaatagggcagacatcgctaaaccagcctcctcgcaccaagtcaagcttgcagcctagtgtgcaaagtagagagcccaatggagagaatccattgaatcccgggaattgctttcctcctagcccttcgtaccacgtggggtcacgtactaagcaagccaaaggcaagaagagtaagactcagaagagaaaagcaccgatgcgaactgaagaagaagtacgtaagatgactattaccagcaccgaatggcctccagcagggataactattcctagacgtcaaagaggaaataccttccgaggtgcacgacagttgacccagcacctcctaagccacggtggcagagtatctgatagtgaagggtcagatcaagtctcctcggatgatgaagatgagtctccccgacatctcggcgaggaagagatggaatcaaaggcatgcacccgttgtggagaaattggacacgttgctagcatgtgtctcacactctgcgcttattgtgaagaagaccatccaccaggggagtgtcccacctgcaaggtcacatgttttctatgcgaaggtacaaaccatgtgcccaaggattgccaactcagtgtgttgtcgaccaagaccgcagaaatccaacgaacaaccctacgattgtctcatcagctagtcagctccaacggcaatatcgacgatatcatccacagcaccaatgctcctcctgctgcacctgactctgcaataaatcatagcaataataccttcagcaccaaccattctctgcaccgacagcctcagcaaagaattgtcgttgatggaagaagttgtgtctctccccgacctactccaggccaagcaaagggcaatcaacctcaggagggcgataccaagcagaaaaccgtcatccgcttcaaacagcaatcagaaggaagcttctcctgtgaa

SEQ ID NO: 15443 - DNA, 1275 bp, Oryza sativa
  Clone ID: TFbOSC12281j.C1.o1.fg
atgaaagccagtgattggttgcgcacagtcgagaagaagctggggttgattcagtgcacagaccaggagcgggttggcttcgcaactcatcagttggttggaccgacttcagaatggtgggatagctacgaagcatcacggccagaaggacataccatcacttgggatgagttttcatctgtattcaagagatcacatgttcccgcaggaatgatcacactaagaaaacgagagtttcgctacctgaagcaagaagatttgaccgtgacagagtacctgcacgagttccatcgtttggctcactatgcaccagaagatgtggaaacggatgaagacaaacaagagaagtttctccaggggttaaaagatgaggttgcagtgcaactactcctagaggattatgaagattttgagaaacttgtggacacaagccatacaactcgaaaggaccactcggatcaagcgtgcgatgtcaatagcattcaccaagatatcgacgatagtatcaatgaaggcacccagaatgacaaccctagcaattttgactctgagaaagactccaatggtgatagcaactatggtaccactgatgccaatgttagcaaggatttccaaccaccaattccaactccaagtcagaatgatcgttcccagacgaacagctcagtaaagaagacattgatttgttacaattgcaaagaaccaggtcatttctccacagattgtccacaaccgaagcgtaacctgcgtcatcactccggccattatgcaagaagaagacaagtcactcgccttgtggtcactggagcaaacgccatacctgtttctctgaaaggcagcaggctcaagtaccacatcgtcaccagaagcatccacaactctcggagtgaagagtacttagttgacaaaggtcaaaagatgattgatagaagatatcgaaaaagatgtttattaccgggcaaagaagtaggtcgaaacgtgattgataagagaaatcgggaaagaacacatcaagttgataacttgtgtgaggttgacgccgaagatatgaatcatgagaagttctggaacggaagcatcattaaactaccgcaacctagtctaagtaacctaaaaggtgcaccctggttcgagtcaggtgaagagaagattccatccgcaataggaggtcaagccaagcagttccgagtggtgaagttttgctggaagtttgtgaagacgcaacagaagaagtcagacaagaagagaagaccgcccaacctatcttcttgctag

SEQ ID NO: 15444 - DNA, 1983 bp, Oryza sativa
  unsure (1)..(1983): unsure at all n locations
  Clone ID: TFbOSC13271j.C1.o1.np
atggctagccgtccccgccgtgcagctcgtgcaccagcccgctttggtgttgaggatggtagagttgagccagaagaaaatcatgaatcagctaatgagcagtctcaccacagcaaccgttcgcatcgtactgtttcccgcaacgcagaggttgagcaaccccgccgcagcagccgctcgcatcgcacagtttcccgtgatgcagagatggaacagtctcaccgctctcaccgcactgccagtcacaattctggagaagaacgcctcccttccccacctcatgtggaaaccaacatgcaacacttaatggcagttcagacacaaatcttgcaaggactaaccacagccatagccagttttcagcataatgcgcatggaaatggccaccctcacatgggcaacaacagatccaagctgacagactttttgaggtctcgtccgccagagttctctcagaccgtcgagcccgtcgaggctgacgattggttgaaagatgttgatagaaaactcaacttagtgcagtgtactcctgttgagaagacgctctacgcctctcaccaactaagaggacctgccgcagattggtgggagaattactgcaatgcacaccctgaacccactaacattgcttgggatgagttcgctacggctttccgtgcagctcatgtgcctgaaagcactattgacatgaagaaagaagaattcaacagacttaagcaaggcaacagcagtatcaaatgagtacctaaagtcagttcaacaagttggctcggtacgcccctgaggaagtggacacagacaagaagaagatcaggaaattcttgaaaggaatcgcagttggaatgagactccagtgcttgctcatgacttccccacttttcaacatatgatcaacaacgcacttctacttgaggatgccaggaaagaggctaccgaagaatacaagaaacgcaagtctaaccatcagggaaattcttcccgaggcgcacctctcgcctcgctacggtcaacccatgcaataccaccagtcggtcactcaggctaaccgcaagccaggctacgcccctcgtcctcagataaaccggtcgggcacctcagccacagcagcgtgcccctagtggcaatactgcgcctaacagcgttacctctttcaagtcaccgtagggaccgtcagcagttcagtgtttccggtgcaaccagatgggtcactatgctagacagtgtcctcagaatcctaccaacaccaactcagggcatgctaatggcagcactgccagaactcctactccagcggcaactcagtctcgtcctagctctcaggcaagtggacaaggttcacgtgcttccaacaactttggtcgaggccgtgtgaatcacattcaagctgaaaccgctcaggatgctccagacgttgtgatgggtatgttctctgtcaactccgtacccgcaatagttctgttcgattcgggagcttcccattctttcatatcgcaagcttttgtgaaaagaaatggttggaaaacccaaaatttgcgtgtaccaatgatagtacattcccctggaaggaatataagggcaactcaaatatgcccggaagttaaccttagaattgaggaagttgacttcctagccaaaccgatagtcctagactcgcaaagcttggacatcattctagggatggattggttggctaagcacaaaggacagatagaatgtgccgaaaagtccatcaccttgcaaggacctagaggaaagcaagtccgctttacccctaacacccctaccgcaagtcggtctatcctaacctgtttacaagtcacctccttgggagtcgggtgccccattaaagggngttttcccttttgggtttccggagaattaacagaatccaccagaccgagagatcgagttcgccatagaactggcaccaggcacagctccaattgcaaaaagaccctaccgaatggcagctaatgagttagc

SEQ ID NO: 15445 - DNA, 2138 bp, Oryza sativa
  Clone ID: TFbOSC13981j.C1.o2.hg
atggctagccgcccctgccgtgcagctcgtgcgccagcccacttcggttttgaagaaggtagagtcgaaccagaagcaaatcatgaatcagctaatgagcagtctcaccgcagcaacaattcgcaccgtactgtttcccgtaacgcagaagttgagcaaccccgccgtagcaaccgctcgcatcgcacagcttcccgtgattcagagatggaacagtctcaccgctctcaccgcactgctagtcacaattctggagaagaacgcctcccttccccacctcatgtggaaaacaacatgcaacacttaatggcagttcagacacaaatcttgcaaggaatagccgcagccgtagccggttatcagcataatgtgcatggaaatggccaccctcacatgggcaacaatagatccaagctgacagattttctaaggtcacgtccgccagagttctctcagaccgtcgagcccgtcgaggctgacgattggctgaaggatgttgaaagaaaattcaacttagtgcagtgtactcctgttgagaagacgctctacgcctctcaccaactaagaggacctgctgcagattggtgggagaattactgcaatggacaccctgaacccactaacattgcttgggatgagtttgccacggctttccgtgcagctcatgtgcctgaaagcaccattgacatgaagaaagaggaattcaacaggcttaagcaaggcaacaccagtgtcaatgagtacctaagtcagttcaacaagttggctcggtacgcccctgaggaggtggacacagacaagaagaagatcaggaagttcttgaagggaatcgcagttgggatgagactccagttgcttgctcatgacttccccacttttcaacacatgatcaacaaggcacttctacttgaggatgccagaaaagaggctaccgaagagtacaagaaacacaagtctaaccatcagggaaattcttcccgaggcgcgcctcgccctcgctacggtcaacccgtgcaataccaccagtcggtcactcaggctaaccgccagccaggctacgcccctcgtcctcagataaaccgtccggcacctcagccacagcagcgtgcccctagtggcaatactgcgccaaacagcgttacctccttcaagtcacctcaaggaccgtcagcagttcagtgtttccggtgcaaccagatgggtcactatgctagacagtgccctcagaatcctaccaacaccaactcagggcatgctaatggcagcactgccagaactcctactccagcggcagctaagtctcgtcctagcactcaggcaagtggacaaggttcacgtgcttccaaccactttggtcgaggccgtgtgaatcacattcaagctgaaaccgctcaggatgctccagacgttgtgatgggtatgttctctgtcaactccgtacccgcaatagttctgtttgattcaggagcttcccattctttcatatcacaagcttttgtgaaaagaaatggttggaaaacccaaaatttacgtgtaccaatgatagtacattcccctggaaggaatataaaggcaactcaaatatgcccggaagttaaccttagaattgaggaagttgacttcctagccaaaccgatagtcctagactcgcaaagcttggacatcatcctagggatggattggttggctaagcacaaaggacagatagattgtgccgaaaagtccatcaccttgcaaggacctggaggaaagcaagtccgctttacccctaacactcctaccgcaagtcggtctatcttaacctgtttacaagtcacctccttggagtcggtgcccatagtttgtgaatatcccgacgtatttccggaagaattaacaagaatgccactagaccgagagattgagttcgccatagaactggcaccaggcaccgcaccaattgcaaaaagaccctaccgaatggcagctaatgagttagcagaagttaaaagacaaatcgaagagctggaaagtaaaggttatgtacgacctagctcatccccttggggagccccagtgcttctggttaagaaaaaggaaggctctgagagaatggtaatcgactatagagccctgaatgaagtaactataaagaacaa

SEQ ID NO: 15446 - DNA, 852 bp, Oryza sativa
  Clone ID: TFbOSC14645j.C1.o1.fg
atggaagccagtgattggttgcgcacagtcgagaagaagctagggttgattcagtgcaccgaccaggagcgggttggcttcgcaactcatcagttggttggaccggcttcagagtggtggaatagctacgaagcatcacggccagaaggacataccatcacttgggatgagttttcatctgtattcaagagatcacatgttcccgcaggaatgatcacactaagaaaacgagagtttcgctacctgaagcaagaagatttgaccgtcacagagtacctgcacgagttctatcgtttggctcactatgcaccagaagatgtggaaacggatgaagacaaacaagagaagtttctccaggggttaaaagatgaggttgcagtgcaactactcctagaggattatgaagattttgagaaacttgtggacacaagccatacaactcgaaaggaccactcggatcaagcgtgcgatgtcaatagcattcaccaagatatcgacgatagtatcaatgaaggcacccagaatgacaaccctagcaattttgactctgagaaagactccaatggtgatagcaactatggtaccactgatgccaatgttagcaaggatttccaaccaccaattccaactccaagtcagaatgatcgttcccagacgaacagctcagtaaagaagacattgatttgttacaattgcaaagaaccaggtcatttctccacagattgtccacaaccgaagcgtaacctgcgtcatcactccggccattatgcaagaagaagacaagtcactcgccttgtggtcactggagcaaacgccatacctgtgaggcctcgtgctaatcataacccatag

SEQ ID NO: 15447 - DNA, 4149 bp, Oryza sativa
  Clone ID: TFbOSC16108j.C1.o1.fg
atggctagccgcccccgccgtgcagctcgtgcaccagcccgctttggttttgaagatggtagagttgagccagaagaaaatcatgagtcagctaatgagcagtctcaccacagcaaccgttcgcaccgtactgcttcccgcaacgcagaagttgagcaaccccgccgcagcagccgctcgcatcgcacagtttcccgtaatgcagagatggaacagtctcaccgctctcaccgcactgccagtcacaattctggagaagaacgcctccctttcccacctcatgtggaaaacaacatgcaacacttaatggcagttcagacacaaatcttgcaaggattagccgcagccgtagccggttttcagcataatgcgcatggaaatggccaccctcacatgagcaacaatagatccaagctgacagattttctgaggtcacgtccgccagagttctctcagaccatcgagcccgttgaggctgacgattggctgaaagatgttgatagaaaactcaacttagtgcagtgtactccggtcgagaagacgctctacgcctctcaccagctaagaggacctgctgcagattggtgggagaattactgcaatgcacaccctgaacccactaacattgcttgggatgagtttgctacggctttccgtgcagctcatgtgcctgaaagcactattgacatgaagaaagaagaattcaacagacttaagcaaggcaacagcagtgtcaatgagtacctaagtatgttcaacaagttggctcggtacgcccctgaggaagtggacacagacaagaagaagatcaggaaattcttgaaaggaatcgcagttggaatgagactccagttgcttgctcatgatttccccacttttcaacatatgatcaacaaggcgcttctacttgaggatgccagaaaagaggctaccgaagaatacaagaaacgcaagtctaaccatcagggaaattcttcccgaggcgtacctcgccctcgctacggtcaacccatgcaataccaccagtcggtcactcaggctaaccaccagccaggctacgcccctcgtcctcaaatgaaccgtccggcacctcagccacagcagcgtgcccctagtggcaatactgcgccaaacagtgttacctctttcaagtcaccacagggaccgtcagcagttcagtgtttccggtgcaaccagatgggtcactatgccagacagtgccctcagaatcctaccaacaccagcttagggcatgctaatggcagcactgccagaactcctactccagcggcagctcagtctcgtcctagctctcaggcaagtggacaagtacattcccctgggaggaatataagggcaactcaagtatgcccgggagttaaccttagaattgaggaagttgacttcctagccaaaccgatagtcctagactcgcaaagcttggacatcattctagggatggattggttggctaagcacaaaggacagatagattgtgctgaaaagtccatcaccttgcaaggacctggaggaaagcaagtccgctttacctctaacacccctaccgcaagtcggtctatcctaacctgtttacaagtcacctccttggagtcggtgcccatagtctgtgaatatcccgacgtattcccagaagaattaacaagtatgccaccagaccgagagattgtgttcgccatagaactggcgccaggcactgcaccaattgcaaaaagaccctaccgaatggcagctaatgagttagcagaagttaaaagacaaatcgaagaattggagggtaaaggttatgtgcgacctagctcatccccttggggagccccagtgcttctggttaagaaaaaggatggctctgagagaatgctggaccagtttgtcgtggtgttcatcgatgacatcctgatatactccaagaatgaggaagaacatgctgaacacctgaggctgataatggaaaagctcagagatcatcaactattcgctaaattctcgaaatgcgaattctggttagaccgagtagcatttcttggacacgtgatctcctccaacggtgtcgaagtagatcccagcaaggttgaagctgtacttgcttggaacccgcccaagaatgtgtcagagattcgcagcttccttggcttagctggatattatcgaagattcattgaaggattctctaagctagccagacctatgaccgagctattaaagaaggaaaggaaatttcaatggtctgcagcctgtgaagacagttttcaagaaatgaagaaaaggttgaccactgccccagttctcaccttgccagatatccaaaaagattttgagatcttctgtgatgcatcaagacaaggcttaggatgtgtcctaatgcaagaacgaaaggtggtggcctatgcgtccagacagctcaggcctcatgaagtcaattaccccacccatgatctcgagttggcagccgtgattcatgctcttaaaatctggaggcactatttaatcggaaagagatgtgaagtatacaccgatcacaaaagtcttaaatacatcttcactcagaccgagttaaacatgaggcagagaagatggttggaactaatcaaggattacgatctgggaattcattatcatcccggtaaagctaacgtggtcgctgatgcgctaagtcgcaaggcctattgcaatgtagctcaaatacggcctgaccaagatcgcctgtgcagagaattggagaagttaaggctgaccgtggtacagtcaggtgtccctgccagcttgacagtacagcctaccctagaatcgcaaatccgggaggctcagaaagatgacgaagggataaaagagttaataaaaagaatacaggaaaagaaagacaccaatttctccatagacgaccaaggcacagtttggtgcggtccacacatctgtgtaccagccaagaaggagttaagagatctcatcctaaaggaagctcatgagtccgcctactccattcatccaagaagtacgaagatgtaccaagatatcaaggcatatttctggtgggctagaatgaagcgagatgtcgcagaatacgtagccctgtgtgacatttgccaaagagtcaaggcagagcaccagaggccagctggtctgctacagcccctaccgattcccgagtggaaatgggaagagatcgggatggatttcatcaccggtttgccaagaacccctagcgggtacgactccatttgggtaatcgtggaccgactcacgaaatcagctcatttcgtgccagtgaaaaccacctttgatggaaagaaactagcagaactctacatgacccatgtcgtatgtagatttggctgtcccaagaagatcgtgtcagatcgaggcactcagttcacctcaaggttctggaagcagttgcatgaagccctcggaaccgatctaaatttaagtacgggctaccatccgcagactgatggtcagacagaaagggtaaaccaaatcctagaagacatgctacgtgcgtgtgccttggatttcgaaggcacctgggatcgttgtttgccgtatgcggagttctcatacaacaacagttatcaggctagcatacagatgtcgccgaacgaggcaatgttcggaagaaagtgccgtactcccttgtgctggaatgaggtgggcgaagcgctggtattcggtcttgacatactcaaggcagcagaagaacaagttaagctaatccgagaacgtttaaagacagcgcaaaaccgtcagaagaattacgctgacaatcggaggcgtgaccttgagttcgaaaaaggagatcatgtatacctgcgggtatcacccctccgtggtatgaggaggtttgggatgtccggcaagttagcaccccgctacatcggcccctacctcataaccgccagacgtggcgaagtggcttatcagcttgagttacctgaaggtctcgcagatgtgcacaacgtgtttcacgtgtctcagttgaagaaatgtcttcgagttccagaagagcaagtccctctgggtaatatcgagctggaaaagaatctgacttacaaggaaagaccgaccaaggttcttgaagaggcagaacgtcagactcgaaagaagaccatcaagttctacaaagtccaatag

SEQ ID NO: 15448 - DNA, 5556 bp, Oryza sativa
  Clone ID: TFbOSC17191j.C1.o1.fg
atggcagtgaacgccagtttcagttcccacggttttggtgagggtcaccacgtcgctcagcttcgtgacctcgcccgtttccttggcttctcgtgtcccgagtacacggggtactccgtggaccgtgttccccctcactgtgagctctctgtgtacctttacccccgtggaggtatacacggagctggccttcgcccacaccacttcactgtagccaggcccactctccagatcgcgtaccaggacctctcctggactgcgcttcgtcgcctggcccacgactacagccaccgtctcggaggctccgccttccggcagcttccacgccttccttctggccactcagacgccaggtacccttgtccgtacagcgagtctcagccagtgctgactcgcatggttgagctttcggaggctcaggccactcagcacgacctactccttgaggcttaccgctcccttgcccgccgctacgccgccttggaggcccgtctggccgaggagggtgtcacctcagttgacactatctcctgggactcaggccgcctctgccacgccagccacctgtcctcccacagctcccgcggctctgcccgcactcccagtggcccgcgctcccccagctcgcgtgcgccgtactcaccagtgtactcgccctacccacacccagttagcccttcctacaccccaggacacaccccagttgcttcctcctgccgtggcccacgctttatccgcactgcgcggaagcgtgttgttggttctgccaccgtgttccgtttccactacccagctcccctaccgccagcggcccgtgctgctgccggccctcgacagatggctagccgcccccgccgtgcagctcgtgcaccagcccgctttggttttgaggatggtagagttgagccagaagaaaatcatgaatcagctaatgagcagtctcaccacagcaaccgttcgcatcgtactgtttcccgcaacgcagaggttgagcaaccccgccgcagcagccgctcgcatcgcacagtttcccgtgatgcagagatgggacagtctcaccgctctcaccgcactgccagtcacaattctggagaagaacgcctccctttcccacctcatgtggaaaccaacatgcaacacttaatggcagttcagacacaaatcttgcaaggactaaccacagccatagccagttttcagcataatgcgcatggaaatggccaccctcacatgggcaacaacagatccaagctgacagactttctgaggtctcgtccgccagagttctctcagaccgtcgagcccgtcgaggctgacgattggttgaaagatgttgatagaaaactcaacttagtgcagtgtactcctgttgagaagatgctctacgcctctcaccaactaagaggacctgccgcagattggtgggagaattactgcaatgcacaccctgaacccactaacattgcttgggatgagttcgctacggctttccgtgcagctcatgtgcctgaaagcactattgacatgaagaaagaagaattcaacagacttaagcaaggcaacagcagtatcaatgagtacctaagtcagttcaacaagttggctcggtatgcccctgaggaagtggacacagacaagaagaagatcaggaaattcttgaaaggaatcgcagttggaatgagactccagttgcttgctcatgacttccccacttttcaacatatgatcaacaaggcacttctacttgaggatgccagaaaagaggctaccgaagaatacaagaaacgcaagtctaaccatcagggaaattctttccgaggcgcacctcgccctcgctacggtcaacccatgcaataccaccagtcggtcactcaggctaaccgccagccaggctacgcccctcgtcctcagataaaccgtccggcacctcagccacagcagcgtgcccctagtggcaatactgcgcctaacagtgttatctctttcaagtcaccgcagggaccgtcagcagttcagtgtttccggtgcaaccagatgggtcactatgctagacagtgtcctcagaatcctaccaacaccaactcagggcatgctaatggcagcactgccagaactcctactccagcggcagctcagtctcgtcctagctctcaggcaagtggacaaggttcacgtgcttccaacaactttggtcgaggccgtgtgaatcacattcaagctgaaaccgctcaggatgctccagacgttgtgatgggtatgttctctgttaactccgtacccgcaatagttctgttcgattcgggagcttcccattctttcatatcgcaagcttttgtgaaaagaaatggttggaaaacccaaaatttgcgtgtaccaatgatagtacattcccctggaaggaatataagggcaactcaaatatgcccggaagttaaccttagaattgaggaagttgacttcctagccaaaccgatagtcctagactcgcaaagcttggacatcattctagggatggattggttggctaagcacaaaggacagatagattgtgccgaaaagtccatcaccttgcaaggacctggaggaaagcaagtccgctttacccctaacacccctaccgcaagtcggtctatcctaacctgtttacaagtcacctccttggagtcggtgcccatagtctgtgaatatcccgacgtatttccggaagaattaaaaagaatgccaccagaccgagagatcgagttcgccatagaactggcaccaggcacagctccaattgcaaaaagaccctaccgaatggcagctaatgagttagcagaagttaaaagacaaatcgaagagttggagagtaaaggttatgtgcgacctagctcatccccttggggagccccagtgcttctggttaagaaaaaggatggctctgagagaatggtaatcgactatagagccctgaatgaagtaactataaagaacaagtacccgttgccacggattgacgatttattcgatcaacttaaaggagcaagagtcttctcaaaaattgacttgaggtcaggttaccatcaactgaaaatcagatctgaagatattccgaagaccgctttctcaacgcgttatggtctatatgagttcacagtaatgtccttcggactcaccaatgctccagcattcttcatgaacttaatgaacaaaatctttatggaatacctggaccagtttgtcgtggtattcatcgataacatcctgatatactccaagaacgaggaggaacatgctgaacacctgaggcggataatggaaaagctcagagatcatcaactattcgcaaaattctcgaagtgcgaattctggttagaccgagtagcatttcttggacacgtgatctcgtccaacggtgtcgaagtagatcccagcaaggttgaagctgtacttgcttggaacccgcccaagaatgtgtcagagattcgcagcttccttggcttagcgggatattatcgaagattcattgaaggattctctaagctagccagacctatgaccgagctgttaaagaaggaaaagaaatttcaatggtctgcagcctgtgaagacagcttccaagaattgaagaaaaggttgaccactgccccagttctcaccttgccagatatccgaaaagatttcgagatcttctgtgacgcatcaagacaaggcttaggatgtgtcctaatgcaagaacaaaaggttgtggcctatgcatccaggcagctcaggcctcatgaagccaattatcccacccatgatctcgagttggcagccgtggttcatgctcttaagatctggaggcactatttaatcgggaacagatgtgaagtatacaccgatcacaaaagtcttaagtatatcttcactcagaccgagttaaatatgagacagagaaaatggttggaactaatcaaggattacgatcttggaatccactatcatcctggtaaagccaacgtggtcgctgatgcgctaagtcacaaggcctattgcaatgtagctcaaatacggcctgaccaagatcacctgtgcagagaattggagaagttaagactgaccgtggtacagtcaggtgtccctgccagcttgacagtacagcctaccctagagtcgcaaatccgggaggctcagaaagacgacgaagggataaaagaattaataaaaagaatacaggagaagaaagacaccaatttctccatagacgataaaggcacagtttggtgcggaccacgcatctgtgtaccggccaagaaggagttaagagatctcatcctaaaggaagctcatgagtccgcctactccattcacccaggaagtacgaagatgtaccaagatatcaaggcatacttctggtgggctggaatgaagcgagacgtcgcagaatacgtagccctgtgtgacatttgccaaagagtcaaggcggaacatcagaggccagctggtctgctgcaacccctaccgattcccgagtggaaatgggaagagatcggaatggatttcatcaccggtttgccaagaacccccagcgggtacgactccatctgggtaatcgtggaccgactcacgaagtcagctcatttcgtgccagtgaaaaccacctatgatggaaagaaactagcagaactctacatgactcatgtcgtatgtagatttggctgtcccaagaaaatagtgtcggatcgaggcactcagttcacctcaaggttctggaagcagttgcatgaagccctcggaactgatctaaattttagtacggcctaccatccacagaccgatggtcagacggaaagggtaaaccaaatcctagaagacatgctacgtgcgtgtgccttggatttcgaaggcacttgggatcgttgtttgccgtatgctgagttctcatacaacaacagttatcaggccagcattcagatgtcgccgaatgaggcaatgttcggaagaaagtgccgcacccccttgtgctggaatgaggtgggcgaagccctggtattcggtcctgacatactcaagtcagcagaagaacaagttaagctgatccgagagcgtttaaagacagcgcagaaccgtcagaaaaattacgcagacaatcggagacgtgaccttgagttcgaaaagggagatcatgtgtacctgcgagtatcacccctccgtggtatgagaaggtttgggatgtccggcaagttagcaccccgctacatcggtccctacctcataaccgccagacatggcgaagtggcttatcagcttgagctacctgaaggtctcgcagatgtgcacaacgtgttccacgtatcccagttaaagaaatgtcttcgagttccagaagagcaagttcccctgggtaatatcgagctggaaaagaatctgacctacaaggaaagaccgatcaaggttcttgaagaggtagaacgtcagactcgaaggaagaccatcaagttctataaagtccaatggagcaatcattccgaagacgaggcaacctgggagcgagaagatcttctccgcgccgagttcccggacctgctcccttag

SEQ ID NO: 15449 - DNA, 4212 bp, Oryza sativa
  Clone ID: TFbOSC19655j.C1.o3.gm
atggcgcccccaatcgccgggaacggacgcgccaaccgtctctccctcctcgccggagcgtcgtccggtcgcgccgtcgcctcctccagcatcgcagctgcctccccttccccggcttgccctccgtttcccgcggagacccccggagctgcgttcccgccgtcgcccttccctttcatccgcgtcggccgcctccagccgcctctatctccctgcctgagcgccggtcgacgtcgccaccacctccctcgactccgcgacgccgccctcatccccggcatctcctcctcctcgcccgaatttcgccggaacaccgtcgcccgcgccggcttctccttcctcctcggcggcatctcctccggctgcccctttcgccatgcccatgcgtcagccggcgctgccgtcccctccctcggcacgccgcggcaccaccacctccggcatcgcagcggcaaggtcgcccttggcctcgcttcccctccatccaaacccctccgcggtccatcatcgtcgtctccgatcgttctcgtcgtcgacgtcccatcggtcacccggctcgtcgtctcgcggcgccgcctccgtcgtcggcatcgcagcggcgtggtccacgccgtcgtcggctgccctcatcgtctcctcgccggccccgcccccgtcatcgtcttcgtcctcgcctccgcgtcgtcaagcctcgtgccggccgcgtctcgccgtcgtccaaggatcgccgccgaagtcgttccctcgccgtctgtctccgccgcgcctctttcgtcgttccggaggttcccgaagcgtggttcgtggtcgtcgccgaagaccgtcgagcccgtcgaggctgacgattggttgaaagatgttgatagaaaactcaacttagtgcagtgtactcctgttgagaagacgctctacgcctctcaccagctaagaggacctgctgcagattggtgggagaattactgcaatgcacatcctgaacccactaacattgcttgggatgagtttgctacggctttccgtgcagctcatgtgcctgaaagcactattgacatgaagaaagaagaattcaacagacttaagcaaggcaacagcagtgtcaatgagtacctaagtcagttcaacaagttggctcggtacgcccctgaggaagtagacacagataagaagaagatcaggaaattcttgaaacgaatcgcagttggaatgagactccagttgcttgctcatgacttccccacttttcaacatatgatcaacaaggcacttctgcttgaggatgccagaaaagaggctaccgaagaatacaagaaacgcaagtctaaccatcagggaaattcttcccgaggcacacctcgccctcgctacggtcaacccatgcaataccaccagtcggtcactcaggctaaccgccagccaggctacgcccctcgccctcagatgaaccgtccgacacctccgccacagcagtgtgcccctagtggcaacactgcgccaaacagtgttacctctttcaactcaccacagggaccgtcagtagttcagtgtttccggtgcaaccagatgggtcactatgctagacagtgccctcagaatcctaccaacaccaacttagggcatgctaatggcagcatcgccaaaactcctactccagcggcagctcagtctcgtcctagctctcaggcaagtggacaaggttctcgtgcttccaaccactttggtcgaggacgtgtgaatcacattcaagctgaaaccgctcaggatgctccagacgttgtgatggaagaattaacgagtatgccaccagaccgagagattgagttcgccatagaactggcaccagggactgcaccaattgcaaaaaggccataccgaatggcagctaatgagttagcagaagttaaaagacaaatcgaagaactggaaagtaaaggttatgtgcgacctagctcatccccttggggagccccagtgcttctggttaagaaaaaggatggctcggagagaatggtaatcgactatagagccctgaatgaagtaactataaagaacaagtacccgttgccacggattgacgatttattcgatcaacttaaaggagcaagagttttctcaaaaattgacttgaggtcaggttaccaccaactgaaaatcagatctgaagatatcccgaagaccgctttctcaacgcgttatggtctatatgagttcacagttatgtccttcggactcaccaatgctccagcattcttcatgaacttaatgaacaaaattttcatggaatacctagaccagtttgtcgtggtgttcatcgatgacatcctgatatactccaagaacgaggaagaacatgctgaacacctgaggctgataatggaaaagctcagagatcatcaactattcgctaaattctcgaaatgggaattctggttggaccgagtagcatttcttggacacgtgatctcctctaacggtgtcgaagtagatcccagcaaggttgaagctgtacttgcttggaacccgcccaagaatgtgtcagagatccgcagcttccttggcttagcgggatattatcgaagattcattgaaggattctctaagctagccagacctatgaccgagctgttaaagaaggaaaagaaatttcactggtctacagcctgtgaagacagctttcaagaaatgaagaaaaggttgaccactgcaccagttctcaccttgccagatatccgaaaagattttgagatcttctgtgacgcatcaagacaaggcttaggatgtgtcctaatgcaagaacgaaaggttgtggcatatgcatccaggcagcttaggcctcatgaagtcaattatcccacccatgatctcgagttggcaaccgtggagaagaaagacaccaacttctccatagacgatcaaggcacagtttggtgcggtccacgcatctgtgtaccggccaagaaggagttaagagatctcatcctaaaggaagctcatgagtccgcttactccattcatccaggaagtacgaagatgtaccaagatatcaaggcatacttttggtgggttggaatgaagcgagatgtcacagaatacgtagccttgtgtgacatttgccaaagagtcaaggcagagcatcagaggccagccggggacgttgggcccgagggtgatgtgttcgccctcctcttagtccccccgagggggtcgagccgcacccgcctcggccccgagggccgaggcgccccgacccctcgtgggttttcgctccgcgtgtatgggttagacagccatgattccgcgtcgcgcctgctcccggcgaaagtggagattgggagcttggagtctcacctagggtccccggccgaaccggcaaaggggggcctgcgcggtctcccggtgaggagccccacgctccgtcacctaccgattcccgagtggaaatgggaagagatcggaatggatttcatcaccggtttgccaagaacccccaacgggttctggaagcagttgcatgaagccctcggaactgatctaaattttagtacggcctaccatccacagaccgatggtcagacggaaagggccagcattcagatgtcgccgaatgaggcaatgttcggaagaaagtgccgcacccccttgtgctggaatgaggtgggcgaagcactggtattcggtcctgacatactcaagtcagcagaagaacaagttaagctgatacgagaacgtttgaagacagcacagaaccgtcataagaattacactgacaatcggaggcgtgaccttgagttcgaaaagggagatcatgtgtacctgcgggtatcacccctccgtggtatgagaaggtttgggatgtccggcaagttagcaccccgctacatcggcccctacctcataaccgccagacgtggcgaagtggcttatcagcttgagctacctgaaggtctcgcagatgtgcacaacgtgttccacgtatcccagctaaagaaatgtcttcgagttccagaagagcaagttcccctgggtaatatcgagctggaaaagaatctgacctacaaggaaagaccgatcaaggttcttgaagaggcagaacgtcagactcgaaggaagaccatcaagttctacaaagtccaatggagcaatcattctgaagatgaggcaacctgggaacgagaagatcttctccgcgccgagttcccggacctgctcccttag

SEQ ID NO: 15450 - DNA, 1589 bp, Oryza sativa
  Clone ID: TFbOSC2188j.C1.o1.fg
atgcaatatcaccagtcagtcactcaggctaaccgccagccaagctatgcccctcgtcctcagatgaatcgtctggcacctcagccgcagcagcgtgccccaagtggcaataccgcgccaaacagtgttacctctttcaagtcaccgccaggactatcagcagttcagtgtttccggtgcaaccagatgggtcactatgccagacagtgccctcagaatcttaccaactccaactcagggcataccaatggcagcaccgccagaactcctactcctgcagcagctcagtcccgtcctagcacgcaggcaagtggacaaggttcccgtgcttccaacaactttggtcgagaccgagtgaaccacattcaagccgagaccgctcaggacgctccagacgttgttatgggtatgttctctgtcaactccgcacccgcaatagttctgtttgattcaggagcatcccattctttcatatcgcaagcttttgtgaaaagaaatggttggaaaacccaaaatttgcgagtaccaatgatagtacattcccctggaagggatataagggcaactaaaatatgctcggaagttaaccttagaattgaggaagttgacttcctagccaaaccgatagtcctagactcgcaaagcttggacatcattcttgggatggattggttggctaagcacaaaggacagatagattgtgccgaaaggtccatcaccttgcaaggacctggaggaaagcaagttcgctttacccccaacactcttactgcaagtcggtctatcctaaccagtttgcaagccacttctttggaatcggtacccatagtctgtgaatatcccgacgtatttccaaaagaattaacggaaatgccaccaaaccgagagattgagttcgccatagaactggcactaggcaccgcaccaattgcaaaaagtccctaccgaatggcagctaatgaattagcagaagtcaaaaagcagatcgaagaattggagagtaaaggttatgtgcgacctagctcatccccttggggagccccagtgcttctggttaagaaaaaggatggctctgagagaatgttgaaaatcagatatgaagatatcccgaagaccgctttctcaacgcgctatgggctgtatgagttcacagtgatgtccttcggactcaccaatgctccagcattcttcatgaacctgatgaacaaaatcttcatggagtacctggaccagtttgttgtggtattcatcgatgacatcctgatatactccaagaatgaggaagaacatgttgaacacctgaggctgataatggagaagctaagagatcatcaattgttcgctaagttctcaaaatgcgaattctggctggaccgagtagcattccttggtcacgtgatctcctctaacggtgtcgaagtagatcccagcaaggttgaagctgtccttgcttggtatcctcccaagaatgagtcagagatccgcagtttccttggcctagctggttactatcgaagattcatcgaagggttctctaagctagccagacctatgaccgagctgttaaagaaggaaaagaagtttgaatg

SEQ ID NO: 15451 - DNA, 3246 bp, Oryza sativa
  Clone ID: TFbOSC23559j.C1.o4.gm
atgcagagatggaacagtctcaccgctctcaccgcactgccagtcacaattctggagaagaacgcctcccttccccacctcataccgtcgagcccgtcgaggctgaaagatgttgatagaaaactcaacttagtacagtgtactcctgttgagaagacgctctacgcctctcaccagctaagaggacctgctacagattggtgggagaattactgcaatgcacaccctgaacccactaacattgcttgggatgagtttgcgacggctttccgtgcagctcatgtacctgaaagcaccattgatatgaagaaagaggaatttaacaggcttaagcaaggcaacaacagtgtcaatgagtacctaagtcagttcaacaaattggctcggtatgcccctgaggaagtggacacagacaagaagaagatcaagaagttcttgaagggaatcgcagttggaatgagactccagttgcttgctcatgacttccccacttttcaacatatgatcaataaggcacttctacttgaggatgccagaaaagaggctaccgaagaatacaagaaacgcaagtctaaccatcagggaaattcttcccgaggcgcacctcgccctcgctatggtcaacccatgcaatatcaccaatcggtcactcaggctaaccgccagccaggctacgcccctcgtcctcagatgaaccgtccggcaccccagccacagcagtgtgcccctagtggcaatactgcgccaaacagtgttacctctttcaagtcaccgcagggaccgtcagcagttcagtgtttccggtgcaaccagatgggtcactatgctagacagtgccctcagaatcctaccaacaccaactcagggcatgctaatggcagcactgccaggactcctactccagcggcagctcagtctcgtcctagctctcaggcaagtggacaaggttcacgtgcttccaacaactttggtcgaggccgggtgaaccacattcaagctgagaccgctcaggatgctccagacgttgtgatggaagaattaacgagtatgccaccagaccgagagattgagttcgccatagaactggcgccaagcactgcaccaattgcaaaaagaccataccgaatggcagctaatgagttagcagaagttaaaagacaaatcgaagagttggagagtaaaggttatgtgcgacctagctcatccccttggggagccccagtgcttctggttaagaaaaaggatggctctgagagaatggtaatcgactatagagccctgaatgaagtaactataaagaacaagtacccgttgccacggattgacgatttgttcgatcaacttaaaggagcaagagttttctctaaaattgacttgagatcaggttaccaccaactgaaaatcagaactgaagatatcccgaagaccgctttctcaacgcgttatggtctatacgagttcacagtgatgtccttcggactcaccaatgccccagcattcttcatgaacttaatgaacaaaatctttatggaatacctggaccagtttgtcgtggtgttcatcgatgacatcctgatatactccaagaatgaggaagaacatgttgaacacctgaggctgataatggaaaagctcagagatcatcaactattcgctaaattctcgaaatgcgaattctggttagaccgagtagcatttcttggactcgtgatctccttcaacggtgtcgaagtagatcccagcaaggttgaagctgtacttgcttggaacccgcccaagaatgtgtcagagattcgcagcttccttggcttaactggatattatcgaagattcattgaaggattctctaagctagccagacctatgaccgagctgttaaagaaggaaaagaaatttcactggtctgcagcctgtgaagacagttttcaagaaatgaagaaaaggttgaccactgccccagttctcaccttgccagatatccgaaaagatttcgagatcttctgtgatgcatcaagacaaggcttaggatgtgtcctaatgcaagaacgaaaggttgtggcctatgcatccaggcagcttaggcctcatgaagtcaattatcccacccatgatctcgagttggcagccgtggttcatgctcttaagatctggaggcactatttaatcgggaacagatgtgaagtatacaccgatcacaaaagttttaagtacatcttcactcagaccgagttaaatatgaggcagagaagatggttggaactaatcaaggattacgatcttggaattcataccaccccgtcaggtgtccctgccagcttgacagtacagcctaccctagagtcgcaaatccgagaagctcagaaagacgacgaagggataaaggagttaacaaaaagaatacaagagaagaaagacaccgatttgtccatagacgaccaaggcacagtttggtgcggtccacgcatctgtgtaccggccaaaaaggagttaagagatctcatcctaaaagaagctcatgagtccgcctactccattcatccaggaagtacgaagatgtaccaagatatcaaggcatacttctggtgggctggaatgaagcgagatgtcgcagaatacgtagccttgtgtgacatttgccaaagagttaaggcagaacatcagaggccagctggtctgctgcaacccctaccgattcccgagtggaaatgggaagagatcggaatggatttcatcaccggtttgccaagaacccctagcgggtacgactccatctggaaccgtcagaaaaattacgctgacaatcggaggcgtgaccttgagttcgaaaaaggagatcatgtatacctgcgggtatcacccctccgtggtatgaggaggtttgggatgtccggcaagttagcaccccgctacattggcccctacctcataactgccagacgtggcgaagtggcttatcagctcgagttacctgaaggtctcgcagatgtgcacaacgtgttccacgtatcccagttaaagaaatgtcttcgagttccagaagagcaagtcctcctgggtaatatcgagctggaaaagaatctgacctacaaggaaagaccgatcaaggttcttgaagaggcagaacgtcagactcgaaggaagaccaccaagttctacaaagtccaatggagcaaccattctgaagatgaggcaacctgggagcgagaagatcttctccgtgcagagttcccggagctgctcccctag

SEQ ID NO: 15452 - DNA, 4515 bp, Oryza sativa
  Clone ID: TFbOSC27040j.C1.o1.fg
atggctagccgcccccgccgtgcagctcgtgcaccagcccgctttggttttgaagatggtagagttgaagcagaagcaaatcatgaatcagctaatgagcagtctcaccgcagcaaccgttcgcaccgtactgtttcccgcaacgcagaggttgagcaaccccgccgcagcagccgctcgcatcgcacagtttcccgtgatgcagagatggagcagtctcacctctctcactgcactgtcagtcacaattctggagaagaacgcctcccttccccacctcatgtggaaaacaacatgcaacacataatggcagttcagacacaaatcttgcaaggactaaccacagccatagccagttttcagcataatgtgcatggccaccctcacgtgggcaacaatagatccaagctgacagactttctgaggtcacgtccgccagagttctctcagaccgtcgagcccgtcgaggctgacgattggttgaaagatgttgatagaaaactcaacttagtgcagtgtactcctgttgagaagacgctctacgcctctcaccagctaagaggacctgccgcagattggtgggaaaattactgcaatgcacatcctgaacccaataacattgcttgggatgagtttgctacggctttccgtgcagctcatgtgcctgaaagcactattgacatgaagaaagaagaattcaacagacttaagcaaggcaacaacagtgtcaatgagtacctaagtcagttcaacaagttggctcggtacgcccctgaggaagtagacaccgataagaagaagatcaggaaattcttgaagggaatcgcagttggaatgagactccagttgcttgctcatgacttccccacttttcaacatatgatcaacaaggcacttctgcttgaggatgccagaaaagaggctaccgaagaatacaagaaacgcaagtctaaccatcagggaaattcttcccgaggcgcacctcgccctcgctacggtcaacccatgcaataccaccagtcgatcactcaaactaaccgccagccaggctacgcccctcgtcctcagataaaccgtccggcacctccgccacagcagcgtgcccctagtggcaatactgcgccaaacagtgttacctctttcaagtcaccacagggaccgtcagcagttcagtgtttccggtgcaaccagatgggtcactatgctagacagtgtcctcagaatcctgccaacaccaactcagggcatgctaatggcagcaccgccagaactcctactccagcggcagctcagtctcgtcctagctctcaggcaagtggacaaggttctcgtgcttccaaccactttggtcgaggacgtgtgaatcacattcaagctgaaaccgctcaggatgctccagacgttgtgatgggtatgttctctgtcaactccgtacccgcaatagttctatttgattcaggagcttcccattctttcatatcacaagcttttgtgaaaagaaacggttggaaaacccaaaatttgcgtgtaccaatgatagtacattcccctgggaggaatataagggcaattcaaatatgcccggaagttaaccttagaattgaggaagttgacttcctagccaaaccgatagtcctagactcgcaaagcttggacatcatcctagggatggattggttggctaagcacaaaggacagatagattgtgccgaaaagtccatcaccttgcaaggacctggaggaaagcaagtccgctttacccctaacacccctaccgcaagtcggtctatcctaacctgtttgcaagtcacctccttggagtcggtgcccatagtcagtgaatatcctgacgtatttccagaagaattaacgactaatgagttagcagaagtcaaaagacaaatcgaagagttggagagtaaaggttatgtgcgacctagctcatccccttggggagccccagtgcttctggttaagaaaaaggatggctctgagagaatggtaatcgactatagagccctgaatgaagtaactataaagaacaagtacccgttgccacggattgacgatttattcgatcaacttaaaggagcaagagtcttctcaaaaattgacttgaggtcaggttaccaccaattgaaaatcagatctgaagatattccgaagaccgctttctcaacgcgttatggtctatacgagttcacagtaatgtccttcggactcaccaatgctccagcgttcttcatgaacttaatgaacaaaatcttcatggaatacctggaccagtttgtcgtgaaatgcgaattctggttggaccgagtagcatttcttggacacgtgatttcctccaacggtgtcgaagtagatcccagcaaggttgaagctgtacttgcttggaacccgcccaagaacgtgtcagagatccgcagcttccttggcttagcgggatattatcgaagattcattgaaggattctctaagctagccagacctatgaccgagctgttaaagaaagaaaagaaatttcaatggtctgcagcctgtgaagacagctttcaagaaatgaagaaaaggttgaccactgcaccagttctcaccttgccagatatccgaaaagatttcgagatcttctgtgacgcatcaagacaaggcttaggatgtgtcctaatgcaagaacgaaaggttgtggcctacgcatccaggcagctcaggcctcatgaagtcaattatcccacccatgatctcgagttggcagccatggttcatgctcttaagatctggaggcattatttaatcgggaacagatgtgaagtatacaccgatcacaaaagtcttaagtatatcttcacacagaccgagttaaatatgagacagagaagatggttggaactaatcaaggattacgatctgggaattcattatcatcccggtaaagctaacgtggtcgctgatgcgctaagtcgcaaggcctattgcaatgtagcccaaacacggcctaaccaagatcacctgtgcagagaattggagaagttaaggctgaccgtggtacagtcaggtgtccctgccagcttgacagtacagcctaccctagaatcacaaatccgggaggcccagaaagatgacgaagggataaaagagttaataaaaagaatacgggagaagaaagacaccaatttctccatagacgaacaaggcacagtttggtgcggtccacgcatctgtgtaccggccaagaaggagttaagagatctcatcctaaaggaagctcatgagtccgcctactccattcatccaggaagtacgaagatgtaccaagatatcaaggcatacttctggtgggctggaatgaagcgagacgtcgcagaatacgtagccttgtgtgacatttgccaaagagtcaaggcagagcaccagaggccagctggtctgctacaacccctaccaattcccgagtggaaatgggaagagatcggaatggatttcatcaccggtttgccaagaaccccctgcgggtatgactccatttgggtaatcgtggaccgactcacgaaatcagctcatttcgtgccagtgaaaaccacctatgatggaaagaaactggcagaactctacatgactcatgtcgtatgtagatttggctgtcccaagaaaattgtgtcggaccgaggcactcagttcacctcaaggttctggaagcagttgcatgaaactctcggaactgatctaaattttagtacggcctaccatccacagaccgatggtcagacagaaagggtaaaccaaatcctagaagacatgctgcgtgcgtgtgccttggatttcgaaggcacttgggatcgttgtttgccgtatgctgagttctcatacaacaacagttaccaggctagtattcagatgtcgccaaatgaggcaatgttcggaagaaagtgccgcacccccttgtgctggaatgaggtgggcgaagccctggtattcggtcctgacatactcaagtcagcagaagaacaagttaagctgatccgagaacgcttgaagacagcgcagaaccgtcagaaaaattacgctgacaatcggagacgtgaccttgagttcaaaaaaggagatcatgtgtacctgcgggtgtcacccctccgaggtatgagaaggtttgggatgtccggcaagttagcaccccgctacatcggcccctacctcatagccgccagacgtggcgaagtggcttatcagcttgagctacctgaaggtctcgcagatgtgcacaacgtgttccacgtatcccagttaaagaaatgtcttcgagttccagaagagcaagttcccctgggtagtatcgagctggaaaagaatctgacctacaaggaaagaccgatcaaggttcttgaagaggcagaacgtcagactcgaaggaagaccatcaagttctacaaagtccaatggagcaatcattctgaagatgaggcaaccagggaacgagaagatcttctccgcgccgagtttccggagctgctcccttag

SEQ ID NO: 15453 - DNA, 4974 bp, Oryza sativa
  Clone ID: TFbOSC29124j.C1.o1.fg
atggcagtgaatgccagcttcagttcccacggttttggtgagggtcaccacgtcgctcagcttcgtgacctcgcccatttccttggcttctcgtgtcccgagtacacggggtactccgtggaccgtgttccccctcactgtgagctctctgtgtacctttacccccgtggaggtatacacggagctggccttcgcccacaccacttcaccgtggccaggcccactctccagatcgcgtaccaggatctctcctggactgcgcttcgtcgcctggcccatgactacagccaccgtctcggaggctccgccttccggcagcttccacgccttccttctggccactcagacgctaggtacccttgtccgtacagcgagcctcagccagtgctgactcgcatggttgagctttcggaggctcaggccactcagcacgacctactccttgaggcttaccgctcccttgcccgccgctacgccgccttggaggcccgtctggccgaggagggtgtcacctcagttgacactatctcctgggactcaggccgcctctgccacgccagccacctgtcctcccacagctcccgcggctctacccgcactcccagtggcccgcgctcccccagctcgcgtgcgccgtactcaccagtgtactcgccctacccacacccagttagcccttcctacaccccaggacacaccccagttgcttcctcccgccgtggcccacgctttatccgcactgcgcggaagcgtgttgttggttctgccaccgtgttccgtttccactacccagctcccctaccgccagcggcccgtgctgctgccggccctcgacagatggctagccgcccccgccgtgcagctcgtgcaccagcccactttggttttgaagatggtagagttgagccagaagaaaatcatgagtcggctaatgagcagtctcaccgcagcaaccgttcgcatcgtacagcttcccgtaatgcagaaatggaacagtcccaccgctctcaccacactgtcagtcacaattctggagaagaacgcctcccttccccacctcatgtggaaaacaacatgcaacacttaatggcagttcagacacaaatcttgcaaggtttagccgcagccgtagccggttttcagcataatgcgcatggaaatggccaccctcacatgagcaacaatagatccaagctgacaaactttctgaggtctcgtccgccagagttctctcagaccgtcgagcccgtcgaggctgacgattggctgaaagatgtggatagaaaactcaacttagtgcagtgtactccggttgagaagacgctctacgcctctcaccagctaagaggacctgccgcagattggtgggagaattactgcaatgcacaccctgaacccactaacattgcttgggatgagtttgctacggccttccgtgcagctcatgtgccggaaagcactattgacatgaagaaagaagaattcaacagacttaagcaaggcaacagcagtgtcaatgagtacctaagtatgttcaacaagttggctcggtacgcccctgaggaagtggacacagacaagaagaagatcaggaagttcttgaagggaatcgcagttggaatgagactccagttgcttgctcatgacttccccacttttcaacatatgatcaacaaagcacttctacttgaggatgccagaaaagaggctaccgaagaatacaagaaacgcaagtctaaccatcagggaaattctttccgaggcgcacctcgccctcgctacggtcaacccatgcaatatcaccagtcggtaactcaggctaaccgccagccaggctacgcccctcgtcctcagatgaaccatccggcacctcagccacagcagcgtgcccctagtggcaatactgcgccaaacagtgttacctctttcaagtcaccacagggaccgtcagcagttcagtgtttccggtgcaaccagatgggacactatgccagacagtgtcctcagaatcctaccaacaacaactcagggcatgctaatggcagcactgccagaactcctactccagcggcagctcagtctcgtcctagctctcaggcaagtggacaaggttctcgtgcgtccaacaactttggtcgaggacgtgtgaatcacattcaagctgaaaccgctcaggatgctctagacgttgtaatgggacctggaggaaagcaagtccgctttacccctaacacccctaccgcaagtcggtctatcctaacctgtttacaagtcacctccttggagtcggtgcccatagtctgtgaatatcccgacgtatttccggaagaattaacgagaatgccaccagaccgagagatcgagttcgccatagaactggcaccaggcacagctccaattgcaaaaagaccctaccgaatggcagctaatgagttagcagaagttaaaagcaaattgaagaactggaaagtaaaggttatgtgcgacctagctcatccccttggggagccccagtgcttctggttaagaaaaaggatggctctgagagaatggtcaggttaccaccaactgaaaatcagatctgaagatatcccgaagaccgctttctcaacgcgttatggtctatatgagttcacagttatgtccttcggactcaccaatgctccagcattcttcatgaacttaatgaacaaaatcttcatggaatacctggaccagtttgtcgtggtgttcatcgatgacatcctgatatactccaagaacaaggaagaacatgctgaacacctgaggctgataatggaaaagctcagagatcatcaactattcgctaaattctcgaaatgcgaattctggttggaccgagtagcatttcttggacacgtgatttcctccaacggtgtcgaagtagatcccagcaaggttgaagctgtacttgcttggaacccgcccaagaacgtgtcagagatccgcagtttccttggcttagcgggatattatcgaagattcattgaaggattctctaagctagccagacctatgaccgagctgttaaagaaggagaagaaatttcaatggtctgcagcctgtgaagacagctttcaagaaatgaagaaaaggttgaccactgcaccagttctcaccttgccagatatccgaaaagatttcgagatcttctgtaacgcatcaagacaaggcttaggatgtgtcctaatgcaagaacgaaaggttgtggcctatgcatccaggcagctcaggcctcatgaagtcaattatcccacccatgatctcgagttggcagccgtggttcatgcacttaagatctggaggcactatttaatcgggaacagatgtgaagtatacaccgatcacaaaagtcttaaatatatcttcacacagaccgagttaaatatgaggcagagaagatggttggaactaatcaaggattacgatcttggaatccactatcatcctggtaaagccaacgtggtcgctgatgcgctaagtcgcaaggcctattgcaatgtagctcaaatacggcctgaccaagatcatctgtacagagaattggataagttaaggctgaccgtggtacagtcaggagtccctgccagcttgacagtacagcctaccctagaatcgcaaatccgggaggctcagaaagatgacgaagggataaaagagttaataaaaagaatacaggagaagaaagacgctaatttctccatagacgatcaaggcacagtttggtgcggtccacgcatctgtgtaccggccaagaaggagttaagagatctcatcctaaaagaagctcatgagtccgcctactccattcatccaggaagtacgaagatgtaccaagatatcaaggcatacttctggtgggctggaatgaagcgagatgtcgcagaatacatagccttgtgtgacatttgccaaagagtcaaggcagagcatcagaggccagctggtctgctgcaacccctaccgatccccgggtggaaatgggaagagatcggaatggatttcatcaccggtttgccaagaacccctagcgggtacgactccatctgggtaatcgtggatcgactcacgaaatcagctcatttcgtgccagtgaaaaccacctatgatggaaggaaactagcagagctctacataacccatgtcgtatgtaggtttggttgtcccaagaaaatagtgtcggatcgaggcactcagttcacctcaaggttctggaagcagttgcatgaagctctcggaactgatctaaattttagtacagcctaccatccgcagaccgatggtcagacagaaagggtaaaccaaatcctagaagacatgctgcgagcgtgtgccttggatttcgaaggcacttgggatcgttgtttgccgtatgctgagttctcatacaacaacagttatcaggccagcattcagatgtcgccgaatgaggcaatgtttggaagaaagtgccgcactcccttgtgctggaatgaggtgggcgaagcgctggtattcggtcctgacatactcaagcgtgaccttgagttcgaaaaaggagatcatgtatacctgcgggtatcacccctccgtggtatgaagaggtttgggatgtccggcaagttagcaccccgctacatcggcccctacctcataaccgccagacgtggcgaagtggcatatcagcttgagctacctgaaggtctcgcagacgtgcataacgtgtttcacgtatcccagttaaagaaatgtcttcgagttccagaagagcaagtccccctgggtaatatcgaactggaaaagaatctgacctacaaggaaagaccgatcaaggttctggaagaggcagaacgtcagactcgaaggaagaccatcaagttctacaaagtccagtggagcaatcattctgaagatgaggcaacctgggagcgagaagatcttctccgcgccgagttcccggagctgctcccttag

SEQ ID NO: 15454 - DNA, 4974 bp, Oryza sativa
  Clone ID: TFbOSC31735j.C1.o1.np
atgactgtactcctactctgtaataaagagacctctgttgctatgatattctgtcttcctgtgataccagcattgtttcctgggactggtatcgatgaacagatggcagtgaacgccagcttcagttcccacggttttggtgagggtcaccacgtcgctcagcttcgtgacctcgcccgcttccttggcttctcgtgtcctgagtacacggggtactctgtggaccgtgttccctctcgttatgagctttcggtgtacctttaccctcgtggaggtatacacggggctggccttcgcccacaccacttcactgtggccaggcccactctccagatcgcccaccgcctcgggggctctgcctttcggcagctcctgcgccttccttctggccgcactgacactaggtacccttgcccgtacagcgagtctcagcctgtgctgactcgcatggttgagctctctgaggctcaggccacccagcacgaccttctccttgaggcttaccgctcccttgctcgccgctacgctgctttggaggcccgcctggccgaggagggtgtcacctcagttgacactgcctcttgggacttaggtcgcctctgccacgccagccacctgtcttcccacagctcccgcggctctgttcgcactcccagtggcccgcgcacccccagttcgcgtgtgccgtactccccagtgcactctccctaccctcacccagttagcccttcctacactcctggtcacaccccagttgcttcctcctgccgtggcccacgctttatccgcactgtgcggaagcgtgttgttggttcttccactgtgttccgctttgaccacccagctcgcccaccgccagcagcccgtgctgctgccggccctcgacaagttccgccgatctcttcgcgtcagccgatcgacgtctcttcgactgaggagccgactacaggagcccatttcggttttgaggaaggtagagttgagccagaagcaaatcatgagtcagctaatgagcagtctcaccacagcaaccgttcgcaccatactgcttcccgcaatgcagaagttgagcaaccccaccgcagcaaccgctcgcaccgcacagtttcccgtaatgcagaagtggaacagtctcaccgctctccccgcgctgccattcacaattctagggaagaacgcattccttccccaccccatgttgagaacaacatgcagcacttgatggcagttcagactcaaatcttgcaaggtttagccacagccatagccggtattcagcacaacgcgcatggaaatggccatccccacacgggcaacaacagatctaagctgacagactttctaaggtctcgtccgccagagttctcccagaccgtcgagcccgttgaggctgacgattggctgaaagatgttgagagaaaactcaacttagtgcagtgtactcctgttgagaagacgctctacgcctctcaccagctaagaggacctgctgcagattggtgggagaattattgcaacgcacaccccgaacccactaacattccatgggatgaattcgctgcagctttccgtgcagctcatgtgcctgaaagcactattgacatgaagaaggaagaatttaacaggctcaagcaaggcaataccagtgtcaatgagtatatgagtcagttcaacaagttggctcgatacgctcctgaggaagtggacacagacaagaagaagatcaggaagttcttgaaaggagtcacaagacttctacttgaggatgccagaaaagaggctaccgaggagtataagaaacgcaagtctacccatcagggaaattcttcccgaggggaacctcgccctcgctttggacaacccatgcaatatcaccagtcagtcactcaggctaaccgccagccaagctatgcccctcgtcctcagatgaatcgtctggcacctcagccgcagcagcgtgccccaagtggcaataccgcgccaaacagtgttacctctttcaagtcaccgccaggactatcagcagttcagtgtttccggtgcaaccagatgggtcactatgccagacagtgccctcagaatcttaccaactccaactcagggcataccaatggcagcaccgccagaactcctactcctgcagcagctcagtcccgtcctagcacgcaggcaagtggacaaggttcccgtgcttccaacaactttggtcgagaccgagtgaaccacattcaagccgagaccgctcaggacgctccagacgttgttatgggtatgttctctgtcaactccgcacccgcaatagttctgtttgattcaggagcatcccattctttcatatcgcaagcttttgtgaaaagaaatggttggaaaacccaaaatttgcgagtaccaatgatagtacattcccctggaagggatataagggcaactaaaatatgctcggaagttaaccttagaattgaggaagttgacttcctagccaaaccgatagtcctagactcgcaaagcttggacatcattcttgggatggattggttggctaagcacaaaggacagatagattgtgccgaaaggtccatcaccttgcaaggacctggaggaaagcaagttcgctttacccccaacactcttactgcaagtcggtctatcctaaccagtttgcaagccacttctttggaatcggtacccatagtctgtgaatatcccgacgtatttccaaaagaattaacggaaatgccaccaaaccgagagattgagttcgccatagaactggcactaggcaccgcaccaattgcaaaaagtccctaccgaatggcagctaatgaattagcagaagtcaaaaagcagatcgaagaattggagagtaaaggttatgtgcgacctagctcatccccttggggagccccagtgcttctggttaagaaaaaggatggctctgagagaatgttgaaaatcagatatgaagatatcccgaagaccgctttctcaacgcgctatgggctgtatgagttcacagtgatgtccttcggactcaccaatgctccagcattcttcatgaacctgatgaacaaaatcttcatggagtacctggaccagtttgttgtggtattcatcgatgacatcctgatatactccaagaatgaggaagaacatgttgaacacctgaggctgataatggagaagctaagagatcatcaattgttcgctaagttctcaaaatgcgaattctggctggaccgagtagcattccttggtcacgtgatctcctctaacggtgtcgaagtagatcccagcaaggttgaagctgtccttgcttggtatcctcccaagaatgagtcagagatccgcagtttccttggcctagctggttactatcgaagattcatcgaagggttctctaagctagccagacctatgaccgagctgttaaagaaggaaaagaagtttgaatggtcagcagcctgtgaagacagctttcaagaaatgaagaaaagattgaccactgccccagttctcaccttgccagatatccgaaaagatttcgaaatcttctgtgatgcatcaagacaaggcttaggatgtgtcctaatgcaagagcgaaaggttgtggcctacgcatccaggcagcttaggcctcacgaagtcaactatcccacccatgatctcgagttggcagccgtggttcatgctcttaagatctggaggcactatttaatcgggaacagatgtgaagtatacaccgatcacaaaagtcttaagtacatcttcactcagaccgagttaaatatgaggcagagaagatggttggaactaatcaaggattacgatcttggaattcattaccatcccggtaaagctaatgtggtcgctgatacgctaagtcgcaagacctattgcaatgcagctcaaatatggccagaccaagatcgcctgtgcagagaattggagaagttaaggctgaccgtggtgcagtcaggtgtccctgccagcttgacagtgcagcctaccctagaatcgcaaatccgggaagctcagaaagatgatgaagggataaaagagctaataaaaagaatacagaagatgaaggacaccgatttctccatagacgatcaaggcacagtttggtgcggtccacgcatctgtgtaccggccaagaaggagttaagagacctcattttaaaagaagctcatgagtccgcctactccatctatccaggaagtacgaagatgtaccaggatatcaaggcatatttctggtgggttggaatgaagcgagatgtcgcagaatacgtagccctttgtgacatttgccagagagtcaaggcagagcatcagaggccagctggtctgctgcaacccctaccgattcccgagtggaaatgggaagagatcggaatggatttcataaccggtttgccaagaacccctagcgggtacgactccatctgggtaatcgtggatcgactcacgaaatcggcacatttcgtgccagcgaaaaccacctttgatggaaagaaactggcagaactctacatgacccatgtcgtgtgtcgatttggttgtcccaagaagattgtgtcggatcgaggcactcagttcacctcaagttatcaggccagcattcagatgtcgccgaatgaggcaatgttcggaagaaagtgccgcactcccttgtgctggaataaggttggcgaagcactggtgttcggtcctgacatactcaaggcagcagaagaacaagttaagctgatccgacaatgtttaaagacaactcagaaccgtcagaagaattacgctgacaatcggaggcgtgaccttgagtttgaaaaaggagatcttgtgtacttgcgggtatcacctctccgtggaatgaggaggtttgggatgtccggcaagttagcaccccgctacatcggcccctacctcataaccgccagacgtggtgtcacgccccgaactagccccgagcggaac

SEQ ID NO: 15455 - DNA, 4721 bp, Oryza sativa
  Clone ID: TFbOSC33740j.C1.o1.np
atggctagccgcccccgccgtgcagctcgtgcaccagcccgctttggttttgaagatggtagagttgaagcagaagcaaatcatgaatcagctaatgagcagtctcaccacagcaaccgttcgcaccgtactgtttcccgcaacgcagaggttgagcaaccccgccgcagcaaccgctcgcatcgcatagttttccgtaatgcagagatggaacagtctcaccgctctcaccacactgccagtcacaattctggagaagaacgcctcccttccccacctcatgtggaaaacaacatgcaacacataatggcagttcagacacaaatcttgcaaggaataaccacagccatagccggttttcagcataatgcgcatggaaatggccaccctcacgtgggcaacaatagatccaagctcacagactttctgaggtcacgtccgccagagttctctcagaccgtcgagcccgtcgaggctgacgattggttgaaagatgttgatagaaaactcaacttagtgcagtgtactcctgttgagaagacgctctacgcctctcaccagctaagaggacctgctgcagattggtgggagaattactgcaatgcacatcctgaacccactaacattgcttgggatgagtttgctatggctttccatgcagctcatgtgcctgaaagcactattgacatgaagaaagaagaattcaacagacttaagcaaggcaacagcagtgtcaatgagtacctaagtcagttcaacaagttggctcggtacgcccctgaggaagtagacacagataagaagaagatcaggaaattcttgaagggaatcgcagttggaatgagactccagttgcttgctcatgacttccccacttttcaacatatgatcaacaaggcacttctgcttgaggatgccagaaaagaggctaccgaagaatacaagaaacgcaagtcgcaagtctaaccatcagggaaattcttcccgaggcgcacctcgccctcgctacggtcaacccatgcaataccaccagtcggtcactcaggctaaccgacagccaggctacgcccctcgtcctcagatgaaccgtccggcacctccgccacagcagcgtgcccctagtggcaacactgcgccaaacagtgttacctccttcaagtcaccacagggaccgtcagcagttcagtgtttccggtgcaaccagatgggtcactatgctagacagtgccctcagaatcctaccaacaccaactcagggcatgctaatggcagcaccgccagaactcctactccagcggcagctcagtctcgtcctagctctcaggcaagtggataaggttctcgtgcttccaaccactttggtcgaggacgtgtgaatcacattcaagctgaaaccgctcaggatgctccagacgttgtgatgggtatgttctctgtcaactccgtacccgcaatagttctatttgattcaggagcttcccattctttcatatcacaagcttttgtgaaaagaaatggttggaaaacccaaaatttgcgtgtaccaatgatagtacattcccctgggaggaatataagggcaactcaaatatgcccggaagttaaccttagaattgaggaagttgactttctagccaaaccgataatcctagactcgcaaagcttggacatcatcctagggatggattggttggctaagcacaaaggacagatagattgtgccgaaaagtccatcactttgcaaggacctggaggaaagcaagtccgctttacccctaacacccctaccgcaagtcggtctatcctaacctgtttacaagtcacctccttggagtcggtgcccatagtctgtgaatatcccgacgtatttccagaagaattaacgagtatgccaccagaccgagagattgagttcgccatagaactggcaccaggcacagctccaattgcaaaaagaccctaccgaatggcagctaatgagttagcagaagtcaaaagacaaatcgaagagttggagagtaaaggttatgtgcgacctagctcatctccttggggagccctagtgcttctggttaagaaaaaggatggctctgagagaatggtaatcgactatagagccctgaatgaagtaactataaagaacaagtacccgttgccacggattgacgatttattcgatcaacttaaaggagcaagagttttctcaaaaattgacttgaggtcaggttaccaccaactgaaaatcagatctgaagatatcccgaagaccgctttctcaacgcgttatggtctatatgagttcacagttatgtccttcggactcaccaatgctccagcattcttcatgaacttaatgaaccaaatcttcttggaatacctggaccagtttgtcgtggtgttcatcgatgacatcctgatatactccaagaacgaggaagaacatactgaacacctgaggctgataatggaaaagctcagagatcatcaactattcgctaaattctcgaaatgcgaattctggttggaccgagtagcatttcttggacacgtgatttcctccaacggtgtcgaagtagatcccagcaaggttgaagctgtacttgcttggaacccgcccaagaacgtgtcagaaatccgcagcttccttggcttagcgggatattatcgaagattcattgaaggattctctaagctagccagacctatgaccgaactgttaaagaaggaaaagaaatttcaatggtctgcagcctgtgaagacagctttcaagaaatgaagaaaaggttgaccactgcaccagttctcaccttgccagatatccgaaaagatttcgagatcttctgtgacgcatcaagacaaggcttaggatgtgtcctaatgcaagaacgaaaggttgtggcctatgcatccaggcagctcaggcctcatgaagtcaattatcccacccatgatctcgaattggcagccgtggttcatgctcttaagatctggaggcattatttaatcgggaacagatgtgaagtatacaccgatcacaaaagtcttaaatatatcttcacacagaccgagttaaatatgaggcagagaagatggttggaactaatcaaggattacgatcttggaatccactatcatcctggtaaagccaacgtggtcgctgatgcgctaagtcgcaaggcctattgcaatgtagctcaaatacggcctgaccaagagcatttgtgcagagaattggagaagttaaggctgaccgtggtacagtcaggagtccctgccagcttgacagtacagcctaccctagaatcgcaaatccgggaggctcagaaagatgacgaagggataaaagagttaataaaaagaatacaggagaagaaagacaccaatttctccatagacgatcaaggcacagtttggtgcggtccacgcatctgtgtaccggccaagaaggagttaagagatctcatcctaaaggaagctcatgagtccgcttactccattcatccaggaagtacgaagatgtaccaagatatcaaggcatacttttggtgggctggaatgaagcgagatgtcgcagaatatgtagccttgtgtgacatttgccaaagagtcaaggcagagcatcagaggccagctggtatgctgcaacccctaccgattcccgagtggaaatgggaagagatcggaatggatttcatcaccggtttgccaagaacccccaacgggtacgactccatttgggtaatcgtggaccgactcacgaaatcagctcatttcgtgccagtgaaaaccacctatgatggaaagaaactagcagaactctacatgacccatgtcatgtagatttggctgtcccaagaaaattgtgtcagaccgaggcactcagttcacctcaaggttctggaagcagttgcatgaagccctcggaactgatctgaattttagtacagcctaccatccgtagaccgatggtcagaccgaaagggtaaaccaaatcctagaagacatgctacgtgcgtgtgccttggatttcgaaggcacttgggatcgttgtttgccgtatgccgagttctcatacaacaacagttatcaggccagcattcagatgtcgccgaatgaggcaatgttcggaagaaagtgccgcacccccttgtgctggaatgaggtgggcgaagcactggtattcggtcctgacatactcaagtcagcagaagaacaagttaagctgatacgagaacgtttgaagacagcacagaaccgttagaagaattacgctgacaatcggaggcgtgaccttgagttcgaaaaaggagatcatgtgtacctgcgggtatcacccctccgtggtatgagaaggtttgggatgtccggcaagttagcaccccgctacatcggcccctacctcataacggccagacgtggcgaagtggcttatcagcttgagctacctgaaggtctcgcagatgtgcacaacgtgttccacgtatcccagttaaagaaatgtcttcgagttccagaagagcaagttcccctgggtaatatcgagctggaaaagaatctgacctacaaggaaagaccgatcaaggttcttgaagaggcagaacatcagactcgaaggaagaccatcaagttctacaaagtccaatggagcaatcattctgaagatgaggcaacctgggaacgagaagatcttctccgcgccgagtttccggagctgttccct

SEQ ID NO: 15456 - DNA, 477 bp, Oryza sativa
  Clone ID: TFbOSC34202j.C1.o14.gm
atggggagggaaggagaaggggaggccgggggtttaaggaggcggcaatgtcggtttggggaaccgacttgcgcggtcaagagcgcgagctggcgctcggctagcggccaaattggcgacagggaggatgacgccggcggagaggcgtgcgcagaggctgacggcggcggcgaccgggcggtcggccacgcgcgcgcggctcgcaacgggaaggcgcggcggatggtgcggcgcggctcggcacgcgcgctggctgcggggccgagcggctgcaggctgcagggcggcagggcagcgggaccgggcggcatccacgcgggcgcgcgcgagcaacggcccgcggggagcggcagcgagggatggggagacggagagcgagggggggcgctcggggcggcgcgcgagcagcgaattggattcggagatgaactcgacgatagatcggggattgagatcatgagatggcacgggcactag

SEQ ID NO: 15457 - DNA, 5331 bp, Oryza sativa
  Clone ID: TFbOSC400014j.C1.o36.fg
atggcagtgaacgccagcttcagttcccacggttttggtgagggtcaccacgtcgcccagcttcgtgacctcgcccgtttccttggcttctcgtgtcccgagtacacggggtactccgtggaccgtgttccccctcactgtgagctctctgtgtacctttacccccgtggaggtatacacggagctggccttcgcccccaccacttcactgtggccaggcccaccctccagatcgcgtaccaggacctctcctggactgcgcttcgtcgcctggcccacgactacagccaccgtctcggaggctccgccttccggcagcttccacgtcttccttctggccactcagacgccaggtacccttgtccgtacagcgagtctcagccagtgctgactcgcatggtcgagctttcggaggctcaggccactcagcacgacctactccttgaggcttaccgctcccttgctcgccgctacgccgctttggaggcccgtctggccgaggagggtgtcacctcagttgacactatctcttgggactcaggccgtctctgccacgccagccacctgtcctcccacagctcccgcggctctgctcgcactcccagtggcccgcgctcccccagctcgcgtgcgccgtactcaccagtgtactccccctacccacacccagttagcccttcctacacccccggacacactccagtcgcttcctcccgccgtggcccacgctttatccgcactgcgcggaagcgtgttgttgaggttgagcaacctcgccgcagcagccgctcgcatcgcacagtttcccgtgaagcagagttggagcagtctcaccgccctcaccgcactgccagtcacaattctggagaagaacgcctcccttccccacctcatgtggaaaacaacatgcaacacataatggcagttcagacacaaatcttgcaaggtctaaccacagccatagccagctttcagcataatgcgcatggaaatggccaccctcacatgggcaacaatagatccaagctgacagactttctgaggtcacgtccaccagagttctctcagaccgtcgagcccgtcgaggctgacgattggttgaaagatgttgataggaaactcaacttagtgcagtgtactcctgttgagaagacgctctacgcctctcaccagctaagaggacctgccgcagattggtgggagaattactgcaatgcacaccctgaacccactaacattgcttgggatgagttcgctacggctttccgtgcagctcatgtgcctgaaagcactattgacatgaagaaagaagaatttaacagacttaagcaaggccacagcagtgtcaatgagtacctgagtcagttcaacaagttggctcggtacgcccctgaggaagtagacaccgataagaaaaagatcaggaaattcttgaaagaaatcgcagttggaatgagactccagttgcttgctcatgacttccccacttttcaacatatgatcaataaagcacttctacttgaggatgccagaaaagaggccaccgaagaatacaagaaacgcaagtctaaccatcagggaaattcttcccgaggcgcacctcgccctcgctacggtcaacccatgcaataccatcagtcggtcactcaggctaaccgccagccaggctacgcccctcgtcctcagataaaccgtccggcacctcagccacagaagcatgcccctagtggcaacactgcgccaaacagtgttacctccttcaagtcaccacaaggaccgtcagcagttcagtgtttccggtgcaaccagatgggtcactatgctagacagtgtcctcagaatcctaccaacaccaactcagggcatgctaatggcagcaccgcccgaactcctactccagcggcagctcagtctcgtcctagctctcaggcaagtggacaaggttctcgtgcttccaaccactttggtcgaggacgtgtgaatcacattcaagctgaaaccgctcaggatgctccggacgttgtgatgggtatgttctctgtcaactccgtacccgcaatagttctgtttgatttgggagcttcccattctttcatatcgcaagcttttgtgaaaagaaatggttggaaaacccaaaatttgcgtgtaccaatgatagtacattcccctggaaggaatataagggcaactcaaatatgcccggaagttaaccttagaattgaggaagttgacttcctagccaaaccgatagtcctagactcgcaaagcttggacatcatccttgggatggattggttggctaagcacaaaggacagatagattgtgccgaaaagtccatcaccttgcaaggacctggaggaaagcaagtccgctttacccctaacacccctaccgcaagtcggtctatcctaacctgtttgcaagtcacctccttggagtcggtgcccatagtctgtgaatatcccgacgtatttccggaagaattaacaagaatgccaccagaccgagagatcgagttcgccatagaactggcaccaggcacagctccaattgcaaaaagaccctaccgaatggccgctaatgagttagcagaagttaaaagacaaatcgaagaactggaaagtaaaggttatgtgcgacctagctcatccccttggggagccccagtgcttctggttaagaaaaaggatggctatgagagaatggtaattgactatagagccctgaatgaagtaactataaagaacaagtacccgttgcctcggattgacgacttattcgatcaacttaaaggagcaagagtcttctcaaaaattgacttgaggtcaggttaccaccaactgaaaatcagatctgaagatattccgaagaccgctttctcgacgcgatatggtctatatgagttcacagtaatgtccttcggactcaccaatgctccagcattcttcatgaacttaatgaacaaaatctttatggaatacctggaccagtttgtcgtggtattcatcgatgacatcctgatatactctaagaacgaggaagaacatgctgaacacctgaggctgataatggaaaagctcagagatcatcaactattcgctaaattctcgagatgcgaattctggttggaccgagtagcatttcttggacacgtgatctcctccaacggtgtcgaagtagatcccagcaaggttgaagctgtacttgcttggaacccgcccaagaatgtgtcagagattcgcagcttccttggcttagctggatattatcgaagattcattgaaggattctctaagctagccagacctatgaccgagctgttaaagaaggaaaagaaatttcaatggtctacagcctgtgaagacagctttcaagaaatgaagaaaagattgaccactgccccagttctcaccttgccagatatccgaaaagatttcgagatcttctgtgacgcatcaagacagggcttaggatgtgtcctaatgcaagaacgaaaggttgtggcctatgcatccaggcagctcaggcctcatgaagtcaattatcccacccatgatctcgagttggcagccgtgattcatgctcttaagatctggaggcactacttaatagggaacagatgtgaagtatacaccgatcacaaaagtcttaaatatatcttcacacagaccgagttaaatatgaggcagagaagatggttggaactaatcaaggattacgatcttggaatccactatcatcctggtaaagccaacgtggtcgctgatgcgctaagtcgcaaggcctattgcaatgtagctcaaatacggcctgaccaagatcatctgtgcagagaattggagaagttaaggctgaccgtggtacagtcaggtgtccctgccagcttgacagtacagcctaccctagagtcgcaaatccgggaggcacagaaagacgacgaaggggtaaaagaattaataaagagaatacaggagaagaaagacaccaatttctccatagacgatcaaggcacagtttggtgcggttcacgcatctgtgtaccggccaagaaggagttaagagatctcatcctaagggaagctcatgagtccgcctactccattcatccaggaagtacgaagatgtaccaagatatcaaggcatacttttggtgggctggaatgaagcgagatgtcgcagaatacgtagccttgtgtgacatttgccaaagagtcaaggcagagcatcagaggccagctggtctgttgcaacccctaccgattcccgggtggaagtgggaagagatcggaatggatttcatcaccggtttgccaagaacccccagcgggtacgactccatttgggtaatcgtggaccgactcacgaaatcagctcatttcgtgccagtgaaaaccacctatgatggaaagaaactagcagaactctacatgacccatgtcgtatgtagatttggctgccccaagaaaattgtgtcagaccgaggcactcagttcacctcaaggttctggaagcagctgcatgaagccctcggaactgatctgaattttagtacagcctaccacccgcagaccgatggtcagaccgaaagggtaaaccaaatcctagaagacatgctacgtgcgtgtgccttggatttcgaaggcacttgggatcgttgtttgccatatgccgagttctcatacaacaacagttatcaggccagcattcagatgtcaccgaatgaggcaatgttcggaagaaagtgccgcacccccttgtgctggaatgaggtgggcgaagcactggtattcggtcctgacatactcaagtcagcagaagaacaagttaagctgatccgagaacgtttgaagacagcgcagaaccgccaaaagaattacgctgacaatcggagacgtgaccttgagttcgaaaaaggagatcatgtgtacctgcgggtatcaccactccgtggtatgagaaggtttgggatgtccggcaagttagcaccccgctacatcggcccctacctcataaccgccagacgtggcgaagtggcttatcagcttgagctacctgaaggtctcgcagatgtgcacaacgtgttccacgtatcccagttaaagaaatgtcttcgagttccagaagagcaagttcccctgggtaatatcgagctggaaaagaatctgacctacaaggaaagaccgatcaaggttcttgaaaaagcagaacgtcagactcgaaggaagacaatcaagttctacaaagtccaatggagcaatcattctgaagatgaagcaacctgggaacgagaagatcttctccgcgccgagttttcggagctgctcccttag

SEQ ID NO: 15458 - DNA, 5013 bp, Oryza sativa
  Clone ID: TFbOSC400028j.C1.o11.fg
atggcagtgaactccagcttcagttcccacggttttggtgagggtcaccacgtcgctcagcttcgtgacctcgcccgtttcctcggtttctcgtgtcccgagtacacggggtactccgtggaccgtgttccccctcactgtgagctctctgtgtacctttacccccgtggaggtatacacggagccggccttcgcccacaccacttcaccgtggccaggcccactctccagatcgcgtaccaggacctctcctggactgcgcttcgtcgcctggcccacgactacagccaccgtctcggaggctccgccttccggcagcttccacgccttccttctggccactcagacgccaggtacccttgtccgtacagcgagtctcagccagtgctgactcgcatggttgagctttcggaggctcaggccactcagcacgacctactccttgaggcttaccgctcccttgcccgccgctacgccgctttggaggcccgtctggccgaggagggtgtcacctcagttgacactatctcctgggactcaggccgcctctgtcacgccagccacctgtcctcccacagctcccgtggctctgcccgcactcccagtggtccgcgctcccccagctcgcgtgcgccgtactcaccagtgtactccccctacccacacccagttagcccttcctacacccccggacacaccccagttgcttcctcccgccgtggcccacgctttatccgcaccgcgcggaagcgtgttgttggttcttccaccgtgttccgtttccactacccagctcccccaccgccagcggcccgtgctgctgccggccctcgacagacacaaatcttgcaaggattagccgcagccatagccggttttcagcataatacgcatggaaatggccaccctcacatgagcaacaatagatccaagctgacagactttctgaggtctcgtccgccagagttctctcagaccgtcgagcccgtcgaggctgacgattggctgaaagatgtggatagaaaactcaacttagtgcagtgtactcctgttgagaagacgctctacgcctctcaccagctaagaggacccgctgcagattggtgggagaattactgcaatgcacaccctgaacccactaacattgcttgggatgagtttgctacggctttccgtgcagctcatatgcctgaaagcactattgacatgaagaaagaagaattcaacagacttaagcaaggcaacagcagtgtcaatgagtacctaagtatgttcaacaagttggctcggtacgcccctgaggaagtggacacagacaagaagaagatcaggaaatttttgaaggggatcgcagttggaatgagactccagttgcttgctcatgactttcccacctttcaacatatgatcaacaaggcacttctacttgaggatgccagaaaagaggctatcgaagaatacaagaaacgcaagtctaaccatcagggaaattcttcccgaggcgcacctcgccctcgctacggtcagcccatgcaatatcaccagtcggtaactcaggctaaccgccagccaggctacgcccctcgtcctcagatgaaccatccggcacctcagccacagcagcgtgcccctagtggcaatactgcgccaaacagtgttacctcttttaagtcaccacagggaccgtcagcagttcagtgcttccggtgcaaccagatgggtcactatgccagacagtgtcctcagaatcctaccaacaccaactcagtacatgctaatggcagcactgccagaactcctactccagcgacagctcagtctcgtcccagctctcaggcaagtggacaaggttcacgtgcttccaaccactttggtcgaggacgtgtgaaccatattcaagctgaaaccgctcaggatgctccagacgttgtgatgggtatgttctctgtcaactccgtacccgcaatagttctgtttgattcaggagcttcccattctttcatatcacaagcttttgtgaaaagaaatggttggaaaacccaaaatttacgtgtaccaatgatagtacattcccctggaaggaatataagggcaactcaaatatgcccggaagttaaccttaaaattgaggaagttgacttcctagccaaaccgatagtcctagactcgcaaagcttggacatcatcctaggtatggattggttggctaagcacaaaggacagatagattgtgccgaaaagtccatcaccttgcaaggacctggaggaaagcaagtccgctttacccctaacacccctaccgcaagtcggtctatcctaacctgtttacaagtcacctccttggagtcggtgcccatagtctgtgaatatcccgacgtattcccagaagaattaacgagtatgccaccagaccgagagattgagttcgctatagaactggcaccaggcacggctccaattgcaaaaaggccctaccgaatggcagctaatgagttagcagaagttaaaagacaaatcgaagagttggagagtaaaggttatgtgcgacctagctcatccccttggggagccccagtgcttctggttaagaaaaaggatggctctgagagaatggtaattgactatagagccctgaatgaagtaactataaagaacaagtacccgttgccacggattgacgatttattcgatcaacttaaaggagcaagagttttctcaaaaattgacttgaggtcaggttaccaccaactgaaaatcagatctgaagatatcccgaagaccgctttctcaacgcgttatggtctatatgagttcacagtaatgtccttcggactcaccaatgctccagcattcttcatgaacttaatgaacaaaatctttatggaatacctggaccagtttgtcgtggtgttcatcgatgacatcctgatatactccaagaatgaggaagaacacgctgaacacctaaggctgataatggaaaagctcagagatcatcaactattcgctaaattctcgaaatgcaaattctggttagatcgagtagcatttcttggacacgtgatctcctcccacggtgtcgaagtagatcccagcaaggttgaagctgtacttgcttggaacccgcccaagaatgtgtcagagattcgcagcttcctaggcttagctggatattatcgaagattcattgaagtattctctaagctagccagacctatgaccgagctgttaaagaaggaaaataaatttcactggtctgcatcctgtgaagacagctttcaagaaatgaagaaaaggttgaccactgccccagttctcaccttgccagatatccgaaaagatttcgagatcttctgtgatgcatcaagacaaggcttaggatgtgtcctaatgcaagaacgaaaggttgtggcctatgcatccaggcagctcaggcctcatgaagtcaattatcccacccatgatctcgagttggcagccgtggtgcatgcccttaagatctggaggcactatttaatcgggaacagatgtgaagtatacaccgatcacaaaagtcttaagtatatcttcacacagaccgagttaaacatgagacagagaagatggttggaactaatcaaggattacgatcttggaatccattatcatcctggtaaagccaacgtggtcgctgatgcgctaagtcgcaaggcctattgcaatgtagctcaaatacggcctgaccatgatcacctgtgcagagaattggagaagttaaggctgaccgtggtacagtcaggtgtccctgccagcttgacagtacagcctaccctagagtcgcaaatccgggaggctcagaaagacaacgaagggataaaagaattaataaaaaggaatacaggagaagaaagacaccaatttctccatagacgatcaaggcacagtttgaaggagttaagagatctcatcctaaaggaagctcatgagtccgcctactccattcatccaggaagtacgaagatgtaccaagatatcaaggcatacttctggtgggctggaatgaagcgagatgtcgcagaatacgtagccttgtgtgacatttgccaaagagtcaaggcagagcatcagaggccagctggtctgctgcaacccctaccgattcccgagtggaaatgggaagagatcggaatggatttcatcaccggtttgccaagaacccctaacgggtacgactccatctgggtaatcgtggatcgactcacgaaatcagctcatttcgtgccagtgaaaaccacctttgatggaaagaaactagcagaactctacatgacccatgtcgtgtgtagatttggctgtcccaagaaaattgtgtcggaccgaggcactcagttcacctcaaggttctggaagcagttgcatgaagccctcggaactgatctaaaatttagtacagcctaccatccgcagaccgatggtcagaccgaaagggtaaaccaaatcctagaagacatgctacgagcgtgtgccttggatttcgaaggcacttgggatcgttgtttgccgtacgcggagttctcatacaacaacagttaccaggctagtattcagatgtcgccgaatgaggcaatgttcggaagaaagtgccgcactcccttgtgctggaatgaggtgggcgaagcactgttagcaccccgctacatcggcccctacctcataaccgccagacgtggcgaagtggcttatcagcttgagttacctgaaggtctcgcagatgtgcataacgtgttccacgtatcccagctaaagaaatgtcttcgagttccagaagagcaagtccccctgggtaatatcgaactggaaaagaatctgacctacaaggaaagaccgatcaaggttcttgaagaggcagaacgtcagactcgaaggaagaccatcaagttctacaaagtccaatggagcaatcattttgaagacgaggcaacctgggagcgagaagatcttctccgcgccgagttcccggagctgctcccttag

SEQ ID NO: 15459 - DNA, 5490 bp, Oryza sativa
  Clone ID: TFbOSC400049j.C1.o32.fg
atgcccacggtcatgggcggatgtgagatggcagtgaacgccagcttcagttcccacggttttggtgagggtcaccacgtcgctcagcttcgtgacctcgcccgtttccttggcttctcgtgtcccgagtacacggggtactccgtggaccgtgttccccctcactgtgagctctccgtgtacctctaccctcgtggaggtatacacggagctggccttcgcccccaccacttcatcgtggccaggcccactctccagatcgcgtaccaggacctttcctggactgcgcttcgtcgcctggcccacgactacagccaccgtctcggaggctccgccttccggcagcttccacgccttccttctggccactcagacgccaggtacccttgtccgtacagcgagtctcagccagtgttgactcgcatggttgagctttcggaggctcaagccactcagcacgacctactccttaaggcttaccgctccctggcccgccgctacgccgctttggaggcccgtctggccgaggagggtgtcacctcagttgacactatctcctgggactcaggccgcctctgccacgccagccacctgtcctcccacagctcccgcggctctgcccgcactcccagtggcccgcgctcccccagctcgcgtgcgccgtactcaccagtgtactccccctacccacacccagttagcccttcctacacccccggacacaccccagttgcttcctcccgccgtggtccatgctttatccgcactgcgcggaagcgtgttgttggttcttccaccgtgttccgtttccaccacctagctcccccaccgccagcgatggctagccgcccccgccgtgcagcttgtgcgccagcccgcttcggttttgaagaaggtagagtcaaaccagaagcaaatcatgaatcagctaatgagcagtctcaccgcagcaaccgttcgcaccgtactgtttcccgcaacgcaaaagttgagcaaccctgccgtagcaaccgctcacatcgcacagcttcccgtgatgtagagatggaacagtctcaccgctctcaccgcactgccagtcacaattctggagaagaatgcctcccttccccacatcatgtggaaaacaacatgcaacacttaatggcagttcagacacaaatcttgcaaggaatagccgcagccgtagccggttataagcataattcgcatggaaatggccaccctcacatgggcaacaatagatccaagctgacagattttctgaggtcacgtccgccagagttctctcagaccgtcgagcccgtcgaggctgacgattggttgaaagatgttgatagaaaactcaacttagtgcagtgtactccggtcgagaagacgctctacgcctctcaccagctaagaggacctgctgcaaattggtgggagaattactgcaatgcacaccctgaacccactaacattgcttgggatgagtttgctacggctttccgtgcagctcatgtgcctgaaagcaccattgacatgaagaaagaaaaattcaacagacttaagcaaggcaacagcagtgtcaatgagtacctaagtatgttcaacaagttggctcggtacgcccttgaggaagtggactcagataagaagaagatcaggaaattcttgaaaggaatcgcagttggaatgagactccagttgctagcgcatgacttccccacttttcaacatatgatcaacaaggcacttctacttgaggatgccagaaaagaggctaccgaagaatacaagaaacgcaaatctaaccaccaggggaattcctcccgaggcgcacctcgccctcgctacggtcaacccatgcaataccaccagtcggtcactcaggctaaccgccagccaggctacgcccctcgtcctcagatgaaccgctcggcaccccagccacagcagcatgcccctagtggcaatactgcgccaaacagtgttacctctttcaagtcaccacagggaccgtcggcagttcagtgtttccggtgcaaccagatgggtcactatgctagacagtgccctcagaatcctaccaacaccaactcagggcatgctaatggcagcactgccagaactcctactccagcggcagctcagtctcgtcttagcactcaggcaagtggacaaggttcacgtgcttccaaccactttggtcgaggctgtgtgaatcacattcgagctgaaaccgctcaggatgctccagacgttgtgatgggtatgttctctgtcaactccgtacccgcaatagttctgtttgattcgggagcttcccattctttcatatcacaagcttttgtgaaaagaaatggttggaaaacccaaaatttacgtgtaccaatgatagtacattcccctggaaggaatataagggcaactcaaatatgcccggaagttaaccttagaattgaggaagttgacttcctagccaaaccgatagtcctagactcgcaaagcttggacatcatcctagggatggattggttggctaagcacaaaggacagatagattgtgccgaaaagtccatcaccttgcaaggacctggaggaaagcaagtccgctttacccctaacactcctaccgcaagtcggtctatcttaacctgtttacaagtcacctccttggagtcggtgcccatagtttgtgaatatcccgacgtatttccggaagaattaacaagaatgccaccagatcgagagattgagttcgccatagaactggcaccaggcaccgcaccaattgcaaaaagaccctaccaaatggcagctaatgagttaacagaagttaaaagacaaatcggagagctggaaagtaaaggttatgtacgacctagctcatccccttggggagccccagtgcttctggttaagaaaaaggatggctctgagagaatggtaatcgactatagagccctgaatgaagtaactataaagaacaagtacccgttgccacggatcgacgatttattcgatcaacttaaaggagcaagagttttctcaaaaattgacttgaggtcaggttaccaccaactgaaaatcagatctgaagatatcccaaagaccgctttctcaacgcgttatggtctatatgagttcacagtaatgtcctttggactcaccaatgctccaacattcttcatgaacttaatgaacaaaatcttcatggaatacctggaccagtttgtcgtggtattcatcgatgacatcctgatatactccaagaacgaggaagaacatgctgaacacctgaggttgataatggaaaagctcagggatcatcaactattcgcaaaattctcgaaatgcgaattctggttagaccgagtagcatttcttggacacgtgatttcctccaatggtgtcgaagtagatcccagcaaggttgaagctgtacttgcttggaacccgcccaagaatgtgtcagagattcgcagcttcctcggcttagctggatattatcgaagattcattgaaggattctctaagctagccagacctatgaccgagctgttaaagaaggaaaagaaatttcgatggtctgcagcctgtgaagacagcttccaagaaatgaagaaaaggttgaccactgccccagttctcaccttgccagatatccgaaaagatttcgagatcttctgtgatgcatcaagacaaggcttaggatgtgtcctaatacaagaacgaaaggttgtggcctatgcatctaggcagctcaggcctcatgaagtcaattatcccacccatgatctcgaattggcagccgtggttcatgctcttaagatctggaggcactatttaatcgggaacagatgtgaagtatacaccgatcacaaaagtcttaagtatatcttcacacagaccgagttaaatatgagacagagaagatggttggaactaatcaaggattacgatcttggaatccactatcaccctggtaaagccaacgtggtcgctgatgcgctaagtcgcaagacctattgcaatgtagctcaaatacggcctgaccaagatcacctgtgcagagaattggagaagttaaggctgaccgtggtacagtcaggtgtccctgccagcttgacagtacagcctaccctagagtcgcaaatccgggaggctcagaaagacgacgaagggataaaagaattaataaaaagaatacaggagaagaaagacaccaatttctccatagacaaccaaggcacagtttggtgcggtccacgcatctgtgtaccggccaagaaggagttaagagatctcatcctaaaggaagctcatgagtccgcctattccattcatccaggaagtacgaagatgtaccaagatatcaaggcatacttctggtgggctggaatgaagcgagatgtcgcagaatacgtagccctgtgtgacatttgccaaagagtcaaggcggaacatcagaggccagctggtctgctgcaacccctaccgattcccgagtggaaatgggaagagatcggaatggatttcatcaccggtttgccaagaacccctaacgggtacgactccatctgggtaatcgtggaccgactcacgaaatcagctcatttcgtgccagtgaaaaccacctttgatggaaagaaactagcagaactctacatgacccatgtcgtatgtagatttggctgtcccaagaagatcgtgtcagatcgaggcactcagttcacctcaaggttctggaaacaattgcatgaagccctcggaaccgatctaaattttagtatggcctaccatccgcagaccgatggcacttgggatcgttgtttgccgtatgctgagttctcatacaacaacagttatcaggccagcattcatatgtcgccgaatgaggcaatgttcggaagaaagtgccacacccccttgtgctggaatgaggtgggtgaagcgctggtattcggtcctgacatactcaagtcagcagaagaacaagttaagctaatccgagaacgtttaaagacagcgcagaaccgtcagaaaagttacgctgacaatcgaaggcgtgaccttgagttcgaaaaaggagatcatgtgtacctgcgggtatcacccctccgtggtatgaggaggtttgggatgtccggcaagttagcaccccgctacatcggcccctacctcataaccgccagacgtggcgaagtggcttatcagcttgagctacctgaagatctcgcagatgtgcacaacgtgttccacgtatcccagctaaagaagtgtcttcgagttccggaagagcaagttcccctgggtaatatcgtgctggaaaagaatctgacctacaaggaaagaccgatcaaggttcttgaagaggcagaacgtcagactcgaaggaagaccatcaagttctacaaagtccaatggagcaaccattctgaagatgaggcaacctgggagcgagaagatcttctccgcgccgagttcccggagctgctcccttag

SEQ ID NO: 15460 - DNA, 5085 bp, Oryza sativa
  Clone ID: TFbOSC400197j.C1.o6.fg
atggcggtgaacgccagcttcagttcccacggtttcggtgagggtcaccacgtcgtccagcttcgtgacctcgcccgtttccttggcttctcgtgttccgagtacacggggtactccgtggaccgtgttccccctcactgtgagctctctgtgtacctttacccccgtggaggtatacacggagctggccttcgcccccaccacttcactgtggccaggcccactctccagatcgcgtaccaggacctctcctggactgtgcttcgtcgcctggcccacgactacagccaccgtctcggaggttccgccttccggcagcttccacgccttccttctggccactcagacgccaggtacccttgtccgtacagcgagtctcagccagtgctgactcgcatggtcgagctttcggaggctcaggccactcagcacgacctactccttgaggcttaccgctcccttgcccgccgctacgccgctttggaggcccgtctggccgaggagggtgtcacctcggttgacactatctcctgggactcaggccgcctctgccacgccagccacctgtcctcccacagctcccgcggctctgcccgcactcccagtggcccgcgctcccctagctcacgtgcgccgtactcaccagtgtactccccctacccacacccagttagcccttcctacacccccggacacaccccagttgcttcctcccgccatggcccacgctttatccgcactgcgcggaagcgtgttgttggttcttccaccgtgttccgtttccgccacccagctcccccaccgatggctagccgcccccgccgtgcagctcgtgcaccagcccgctttggttttgaagatggtagagttgaagcagaagcaaatcatgaatcagctaatgagcagtctcaccacagcaaccgttcgcaccgtactgttttccgcaacgcagaggttgagcaaccccaccgcagcaaccgctcgcatcgcacagttttccgtaatgcagagatggaacagtctcaccgctctcaccgcactgccagtcacaattctggagaagaacgcctcccttccccacctcatgtggaaaacaacatgcaacacataatggcagtacagacacaaatcttgcaaggactaaccacagccatagccagttttcagcataatgcgcatggaaatggccaccctcacgtgggcaacaatagatccaagctgacagattttctgaggtcacatccgccagagttctctcagaccgtcgagcccgtcgaggctgacgattggttgaaagatgttgatagaaaactcaacttagtgcaatgtactcctgttgagaagacgctctacgcctctcaccagctaagaggacctgctgcagattggtgggagaattactgcaatgcacaccctgaacccactaacattgcttgggatgagtttgctacggccttccgtgcagctcatgtgccggaaagcactattgacatgaagaaagaagaattcaacagacttaagcaaggcaacagcagtgtcaatgagtacctaagtatgttcaacaagttggctcggtacgcccctgaggaagtggacacagacaagaagaagatcaggaaattcttgaaggggatcgcagttggaatgagactccagttgcttgctcatgacttccccacttttcaacatatgatcaacaaggcacttctgcttgaggatgccagaaaagaggctaccgaagaatacaagaaacgcaagtctaaccatcagggaaattcttcccgaggcgcacctcgccctcgctacggtcaacccatgcaataccaccagtcggtcactcaggctaaccgccagccaggctacgcccctcgccctcagatgaaccgtccggcacctccgccacagcagcgtgcccctagtggcaacactgcgccaaacagtgttacctctttcaagtcaccacagggaccgtcagcagttcagtgtttccggtgcaaccagatgggtcactatgctagacagtgccctcagaatcctaccaacaccaactcagggcatgctaatggcagcaccgccagaactcctactccagtggcagctcagtctcgtcctagctctcaggcaagtggacaaggtcctcgtgcttccaaccactttggtcgaggacgtgtgaatcacattcaagctgaaaccgctcaggatgctccagacgttgtgatggtctgtgaatatcccgacgtattcctagaagaattaacgagaatgccaccagaccgagagattgagttcgccatagaactggcaccaggcacagctccaattgcaaaaagaccctaccgaatggcagctaatgagttagcagaagttaaaagacaaatcgaagaactggaaagtaaaggttatgtgcgacctagctcatccccttggggagccccaatgcttctggttaagaaaaaggatggctctgagagaatggtaatcgactatagagccctgaatgaagtaactataaagaacaagtacccgttgctacggattgacgatttattcgatcaacttaaaggagcaagagttttctcaaaaattgacttgaggtcaggttaccaccaactgaaaatcagatctgaagatatcccgaagaccgctttctcaacgcgttatggtctatatgagttcacagttatgtccttcggactcaccaatgctctagcattcttcatgaacttaatgaacaaaatcttcatggaatacctggaccagtttgtcgtggtgttcatcgatgacatcctgatatactccaagaacgaggaagaacatgctgaacacctgaggctgataatggaaaagctcagagatcatcaactattcgctaaattctcgaaatgcgaattctggttagatcgagtagcatttcttggacacgtgatttcctccaacggtgtcgaagtagatcccagcaaggttgaagctgtactttcttggaacccgcccaagaacgtgtcagagatccgcagcttccttggcttagcgggatattatcgaagatccattgaaggattctctaagctagccagacctatgaccgagctgttaaagaaggaaaagaaatttcaatggtctgcagcctgtgaagacagctttcaagaaatgaagaaaaggttgaccactgcaccagttctcaccttgccagatatccgaaaagatttcgagatcttctgtgatgcatcaagacaaggcttaggatgtgtcctaatgcaagaacgaaaggttgtggcctatgcatccaggcagctcaggcctcatgaagtcaattatcccacccatgatctcgagttggcagccgtggttcatactcttaagatctggaggcattatttaatcgggaacagatgtgaagtatacaccgatcacaaaagtcttaaatatatcttcacacagaccgagttaaatatgaggcagagaagatggttggaactaatcaaggattacgatcttggaatccactatcatcctggtaaagccaacgtggtcgctgatgcgctaagtcgtaaggcctattgcaatgtagctcaaatacggcctgaccaagatcatatgtgcagagaattggagaagttaaggctgaccgtggtacagtcaggagtccctgccagcttgacagtacagcctaccctagaatcgcaaatccaggaggctcagaaagatgacgaagggataaaagagttaataaaaagaatacaggagaagaaagacaccaatttctccatagacgatcaaggcacagtttggtgcggtccacacatctgtgtaccggccaagaaggagttaagagatctcatcctaaaggaagctcatgagtccgcttactccattcatccaggaagtacgaagatgtaccaagatatcaaggcatacttttggtgggctggaatgaagcgagatgtcgcagaatacgtagccttgtgtgacatttgccaaagagtcaaggcagagcatcagaggccagctggtctgctgcaacccctaccgattcccgagtggaaatgggaagagatcggaatggatttcatcaccggtttgccaagaacccccagcgggtacgactccatttgggtaatcgtggaccgactcacgaaatcagctcatttcgtgccagtgaaaaccacctatgatggaaagaaactagcagaactctacatgacccatgtcgtatgtagatttggctgtcccaagaaaattgtgtcagaccgaggcactcagttcacctcaaggttctggaagcagttgcatgaagccctcggaactgatctgaattttagtacagcctaccatccgcagaccgatggtcagaccgaaagggtaaaccaaatcctagaagacatgctacgtgcgtgtgccttggatttcgaaggcacttgggatcgttgtttgccgtatgccgagttctcatacaacaacagttatcaggccagcattcagatgtcgccgaatgaggcaatgttcggaagaaagtgccgcacccccttgtgctggaatgaggtgggcgaagcactggtattcggtcctgacatactcaagtcagaagaagaacaagttaagctgatacgagaacgtttgaagacaacacagaaccgtcagaagaattacgctgacaatcggaggcgtgaccttgagttcgaaaaaggagatcatgtgtacctgcgggtatcacccctccgtggtatgagaaggtttgggatgtccggcaagttagcaccccgcctcataactgccagacgtggcgaagtggcttatcagcttgagctacctgaaggtctcgcagatgtgcacaacgtgttccacgtatcccagttaaagaaatgtcttcgagttccagaagagcaagttcccctgggtaatatcgagctggaaaagaatctgacctacaaggaaagaccgatcaaggttcttgaagaggcagaacgtcagactcgaaggaagaccatcaagttctacaaagtccaatggagcaatcattctgatgatgaggcaacctgggaacgagaagatctgctccgcgccgagtttccggagctgctctcttag

SEQ ID NO: 15461 - DNA, 5556 bp, Oryza sativa
  Clone ID: TFbOSC400239j.C1.o3.fg
atggcagtgaacgccagtttcagttcccacggttttggtgagggtcaccacgtcgcccagcttcgtgacctcgcccgtttccttggcttctcgtgtcccgagtacacggggtactccgtggaccgtgttccccctcactgtgagctctctgtgtacctttaccctcgtggaggtatacacggagttggccttcgcccccaccacttcactgtggccaggcccactctccagatcgcgtaccaggacctctcctggactgcgcttcgccgcctggcccacgactacggccaccgtctcggaggctccgccttccggcagcttccacgtcttccttctggccacgcagacgccagatacccttgtccgtacagcgagtctcagccagtgctgactcgcatggtcgagctttcggaggctcaggccactcagcacgacctactccttgaggcttaccgctcccttgcccgccgctacgccgccttggaggcccgtctggccgaggagggtgtcacctcagttgacactatctcttgggactcaggccgtctctgccacgccagccacctgtcctcccacagctcccgcggctctgctcgcactcccagtggcccgcgctcccccagctcgcgtgcgccgtactcaccagtgtactccccctacccacacccagttagcccttcctacacccccggacacactccagtcgcttcctcccgccgtggcccacgctttatccgcactgcgcggaagcgtgttgttggttcttccaccgtgttccgtttccgccacccagctcccccaccgccagcggcccgtgctgctgccggccctcgacagatggctagccgcccccgtcgtacagctcgtgcaccagtccgctttggttttgaagatggtagagttgaagcagaagcaaatcacgaaccagctaatgagcattctcaccacagcaaccgttcgcaccgtactgtttcccgcaacgcagaggttgagcaacctcgccgcagcagccgctcgcatcgcacagtttcccgtgaagcagagttggagcagtctcaccgctctcaccgcactgccagtcacaattctggagaagaacgcctcccttccccacctcatgtggaaaacaacatgcaacacataatggcagttcagacacagatcttgcaaggtctaaccacagccatagccagctttcagcataatgcgcatggaaatggccaccctcacgtgggcaacaatagatccaagctgacagactttctgaggtcacgtccaccagagttctctcagaccatcgagcccgtcgaggctgacgattggttgaaagatgtggatagaaaactcaacttagtgcagtgtactcctgttgagaagacgctctacgcctctcaccagctaagaggacctgccgcagattggtgggagaattactgcaatgcacatcctgaacccactaacattgcttgggatgagttcgctacggctttccgtgtagctcatgtgcctgaaagcactattgacatgaagaaagaagaatttaacagactcaagcaaggccacagcagtgtcaatgagtacctaagtcagttcaacaagttggctcggtacgcccctgaggaagtagacaccgataagaaaaagatcaggaaattcttgaaaggaatcgcagttggaatgagactccagttgcttgctcatgacttccccacttttcaacatatgatcaacaaagcacttctacttgaggatgccagaaaagaggccaccgaagaatacaagaaacgcaagtctaaccatcagggaaattcttcccgaggcgcacctcgccctcgctacggtcagcccatgcaataccatcagtcggtcactcaggctaaccgccagtcaagctacgcccctcgtcctcagatgaaccgtccggcacctccgccacagcagcgtgcccctagtggcaacactgcgccaaacagtgttacctccttcaagtcaccacagggaccgtcagcagttcagtgtttccggtgcaaccagatgggtcactatgctagacagtgtcctcagaatcctaccaacaccagcccaggacatgctaatggcagcactgccagaactcctactccagcggcagctcagtctcgtcctagctctcaagcaagtggacaaggttctcgtgcttccaaccactttggtcgaggacgtgtgaatcacattcaagctgaaaccgctcaggatgctccagacgttgtgatgggtatgttctctgtcaactccgtacccgcaatagtcctgtttgattcgggagcttcccattctttcatatcgcaagcttttgtgaaaagaaatggttggaaaacccaaaatttgcgtgtaccaatgatagtacattcccctggaaggaatataagggcaactcaaatatgcccggaagttaaccttagaattgaggaagttaacttcctagccaaaccgatagtcctagactcgcaaagcttggacatcatcctagggatggattggttggctaagcacaaaggacagatagattgtgccgaaaagtccatcaccttgcaaggacctggaggaaagcaagtccgctttacccctaacacccctaccgcaagtcggtctatcctaacctgtttgcaagtcacctccttggagtcggtgcccatagtctgtgaatatcccgacgtatttccggaagaattaacaagaatgccaccagaccgagagattgagttcgccatagaactggcaccaggcacagctccaattgcaaaaagaccctaccgaatggccgctaatgagttagcagaagttaaaagacaaatcgaagaactggaaagtaaaggttatgtgcgacctagctcatccccttggggagccccagtgcttctggttaagaaaaaggatggctctgagagaatggtaattgactatagagccctgaatgaagtaactataaagaacaagtacccgttgcctcggattgacgacttattcgatcaacttaaaggagcaagagtcttctcaaaaattgacttgaggtcaggttaccaccaactgaaaatcagatctgaagatattccgaagaccgctttctcgacgcgttatggtctatatgagttcacagtaatgtccttcggactcaccaatgctccagcattcttcatgaacttaatgaacaaaatctttatggaatacctggaccagtttgtagtggtattcatcgatgacatcctgatatactctaagaatgaggaagaacatgctgaacacctgaggctgataatggaaaagctcagagatcatcaactattcgctaaattctcgaaatgcgaattctggttggaccgagtagcttttcttggtcacgtgatctcctccaacggtgtcgaagtagatcccagcaaagttgaagctgtacttgcgtggaacccgcccaagaatgtgtcggagattcgcagcttcctcggcttagctggatattatcgaagattcattgaaggattctctaagctagccagacctatgaccgagctgttaaagaaggaaaagaaatttcaatggtccacagcctgtgaagacagctttcaagaaatgaagaaaagattgaccactgccccagttctcaccttgccagatatccgaaaagacttcgagatcttctgtgatgcatcaagacagggcttaggatgtgtcctaatgcaagaacgaaaggttgtggcctatgcatccaggcagctcaggcctcatgaagtcaattaccccacccatgatctcgagttggcagccgtgattcatgctcttaagatctggaggcactacttaatagggaacagatgcgaagtatacaccgatcacaaaagtcttaagtatatcttcactcagaccgagttaaatatgagacagagaagatggttggaactaatcaaggattacgatcttggaatccactatcatcctggtaaagccaacgtggtcgctgatgcgctaagtcgcaaggcctattgcaatatagctcaaatacggcctgaccaagatcacctgtgcagagaattggagaagttaaggctgaccgtggtgcagtcaggtgtccctgccagcttgacagtacagcctaccctagagtcgcaaatccgggaggctcagaaagacgacgaagggataaaagaattaataaaaagaatacaggagaagaaagacaccaatttctccatagacgatcaaggcacaatttggtgcggtccacgcatctgtgtaccggccaagaaggagttaagaaatctcatcctaaaggaagctcatgagtccgcttactccattcatccaggaagtacgaagatgtaccaagatatcaaggcatacttttggtgggctggaatgaagcgagatgtcgcagaatacgtagccttgtgtgacatttgccaaagagtcaaggcagaacaccaaaggccagctggactgctacaacccctaccgattcccgagtggaaatgggaagagatcggaatggatttcatcaccggtttgccaagaacccccagcggatacgactccatttgggtaatcgtggaccgactcacgaagtcagcacatttcgtgccagtgaagaccacctatgatggaaagaaactagcagaactctacatgactcatgtcgtatgtagatttggctgtcccaagaaaatagtgtcggatcgaggcactcagttcacctcaaggttctggaagcaattgcatgaagcactcggaactgatctgaattttagtacggcctaccacccgcagaccgatggtcagacagaaagagtaaaccagatcctagaagacatgctgcgagcatgtgccttggatttcgaaggcacttgggatcgttgttggccgtatgccgagttctcatacaacaacagttatcaggccagcattcagatgtcgcggaatgaggcaatgttcggaagaaggtgccgcactcccttgtgctggaatgaggtgggcgaagcattggtattcggtcctaacatactcaagtcagcagaagaacaagttaagctgatacgagaacgtttgagaacagcacagaaccgtcagaagaattacgctgacaatcggaggcgtgacgttgagttcgaaaaaggagatcatgtgtacctacgggtatcaccactccgaggaatgagaaggtttgggatgtccggcaagttagcaccccgctacatcggcccctacctcataaccgccagacgtggcgaagtggcttatcagcttgagctacctgaaggtctcgcagatgtgcacaacgtgttccacgtatcccagttaaagaaatgtcttcgagttccagaagagcaagttcccctaggtaatatcgagctggaaaagaatctgacctacaaggaaagaccgatcaaggttcttgaagaagcagaacgtcagactcgaaggaagacaatcaagttctacaaagtccaatggagcaatcattctgaagatgaagcaacctgggaacgagaagatcttctccgcgccgagtttccggagctgctcccttag

SEQ ID NO: 15462 - DNA, 3600 bp, Oryza sativa
  Clone ID: TFbOSC400259j.C1.o3.fg
atgggcaacaacagatccaagctgacagactttctgaggtctcgtccgccagagttctctcagaccgtcgagcccgtcgaggctgacgattggttgaaagatgttgatagaaaactcaacttagtgcagtgtactcctgttgagaagacgctctacgcctctcaccaactaagtggacctgccgcagattggtgggagaattactgcaatgcacaccctgaacccactaacattgcttgggatgagttcgctacggctttccgtgcagctcatgtgcctgaaatcactattgacatgaagaaagaagaattcaacagacttaagcaaggcaacagcagtgtcaatgagtacctaagtcagttcaacaagttggctcggtacgcccctgaggaagtagacacagataagaagaagatcaggaaattcttgaaaggaatcgcagttggaatgagactccagttgcttgctcatgacttccccacttttcaacatatgatcaacaaggcacttctacttgaggatgccagaaaagaggctaccgaagaatacaagaaacgcaagtctaaccatcagggaaattcttcccgaggcgcacctcgccctcgctacggtcaacccatgcaataccaccagtcggtcacccaggctaaccgccagccaggctacgcccctcgtcctcagataaaccgtccggcacctcagccacagcagcgtgcccctagtagcgatactgcgcctaacagtgttacctctttcaagtcaccgcagggaccgtcagcagttcagtgtttccggtgcaaccagatgggtcactatgctagacagtgtcctcagaatcctaccaacaccaactcagggcatgctaatggtagcactgccagaactcctactccagcggcagctcagtctcgtcctagctctcaggcaagtggacaaggttcacgtgcttccaacaactttggtcgaggccgtgtgaatcacattcaagcagaaaccgctcaggatgctccagacgttgtgatgggacctggaggaaagcaagtccgctttacccctaacacccctaccgcaagtcggtctatcctaacctgtttacaagtcacctccttggagtcggtgcccatagtctgtgaatatcccgacgtatttccggaagaattaacaagaatgccaccagaccgagagatcgagttcgccatagaactggcaccaggcacagctccaattgcaaaaagaccctaccaaatggcagctaatgagttagcagaagttaaaagacaaatcgaagaactggaaagtaaaggttatgtgcgacctagctcatccccttggggagccccagtacttctggttaagaaaaaggatggctcggagagaatggtaatcgactatagagccctgaatgaagtaactataaagaacaagtacccgttgccacggattgacgatttattcgatcaacttaaaggagcaagagttttctcaaaaattgacttgaggtcaggttaccaccaactgaaaatcagatctgaagatatcccgaagaccactttctcaacgcgttatggtctatatgagttcacagttatgtccttcggactcactaatgctccagcattcttcatgaacttaatgaacaaaatcttcatggaatacctagaccagtttgtcgtggtgttcatcgatgacatcctgatatactccaagaacgaggaagaacatgctgaacacctgaggctgataatggaaaagctcagagatcatcaactattcgctaaattctcgaaatgcgaattctggttggaccgagtagcatttcttggacacgtgatttcctccaacgcctgtgaagacagcttccaagaattgaagaaaaagttgaccactgccccagttctcaccttgccagatatccgaaaatatttcgagatcttctgtgacgcatcaagacaaggcttaggatgtgtcctaatgcaagaacaaaaggttgtggcctatgcatccaggcagctcaggcctcatgaagccaattatcccacccatgatctcgagttggcagccgtggttcatgctcttaagatctggaggcactatttaatcgggaacagatgtgaagtatacaccgatcacaaaagtcttaagtatatcttcactcagaccgagttaaatatgagacagagaagatggttggaactaatcaaggattacgatcttggaatccactatcatcctggtaaagccaacgtggtcgctgatgcgctaagtcgcaaggcctattgcaatgtagctcaaatacggcctgaccaagatcacctgtgcagagaattggagaagttaagactgaccgtgatacagtcaggtgtccctgccagcttgacagtacagcctaccctagagtcgcaaatccgggaggctcagaaagacgacgaagggataaaagaattaataaaaagaatacaggaaaagaaagacacaaatttctccatagacgatcaaggcacagtttggtgcggaccacgcatctgtgtaccggccaagaaggagttaagagatctcatcctaaaggaagctcatgagtccgcctactccattcacccaggaagtacgaagatgtaccaagatatcaaggcatacttctggtgggctggaatgaagcgagacgtcgcagaatacgtagccctgtgtgacatttgccaaagagtcaaggcggaacatcagaggccagctggtctgctgcaacccctaccgattcccgagtggaaatgggaagagatcggaatggatttcatcaccggtttgccaagaacccccaacgggtacgactccatttggatttggctgtcccaagaaaattgtgtcagaccgaggcactcagttcacctcaaggttctgaattttagtacagcctaccatccgcagaccgatggtcagaccgaaagggtaaaccaaatcctagaagacatgctacgtgcgtgtgccttggatttcgaaggcacttgggatcgttgtttgccgtatgccgagttctcatacaacaacagttatcaggccagcattcagatgtcgccgaatgaggcaatgttcggaagaaagtgccgcaccccattgtgctggaatgaggtgggcaaagcattggtattcggtcctgacatactcaagtcagcagaagaacaagttaagctgatacgggaacgtttgaagacagcacagaaccgtcagaagaattacgctgacaatcggaggcgtgaccttgagttcgaaaaaggagatcatgtgtacctgcgggtatcacccctccgtggtatgagaaggtttgggatgtccggcaagttagcaccccgctacatcggcccctacctcataaccgccagacggtgcgaagtggcttatcagcttgagctacctgaaggtctcgcaaacgtgcacaacgtgttccacgtatcccagttaaagaaatgtcttcgagttccagaagagcaagttcccctgggtaatatcgagctggaaaagaatctgacctacaaggaaagaccgatcaaggttcttgaagaggcagaacgtcagactcgaaggaagaccatcaagctctacaaagtctaa

SEQ ID NO: 15463 - DNA, 4923 bp, Oryza sativa
  Clone ID: TFbOSC400530j.C1.o1.fg
atggcagtgaacgccagcttcagttcccacggttttggtgagggtcaccacgtcgcccagcttcgtgacctcgcccgtttccttggcttctcatgtcccgagtacacggggtactccgtggaccgtgttccccctcactgtgagctctcggtgtacctttacccccgtggaggtatacacggagctggcctttgcccccaccacttcactgtggccaggcccactctccagatcgcgtaccaggacctctcctggactgcgcttcgtcgcctggcccacgactacagccaccgtctcggaggttccgccttccggcagcttccacaccttccctctggccactcagacgccaggtacccttgtccgtacagcgagtctcagccagtgctgactcgcatggtcgagctttcggaggctcaggccactcagcacgacctactccttgaggcttaccgctcccttgcccgccgctacgccgctttggaggcccgtctggccgaggagggtgtcacctcagttgacactatctcttgggactcaggccgcctctgccacgccagccacctgtcctcccacagctcccgcggctctgcccgcactcccagtggcccgcgctcccccagctcgcgtgcgccgtactcaccagtgtactccccctacccacacccagttagcccttcctacacccccggacacaccccagttgcttcctcccgccgtggcccacgctttatccgcaccgcgcggaagcgtgttgttggttcttccaccgtgttccgtttccactacccagctcccccaccgccagcggcccgtgctgctgccggccctcgacagatggctagccgtccccgccgtgcagctcgtgcaccagcccgctttggttttgaggatggtagagttgagccagaagaaaatcatgaatcagctaatgagcagtctcaccacagcaaccgttcgcatcgtactgtttcccgcaacacagaggttgagcaaccccgccgcagcagccgctcgcatcgcacagtttcccgtgatgcagagatggaacagtctcaccgctctcaccgcactgccagtcacaattctggagaagaacgcctcccttccccacctcatgtggaaaccaacatgcaacacttaatggcagttcagacacaaatcttgcaaggactaaccacagccatagccagttttcagcataatgcgcatggaaatggccaccctcacatgggcaacaacagatccaagctgacagactttttgaggtctcgtccgctagagttctctcagaccgtcgagcccgtcgaggctgacgattggttgaaagatgttgatagaaaactcaacttagtgcagtgtactcctgttgagaagacgctctacgcctctcaccaactaagaggacctaccgcagattggtgggagaattactgcaatgcacaccctgaacccactaacattgcttgggatgagttcgctacggctttccgtgcagctcatgtgcctgaaagcactattgacatgaagaaagaagaattcaacagacttaagcaaggcaacagcagtgtcaatgagtacctaagtcagttcaacaagttggctcggtacgcccctgaggaagtagacacagataagaagaagatcaggaaattcttgaaagaaatcgcagttggaatgagactccagttgcttgctcatgacttccccacttttcaacatatgatcaacaaggcacttctacttgaggatgccagaaaagaggctaccgaagaatacaagaaacgcaagtctaaccatcagggaaattcttcccgaggcgcacctcgccctcgctacggtcaacccatgcaataccaccagtcggtcacccaggctaaccgccagccaggctacgcccctcgtcctcagataaaccgtccggcacctcagccacagcagcgtgcccctagtagcgatactgcgcctaacagtgttacctctttcaagtcaccgcagggaccgtcagcagttcagtgtttccggtgcaaccagatgggtcactatgctagacagtgtcctcagaatcctaccaacaccaactcagggcatgctaatggcagcactgccagaactcctactccagcggcagctcagtctcgtcctagctctcaggcaagtagacaaggttctcgtgcttccaaccactttggtcgaggccgtgtgaatcacattcaagctgaaaccgctcaggatgctccagacgctgtgatgggtatgttctctgtcgactccgtacccgcaatagttctgttcgattcgggagcttcccattctttcatatcgcaagcttttgtgaaaagaaatggttggaaaacccaaaaattgcgtgtaccaatgatagtacattcccctgggaggaatataagggcaactcaaatatgcccggaagttaaccttagaattgaggaagttgacttcctagccaaaccgatagtcctagactcgcaaagcttggacatcattctagggatggattggttggctaagcacaaaggacagatagattgtgccgaaaagtccatcaccttgcaaggacctgcaggaaagcaagtccgctttacccctaacacccctaccgcaagtcggtctatcctaacctgtttacaagtcacctccttggagtcggtgcccatagtctatgaatatcccgacgtatttctggaagaattaacaagaatgccaccagaccgagagatcgagttcgccatagaactggcaccaggcacagctccaattgcaaaaagaccctaccgaatggcagctaatgagttagcagaagttaaaagacaaatcgaagagttggagagtaaaggttatgtgcgacctagctcatccccttggggagccccagtacttctggttaagaaaaaggatggctctgagagaatggtaatcgactatagagccctgaatgaagtaactataaagaacaagtacccgttgccacggattgacgatttattcgatcaacttaaaggagcaagagtcttctcaaaaattgacttgaggtcaggttaccatcaactgaaaatcagatctgaagatattccgaagaccgctttctcaacgcgttatggtctatatgagttcacagttatgtccttcggactcaccaatgctccagcattcttcatgaacttaatgagcaaaatcttcatggaatacctggaccagtttgtcgtggtattcatcgatgacattctgatatactctaagaacgaggaagaacatgctgaacacctgaggttgataatggaaaagctcagggaccatcaactattcgcaaaattctcgaaatgcgaattctggttagaccgagtagcatttcttggacacgtgatctcccccaacggtgttgaagtagatcccagcaaggttgaagctgtacttgcttggaacccgcccaagaatgtgtcagagattcgcagtttccttggcttagctggatattatcgaagattcattgaaggattctctaagctagccagacctatgaccgagctgttaaagaaggaaaagaaatttcaatggtctgcagcctgtgaagacagctttcaagaaatgaagaaaaggttgaccactgccccagttctcaccttgccagatatccgaaaagatttcgagatcttctgtgatgcatcaagacaaggcttaggatgtgtcgtaatgcaggaacgaaaggttgtggcctatgcatccaggcagctcaggcctcatgaagtcaattatcccacccatgatcttgagttggcagccgtggttcatgctcttaagatctggaggcattatttaatcgggaacagatgtgaagtatacaccgatcacaaaagtcttaagtatattttcacacagaccgagttaaatatgagacagagaagatggttggaactaattaaggattacgatcttggaatccactatcatcctggtaaagccaacgtggtcgctgatgcgctaagtcgcaaggcctattgcaatgtagctcaaatacggcctgaccaagatcacttgtgcagagaattagagaagttaaggctgaccgtggtacagtcaggtgtccctgccagcttgacagtacagcctaccctagagtcgcaaatccgggaagctcagaaagacgacgaagggataaaagagttgataaaaagaatacaggagaagaaagacaccaatttctccatagacgatcaaggcacagtttggtgcggtccacgcatctgtgtaccggccaagaaggagttaagagatctcatcctaaaggaagctcatgagtccacctactccattcacccaggaagtacgaagatgtaccaagatatcaaggcatacttctggtgggccggaatgaagcgagatgtcgcggaatacgtagccttgtgtgacatttgccaaagagtcaaggcagagcatcagaggccagctggtctgctgcaacccctaccgattcccgagtggaaatgggaagagatcggaatggatttcatcaccggtttgccaagaacccccaacgggtacgactccatttgggtaatcgtggaccgactcacgaaatcagctcatttcgtgccagtgaaaaccacctatgatggaaagaaactagcagaactctacatgacccatgtcgtatgtagatttggctgtcccaagaaaattgtgtcagatcgaggcactcagttcacctcaaggttctggaagcagttgcatgaagctctcggaactgatctaaattttagtacggcctaccatccgcagaccgatggtcagacagaaagggtaaaccaaatcctagaagacatgctacgtgcgtgtgccctggatttcgaaggcacttgggatcgttgtttgccgtatgctgagttctcatacaacaacagctattag

SEQ ID NO: 15464 - DNA, 5199 bp, Oryza sativa
  Clone ID: TFbOSC400630j.C1.o10.fg
atggctagccgcccccgccgtgcagctcgtgcaccagcccgctttggttttgaagatggtagagttgaagcagaagcaaatcatgaatcagctaatgagcagtctcaccacagcaaccgttcacaccatactgtttcccgcaacgcagaggttgagcaaccccgccgcagcaaccgctcgcatcgcacagttttccgtaatgcagagatggaacaatctcaccgctctcaccgcactgccagtcacaattctggagaagaacgccttccttccccacctcatgtggaaaacaacatgcagcacttaatggcagttcagacacaaatcttgcagggattaaccacagccatagccagttttcagcataatgcgcatggaaatggccaccctcacgtgggcaacaatagatccaagctgacagactttctgaggtctcgtccgccagagttctctcataccgtcgagcccgtcgaggctgacgattggctaaaagatgttgatagaaaactcaacttagtgcagtgtactccggttgagaagacgctctacgcctctcaccagctaagaggacctgctgcagattggtgggagaattactgcaatgcacaccctgaacccactaacattgcttgggatgagtttgctatggctttccgtacagctcatgtgcctgaaagcgctattgatatgaagaaagaagaattcaacagacttaagcaaggcaacagcagtgtcaatgagtacctaagtatgttcaacaagttggctcggtacgcccctgaggaagtggacaccgacgagaagaagatcaggaaattcttgaaaggaatcgcagttggaatgagactccagttgattgctcatgatttccccacttttcaacatatgatcaacaaggcacttctactcgaggatgctagaaaagaggctaccgaagaatacaagaaacgcaagtctaaccatcagggaaattcttcccgaggcgcacctcgccctcgctacggacaacccatgcaataccaccagtcggtcactcaggctaaccgccagccaggttacgcccctcgtcctcagatgaaccgtccggcacctcagccacagcagcgtgcccctagtggcaatactgcgccaaacagtgttacctcgttcaagtcaccacagggaccgacagtagttcagtgtttccggtgcaaccagatgggtcactatgctagacagtgccctcagaaccctaccaacaccagctcagggcatgcgaatggcagcactgccagaactcctacccagcggcagctcagtctcgtcctagctctcaggcaagtggacaaggatgcttcagacattgtgatgggtatgttctctgtcaactccatacccgcaatagttctggttgattcgggagcttcccattctttcatatcacaagcttttgtgaaaagaaatggttggaaaacccaaaatttgcgtgtaccaatgatagtacattcccctggaaggaatataagggcaactcaaatatgcccggaagttaaccttagaattgaggaagttgacttcctagccaaaccgatagtcctagactcgcaaagcttggacatcatcctagggatggattggttggctaagtacaaaggacagatagattgtgccgaaaagtccatcaccttgcaaggacctggaggaaagcaagtccgctttacccctaacactcctaccgcaagtcggtctatcttaacctgtttacaagtcacctcattggagtcggtgcccatagtttgtgaatatcccgacgtatttccggaagaattaacaagaatgccaccagaccgagagattgagttcgccatagaactggcaccaggcaccgcaccaattgcaaaaagaccctaccgaatggcagctaatgagttagcagaagttaaaagacaaatcgaagagctggaaagtaaaggttttgtgcgacctagctcatccccttggggagccccagtgcttctggttaagaaaaaggatggctctgagagaatggtaatcgactatagagccctgaatgaagtaactataaagaacaagtacccgttgccacggatcgacgatttattcgatcaacttaaaggagcaagagttttctcaaaaattgacttgaggtcaggttaccaccaactgaaaatcagatctgaagatatcccaaagaccgctttctcaacgcgttatggtctatatgagttcacagtaatgtccttcggactcaccaatgctccagcattcttcatgaacttaatgaacaaaatcttcatggaatacctggaccagtttgttgtggtattcatcgatgacatcctgatatactccaagaacgaggaagaacatgctgaacacctgaggttgataatggaaaagctcagggatcgtcaactattcgcaaaattctcgaaatgcgaattctggttagaccgagtagcatttcttggacacgtgatttcctccaatggtgtcgaagtagatcccagcaaggttgaagctgtacttgcttggaacccgcccaagaatgtgttagagattcgcagcctcctcggcttagctggatattatcgaagattcattaaaggattctctaagctagccagacctatgaccgagctgttaaagaaggaaaagaaatttcaatggtctgcagcctgtgaagacagcttccaagaaatgaagaaaaggttgaccactgccccagttctcaccttgccagatatccgaaaagatttcgagatcttctgtgatgcatcaagacaaggcttaggatgtgtcctaatgcaagaacgaaaggttgtggcctatgcctccaggcagctcaggcctcatgaagtcaattatcccacccatgatctcgagttggcagccgtggttcatgctcttaagatctggaggcactatttaatcgggaacagatgtgaagtatacaccgatcacaaaagtcttaagtatatcttcacacagaccgagttaaatatgagacagagaagatggttggaactaatcaaggattacgatcttggaatccactatcaccctggtaaagccaacgtggtcgctgatgcgctaagtcgcaaggcctatcacaatgtagctcaaatacggcctgaccaagatcacctgtgcagagaattggagaagttaaggctgaccgtggtacagtcaggtgtccctgccagcttgacagtacagcctaccctagagtcgcaaatccgggaggctcagaaagacgacgaagggataaaagaattaataaaaagaatacaggagaagaaagacaccaatttctccatagacaaccaaggcacagtttggtgcggtccacgcatctgtgtaccggccaagaaggagttaagagatctcatcctaaaggaagcttatgagtccgcctattccattcatccaggaagtacgaagatgtaccaagatatcaaggcatacttctggtgggctggaatgaagcgagatgtcgcagaatacgtagccctgtgtgacatttgccaaagagtcaaggcggaacatcagaggccagctggtctgctgcaacccctaccgattcccgagtggaaatgggaagagatcggaatggatttcatcaccggtttgccaagaacccctaacgggtacgactccatctgggtaatcgtggaccgactcacgaaatcagctcatttcgtgccagtgaaaaccacctttgatggaaagaaactagcagaactctacatgacccatgtcgtatgtagatttggctgtcccaagaagatcatgtcagatcgaggcactcagttcacctcaaggttctggaaacaattgcacgaagccctcggaaccgatctaaattttagtacggcctaccatccgcagaccgatggtcagactgaaagggtaaaccaaatcctagaagacatgctacgtgcgtgtgccctggatttcgaaggcacttgggatcgttgtttgccgtatgctgagttctcatacaacaacagttatcaggccagcattcagatgtcgccgaatgaggcaatgttcggaagaaagtgccgcacccccttgtgctggaatgaggtgggcgaagcgctggcattcggtcctgacatactcaagtcagcagaagaacaagttaagctaatccgagaacgtttaaagacagcgcaggaccgtcagaaaagttacgctaacaatcgaaggcgtgaccttgagttcgaaaaaggagatcatgtgtacctgcgggtatcacccctccgtggtatgaggaggtttgggatgtccggcaagttagcaccccgctacatcggcccctacctcataaccgccagacgtggcgaagtggcttatcagcttgagctacctgaaggtctcgcagatgtgcacaacgtgttccacgtatcccagctaaagaaatgtcttcgagttccagaagagcaagttcccctgggtaatatcgtgctggaaaagaatctgacctacaaggaaagaccgaccaaggttcttgaagaggcagaacatgatataattgttgctagttcaacacagagtgcagtatcagctttgttgcaggatcttaaggaggattttgcactaaaggatttgggtgatttgcactatttccttggaatagaagtgaacaaggtaaatgatgggttgctactatctcaaggaaagtacactgctgacttgcttaagaaaaccaatatgagtgattgcaaaccttttaacacacctttatcaacatcagagaaactctctctacatgagggagatttacttgggtctagtgatgccacacagtatagaagcatagtaggggctctgcaatacttaactttgactagacctgatatctccttctcagtgaataaggtgtgtcagtttttacatgctcctactacagttcattgggcaacagtgaagaggattttaagatatttgaagtatacagccagtctaggacttaagtttgaaaaatcaaagtctggtcttgttagtgcttttacagatgcagattgggctggatcccttgatgacaggagatctactggaggctttgctatttatcttggctccaaccttgtgtcatggagtgcaagaaaacaggcaacagtgtctagatcaagcactgaagcggaatacaaagcacttgctaatgtaactgcagaattgatgtggatatag

SEQ ID NO: 15465 - DNA, 4971 bp, Oryza sativa
  Clone ID: TFbOSC400662j.C1.o1.np
atgactgtactcctactctataataaagagacctctgttgctgtgatattctatcttcctgtgataccagcactgtttcctgggactggtatcgattaacagatggcagtgaacgccagcttcagttcccacggttttggtgagggtcaccacgtcgctcagcttcgtgacctcgcccgtttccttggcttctcgtgtcccgagtacacggggtactccgtggaccgtgttccccctcactgtgagctctctgtgtacctttacccccgtggaggtatacacggagctggccttcgcccccaccacttcactgtggccaggcccactctccagatcgcccaccgtctcggaggttccgccttccggcagcttccacgccttccttctggccactcagacgccaggtacccttgtccgtacagcgagtctcagccagtgctgactcgcatggttgagctctcggaggctcaggccactcagcacgacctactccttgaggcttaccgctcccttgcccgccgctacgccgctttggaggcccgtttggccgaggagggtgtcacctcagttgacactatctcttgggactcaggccgcctctgccacgccagccacctgtcctcccacagctcccgcggctctgcccgcactcccagtggcccgcgctcccccagctcgcgtgcgccgtactcaccagtgtactccccctacccacacccagttagcccttcctacacccccggacacaccccagttgcttcctcccgccgtggcccacgctttatccgcaccgcgcggaagcgtgttgttggttcttccaccgtgttccgtttccactacccagctcccccaccgccagcggcccgtgctgctgccggccctcgacaggttccgccggtcccttcgcgtcagccgatcgacgtttcttcgactgaggagccgactacaggagcccgctttggttttgaagatggtagagttgaagcagaagcaaatcatgaatcagctaatgagcagtctcaccacagcaaccgttcgcaccgtactatttcccgcaacgcagaggttgagcaaccccgccgcagcaaccgctcgcatcgcacagcttcccgtgatgcagagatggaacagtctcaccgctctcaccgcactgccagtcacaattctggagaagaacgcctcccttccccacctcatgtggaaaacaacatgcaacacttaatggcagttcagacacaaatcttgcaaggaatagccgcagccgtagccggttatcagcataatgcgcatggaaatggccaccctcacatgggcaacaatagatccaagctgacagattttctgaggtcacgtccgccagagttctctcagaccgtcgagcccgtcgaggctgacgattggttgaaagatgttaatagaaaactcaacttagtgcagtgtactccggtcgagaagacgctctacgcctctcaccagctaagaggacctgctgcagattggtgggagaattactgcaatgcacaccctgaacccactaacattgcttgggatgagtttgctacggctttctgtgcagctcatgtgcctgaaagcaccattgacatgaagaaagaggaattcaacagacttaagcaaggcaacagcagtgtcaatgagtacctaagtatgttcaacaagttggctcggtacgcccctgaggaagtggactcagataagaagaagatcaggaaattcttgaaaggaatcgcagcacttctacttgaggatgccagaaaagaggctaccgaagaatacaagaaacgcaaatctaaccaccaggggaattcctcccaaggcgcacctcgccctcgctacggtcaacccatgcaataccaccagtcggtcactcaggctaaccgccagccaggctacgcccctcgtcctcagatgaaccgcccggcaccccagccacagcagcgtgcccctagtggcaatattgcgccaaacagtgttacctctttcaagtcaccgcagggaccgtcagcagttcagtgtttccggtgcaaccagatgggtcactatgccagacaatgccctcagaatcctaccaacaccaactcagggcatgctaatggcagcactgccagaactcctactccagcggcagctcagtctcgtcctagcactcaagcaagtggacaaggttcacgtgcttccaaccactttggtcgaggccgtgtgaatcacattcaagctgaaaccgctcaggatgctccagacgttgtgatgggtatgttctctgtcaactccgtacccgcaatagttctgtttgattcgggagcttcccattctttcatatcacaagcttttgtgaaaagaaatggttggaaaacccaaaatttacgtgtaccaatgatagtacattcccctggaaggaatataagggcaactcaaatatgcccggaagttaaccttagaattgaggaaattgacttcctagccaaaccgatagtcctagactcgcaaagcttggacaacatcctaggaatggattggttggctaagcacaaaggacagatagattgtgccgaaaagtccatcaccttgcaaggacctggaggaaagcaagtccgctttacccctaacactcctaccgcaagtcggtctatcttaacctgtttacaagtcacctccttggagtcggtgcccatagtttgtgaatatcccgacgtatttccggaagaattaacaagaatgccaccagaccgagagattgagttcgccatagaactggcaccaggcaccgcaccaattgcaaaaaaaccctaccgaatggcagctaatgagttagcagaaattaaaagacaaatcgaagagctggaaagtaaaggttatgtgcgacctagctcatccccttggggagccccagtgcttctggttaagaaaaaggatggctctgagagaatgctgaaaatcagatctgaagatatcccaaagaccgctttctcaacgcgttatggtctatatgagttcacagtaatgtccttcagactcaccaatgctccagcattcttcatgaacttaatgaacaaaatcttcatggaatacctggaccagtttgttgtggtattcatcgatgacatcctgatatactccaagaacgaggaagaacatgctgaacacctgaggttgataatggaaaagctcagggatcatcaactattcgcaaaattctcgaaatgcgaattctggttagtccgagtagcatttcttggacacgtgatttcctccaatggtgtcgaagtagatcccagcaaggttgaagctgtacttgcttggaacccgcccaagaatgtgtcagagattcgcagcttcctcggcttagctggatattatcgaagattcattgaaggattctctaagctagccagacctatgaccgagctgttaaagaaggaaaagaaatttcaatggtctgcagcctgtgaagacagcttccaagaaatgaagaaaaggttgaccactgccccagttctcaccttgccagatatccgaaaagatttcgagatcttctgtgatgcatcaagacaaggcttaggatgtgtcctaatgcaagaacgaaaggttgtggcctatgcatccaggcagctcaggcctcatgaagtcaattatcccacccatgatctcgagttggcagccgtggttcatgctcttaagatctggaggcactatttaatcgggaacagatgtgaagtatacactgatcaccaaagtcttaagtatatcttcacacagactgagttaaatatgagacagagaagatggttggaactaatcaaggattacgatcttggaatccactatcaccctggtaaagccaaggtggtcgctgatgcgctaagtcgcaaggcctatcacaatgtagctcaaatacggcctgaccaagatcacctgtgcagagaattggagaagttaaggctgaccgtggtacagtcaggtgtccctgccagcttgacagtatagcctaccctagagtcgcaaatccgggaggctcagaaagacgacgaagggataaaagaattaataaaaggaatacaggagaagaaagacaccaatttctccatagacaaccaaggcacagtttggtgcggtccacgcatctgtgtaccggccaagaaggagttaagagatctcatcctcaaggaagctcatgagtccgcctattccattcatccaggaagtacgaagatgtaccaagatatcaaggcatacttctggtgggctggaatgaagcgagatgtcacagaatacgtagccctgtgtgacatttgccaaagagtcaaggcggaacatcagaggccagttggtctgctgcaacccctaccgactcccgagtggaaatgggaagagatcggaatggatttcatcaccggtttgccaagaacccccaacggatacgactccatttgggtaatcgtggaccgactcacgaaatcagctcatttcgtgccagtgaaaatcacctatgatggaaagaaactagcagaactctacatgacctatgtcgtatgtagatttggctgtcccaagaaaattgtgtcagaccgaggcactcagttcacctcaagttatcaggccagcattcagatgtcgccgaatgaggcaatgttcggaagaaagtgccgcacccccttgtgctggaatgaggtgggcgaagcactggtattcggtccagacatactcaagtcagctgaagaacaagttaagctgatacgagaacgtttgaagacagcacaccgtcagaagaattacgcagacaatcgaaggtgtgaccttgagttcgaaaaaggagatcatgtgtacctgcgggtatcaccactccgcgcgctagcctccaagggccagaccgggtcgggccgaccccggtcggtccctccgcgtgcgcgcgatccaccgcgagccgtgaggctgcgcgtgggcccgccgcacctg

SEQ ID NO: 15466 - DNA, 4992 bp, Oryza sativa
  Clone ID: TFbOSC400702j.C1.o32.fg
atgactgtactcctactctgtaataaagagacctctgttgctatgatattctgtcttcctgtgataccagcattgtttcctgggactggtatcgatgaacagatggcagtgaacgccagcttcagttcccacggttttggtgagggtcaccacgtcgctcagcttcgtgacctcgcccgcttccttggcttctcgtgtcctgagtacacggggtactctgtggaccgtgttccctctcgttatgagctttcggtgtacctttaccctcgtggaggtatacacggggctggccttcgcccacaccacttcactgtggccaggcccactctccagatcgcccaccgcctcgggggctctgcctttcggcagctcctgcgccttccttctggccgcactgacactaggtacccttgcccgtacagcgagtctcagcctgtgctgactcgcatggttgagctctctgaggctcaggccacccagcacgaccttctccttgaggcttaccgctcccttgctcgccgctacgctgctttggaggcccgcctggccgaggagggtgtcacctcagttgacactgcctcttgggacttaggtcgcctctgccacgccagccacctgtcttcccacagctcccgcggctctgttcgcactcccagtggcccgcgcacccccagttcgcgtgtgccgtactccccagtgcactctccctaccctcacccagttagcccttcctacactcctggtcacaccccagttgcttcctcctgccgtggcccacgctttatccgcactgtgcggaagcgtgttgttggttcttccactgtgttccgctttgaccacccagctcgcccaccgccagcagcccgtgctgctgccggccctcgacaagttccgccgatctcttcgcgtcagccgatcgacgtctcttcgactgaggagccgactacaggagcccatttcggttttgaggaaggtagagttgagccagaagcaaatcatgagtcagctaatgagcagtctcaccacagcaaccgttcgcaccatactgcttcccgcaatgcagaagttgagcaaccccaccgcagcaaccgctcgcaccgcacagtttcccgtaatgcagaagtggaacagtctcaccgctctccccgcgctgccattcacaattctagggaagaacgcattccttccccaccccatgttgagaacaacatgcagcacttgatggcagttcagactcaaatcttgcaaggtttagccacagccatagccggtattcagcacaacgcgcatggaaatggccatccccacacgggcaacaacagatctaagctgacagactttctaaggtctcgtccgccagagttctcccagaccgtcgagcccgttgaggctgacgattggctgaaagatgttgagagaaaactcaacttagtgcagtgtactcctgttgagaagacgctctacgcctctcaccagctaagaggacctgctgcagattggtgggagaattattgcaacgcacaccccgaacccactaacattccatgggatgaattcgctgcagctttccgtgcagctcatgtgcctgaaagcactattgacatgaagaaggaagaatttaacaggctcaagcaaggcaataccagtgtcaatgagtatatgagtcagttcaacaagttggctcgatacgctcctgaggaagtggacacagacaagaagaagatcaggaagttcttgaaaggagtcacacacatgatcaacaagagacttctacttgaggatgccagaaaagaggctaccgaggagtataagaaacgcaagtctacccatcagggaaattcttcccgaggggaacctcgccctcgctttggacaacccatgcaatatcaccagtcagtcactcaggctaaccgccagccaagctatgcccctcgtcctcagatgaatcgtctggcacctcagccgcagcagcgtgccccaagtggcaataccgcgccaaacagtgttacctctttcaagtcaccgccaggactatcagcagttcagtgtttccggtgcaaccagatgggtcactatgccagacagtgccctcagaatcttaccaactccaactcagggcataccaatggcagcaccgccagaactcctactcctgcagcagctcagtcccgtcctagcacgcaggcaagtggacaaggttcccgtgcttccaacaactttggtcgagaccgagtgaaccacattcaagccgagaccgctcaggacgctccagacgttgttatgggtatgttctctgtcaactccgcacccgcaatagttctgtttgattcaggagcatcccattctttcatatcgcaagcttttgtgaaaagaaatggttggaaaacccaaaatttgcgagtaccaatgatagtacattcccctggaagggatataagggcaactaaaatatgctcggaagttaaccttagaattgaggaagttgacttcctagccaaaccgatagtcctagactcgcaaagcttggacatcattcttgggatggattggttggctaagcacaaaggacagatagattgtgccgaaaggtccatcaccttgcaaggacctggaggaaagcaagttcgctttacccccaacactcttactgcaagtcggtctatcctaaccagtttgcaagccacttctttggaatcggtacccatagtctgtgaatatcccgacgtatttccaaaagaattaacggaaatgccaccaaaccgagagattgagttcgccatagaactggcactaggcaccgcaccaattgcaaaaagtccctaccgaatggcagctaatgaattagcagaagtcaaaaagcagatcgaagaattggagagtaaaggttatgtgcgacctagctcatccccttggggagccccagtgcttctggttaagaaaaaggatggctctgagagaatgttgaaaatcagatatgaagatatcccgaagaccgctttctcaacgcgctatgggctgtatgagttcacagtgatgtccttcggactcaccaatgctccagcattcttcatgaacctgatgaacaaaatcttcatggagtacctggaccagtttgttgtggtattcatcgatgacatcctgatatactccaagaatgaggaagaacatgttgaacacctgaggctgataatggagaagctaagagatcatcaattgttcgctaagttctcaaaatgcgaattctggctggaccgagtagcattccttggtcacgtgatctcctctaacggtgtcgaagtagatcccagcaaggttgaagctgtccttgcttggtatcctcccaagaatgagtcagagatccgcagtttccttggcctagctggttactatcgaagattcatcgaagggttctctaagctagccagacctatgaccgagctgttaaagaaggaaaagaagtttgaatggtcagcagcctgtgaagacagctttcaagaaatgaagaaaagattgaccactgccccagttctcaccttgccagatatccgaaaagatttcgaaatcttctgtgatgcatcaagacaaggcttaggatgtgtcctaatgcaagagcgaaaggttgtggcctacgcatccaggcagcttaggcctcacgaagtcaactatcccacccatgatctcgagttggcagccgtggttcatgctcttaagatctggaggcactatttaatcgggaacagatgtgaagtatacaccgatcacaaaagtcttaagtacatcttcactcagaccgagttaaatatgaggcagagaagatggttggaactaatcaaggattacgatcttggaattcattaccatcccggtaaagctaatgtggtcgctgatacgctaagtcgcaagacctattgcaatgcagctcaaatatggccagaccaagatcgcctgtgcagagaattggagaagttaaggctgaccgtggtgcagtcaggtgtccctgccagcttgacagtgcagcctaccctagaatcgcaaatccgggaagctcagaaagatgatgaagggataaaagagctaataaaaagaatacagaagatgaaggacaccgatttctccatagacgatcaaggcacagtttggtgcggtccacgcatctgtgtaccggccaagaaggagttaagagacctcattttaaaagaagctcatgagtccgcctactccatctatccaggaagtacgaagatgtaccaggatatcaaggcatatttctggtgggttggaatgaagcgagatgtcgcagaatacgtagccctttgtgacatttgccagagagtcaaggcagagcatcagaggccagctggtctgctgcaacccctaccgattcccgagtggaaatgggaagagatcggaatggatttcataaccggtttgccaagaacccctagcgggtacgactccatctgggtaatcgtggatcgactcacgaaatcggcacatttcgtgccagcgaaaaccacctttgatggaaagaaactggcagaactctacatgacccatgtcgtgtgtcgatttggttgtcccaagaagattgtgtcggatcgaggcactcagttcacctcaagttatcaggccagcattcagatgtcgccgaatgaggcaatgttcggaagaaagtgccgcactcccttgtgctggaataaggttggcgaagcactggtgttcggtcctgacatactcaaggcagcagaagaacaagttaagctgatccgacaatgtttaaagacaactcagaaccgtcagaagaattacgctgacaatcggaggcgtgaccttgagtttgaaaaaggagatcttgtgtacttgcgggtatcacctctccgtggaatgaggaggtttgggatgtccggcaagttagcaccccgctacatcggcccctacctcataaccgccagacgtggtgtcacgccccgaactagccccgagcggaactag

SEQ ID NO: 15467 - DNA, 3969 bp, Oryza sativa
  Clone ID: TFbOSC400719j.C1.o29.fg
atggctagccgcccccgccgtgctgctcatgcaccagcccgcttcggttttgagcaaggtagagttgagccagaagcaaatcatgagtcagctaatgagcagtctcaccacagcaaccgttcgcaccatactgtttcccgcaatgcagaaattgagcaaccccaccgcagcaatcgctcgcatcacacagcttcccgtaatgcagaagtggaacagtctcaccgctctcatcgcactgccagtcacaattctggagaagaacgcctcccttccccacctcatgtggaaaacaatatgcagcacttaatggcagttcagacacaaatcgtgcaaggattagccgcagccatagccggctttcagcataatgcgcatggaaatggccaccctcacaggggcaacaatagatccaagctgacagactttctgaggtctcgtccgccagagttctctcagaccgtcaagcccgccgaggctgacgattggctgaaagatgttgatagaaaactcaacttagtgcagtgtactcctgttgagaagacgctctacgcctctcaccagctaagaggacctgctgcagattggtgggagaattactgcaatgcacaccctgaacccactaacattgcttgggatgagtttgttatggctttccatgcagctcatgtgcctaaaagcaccattgatatgaagaaagaggaatttaacaggcttaagcaaggcaacaacagtgtcaatgagtacctaagtcagttcaacaagttggctcgtgttacctctttcaagtcaccgctaggaccgtcagcagttcagtgtttccggtgcaaccagatgggtcactatgccagacagtgccctcagaatcctaccaacaccaactcagggcatgctaatggcagcactgccagaactcctactccagcggcagctcagtctcgtcctagctctcaggcaagtggacaaggttctcgggcttccaacaactttggtcgaggccgggtgaaccacattcaagctgagaccgctcaggatgctccagacgttgtgatgggtatgttctctgtcaactccgtacccgcaatagttctgtttgattcaggagcttcccattctttcatatcacaagcttttgtgaaaagaaatggttggaaaacccaaaatttacgtgtaccaatgatagtacattcccctgggaggaatataagggcaactcaaatatacccggaagttaaccttagaattgaggaagttgacttcctagccaaaccgatagtcctagactcgcaaagcttggacatcatcctagggatggattggttggctaagcacaaaggacagatagattgtgccgaaaagtccatcaccttgcaaggacctggaggaaagcaagtccgctttacctctaacacccctaccgcaagtcggtctatcctaacctatttacaagtcacctccttggagtcggtgcccatagtctgtgaatatcccgacgtatttccagaagaattaacgagtatgccatcagaccgagagattgagttcgccatagaactggcaccaggcaccgcaccaattgcaaaaagaccctaccgaatggcagctaatgagttagcagaagttaaaagacaaatcgaagaattggagagtaaaggttaccaccaattgaaaatcagatctgaagatatcccgaagaccgctttctcaacgcgttatggtctatatgagttcacagtgatgtccttcggactcaccaatgctccagcattcttcatgaacttaatgaacaaaatcttcatggaatacctggaccagtttgtcgtggtgttcatcgatgacatcctgatatactccaagaatgaggaagaacatgctgaacacctgatgctgataatagaaaagctcagggatcatcaactattcgctaaattctcgaaatgcgaattctggttagaccgagtagcatttcttggacacgtgatctcctccaacggtgtcgaagtagatcccagcaaggttgaggctgtacttgcttggaacccgcccaagaatgtgtcagagatccgcagcttccttggcttagctggatattatcgaagattcattgaaggattctctaagctagccagacctatgaccgagctgttaaagaaggaaaagaaatttcagtggtctacagcctgtgaagacagctttcaagaaatgaagaaaagacaaggcttaggatgtgtcctaatgcaagaacgaaaggttgtggcctatgcatccaggcagctcaggcctcatgaagtcaactatcccacccatgatctcgagttggcagccgtggttcatgctcttaagatctggaggcactatttaatcgggagtagatgtgaagtatacacagatcacaaaagtcttaagtacatcttcactcagaccgagttaaatatgaggcagagaagatggttggaactaatcaaggattacgatcttggaattcattaccaccccggtaaagctaatgtggtcgctgatgcgctaagtcgcaagacctattgcaatgtagctcaaatatggcctgaccaagatcacctgtgcagagaattggagaagttaaggctgaccgtggagaacaagggcaccgatttctccatagatgatcaaggcacagtttggtgcggtccacgcatctgtgtaccggccaagaaggagttaagagatctcattctaaaggaagctcatgagtccgcctactccattcatccaggaagtacgaagatgtaccaggatatcaaggcatacttctggtgggctggaatgaagcgagatgtcgcagaatacatagccctgtgtgacatttgccaaagagtcaaggcagagcatcagaggccagctggtctgctgcaacccctaccgattcccgagtggaaatgggaagagatcggaatggattttatcaccggtttgccaagaacccctagtgggtacgactccatctgggtaatcgtggatcgactcacgaaatcagctcatttcgtgccagtgaaaaccacctttgatggaaagaaactagcagaactgtacatgacccatgtcgtatgtagatttggctgtcccaagaagattgtgtcagaccgaggcactcagttcacctcaaggttctggaagcagttgcatgaagctctcggaaccgatctaaattttagtacagcttaccatccgcagaccgatggtcagacagaaagggtaaaccaaatcctagaagatatgctacgtgcgtgtgccctagatttcgaaggcacttgggatcgttgtttgccgtatactgagttctcatacaacaacagttatcaggccagcattcagatgtcgccgaatgaggcaatgttcggaagaaagtgccgcactcccttgtgctggaatgaggtgggcgaagcgctggtattcggtcctgacatgctcaaggcagcagaagaacaagttaagctgatccgagaacgtttaaagacatcgcagaactgtcagaagaattacgctgacaatcggaggcgtgaccttgagttcgaaaaaggagatcatgtgtacctgcgggtatcacctctccgtggtatgaggaggtttgggatgtccggcaagttagcaccccgctacatcggcccctacctcataaccgctagacgtggcgaagtggcttatcagcttgagttacctgaaggtctcgcagatgtgcacaacgtgttccacgtgtctcagttgaagaagtgtctccgtgttccagaagaacaagtccccctgggtaatattgagctggaaaagaacctggcctacaaggaaaggccgatcaaggttcttgaagaggcagaacgtcagacccgaaggaagaccatcaagttcgacaaggtccaatggagcaatcattctgaagatgaggcaacctgggaacgagaagatcttctccgcgccgagttcccggagctactcccttag

SEQ ID NO: 15468 - DNA, 5556 bp, Oryza sativa
  Clone ID: TFbOSC400741j.C1.o10.fg
atggcagtgaacgccagcttcagttcccacggttttggtgagggtcaccacgtcgctcagcttcgtgacctcgcccgtttccttggcttctcgtgtcccgagtacacggggtactctgtggaccgtgttccccctcactgtgagctctctgtgtacctttacccccgtggaggtatacacggagctggccttcgcccacaccacttcactgtggccaggcccaccctccagatcgcgtaccaggacctctcctggactgcgcttcgtcgcctggcccacgactacagccaccgtctcggaggctccgccttccggcagcttccacgccttccttctggccactcagacgccaggtacccttgtccgtacagcgagtctcagccagtactgactcgcatggttgagctttcggaggctcaggccactcagcacgacctactccttgaggcttaccgctcccttgcccgccgctacgccgctctggaggcccgtctggccgaggagggtgtcacctcagttgacactatctcttgggactcaggccgcctctgccacgccagccacctgtcctcccacagctcccgcggctctgcccgcactcccagtggcccgcgttcccccagctcgcgtgcgctgtactcaccagtgtactccccctacccgcacccagttagcccttcctacacccccagacacaccccagctgcttcctcccgccgtggcccacgctttatccgcactgcgcggaagcgtgttgttgggtcttccaccgggttccgtttccactacccagctcccctaccgccagcggcccgtgctgctgccggccctcgacagatggctagccgcccccgccgtgcagctcgtgcaccagcccgctttggttttgaagatggtagaaccgagccggaagcaaatcatgagtcagctaatgagcagtctcaccacagcaaccgttcacaccgtactgcttcccgcaatgcagaagttgagcaaccccgccgcagcaaccgctcgcatcgcacagcttcccgtgatgcagagatggaacagtctcaccgctctcaccgcactgccagtcacaattctggagaagaacgcctttcttccccacctcatgtggaaaacaacatgcagcacttaatggcagttcagacacaaatcttgcaaggattagccgcagccatagccggttttcagcataatacgcatggaaatggccaccctcacattagtaacaatagatccaagttgacagactttctgaggtctcgtccgccagagttctctcagaccgtcgagcccgtcgaggctgacgattggctgaaagatgttgatagaaaactcaacttagtgcagtgtactcctgttgagaagacgctctacgcctctcaccagctaagaggacccgctgcagattggtgggaaaattactgcaatgcacaccctgaacccactaacattgcttgggatgagtttgctacggctttccgtacagctcatgtgcctgaaagcgctattgatatgaagaaagaagaattcaacagacttaagcaaggcaacagcagtgtcaatgagtacctaagtatgttcaacaagttggctcggtacgcccctgaggaagtggacacagacaagaagaagatcaggaaattctttaaaggaatcgtagttggaatgagactccagttgattgctcatgatttccccacttttcaacatatgatcaacaaggcacttctactcgaggatgctagaaaagaggctaccgaagaatacaagaaacgcaagtctaaccataagggaaattcttcccgaggcgcacctcgcccttgctacggacaacccatgcaataccaccagtcggtcactcaggctaaccgccaaccaggctacgcccctcgtcctcagatgaaccgtccggcccctcagccacagcagcgtgcccctagtggcaatactgcgccaaacagcgttacctctttcaagtcaccgcagggaccgtcagcagttcagtgtttccggtgcaaccagatgggtcactatgctagacagtgccctcagaaccctaccaacaccaactcagggcatgcgaatggcagcactgccagaactcctaccccagcggcagctcagtctcgtcctagctctcaggcaagtggacaaggttcacatgtttccaacaactttggtcgaggccgggtgaaccacattcaagctgaaaccgctcaggatgctacagacgttgtgatgggtatgttctctgtcaactccgtacccgcgatagttctgtttgattcaggagcttcccattccatcatatcacaagcttttgtgaaaagaaatggttggaaaacccaaaatttacgtgtaccaatgataatacattcccctggaaggaatataagggcaactcaaatatgcccggaagttaaccttagaattgaggaagttaacttcctagccaaaccgatagtcctagactcgcaaagcttggacattatcctagggatggattggttggctaagcacaaaggacagatagattgtgccaaaaagtccatcaccttgcaaggacctagaggaaagcaagtccgctttacctctaacacccctaccacaagtcggtctatcctaacctgtttacaagtcaccaccttggagtcggtgcccatagtctgtgaatatcccgacgtattcccagaagaattaacgagtatgccaccagaccgagagattgagttcgccataaaactggcgccaggcaccgcaccaattgcaaaaagaccctaccgaatggcagctaatgagttagcagaagttaagagacaaatcgaagaattggagagtaaaggttatgtgcgacctagctcatccccttggggagccccagtgcttctggttaagaaaaaggatggctctgagagaatggtaatcgactatagagccctgaatgaagtaactataaagaacaagtacccgttgccacggattgacgatttgttcgatcaacttaaaggagcaagagttttctcaaaaattgacttgaggtcaggttaccaccaactgaaaatcagatctgaagatatcccgaagaccgctttctcaacgcgttatggtctatacgagttcacagtaatgtccttcggactcaccaatgctccagcgttcttcatgaacttaatgaacaaaatctttatggaatacctggaccagtttgtcgtggtgttcatcgatgacatcctgatatactccaagaatgaggaagaacatgctgaacacctgaggctgataatggaaaagctcagagatcatcaactattcgcaaaattctcgaaatgcgaattctggttagaccgagtagcatttcttggacacgtgatctcctccaacggtgtcgaagtagatcccagcaaggttgaagctgtacttgcttggaacccgcccacgaatgtgtcagagatccgcagcttccttggcttagctggatattatcgaagattcattgaaggattctctaagctagccagacctatgaccgagctgttaaagaaggaaaagaaatttcaatggtctgtagcctgtgaagacagctttcaagaaatgaagaaaaggttgaccactgccccagttctcaccttgccagatatccgaaaagatttcgagatcttttgtgatgcatcaagacaaggcttaggatgtgtcctaatgcaagaacgaaaggttgtggcctatgcatccaggcagctcaggcctcatgaagtcaattatcccacccatgatcttgagttggcagccgtggttcatgctcttaagatctggaggcactatttaattgggaacagatgtgaagtatacaccgatcacaaaagtctaaagtatatcttcacacagaccgagttaaatatgaggcaaagaagatggctggaactaatcaaggattacgatcttggaatccattaccatcctggtaaagctaacgtggtcgctgatgcgctaagtcgcaaggtctattgcaacgtagctcaaatatggcctgaccaagatcgcctgtgcagagaattggagaagttgaggctgaccgtggtacagtcaggtgtccctgccagcttgacagtacagcctaccctagagtcgcaaatccgggaagcccagaaagacgacgaagggataaaagagttaataaaaagaatacaggagaagaaagacaccaatttctccatagacgatcaaggcacggtttggtgcggtccacgcatctgtgtaccggccaagaaggagttaagagatctcatcctaaaggaagctcatgagtccgcctactccattcacccagggagtacgaagatgtaccaagatatcaaggcatacttctggtgggctggaatgaagcgagatgtcgcagaatacgtagccctgtgtgatgtttgccaaagagtcaaggcagaacatcagaagccagctggtctgctacaacccctaccgattcccgagtggaaatgggaagagatcggaatggatttcatcaccggtttgccaagaacccccagcgggtacgactccatttgggtaatcgtggaccgactcacgaaatcagctcatttcgtgccagtgaaaaccacctttgatggaaagaaactagcagaactctacatgacccgtgtcgtatgtagatttggctgtcccaagaaaatcgtgtcagaccgaggcactcagttcacctcaaggttctggaaccagttgcatgaagccctcggaaccgatttaaatttcagtacggcctaccatccgcagaccgatggtcagacagaaagggtaaaccaagtcctagaagacatgctacgagcgtgtgccttggatttcgaaggcacttgggatcgttgtttgccgtatgccgagttctcatacaacaacagctatcaggccagcattcagatgtcgccgaatgaggcaatgttcggaagaaagtgccgcactcccttgtgctggaatgaggcgggcgaagcactagtattcggtcctgacatactcaagacagcagaagaacaagttaagctaatccgagaacgtttaaagacagcgcagaacggtcagaaaaattacgctgacaatcggagacgtgaccttgagttcgaaaaaggagatcatgtgtacctgcgggtatcacccctccgtggtatgaagaggtttgggatgtccggcaagttagcaccccgctacatcggcccctacctcataaccgccagacgtggcgaggtggcttatcagcttgagctacctgaaggtctcgcagatgtgcacaacgtgttccacgtatcccagttaaagaaatgtcttcgagttccagaagagcaagtccccctgggtaacatcgagctggaaaagaatctaacctacaagaaaagaccgatcaaggttcttgaagaggcagaacgtcagactcgaaggaagaccatcaagttttacaaagtccaatggagcaatcattctgaagatgaggcaacctgggagcaagaagatcttctccgcgccgagttcccggagctgctcccttag

SEQ ID NO: 15469 - DNA, 4638 bp, Oryza sativa
  Clone ID: TFbOSC400773j.C1.o127.fg
atggcagtgaacgccagcttcagttcccacggtttcggtgagggtcaccacgtcgctcagcttcgtgacctcgcccgtttccttggcttctcgtgtcccgagtacacggggtactccgtggaccgtgttccccctcactgtgagctctctgtgtacctttaccctcgtggaggtatacacggagctggccttcgcccacaccacttcaccgtggccaggcccactctccagatcgcgtaccaggacctctcctggactgcgcttcgtcgcttggcccacgactacagccaccgtctcggaggctccgccttccggcagcttccacgccttccttctggccacgcagacgccaggtacccttgtccgtacagcgagtctcagccagtgctgactcgcatggttgagctttcggaggctcaggccactcagcacgacctactccttgaggcttaccgctcccttgcccgtcgctacgccgctttggaggcccgtctggccgaggagggtgtcacctcagttgacactatctcttgggactcaggtcgcctctgccgcgccagccacctgtcctcccacagctccagcggctctgcccgcactcccagtggcccgcgctcccccagctcgcgtgcgccgtactcaccagtgtactccccctacccacacccagttagcccctcctacacccccggacacaccccagttgcttcctcccgccgtggcccacgctttatccgcactgcgcggaagcgtgttgttggttcttccaccgtgttccgtttccactacccagctcccccaccgccagcgccccgtgctgctgccggccctcgacagctaagaggacctgctgtagattggtgggagaattactgcaatgcacaccctgaacccactaacattgcttgggatgagtttgctacggctttccgtgcagctcatgtgcctgaaagcaccattgacatgaagaaagaggaattcaacagacttaagcaaggcaacagcaatgtcaatgagtacctaagtatgttcaacaagttggctcggtacgctccggaagaagtggacacagacaaaaagaagatcaggaagttcttgaagggaatcgcagtcggaatgagactccagttgcttgctcctgacttccccacctttcaacatatgatcaacaaggcacttctacttgaggatgccagaaaagaggctaccaaagaatacaagaaacgcaagtctaaccatcagggaaattcttcccgaggcgcacctcgccctcgctacggtcaacccatgcaataccaccagtcggtcactcaggctaaccgccagccaggctacacccctcgtcctcagatgaaccgtccggcacctcagccacagcagcgtgcccctagtggcaatcctgcgccaaacagtgttacctctttcaagtcaccgcagggaccgtcagcagttcagtgtttccggtgcaaccagatgggtcactatgccagacagtgcccccagaatcctatcaacaccaactcagggcatgctaatggcagcactgccaggacttctactccagcggcagctcagtctcgtcctagctctcaggcaagtggacaaggttcacgtgcttccaacaactttggtcgaggtcgggtgaaccacattcaagctgaaaccgctcaggatgctccagacgttgtgatgggtatgttctttgtcaactccatacccacaatagttctgtttgattcgggagcttcccattccttcatatcacaagcttttgtaaaaagaaatggttggaaaacccaaaatttgcgtgtgccaatgatagtacattcccctggaaggaatataagggcaactcaaatatgcccggaagttaaccttagaattgaggaggttgacttcctagccaaaccaatagtcctagactcgcaaagcttggacatcatcctagggatggattggttggctaagcacaaaggacagatagattgtgccgaaaaatccatcaccttgcaaggacctggaggaaagcaagtccgctttacctctaacacccctaccgcaagtcggtctattctaacctgcttacaagtcaccaccttggagtcggtgcctatagtctgtgaatatcccgacgtatttccggaagaattaacgggtatgccaccagacagagaggttgagtttgccatagaactggcgccaggcaccgcaccaatcgcaaaaagaccctaccgaatggcagctaatgagttagcagaagttaaaagacaaaccgaagaattggagagtaagggttattttgtcgtggtgttcatcgacaacatcctgatatactccaagaatgaggaagaacatgctgaacacctgaggatgataattgaaaagctcagggatcatcaactatacgctaaattcttgaaatgcgaattctggttagatcgagtagcatttcttggacacgtgatctcctccaacggtgtcgaagtagatcccagcaaggttgaagctgtacttgcttggaacccgcccaagaatgtgtcagaaattcgcagcttccttggcttagctggatattatcgaagattcattgaaggattctctaagctagccagacctatgaccgagctgttaaagaaggaaaagaaatttcaatggactgcagcctgtgaagacagctttcaagaaatgaagaaaaggttgaccactgccccagttctcaccttgccagatatccaaaaagatttcgaaatcttctgtgatgcatcaagacaaggcttaggatgtgtcctaatgcaagaacgaaaggttgtggcctacgcatccaggcagctcaggcctcatgaagtcaattatcccacccatgatctcgagttggcagctgtggttcatgctcttaagatctggagacactatttaatcgggaacagatgtgaagtatacaccgatcacaaaagtcttaagtacatctttactcagaccgagttaaatatgaggcagagaagatggttggaactaatcaaggattacgatcttggaattcattaccaccccggtaaagctaacgtggtcgctgatgcgctaagtcgcaaggcctattgcaatatagctcaaatacggcctgaccaagatcgcctgtgcagagaaatggagaagttgaggctgaccgtggtacagtcaggtgtccctgccagcttgacagtacagcctaccctagagtcgcaaatccgggaagctcagaaagatgacgaagggataagagagttaataaaaagaatacaggagaagaaagacaccaatttctccatagacgatcaaggcacagtttggtgcggtccccgcatctgtgtaccggccaagaaggagttaagagatctcatcctaaaggaagctcatgagtccgcctactccattcatctaggaagtacgaagatgtaccaagatatcaaggcatacttctggtgggctggaatgaagcgagatgtcgcagaatacgtagccttgtgcgacatttgccaaagagtcaaggcagaacatcagaggccagctggtctgctgcaacccctaccgattcccgagtggaaatgggaagagatcggaatggattttatcaccggtttgccaagaacccctagcgggtacgactccatctgggtaatcgtggaccgactcacgaaatcagctcatttcgtgccagtgaaaaccacctttgatgggaagaaactagtagaactctacatgacccatgtcgtatgtagatttggctgtcccaagaagattgtatcagatcgaggcactcagtttacctcaaggttctggaagcagttgcatgaagcccttggaaccgatctgaattttagtacggcctaccatccgcagaccgatggacagacagaaagggtaaaccaaatcctagaagacatgctacgtgcgtgtgccctggatttcgaaggcacttgggatcgttgtttgccgtatgctgagttctcgtacaacaacagttatcaggccagcattcagatgtcgccgaatgaggcaatgttcggaagaaagtgccgcactcccttgtgctggaatgaggtgggcgaagcgctggtattcggtcctgacatactgaaggcagcagaagaacaagttaagctgatccgagaacgtttgaagacagcacagaaccgtcagaagaattacgctgacaatcggaggcgtgaccttgagttcaaaaagggagatcatgtgtacctgcgggtatcacccctccgtggtatgagaaggtttgggatgtccggcaagttagcaccccgctacatcggcccctacctcataaccgccagatgtggcgaagtggcttatcagcttgagttacctgaaggtctcgcagatgtgcacaacgtgttccacgtatcccagttaaagaaatgtcttcgagttccagaagaacaagttcccctgggtaatatcaagctggaaaagaatctgacctacaaggaaagaccgatcaaggttcttgaagaggcagaacgtcagactcgaaggaagaccaccaagttctacaaggtccaatggagcaaccattctgaagataaggcaacctgggagcgagaagatcttctccgcgccgagttcccggagctgctcaattag

SEQ ID NO: 15470 - DNA, 4629 bp, Oryza sativa
  Clone ID: TFbOSC400964j.C1.o53.fg
atggcagtgaacgccagcttcagttcccatggttttggtgagggtcaccacgtcgctcagcttcgtgacctcgcccgtttccttggcttctcgtgtcccgagtacacggggtactccgtgggccgtgttccccctcactgtgagctctctgtgtacctctacccccgtggaggtatacacggagctggccttgcccacaccacttcactttggccaggcccactctccagatcgcgtaccaggacctctcctggactgcgcttcgtcgcctggcccacgactacagccaccgtctcgggggctccgccttccggcagcttccacgccttccttctggccactcagacgccagctcgtgcgccagcccgctttggttttgaagatggtagagccgagccagaagtaaatcatgagcagtctccccacagcaaccgttcgcaccgtactgcttcccgcaacgcagaagttgagcaaccccgccgcagcaaccgctcgcatcgcacggcttcctgtgatgcagagatggaacagtctcaccgctctcaccacactgccagtcacaattctggagaagaacgcctcccttccccacctcatgtggaaaacaacatgcagcacttaatggcagttcagacacaaatcttgcaaggattagccgcagccgtagccggttttcagcataatgcgcatggaaatggccaccctcacatgagcaacaatagatccaagctgacagattttctgaggtctcgtccgccagagttctctcagaccgtcgagcccgtcgaggctgacgattggctgaaagatgttgatagaaaattcaacttagtgcagtgtacccctgttgagaagacgctctacgcctctcaccagctaagaggacctgctgcagattggtgggagaattactgcaatgcacaccctgaacccactaacattgcttgggatgagtttgctacagctttccgtgcagctcatgtacctgaaagcaccattgacatgaagaaagaggaattcaacagacttaagcaaggcaacagcaatgtcaatgagtacctaagtcagttcaacaagttggctcggtatgcccctgaggaagtggacacagacaagaagaagatcaggaagttcttgaagggaatcgcagttggaatgagactccagttgcttgctcatgacttccctacttttcaacatatgatcaacaaggcacttctacttgaggatgccagaaaagaggctaccgaagaatacaagaaacgcaagtctaaccatcagggaaattcttcccgaggcgcacctcgccctcgctacggtcaacccatgcaataccatcagtcggtcactcaagctaaccgccagccaggctacgcccctcgtcctcagatgaaccgtccggcaccccagccacagcagcgtgcccctagtggcaatactgcgccaaacagtgttacctctttcaagtcaccgcagggaccgtcagcagttcagtgtttccggtgcaaccagatgggtcactatgctagacagtgccctcagaatcctaccaacaccagctcagggcatgctaatggcagcactgctagaactcctactccagcggcagctcagtctcgtcctagctcccaggcaagtggacaaggttctcatgcgtccaacaactttggtcgaggccgagtgaaccacattcaagccgagactgctcaggatgctccagacgttgtgatgggtatgttctctgtcaactccatacccgcaatagttctgtttgattcaggagcttcccactccttcatatcacaagcttttgtgaaaagaaatggttggaaaacccaaaatttacgtgtaccgatgatagtacattcccctgggagggatataagggcaactcaaatatgcccggaagttaaccttagaattgaggaagttgacttcctagccaaaccgatagtcctagactcgcaaagcttggacatcatcctagggatggattggttggcaaagcacaaaggacagatagattgtgccgaaaagtccatcactttgcaaggacctggaggaaagcaagtccgctttacctctaacagtcctaccgcaagtcggtctatcttaacctgtttacaagtcacctccttggagtcggtgcccatagtctgtgaatatcccgacgtatttccagaagaattaacgagtatgccaccagaccgagagattgagttcgccatagaactggcaccaggcaccgcaccaattgcaaaaagaccctaccgaatggcagctaatgagttagcagaagtcaaaagacaaatcgaagaattggagagtaaaggttatgtgcgacctagctcatccccttggggagccccagtgcttctggttaagaaaaaggatggctctgaaagaatgtttgtcgtggtgttcatcgatgacatcctaatatactccaagaatgaggaagaacatgctgaacacctgaggctaataatggaaaagctcagggatcatcaactattcgctaaatttttgaaatgcgaattctggttagaccgagtagcattccttggacacgtgatctcctccaacggtgtcgaagtagatcccagcaaggttgaagctgtacttgcttggaacccgcccaagaatgtgtcagagattcgcagcttccttggcttagccggatattatcgaagattcatcgaaggattctctaagttagccagacccatgaccgagctgttaaagaaggaaaagaaatttcaatggtctgcagcctgtgaagacagctttcaagaaatgaagaaaaggttgaccactgccccagttctcaccttgccagatatccgaaaagatttcgagatcttctgtgatgcatcaagacaaggcttagaatgtgtcctaatgcaagaacgaaaggttgtggcctatgcatccaggcagctcagacctcatgaagtcaattatcccacccatgatctcgaattggcagccgtggttcatgctcttaagatctggaggcactatttaatcgggaacagatgtgaagtatacaccgatcacaaaagccttaagtacatcttcacacagacggagttaaatatgaggcagagaagatggttggaactaatcaaggattacgatcttggaattcattaccacccctgtaaagccaacgtggtcgctgatgcgctaagtcgcaaggcctattgcaatgtagctcgaatacggcctgaccaagatcgcctgtgcagagaattggagaagttgaggctgaccgtggtgcagtcaggtgtccctgccagcttgacagtacagcctaccctagagtcgcaaatccgggaagctcagaaaaacgacgaagggataaaagagttaataaaaagaatacaggagaagaaagacaccaatttctccatagacgaccaaggcacagtttggtgcggtccacgcatctgtgtaccggccaagaaggaattaagagatctcatcctaaaagaagctcatgagtccgcctactccattcatccaggaagtacgaagatgtaccaagatatcaaggcatatttctggtgggctggaatgaagcgagacgtcgcagaatacgtagccttgtgtgacatttgccaaagagtcaaggcagagcatcagaggcccgctggtctgctacagcccctaccaattcccgagtggaaatgggaagaaatcggaatggatttcatcaccggtttgccaagaacccctagcgggtacgactccatttgggtaatcgtggaccagctcacgaaaccggctcatttcgtgccagtgaaaaccacctatgatggaaagaaactagcagaactctacatgacccatgtcgtatgtagatttggctgtcccaagaaaattgtgtcagaccgaggcactcagttcacctcaaggttctggaagcagttgcatgaagccctcggaaccgatctaaactttagtacagcttaccatccgcagaccgatggtcagacagaaagaatgtcgccgaatgaggcaatgttcggaagaaagtgccgcacccccttgtgctggaatgaggtgggcgaagcgctggtattcggtcctgacatactcaaggcagcagaagaacaagttaagctaatccgagaacatttaaagacagcgcagaaccgtcagaagaattacgctgacaatcggaggcgtgaccttaagttcgaaaaaggagatcatgtgtacctgcgggtatcacccctccgtggtatgaggaggtttgggatgtccggcaagttagcaccccgctacatcggcccctacctcataactgccagacgaggcgaagtggcttatcagcttgagttacctgaaggtctcgcagatgtgcacaacgtgttccacgtatctcagttaaagaaatgtcttcgagttccagaagagcaagtccccctgggtaatatcgagctggaaaagaatctgacctacaagggaagaccaatcaaggttcttgaagaggcagaacgtcaaactcgaaggaagaccatcaagttctacaaagtccaatggagcaaccattctgaagatgaggcgacctgggagcgagaagatcttctccacgccgagttcccggagctgctcccttag

SEQ ID NO: 15471 - DNA, 5046 bp, Oryza sativa
  Clone ID: TFbOSC400966j.C1.o1.fg
atgggtggaatgggagacatgtggattcaccggggtggtgtctgggaggacccctgggcttcctggcacagtatggtctgggacctaacctgttgttggtctgggacccctctcgtcggcatatggcccactctccagatcgcgtaccaggacctctcctggactgcgcttcgtcgcctggcccacgactacagccaccgtctcgggggctccgccttccggcagcttccacgccttccttctggccactcagacgccaggtacccttgtccgtacagcgagtctcagccagtgctgactcgcatggttgagctttcggaggctcaggccactcagcacgacctactccttgaggcttaccgctcccttgcccgccgctacgccgccttggaggcccgtctggccgaggagggtgtcacctcagttgacactatctcttgggactcaggccgcccctgtcacgccagccacctgtcctcccacagctcccgcggctctgcccgcactcccagtggcccgcgctcccccagctcgcgtgcgccgtactcaccagtgtactccccctacccacacccagttagcccttcctacacccccggacacaccccagttgcttcctcccgccgtggcccacgctttatccgcaccgcgcggaagcgtgttgttggttcttccaccgtgttccatttccactacccagctcccctaccgccagcggcccgtgctgctgccggccctcgacagatggctagccgcccccgccgtgcagctcgtgcgccagcccgctttggttttgaagatggtagagccgagccagaagtaaatcatgagcagtctccccacagcaaccgttcgcaccgtactgcttcccgcaacgcagaagttgagcaaccccgccgcagcaaccgctcgcatcgcacggcttcctgtgatgcagagatggaacagtctcaccgctctcaccacactgccagtcacaattctggagaagaacgcctcccttccccacctcatgtggaaaacaacatgcagcacttaatggcagttcagacacaaatcttgcaaggattagccgcagccgtagccggttttcagcataatgcgcatggaaatggccaccctcacatgagcaacaatagatccaagctgacagattttctgaggtctcgtccgccagagttctctcagaccgtcgagcccgtcgaggctgacgattggctgaaagatgttgatagaaaattcaacttagtgcagtgtacccctgttgagaagacgctctacgcctctcaccagctaagaggacctgctgcagattggtgggagaattactgcaatgcacaccctgaacccactaacattgcttgggatgagtttgctacagctttccgtgcagctcatgtacctgaaagcaccattgacatgaagaaagaggaattcaacagacttaagcaaggcaacagcaatgtcaatgagtacctaagtcagttcaacaagttggctcggtatgcccctgaggaagtggacacagacaagaagaagatcaggaagttcttgaagggaatcgcagttggaatgagactccagttgcttgctcatgacttccctacttttcaacatatgatcaacaaggcacttctacttgaggatgccagaaaagaggctaccgaagaatacaagaaacgcaagtctaaccatcagggaaattcttcccgaggcgcacctcgccctcgctacggtcaacccatgcaataccatcagtcggtcactcaagctaaccgccagccaggctacgcccctcgtcctcagatgaaccgtccggcaccccagccacagcagcgtgcccctagtggcaatactgcgccaaacagtgttacctctttcaagtcaccgcagggaccgtcagcagttcagtgtttccggtgcaaccagatgggtcactatgctagacagtgccctcagaatcctaccaacaccagctcagggcatgctaatggcagcactgctagaactcctactccagcggcagctcagtctcgtcctagctcccaggcaagtggacaaggttctcatgcgtccaacaactttggtcgaggccgagtgaaccacattcaagccgagactgctcaggatgctccagacgttgtgatgggtatgttctctgtcaactccatacccgcaatagttctgtttgattcaggagcttcccactccttcatatcacaagcttttgtgaaaagaaatggttggaaaacccaaaatttacgtgtaccgatgatagtacattcccctgggagggatataagggcaactcaaatatgcccggaagttaaccttagaattgaggaagttgacttcctagccaaaccgatagtcctagactcgcaaagcttggacatcatcctagggatggattggttggcaaagcacaaaggacagatagattgtgccgaaaagtccatcactttgcaaggacctggaggaaagcaagtccgctttacctctaacagtcctaccgcaagtcggtctatcttaacctgtttacaagtcacctccttggagtcggtgcccatagtctgtgaatatcccgacgtatttccagaagaattaacgagtatgccaccagaccgagagattgagttcgccatagaactggcaccaggcaccgcaccaattgcaaaaagaccctaccgaatggcagctaatgagttagcagaagtcaaaagacaaatcgaagaattggagagtaaaggttatgtgcgacctagctcatccccttggggagccccagtgcttctggttaagaaaaaggatggctctgaaagaatgtttgtcgtggtgttcatcgatgacatcctaatatactccaagaatgaggaagaacatgctgaacacctgaggctaataatggaaaagctcagggatcatcaactattcgctaaatttttgaaatgcgaattctggttagaccgagtagcattccttggacacgtgatctcctccaacggtgtcgaagtagatcccagcaaggttgaagctgtacttgcttggaacccgcccaagaatgtgtcagagattcgcagcttccttggcttagccggatattatcgaagattcatcgaaggattctctaagttagccagacccatgaccgagctgttaaagaaggaaaagaaatttcaatggtctgcagcctgtgaagacagctttcaagaaatgaagaaaaggttgaccactgccccagttctcaccttgccagatatccgaaaagatttcgagatcttctgtgatgcatcaagacaaggcttagaatgtgtcctaatgcaagaacgaaaggttgtggcctatgcatccaggcagctcagacctcatgaagtcaattatcccacccatgatctcgaattggcagccgtggttcatgctcttaagatctggaggcactatttaatcgggaacagatgtgaagtatacaccgatcacaaaagccttaagtacatcttcacacagacggagttaaatatgaggcagagaagatggttggaactaatcaaggattacgatcttggaattcattaccacccctgtaaagccaacgtggtcgctgatgcgctaagtcgcaaggcctattgcaatgtagctcgaatacggcctgaccaagatcgcctgtgcagagaattggagaagttgaggctgaccgtggtgcagtcaggtgtccctgccagcttgacagtacagcctaccctagagtcgcaaatccgggaagctcagaaaaacgacgaagggataaaagagttaataaaaagaatacaggagaagaaagacaccaatttctccatagacgaccaaggcacagtttggtgcggtccacgcatctgtgtaccggccaagaaggaattaagagatctcatcctaaaagaagctcatgagtccgcctactccattcatccaggaagtacgaagatgtaccaagatatcaaggcatatttctggtgggctggaatgaagcgagacgtcgcagaatacgtagccttgtgtgacatttgccaaagagtcaaggcagagcatcagaggcccgctggtctgctacagcccctaccaattcccgagtggaaatgggaagaaatcggaatggatttcatcaccggtttgccaagaacccctagcgggtacgactccatttgggtaatcgtggaccagctcacgaaaccggctcatttcgtgccagtgaaaaccacctatgatggaaagaaactagcagaactctacatgacccatgtcgtatgtagatttggctgtcccaagaaaattgtgtcagaccgaggcactcagttcacctcaaggttctggaagcagttgcatgaagccctcggaaccgatctaaactttagtacagcttaccatccgcagaccgatggtcagacagaaagaatgtcgccgaatgaggcaatgttcggaagaaagtgccgcacccccttgtgctggaatgaggtgggcgaagcgctggtattcggtcctgacatactcaaggcagcagaagaacaagttaagctaatccgagaacatttaaagacagcgcagaaccgtcagaagaattacgctgacaatcggaggcgtgaccttaagttcgaaaaaggagatcatgtgtacctgcgggtatcacccctccgtggtatgaggaggtttgggatgtccggcaagttagcaccccgctacatcggcccctacctcataactgccagacgaggcgaagtggcttatcagcttgagttacctgaaggtctcgcagatgtgcacaacgtgttccacgtatctcagttaaagaaatgtcttcgagttccagaagagcaagtccccctgggtaatatcgagctggaaaagaatctgacctacaaggaaagaccaatcaaggttcttgaagaggcagaacgtcaaactcgaaggaagaccatcaagttctacaaagtccaatggagcaaccattctgaagatgaggcgacctgggagcgagaagatcttctccacgccgagttcccggagctgctcccttag

SEQ ID NO: 15472 - DNA, 5292 bp, Oryza sativa
  Clone ID: TFbOSC400993j.C1.o80.fg
atggcagtgaacgccagcttcagttcccacggttttggtgagggtcaccacgtcgctcagcttcgtgacctcgcccgcttccttggcttttcgtgtcccgagtacacggggtactccgtggaccgtgttccccctcgctgtgagctctctgtgtacctttaccctcgtggaggtatacacggagctggccttcgcccacaccacttcactgtggccaggcccactctccagatcgcgtaccaggacctctcctgtcgcgaccgagaaaaatacattttcccgaaagctagtgtattaatccccgtcccaggaaaagccgggactgagccacaaactaagccttacccactagacatgtggaagtacggtagtgctttgcaacagaggcccgagcttaatccttatattggccggggtgctacttcccacaactggcatgcacccaaaccccaccggaaaacaggttttaggggttttgaaagaggaagagagggtggaaccatgaatagagtacccactagttgggattttgtttatcctagggtgaacaaggtcgacggcgacgacgaaaaggcggccggagcggaggaaggcggcggcgcggctcgggtcgacggggacggcggcgctccgacgatcgacgagcgaaacggaggggtggacgaggtcggcgaggatgcggcgaagccgaaggaggcggcgccgaggtgggaggtggtccagggcgacgacgtcggcggaccggagctcggcggcgacggcggagagagagagcgacggcgcgagctcgattccgccgaggaggaagggcggcgagaggcggaaacggacggaggaggacgtgacatctcctggactacgcttcgtcgcttggcccacgactacagccaccgtctcgggggctctgccttccggcagctcccacgccttccttctggccaagcagacgccaggtacccttgtccgtacagcgagtctcagccagtgctgactcgcatggttgagctttcggaggctcaggccactcagcacgacctactccttgaggcttaccactcccttgcccgccgctacgccgctctggaggcccgtctggccgaggagggtgtcacctcagttgacactgtctcttgggactcaggccgcctctgccacgccagccacctgtcctcccacagctcccgcggctctgctcgcactcccagtggcccgcgctcccccagctcgcgtgcgccgtactcaccagtgtactctccctacccacacccagttagcccttcctacacccccggacacaccccagttgcttcctcccgccgtggcccacgctttatccgcactgcgcggaagcgcgttgttggttcttccaccgtgttccgcttcgactacccagctcccccaccgccagcggcccgtgctgctgccggccctcgacagatggctagccgcccccgccgtgctgcccatgcgccagcccgcttcggttttgaagaaggtagagttgtgacagaagcaaatcatgagtcagctaatgagcagtctcaccacagcaacagttcgcaccgtactgcttcccgcaacgcagaagttgagcaaccccgccgcagcaatcgctcgcatcacacagcttcccataatgcagaagtggaacagtctcaccgctctcaccgcactgccagtcacaattctggagaagaacgcctcccttccccacctcatgtggaaaacaacatgcagtacttaatggcagttcagacacaaatcttgcaaggattagccgcagccatagccggttttcagcatagtgcgcatggaaatggccaccctcacatgggcaacaatagatccaagctgacagactttctgaggtctcgtccgccagagttctctcagaccgtcgagcccgtcgaggctgacgattggctgaaagatattgatagaaaactcaacttagtacagtgtactcctgttgagaagacgctctacgcctctcaccagctaagaggacctgctgcagattggtgggagaattactgcaatgcacaccctgaacccactaacattgcttgggatgagtttgctacggctttccgtgcagctcatgtgcctgaaagcaccattgacatgaagaaagaggaatttaacaagcttaagcaaggcaacaacagtgtcaatgagtacctaagtctgttcaacaagttggctcggtacgcccctgaggaagtggacacagacaagaagaagatcaggaagttcttgaagggaatcgcagttggaatgagactccagttgcttgctcatgacttcctcacttttcaacatatgatcaacaaggcacttctacttgaggatgccagaaaagaggctaccgaagaatacaagaaacgcaagtcaccgctaggaccgtcagcagttcagtgtttccgatgcaaccagatgggtcactatgccagacagtgccctcagaatcctaccaacaccaactcagggcatgctaatggcagcactgccagaactcctactccagcggcagctcagtctcgtcctagctctcaggcaagtggacaaggttctcgtccttccaacaactttggtcgaggccgggtgaaccacattcaagctgagaccgctcaggatgctccagacgttgtgatggaggaattaacgagtatgccaccagaccgagagattgagtttgccatagaactggcaccaggcaccgcaccaattgcaaaaagaccctaccgaatggcagctaatgagttagcagaagttaaaaggcaaatcgaagaattggagagtaagggttatgtgcgacctagctcatccccttggggagccccagtgctcctggttaagaaaaaggatggctctgagagaatggtaatcgactatagagccctgaatgaagtaactataaagaacaagtacccgttgccacggattgacgatttgttcgatcaacttaaaggagcaagagttttctctaaaattgacttgagatcaggttaccaccaattgaaaatcagatctgaagatatcccgaagaccgctttctcaacgcgtatgtttgtcgtagtgttcatcgatgacatcctgatatactccaagaatgaggaagaacatgctgaacacctgaggctgataatggaaaagctcagggatcatcaactattcgctaaattctcaaaatgcgaattctggttaaaccgagtagcatttcttggacacgtgatctcctccaacggtgtcgaagtatatcccagcaaggttgaagctgtacttgcttggaacccgcccaagaatgtgtcagagattcgcagcttccttggcttagctggatattatcgaagattcattgaaggattctctaagctagccagacctatgaccgagctgttaaagaaggaaaagaaatttcaatggtctgcagcttgtgaagacagctttcaagaaatgaagaaaaggttgaccactgccccagttctcaccttgccagatatccgaaaagatttcaagatcttctgtgatgcctcaagacaaagcttaggatgtgtcctaatgcaaaaacgaagggttgtggcctatgcatccaggcagctcaggcctcatgaagtcaactatcccacccatgatctcgagttggcagccgtggttcatgctcttaagatctggaggcactatttaatcgggaacagatgtgaagtatacaccgatcacaaaagtcttaagtacatcttcactcagaccgagttaaatatgaggcagagaagatggttggaactaatcaaggattacgatcttggaattcattatcaccccggtaaagccaacgtggtcgctgatgcgctaagtcgcaagacctattgcaatgtagctcaaatacggcctaaccaagatcgcctgtgcaaagaattggagaagttgaggctgaccgtggtacagtcgggtgtccctgccagcctgacggtgcagccaaccctagaatcgcaaatccgggaggctcagaaagatgacgaagggataaaagaattaataaaaaaaatacgggagaagaaagacaccgatttctccatagacgatcaaggcacagtttggtgcggtccacgcatctgtgtaccggccaagaaggatttaagagatctcatcctaaaggaagctcatgagtccgcctactccattcatccaggaagtacgaagatgtaccaggatatcaaggcatatttctggtgggctggaatgaagcgagatgtcgcagaatacgtagccctgtgtgacatttgccaaagagtcaaggcagagcatcagaggccagctgggctgctgcaacccctaccgatccccgagtggaaatgggaagagatcggaatggatttcatcaccgggttgccaagaacccctagcgggtacgactccatctgggtaatcgtggaccgactcacgaaatcagctcatttcgtgccagtgaaaaccacctttgatggaaagaaactagcagaactctacatgacccatgtcgtgtgtagatttggctgtcccaagaagattgtgtcagaccgaggcactcagttcacctcaaggttctggaagcagttgcatgaagccctcggaaccgatctaaattttagtacagcctaccatccgcagaccgatggtcagacagaaagggtaaaccaaatcctagaagacatgctacgtgcgtgtgccctggatttcgaaggcacttgggatcgttgtttgccgtatgctgagttctcatacaacaacagttatcaggccagcattcagatgtcgccgaatgaggcaatgttcggaagaaagtgccgcactcccttgtgctggaatgaggtgggcgaagcgctggtattcggtcccgacatacttaaggcagcagaagaacaagttaaactgatccgagaacgtttaaagacagcgcagaacagtcagaagaattacgctgacaatcggagacgtgaccttgagttcgaaaaaggagatcatgtgtacctgcgggtatcgcctctccgtgatgtgcacaacgtgttccacgtatcccagttaaagaaatgtctccgtgttccagaagaacaagttcccctgggtaatatcgagctggaaaagaatctgacctacaaggaaagaccgatcaaggttcttgaagaggcagaacgtcagactcgaaggaagaccgtcaagttctacaaggtcaaatggagcaatcattctgaagatgaggcaacctgggagcgagaagatcttctccgcgccgagttcccggagctgcttccttag

SEQ ID NO: 15473 - DNA, 5364 bp, Oryza sativa
  Clone ID: TFbOSC401121j.C1.o38.fg
atggcagtgaacgccagcttcagctcccacggttttggtgagggtcaccacgtcgctcagcttcgtgacctcgcccgtttccttggcttctcgtgtcccgagtacacggggtactccgtggaccgtgttccccctcactgtgagctctctgtgtacctttacccccgtggaggtatacacggagctggccttcgtccacaccacttcaccgtggccaggcccactctccagatcgcgtaccaggacctctcctggactgcgcttcgtcgcctggcccacgactacagccaccgtctcgggggctccgccttccggcagcttccacgccttccttctggccactcagacgccaggtacccttgtccgtacagcgagtctcagccagtgctgactcgcatggttgagctttcggaggctcaggccactcagcacgacctactcctggaggcttaccgctcccttgcccgccgctacgccgccctggaggcccgtctggccgaggagggtgtcacttcagttgacactgtctcttgggactcaggccgcctctgccacgccagccacctgtcctcccacagctcccgcggctctgcccgcactcccagtggcccgcgctcccccagctcgcgtgcgccgtactcaccagtgtactccccctacccacacccagttagcccttcctacacccccggacacaccccagttgcttcctcccgccgtggcccacgctttatccgcaccgcgcggaagcgtgttgttggttcttccaccgtgttccgttttcactacccagctcccccaccgccagcggcccgtgctgctgccggccctcgacagatggctagccgtccccgccgtgcagctcgtgcaccagcccgctttggttttgaaaatggtagagttgagccagaagaaaatcatgagtcagctaatgagcagtctcaccacagcaaccgttcgcaccgtactgcttcccgcaacgcagaagttgagcaaccccgccgcagcagccgctcgcatcgcacagtttcccgtaatgcagagatggaacagtctcaccgctctcaccgcactgccagtcacaattctggagaagaacgcctcccttccccacctcatgtggaaaacaacatgcaacacttaatggcagttcagacacaaatcttgcaaggattagccgcagccgtagccggttttcagcataatgcgcatggaaatggccaccctcacatgagcaacaatagatccaagctgacagattttctgaggtcacgtccgccagagttctctcagaccgtcgagcccgttgaggctgacgattggctgaaagatgttgatagaaaactcaacttagtgcagtgtactccggtcgagaagacgctctacgcctctcaccagctaagaggacctgctgcagattggtgggagaattactgcaatgcacaccctgaacccactaacattgcttgggatgagtttgctacggctttccgtgcagctcatgtgcctgaaagcactattgacatgaagaaagaagaattcaacagacttaagcaaggcaacagcagtgtcaatgagtacctaagtatgttcaacaagttggctcggtacgcccctgaggaagtgggcacagacaagaagaagatcaggaaattcttgaaaggaatcgcagttggaatgagactccagttgcttgctcatgatttccccacttttcaacatatgatcaacaaggcgcttctacttgaggatgccagaaaagaggctaccgaagaatacaagaaacgcaagtctaaccatcagggaaattcttcccgaggcgcaccttgccctcgctacggtcaacccatgcaataccaccagtcggtcactcaggctaaccgccagccaggctacgcccctcgtcctcagatgaaccgtccggcacctcagccacagcagcgtgcccctagtggcaatactgcgccaaacagtgttacctctttcaagtcaccacagggaccgtcagcagttcagtgtttccggtgcaaccagatgggtcactatgccagacagtgccctcagaatcctaccaacaccagcttaggtcatgctaatggcagcactgccagaactcctactccagcggcagctcagtctcgtcctagctctcaggcaagtggacaaggttctcgtgcatccaacaactttggtcgaggccgggtgaaccacattcaagctgagaccgctcaggatgctccagacgttgtgatgggtatgttctctgtcaactccatacccgcaatagttctgtttgattcgggagcttcccattctttcatatcacaagcttttgtgaaaagaaatggttggaaaacccaaaatttacgtgtaccaatgatagtacattcccctgggaggaatataagggcaactcaagtatgcccggaagttaaccttagaattgaggaagttgacttcctagccaaaccgatagtcctagactcgcaaagcttggacatcatcctagggatggattggttggctaagcacaaaggacagatagattgtgccgaaaagaccatcaccttgcaaggacctggaggaaagcaagtccgctttacctctaacacccctaccgcaagtcggtctatcctaacctgtttacaagtcacctccttggagtcggtgcccatagtctgtgaatatcccgacgtattcccagaaaaattaacaagtatgccaccagaccgagagattgagttcgccatagaactagcgccaagcaccgcaccaattgcaaaaaggccctaccgaatggcagctaatgagttagcagaagttaaaagacaaatcgaagaattagagagtaaaggttatgtgcgacctagctcatccccttggggagccccagtgcttctggttaagaaaaaggatggctctgagagaatggtaatcgactatagagccctgaatgaagtaactataaagaacaagtacccgttgccacggattgacgatttgttcgatcaacttaaaggagcaagagttttctcaaaaattgacttaagatcaggttaccaccaatttaaaatcagatctgaagatattccgaagaccgctttctcaacgcgttatggtctatacgagttcacagtaatgtccttcggactcactaatgctccagcgttcttcatgaacttaatgaacaaaatctttatggaatacctggaccagtttgtcgtggtgttcatcgatgacatcctgatatactccaagaatgaggaagaacatgctgaacacctgcggctgataatggaaaagctcagagatcatcaactattcgctaaattctcgaaatgcaaattctggttagaccgagtagcatttctcggacacgtgatctcctccaatggtgtcgaagtagatcccagcaaggttgaagctgtacttgcttggaacccgcccaagaatgtgtcagagatccgcagcttccttggcttagctggatattatcgaagattcattgaaggattctctaagctagccagacctatgtccgagctgttaaagaagggcaagaaatttcaatggtctgcagcctgtgaacacagctttcaagaaatgaagaaaaggttgaccactgccccagttctcaccttgccagatatccgaaaagatttcgagatcttctgtgatgcatcaagacaaggcgtaggatgtgtcttaatgcaagaacgaaaggttgtggcctatgcatccaggcagctcaggcctcatgaagtcaattatcccacccatgatctcgagttggcagccgtggttcatgctcttaagatctggaggcactatttaatcgggaacagatgcgaagtatacaccgaccacaaaagtcttaagtatatcttcacacagaccgagttaaatatgagacagagaagatggttggaactaatcgaagattacgatcttggaatccattatcatcccggtaaagctaatgtggtcgctgatgcgctaagtcgcaaggcctattgcaatgtagctcaaatacggcctgaccaagatcgcctgtgcagagaattggagaagttgaggctgaccatggaattaagagatctcatcctaaaggaagctcatgagtccgcctactccattcatccaggaagtacgaagatgtaccaagatatcaaggcatacttctggtgggctggaatgaagcgagatgtcgcagaatacgtagccttgtgtgacatttgccaaagagtcaaggcagagcaccagaggccagctggtatgctacagcccctaccaattcccgagtggaaatgggaagaaatcggaatggatttcatcaccgggttgccaagaacccctagcgggtacgactccatctgggtaatcgtggaccgactcacgaaatcggctcatttcgtgccagtgaaaaccacctatgatggaaagaaactagcagaactctacatgacccatgtcgtatgtagatttggctgtcccaagaagattgtgtcagaccgaggcactcagttcacctcaaggttctggaagcagttgcatgaagctctcggaaccgatctaaattttagtacggcctaccatccgcagaccgatggtcagacagaaagggtaaaccaaatcctagaagacatgctacgtgcgtgtgccctggatttcgaaggcacttgggatcgttgtttgccgtatgctgagttctcatacaacaacagttatcaggccagcattcagatgtcgccgaatgaggctatgttcggaagaaagtgccgcactcccttgtgctggaatgaggcgggcgaagcactagtattcggtcctgacatactcaagacagcagaagaacaagttaagctaatccgagaacgtttaaagacagcgcagaaccgtcagaaaaatttggctgacaatcggagacgtgaccttgagttcgaaaaaggagatcatgtgtacctgcgggtatcacccctccgtggtatgaagaggtttgggatgtccggcaagttagcaccccgctacatcggcccctacctcataaccgccagacgtggcgaagtggcttatcagcttgagctacctgaaggtctcgcagatgtgcacaacgtgttccacgtatcccagctaaagaaatgtcttcgagttccagaagagcaagttcccctgggtaatatcgtactggaaaagaatctgacctacaaggaaagaccgatcaaggttcttgaagaggcagaacgtcagactcgaaggaagaccatcaagttctacaaagtccaatggagcaatcattctgaagatgaggcaacctgggagcgagaagatcttctccgcgccgagtttccggagctgctcccttag

SEQ ID NO: 15474 - DNA, 2510 bp, Oryza sativa
  Clone ID: TFbOSC401123j.C1.o15.np
atgactgtacttctactctataataaagagacttctgttgctgtgatattctgtctccctgtgataccagcactatttcctgggactggtatcgattaacagatggcagtgaacgccagcttcagctcccacggttttggtgagggtcaccacgtcgctcagcttcgtgacctcgcccgtttccttggcttctcgtgtcccgagtacacggggtactccgtggaccgtgttccccctcactgtgagctctctgtgtacctttacccccgtggaggtatacacggagctggccttcgtccacaccacttcaccgtggccaggcccactctccagatcgcccaccgtctcgggggctccgccttccggcagcttccacgccttccttctggccactcagacgccaggtacccttgtccgtacagcgagtctcagccagtgctgactcgcatggttgagctttcggaggctcaggccactcagcacgacctactcctggaggcttaccgctcccttgcccgccgctacgccgccctggaggcccgtctggccgaggagggtgtcacttcagttgacactgtctcttgggactcaggccgcctctgccacgccagccacctgtcctcccacagctcccgcggctctgcccgcactcccagtggcccgcgctcccccagctcgcgtgcgccgtactcaccagtgtactccccctacccacacccagttagcccttcctacacccccggacacaccccagttgcttcctcccgccgtggcccacgctttatccgcaccgcgcggaagcgtgttgttggttcttccaccgtgttccgttttcactacccagctcccccaccgccagcggcccgtgctgctgccggccctcgacaggttccgccggtcccttcgcgtcagccgatcgacgtttcttcgactgaggagccgaccacaggggcccgctttggttttgaaaatggtagagttgagccagaagaaaatcatgagtcagctaatgagcagtctcaccacagcaaccgttcgcaccgtactgcttcccgcaacgcagaagttgagcaaccccgccgcagcagccgctcgcatcgcacagtttcccgtaatgcagagatggaacagtctcaccgctctcaccgcactgccagtcacaattctggagaagaacgcctcccttccccacctcatgtggaaaacaacatgcaacacttaatggcagttcagacacaaatcttgcaaggattagccgcagccgtagccggttttcagcataatgcgcatggaaatggccaccctcacatgagcaacaatagatccaagctgacagattttctgaggtcacgtccgccagagttctctcagaccgtcgagcccgttgaggctgacgattggctgaaagatgttgatagaaaactcaacttagtgcagtgtactccggtcgagaagacgctctacgcctctcaccagctaagaggacctgctgcagattggtgggagaattactgcaatgcacaccctgaacccactaacattgcttgggatgagtttgctacggctttccgtgcagctcatgtgcctgaaagcactattgacatgaagaaagaagaattcaacagacttaagcaaggcaacagcagtgtcaatgagtacctaagtatgttcaacaagttggctcggtacgcccctgaggaagtgggcacagacaagaagaagatcaggaaattcttgaaaggaatcgcagcgcttctacttgaggatgccagaaaagaggctaccgaagaatacaagaaacgcaagtctaaccatcagggaaattcttcccgaggcgcaccttgccctcgctacggtcaacccatgcaataccaccagtcggtcactcaggctaaccgccagccaggctacgcccctcgtcctcagatgaaccgtccggcacctcagccacagcagcgtgcccctagtggcaatactgcgccaaacagtgttacctctttcaagtcaccacagggaccgtcagcagttcagtgtttccggtgcaaccagatgggtcactatgccagacagtgccctcagaatcctaccaacaccagcttaggtcatgctaatggcagcactgccagaactcctactccagcggcagctcagtctcgtcctagctctcaggcaagtggacaaggttctcgtgcatccaacaactttggtcgaggccgggtgaaccacattcaagctgagaccgctcaggatgctccagacgttgtgatgggtatgttctctgtcaactccatacccgcaatagttctgtttgattcgggagcttcccattctttcatatcacaagcttttgtgaaaagaaatggttggaaaacccaaaatttacgtgtaccaatgatagtacattcccctgggaggaatataagggcaactcaagtatgcccggaagttaaccttagaattgaggaagttgacttcctagccaaaccgatagtcctagactcgcaaagctt

SEQ ID NO: 15475 - DNA, 5547 bp, Oryza sativa
  Clone ID: TFbOSC401138j.C1.o20.fg
atggcagtgaacgccagcttcagttcccacggttttggtgagggtcaccacgtcgctcagcttcgtgacctctcccgtttccttggcttctcgtgtcccgagtacacggggtactccgtggaccgtgttccccctcactgtgagctctcggtgtacctttacccccgtggaggtatacacggagctggccttcgcccccaccacttcactgtggccaggcccactctccagatcgcgtaccaggacctctcctggactgcgcttcgtcgcctggcccacgactacagccaccgtctcggaggttccgccttccggcagcttccacgccttccctctggccactcagacgccaggtacccttgtccgtacagcgagtctcagccagtgctgactcgcatggtcgagctttcggaggctcaggccactcagcacgacctactccttgaggcttaccgctcccttgcccgccgctacgccgctttggaggcccgtctggccgaggagggtgtcacctcagttgacactatctcttgggactcaggccgcctctgccacgccagccacctgtcctcccacagctcccgcggctctgcccgcactcccagtggcccgcgctcccccagctcgcgtgcgccgtactcaccagtgtactccccctacccacacccagttagcccttcctacacccccggacacaccccagttgcttcctcccgccgtggcccacgctttatccgcaccgcgcggaagcgtgttgttggttcttccaccgtgttccgtttccactacccagctcccccaccgtcagcggcccgtgctgctgccggccctcgacagatggctagccgcccccgccatgccgctcgtgcaccagcccgctttggttttgaagatggtagagttgaagcagaagcaaatcatgaatcagctaatgagcagtctcaccacagcaaccgttcgcaccgtactgtttcccgcaacgcagaggttgagcaaccccgccgcagcagccgctcgcatcgcacagtttcccgtgatgcaaagatggaacagtctcaccgcactgccagtcacaattctggagaagaacgcctcccttccccatctcatgtggaaaccaacatgcaacacataatggcagtacagacacaaatcttgcaaggactaaccacagccatagccagttttcagcataatgcgcatggaaatggccaccctcacgtgggcaacaatagatccaagctgacagactttctgaggtcacgtccgccagagttctctcagaccgtcgagcccgtcgaggctgacgattggttgaaagatgttgatagaaaactcaacttagtgcagtgtactcctgttgagaagacgctctatgcctctcaccagctaagaggacctgctgcagattggtgggagaattactgcaatgcacatcctgaacccactaacattgcttgggatgagtttgctacggctttccgtgcagctcatgtgcctgaaagcactattgacatgaagaaagaagaattcaacagacttaagcaaggcaatagcagtgtcaatgagtacctaagtcagttcaacaagttggctcggtacgcccctgaggaaatagacacagataagaagaagatcaggaaattcttgaagggaattgcagttggaatgagactccagttgcttgctcatgacttccccacttttcaacatatgatcaacaaggcacttctgcttgaggatgccagaaaagaggctaccgaagaatacaagaaacgcaagtctaaccatcagggaaattcttcccgaggcgcacctcgccctcgctacggtcaacccatgcaataccaccagtcggtcactcaggctaaccgccagccaagctacgcccctcgtcctcagataaaccgtccggcacctcagccacagcagcgtgcccctagtggcaatactgcgcctaacagcgttacctctttcaagtcaccacagggaccgtcagcagttcagtgtttccggtgcaaccagatgggtcactatgctagacagtgccctcagaatcctaccaacaccaactcagggcatgctaatggcagcaccgccagaactcctactccagcggcagctcagtctcgtcctagctctcaggcaagtggacaaggttctcgtgcttccaaccactttggtcgaggacgtgtgaatcacattcaagctgaaaccgctcaggatgctccagacgttgtgatgggtatgttctctgtcaactccgtacccgcaatagttctatttgattcaggagcttcccattctttcatatcacaagcttttgtgaaaagaaatggttggaaaacccaaaatttgcgtgtaccaatgatagtacattcccctgggaggaatataagggcaactcaaatatgcccggaagttaaccttagaattgaggaagttgacttcctagccaaaccgatagtcctagactcgcaaagcttggacatcatcctagggatggattggttggctaagcacaaaggacagatagattgtgccgaaaagtccatcaccttgcaaggacctggaggaaagcaagtccgctttacccctaacacccctaccgcaagccggtctattctaacctgtttacaagtcacctccttggagtcggtgcccatagtctgtgaatatcccgacgtattcccagaagaattaacgagaatgccaccagaccgagaggttgagttcgccatagaactggcaccaggcacagctccaattgcaaaaagaccctaccgaatggcagctaatgagttagcagaagttaaaagacaaatcgaagaactggaaagtaaaggttatgtgcgacctagctcatccccttggggagccccagtgcttctggttaagaaaaaggatggctctgagagaatggtaatcgactatagagccctgaatgaagtaactataaagaacaagtacccgttgccacggattgacgatttattcgatcaacttaaaggagcaagagttttctcaaaaattgacttgaggtcaggttaccaccaactgaaaatcagatctgaagatatcccgaagaccgctttctcaacgcgttatggtctatatgagttcacagttatgtccttcggactcaccaatgctccagcattcttcatgaacttaatgaataaaatcttcatggaatacatggaccagtttgtcgtggtgttcatcgatgacatcctgatatactccaagaacgaggaagaacatgctgaacacctgaggctgataatggaaaagctcagagatcatcaactattcgctaaattctcgaaatgcgaattctggttagatcgagtagcatttcttggacacgtgatttcctccaacggtgtcgaagtagatcccagcaaggttgaagctgtacttgcttggaacccgcccaagaacgtgtcagagatccgtagtttccttggcttagcgggatattatcgaagattcattgaaggattctctaagctagccagacctatgaccgagctgttaaagaaggaaaagaaatttcaatggtctgcagcctgtgaagacagctttcaagaaatgaagaaaaggttgaccactgcaccagttctcaccttgccagatatccgaaaagattttgagatcttctgtgacgcatcaagacaaggcttaggatgtgtcctaatgcaagaacgaaaggttgtggcctatgcatccaggcagctcaggcctcatgaagtcaattatcccacccatgatctcgagttggcagccgtggttcatgctcttaagatctggaggcattatttaatcgggaacagatgtgaagtatacaccgatcacaaaagtcttaaatatatcttcacccagaccgagttaaatatgaggcagagaagatggttggaactaatcaaggattacgatcttggaatccactatcatcctggtaaagccaacgtggtcgctgatgcgctaagtcgcaaggcctattgcaatgtagctcaaatacggcctgaccaagatcatctgtgcagagaattggagaagttaaggctgaccgtggtacagtcaggagtccctgccagcttgacagtacagcctaccctagaatcgcaaatccgggaggctcagaaagatgacgaagggataaaagagttaataaaaagaatacaggagaagaaagacaccaatttctccatagacgatcaaggcacagtttggtgcggtccacgcatctgtgtaccggccaagaaggagttaagagatctcatcctaaaggaagctcatgagtccgcttactccattcatccaggaagtacgaagatgtaccaagatatcaaggcatacttttggtgggctggaatgaagcgagatgtcgcagaatacgtagccttgtgtgacatttgccaaagagtcaaggcagagcatcagaggccagctggtctgctgcaacccctaccgattcccgagtggaaatgggaagagatcggaatggatttcatcaccggtttgccaagaacccccagcgggtacaactccgtttgggtaatcgtggaccgactcacgaaatcagctcatttcgtgccagtgaaaaccacctatgatggaaagagactagcagaactctacatgacccatgtcgtatgtagatttggctgtcccaagaaaattgtgtcagaccgaggcactcagttcacctcaaggttctggaagcagttgcatgaagccctcggaactgatctaaattttagtacagcctaccatccgcagaccgatggtcagaccgaaagggtaaaccaaatcctagaagacatgctacgtgcgtgtgccttggatttcgaaggcacttgggatcgttgtttgccgtatgctgagttctcatacaacaacagttatcaggccagcattaagatgtcgccgaatgaggcaatgttcggaagaaagtgccgcactcccttgtgctggaatgaggtgggcgaagcactggtattcggtcctgacatactcaagtcagcagaagaacaagttaagctgatccgagaacgtttgaagacagcacagagccgtcagaagaattacgctgacaatcggaggcgtgaccttgagttcgaaaaaggagatcatgtatacctgcgagtatcacccctccgtggtatgaggaggtttgggatgtccggcaagttagcagcccgctacatcggcccctacctcataaccgccagacgtggcgaagtggcttatcagcttgagctacctgaaggtctcgcagatgtgcacaacgtgttccacgtatcccagttaaagaaatgtcttcgagttccagaagagcaagttcccctgggtaatatcgagctggaaaagaatctgacctacaaggaaagaccgttcaaggttcttgaagaggcagaacgtcagactcgaaggaagatcatcaagttctacaaagtccaatggagcaatcattctgaagatgaggcaacctgggaacgagaagatcttctccgcgccgagtttccggagctgctcccttag

SEQ ID NO: 15476 - DNA, 4716 bp, Oryza sativa
  Clone ID: TFbOSC401196j.C1.o71.fg
atggctagccgcccccgccgtgcagcccgtgcaccagcccgctttggttttgaagatggtagagttgagccagaagaaaatcatgagtcggctaatgagcagtctcgccgcagcaaccgttcgcatcgtactgcttcccgtaacgcagaagttgagcaaccccgccgcggcagccgctcgcatcgcgcagtttcccgtgatgcagagatggaacagtctcaccgctctcaccgcactgccagtcacaattctggagaagaacgcctcccttccccacctcatgtggaaaacaacatgcaacacataatggcagttcagacacaaatcttgcaaggactaaccacagccatagccagttttcagcataatgcgcatggaaatggccaccctcacgtgggcaacaatagatccaagctgacagattttctgaggtcacgtccgccagagttctctcagaccgtcgagcccgtcgaggctgacgattggttgaaagatgttgatagaaaactcaacttagtgcagtgtactcctgttgagaagacgctctacgcctctcaccagctaagaggacctgctgcagattggtgggagaattactgcaatgcacatcctgaacccactaacattgcttgggatgagtttgctacggctttccgtgcagctcatgtgcctgaaagcactattgacatgaagaaagaagaattcaacagacttaagcaaggcaacagcagtgtcaatgagtacctaagtcagttcaacaagttggctcggtacgcccctgaggaagtagacacagataagaagaagatcaggaaattcttgaaacgaatcgcagttggaatgagactccagttgcttgctcatgacttccccacttttcaacatatgatcaacaaggcacttctgcttgaggatgccagaaaagaggctaccgaagaatacaagaaacgcaagtctaaccatcagggaaattcttcccgaggcacacctcgccctcgctacggtcaacccatgcaataccaccagtcggtcactcaggctaaccgccagccaggctacgcccctcgccctcagatgaaccgtccgacacctccgccacagcagtgtgcccctagtggcaacactgcgccaaacagtgttacctctttcaactcaccacagggaccgtcagtagttcagtgtttccggtgcaaccagatgggtcactatgctagacagtgccctcagaatcctaccaacaccaacttagggcatgctaatggcagcatcgccaaaactcctactccagcggcagctcagtctcgtcctagctctcaggcaagtggacaaggttctcgtgcttccaaccactttggtcgaggacgtgtgaatcacattcaagctgaaaccgctcaggatgctccagacgttgtgatgggtatgttctctgtcaactccgtacccgcaatagttctatttgattcaggagcttcccattctttcatatcacaagcttttgtgaaaagaaacggttggaaaacccaaaatttacgtgtaccaatgatagtacattcccctggaaggaatataagggcaactcaaatatgcccggaagttaaccttaaaattgaggaagttgacttcctagccaaaccgatagtcctagactcgcaaagcttggacatcatcctagggatggattggttggctaagcacaaaggacagatagattgtgccgaaaagtccatcaccttgcaaggacctggaggaaagcaagtccgctttacccctaacacccctaccgcaagtcggtctatcctaaccagtctacaagtcacctccttggagtcggtacccatagtctgtgaatatcccgacgtatttccagaagaattaacgagtatgccaccagaccgagagattgagttcgccatagaactggcaccagggactgcaccaattgcaaaaaggccataccgaatggcagctaatgagttagcagaagttaaaagacaaatcgaagaactggaaagtaaaggttatgtgcgacctagctcatccccttggggagccccagtgcttctggttaagaaaaaggatggctcggagagaatggtaatcgactatagagccctgaatgaagtaactataaagaacaagtacccgttgccacggattgacgatttattcgatcaacttaaaggagcaagagttttctcaaaaattgacttgaggtcaggttaccaccaactgaaaatcagatctgaagatatcccgaagaccgctttctcaacgcgttatggtctatatgagttcacagttatgtccttcggactcaccaatgctccagcattcttcatgaacttaatgaacaaaattttcatggaatacctagaccagtttgtcgtggtgttcatcgatgacatcctgatatactccaagaacgaggaagaacatgctgaacacctgaggctgataatggaaaagctcagagatcatcaactattcgctaaattctcgaaatgggaattctggttggaccgagtagcatttcttggacacgtgatctcctctaacggtgtcgaagtagatcccagcaaggttgaagctgtacttgcttggaacccgcccaagaatgtgtcagagatccgcagcttccttggcttagcgggatattatcgaagattcattgaaggattctctaagctagccagacctatgaccgagctgttaaagaaggaaaagaaatttcactggtctacagcctgtgaagacagctttcaagaaatgaagaaaaggttgaccactgcaccagttctcaccttgccagatatccgaaaagattttgagatcttctgtgacgcatcaagacaaggcttaggatgtgtcctaatgcaagaacgaaaggttgtggcatatgcatccaggcagcttaggcctcatgaagtcaattatcccacccatgatctcgagttggcaaccgtggttcatgctcttaagatctggaggcattatttaatcgggaacagatccaacgtggtcgctgacgcgctaagtcgcaaggcctattgcaatatagctcaaatacggcctgaccaagatcacctgtgcagagaattggagaagttaagactgaccgtggtacagtcaggtgtccctgctagcttgacagtacagcctaccctagagtcgcaaatccgggaggctcagaaagacgacgaagggataaaagaattaataaaaagaatacaggagaagaaagacaccaacttctccatagacgatcaaggcacagtttggtgcggtccacgcatctgtgtaccggccaagaaggagttaagagatctcatcctaaaggaagctcatgagtccgcttactccattcatccaggaagtacgaagatgtaccaagatatcaaggcatacttttggtgggttggaatgaagcgagatgtcacagaatacgtagccttgtgtgacatttgccaaagagtcaaggcagagcatcagaggccagccgcagacagccatgattccgcgtcgcgcctgctcccggcgaaagtggagattgggagcttggagtctcacctagggtccccggccgaaccggcaaaggggggcctgcgcggtctcccggtgaggagccccacgctccgtcacctaccgattcccgagtggaaatgggaagagatcggaatggatttcatcaccggtttgccaagaacccccaacgggtacgactccatttgggtaatcgtggaccgactcacgaaatcagctcatttcgtgccagtgaaaaccacctatgatggaaagaaactagcagaactctacatgacccatgtcgtatgtagatttggctgtcccaagaaaattgtgtcagaccgaggcactcagttcacctcaaggttctggaagcagttgcatgaagccctcggaactgatctaaattttagtacggcctaccatccacagaccgatggtcagacggaaagggtaaaccaaatcctagaagacatgctgcgtgcgtgtgccttggatttcgaaggcacttgggatcgttgtttgccgtatgctgagttctcatacaacaacagttatcaggccagcattcagatgtcgccgaatgaggcaatgttcggaagaaagtgccgcacccccttgtgctggaatgaggtgggcgaagcactggtattcggtcctgacatactcaagtcagcagaagaacaagttaagctgatacgagaacgtttgaagacagcacagaaccgtcataagaattacactgacaatcggaggcgtgaccttgagttcgaaaagggagatcatgtgtacctgcgggtatcacccctccgtggtatgagaaggtttgggatgtccggcaagttagcaccccgctacatcggcccctacctcataaccgccagacgtggcgaagtggcttatcagcttgagctacctgaaggtctcgcagatgtgcacaacgtgttccacgtatcccagctaaagaaatgtcttcgagttccagaagagcaagttcccctgggtaatatcgagctggaaaagaatctgacctacaaggaaagaccgatcaaggttcttgaagaggcagaacgtcagactcgaaggaagaccatcaagttctacaaagtccaatggagcaatcattctgaagatgaggcaacctgggaacgagaagatcttctccgcgccgagttcccggacctgctcccttag

SEQ ID NO: 15477 - DNA, 5556 bp, Oryza sativa
  Clone ID: TFbOSC401200j.C1.o41.fg
atggcagtgaacgccagcttcagttcccacggttttggtgagggtcaccacgtcgctcagcttcgtgacctctcccgtttccttggcttctcgtgtcccgagtacacggggtactccgtggaccgtgttccccctcactatgagctctcggtatacctttacccccgtggaggtatacacggagctggccttcgcccccaccacttcactgtggccaggcccactctccagatcgcgtaccaggacctctcctggactgcgcttcgtcgcctggcccacgactacagccaccgtctcggaggctccgccttccggcagcttccacgccttccttctggccactcagacgccaggtacccttgtccgtacagcgagtctcagccagtgctgactcgcatggttgagctttcggaggctcaggccactcagcacgacctactccttgaggcttaccgctcccttgcccgccgctacgccgccttggaggcccgcctggccgaggagggtgtcacctcagttgacactatctcctgggactcaggccgcctctgccacgccagccacctgtcctcccacagctcccgcggctctgcccgcactcccagtggcccgcgctcccccagctcgcgtgcgccgtactcaccaatgtactccccctacccacacccagttagcccttcctacacccccggacacaccccagttgcttcctcccgccgtggcccacgctttatccgcactgcgcggaagcgtgttgttggttcttccaccgtgttccgtttccgccacccagctcccccaccgccagcggcccgtgctgctgccggccctcgacagatggctagccacccccgccatgcagcccgtgcaccagcccgctttggttttgaagatggtagagttgagccagaagaaaatcatgagtcggctaatgagcagtcacaccacagcaaccgttcgcaccatactgtttcccgcaacgcagagattgggcaaccccgccgcagcaaccgctcgcatcgcacagtttcccgtgatgcagagatgggacagtctcaccgctctcaccgcactgccagtcacaattctggagaagaacgcctcccttccctacctcatgtggaaaacaacatgcaacacataatgacagttcagacacaaatcttgcaaggactaaccacagccatagccagttttcagcataatgcgcatggaaatggccaccctcacgtgggcaacaatagatccaagctgacagattttctgaggtcacgtccgccagagttctctcagaccgtcgagcccgtcgaggctgacgattggttgaaagatgttgatagaaaactcaacttagtgcagtgtactcctgttgagaagacgctctacgcctctcaccagctaagaggacctgctgcagattggtgggagaattactgcaatgcacaccctgaacccactaacattgcttgggatgagtttgctacggctttccgtgcagctcatgtgcctgaaagcactattgacatgaagaaagaagaattcaacagacttaagcaaggcaacagcagtgtcaatgagtacctaagtcagttcaacaagttagctcggtacgcccctgaagaagtggacacagataagaagaagatcaggaaattcttgaaagggatcgcagttggaatgagactccagttgcttgctcatgacttccccacttttcaccatatgatcaacaaggcacttctacttgaggatgccagaaaagaggctaccgaagaatacaagaaacgcaagtctaaccatcagggaaattcttcccgaggcgcacctcgccctcgctacggtcaacccatgcaatatcaccagtcggtaactcaggctaaccaccagccaggctacgcccctcgtcctcagatgaaccgtccggcacctcagccacagcagcgtgcccctagtggcaatactgcgccaaacagtgttacctctttcaagtcaccacagggaccgtcagcagttcagtgtttccggtgcaaccagatgggacactatgccagacagtgtcctcagaatcctaccaacaccaactcagggcatgctaatggcagcactgccagaactcctgctccagcggcagctcagtctcgtcctagctctcaggcaagtggacaaggttctcgtgcgtccaaccactttggtcgaggacgtgtgaatcacattcaagctgaaatcgctcaggatgctccagacgttgtgatgggtatgttctctgtcaactccgtacccgcaatagttctgtttgattcaggagcttctcattctttcatatcgcaagcttttgtgaaaagaaatggttggaaaacccaaaatttgcgtgtaccgatgatagtacattcccctggaaggaatataagggcaactcaaatatgcccggaagttaaccttagaattgaggaagttgacttcctagccaaaccgatagtcctagactcgcaaagcttggacatcattctagggatggattggttggctaagcacaaaggacagatagattgtgccgaaaagtccatcaccttgcaaggacctggaggaaagcaagtccgctttacccctaacacccctaccgcaagtcggtctatcctaacctgtttacaagtcacctccttggagtcggtgcccatagtctgtgaatatcccgacgtatttccggaagaattaacaagaatgccaccagaccgagagatcgagttcgccatagaactggcaccaggcacagctccaattgcaaaaagaccctaccgaatggcagctaatgagttagcagaagttaaaagacaaatcgaagaactggaaagtaaaggttatgtgcgacctagctcatccccttggggagccccagtgcttctggttaagaaaaaggatggctctgagagaatggtaatcgactatagagccctaaatgaagtaactataaagaacaagtacccgttgccacggattgacgatttattcgatcaacttaaaggagcaagagttttctcaaaaattgacttgaggtcaggttaccaccaactgaaaatcagatctgaagatatcccgaagaccgctttctcaacgcgttatggtctatatgagttcacagtaatgtccttcggactcaccaatgctccagcattcttcatgaacttaatgaacaaaatctttatggaatatctggaccagtttgtcgtggtattcatcgatgacatcctgatatactctaagaacgaggaagaacatgctgaacacctgaggttgataatggaaaagctcagggaccatcaactattcgcaaaattctcaaaatgcgaattctggttagaccgagtagcatttcttggacacgtgatctcccccaacggtgtcgaagtagatcccagcaaggttgaagctgtacttgcttggaacccgcccaagaatgtgtcagagattcgcagtttccttggcttagctggatattatcgaagattcattgaaggattctctaagctagccagacctatgaccgagctgttaaagaaggaaaagaaattccaatggtctgtagcctgtgaagacagctttcaagaaatgaagaaaaggttgaccactgccccagttctcaccttgccagatatccgaaaagatttcgagatcttctgtgatgcatcaagacaaggcttaggatgtgtcctaatgcaagaacgaaaggttgtggcctatgcatccaggcagctcaggcctcatgaagttaattatcccacccatgatctcgagttggcagccgtggttcatgctcttaagatctggaggcattatttaatcgggaacagatgtgaagtatacaccgatcacaaaagtcttaagtatatcttcactcagaccgagttaaatatgagacagagaagatggttggaactaatcaaggattacgatcttggaatccactatcatcctggtaaagccaacgtggtcgctgatgcgctaagtcgcaaggcctattgcaatgtagctcaaatacggcctgaccaagatcacctgtgcagagaattggagaagttaagactgaccgtggtacagtcaggtgtccctgccagcttgacagtacagcctaccctagagtcgcaaatccgggaggctcagaaagacgacgaagggataaaagaattaataaaaagaatacaggagaagaaagacacaaatttctccatagacgatcaaggcacagtttggtgcggaccacgcatctgtgtaccggccaagaaggagttaagagatctcatcttaaaggaagctcatgagtccgcctactccatccacccaggaagtacgaagatgtaccaagatatcaaggcatacttctggtgggctggaatgaagcgagacgtcgcagaatacgtagccctgtgtgacatttgccaaagagtcaaggcggaacatcagaggccagctggtctgctgcaacccctaccgattcccgagtggaaatgggaagagatcggaatggatttcatcaccggtttgccaagaacccccagcgggtacgactccatctgggtaatcgtggaccgactcacgaagtcagctcatttcgtgccagtgaaaaccacctatgatggaaagaaactagcagaactctacatgactcatgtcgtatgtagatttggctgtcccaagaaaatagtgtcggaccgaggcactcagttcacctcaaggttctggaagcagttgcatgaagccctcggaactgatctgaattttagtacagcctaccatccgcagaccgatggtcagaccgaaagggtaaaccaaatcctagaagacatgctacgtgcgtgtgccttggatttcgaaggcacttgggatcgttgtttgccgtatgctgagttctcatacaacaacagttatcaggccagcattcagatgtcgccgaatgaggcaatgttcggaagaaagtgccgcacccccttgtgctgggatgaggtgggcgaagccctggtattcggtcctgacatacttaagtcagcagaagaacaagttaagctgatccgagaacgtttaaagacagcgcagaaccgtcagaaaaattacgctgacaatcggagacgtgaccttgagttcgaaaagggagatcatgtgtacctgcgagtatcacccctccgtggtatgagaaggtttgggatgtccggcaagttagcaccccgctacatcggcccctacctcataaccgccagacgtggcgaagtggcttatcagcttgagctacctgaaggtctcgcagacgtgcacaacgtgttccacgtatcccagttaaagaaatgtcttcgagttccagaagagcaagttcccctaggtaatatcgagctggaaaagaatctgacctacaaggaaagaccgatcaaggttcttgaagaggcagaacgtcagactcgaaggaagaccatcaagttctacaaagtccaatggagcaatcattccgaagacgaggcaacctgggagcgagaagatcttctccgcgccgagttcccggacttgctcccttag

SEQ ID NO: 15478 - DNA, 5556 bp, Oryza sativa
  Clone ID: TFbOSC401215j.C1.o49.fg
atggcagtgaacgccagtttcagttcccacggttttggtgagggtcaccacgtcgcccagcttcgtgacctcgcccgtttccttggcttctcgtgtcccgagtacacggggtactccgtggaccgtgttccccctcactgtgagctctctgtgtacctttaccctcgtggaggtatacacggagttggccttcgcccccaccacttcactgtggccaggcccactctccagatcgcgtaccaggacctctcctggactgcgcttcgccgcctggcccacgactacggccaccgtctcggaggctccgccttccggcagcttccacgtcttccttctggccacgcagacgccagatacccttgtccgtacagcgagtctcagccagtgctgactcgcatggtcgagctttcggaggctcaggccactcagcacgacctactccttgaggcttaccgctcccttgcccgccgctacgccgccttggaggcccgtctggccgaggagggtgtcacctcagttgacactatctcttgggactcaggccgtctctgccacgccagccacctgtcctcccacagctcccgcggctctgctcgcactcccagtggcccgcgctcccccagctcgcgtgcgccgtactcaccagtgtactccccctacccacacccagttagcccttcctacacccccggacacactccagtcgcttcctcccgccgtggcccacgctttatccgcactgcgcggaagcgtgttgttggttcttccaccgtgttccgtttccgccacccagctcccccaccgccagcggcccgtgctgctgccggccctcgacagatggctagccgcccccgtcgtacagctcgtgcaccagtccgctttggttttgaagatggtagagttgaagcagaagcaaatcacgaaccagctaatgagcattctcaccacagcaaccgttcgcaccgtactgtttcccgcaacgcagaggttgagcaacctcgccgcagcagccgctcgcatcgcacagtttcccgtgaagcagagttggagcagtctcaccgctctcaccgcactgccagtcacaattctggagaagaacgcctcccttccccacctcatgtggaaaacaacatgcaacacataatggcagttcagacacagatcttgcaaggtctaaccacagccatagccagctttcagcataatgcgcatggaaatggccaccctcacgtgggcaacaatagatccaagctgacagactttctgaggtcacgtccaccagagttctctcagaccatcgagcccgtcgaggctgacgattggttgaaagatgtggatagaaaactcaacttagtgcagtgtactcctgttgagaagacgctctacgcctctcaccagctaagaggacctgccgcagattggtgggagaattactgcaatgcacatcctgaacccactaacattgcttgggatgagttcgctacggctttccgtgtagctcatgtgcctgaaagcactattgacatgaagaaagaagaatttaacagactcaagcaaggccacagcagtgtcaatgagtacctaagtcagttcaacaagttggctcggtacgcccctgaggaagtagacaccgataagaaaaagatcaggaaattcttgaaaggaatcgcagttggaatgagactccagttgcttgctcatgacttccccacttttcaacatatgatcaacaaagcacttctacttgaggatgccagaaaagaggccaccgaagaatacaagaaacgcaagtctaaccatcagggaaattcttcccgaggcgcacctcgccctcgctacggtcagcccatgcaataccatcagtcggtcactcaggctaaccgccagtcaagctacgcccctcgtcctcagatgaaccgtccggcacctccgccacagcagcgtgcccctagtggcaacactgcgccaaacagtgttacctccttcaagtcaccacagggaccgtcagcagttcagtgtttccggtgcaaccagatgggtcactatgctagacagtgtcctcagaatcctaccaacaccagcccaggacatgctaatggcagcactgccagaactcctactccagcggcagctcagtctcgtcctagctctcaagcaagtggacaaggttctcgtgcttccaaccactttggtcgaggacgtgtgaatcacattcaagctgaaaccgctcaggatgctccagacgttgtgatgggtatgttctctgtcaactccgtacccgcaatagtcctgtttgattcgggagcttcccattctttcatatcgcaagcttttgtgaaaagaaatggttggaaaacccaaaatttgcgtgtaccaatgatagtacattcccctggaaggaatataagggcaactcaaatatgcccggaagttaaccttagaattgaggaagttaacttcctagccaaaccgatagtcctagactcgcaaagcttggacatcatcctagggatggattggttggctaagcacaaaggacagatagattgtgccgaaaagtccatcaccttgcaaggacctggaggaaagcaagtccgctttacccctaacacccctaccgcaagtcggtctatcctaacctgtttgcaagtcacctccttggagtcggtgcccatagtctgtgaatatcccgacgtatttccggaagaattaacaagaatgccaccagaccgagagattgagttcgccatagaactggcaccaggcacagctccaattgcaaaaagaccctaccgaatggccgctaatgagttagcagaagttaaaagacaaatcgaagaactggaaagtaaaggttatgtgcgacctagctcatccccttggggagccccagtgcttctggttaagaaaaaggatggctctgagagaatggtaattgactatagagccctgaatgaagtaactataaagaacaagtacccgttgcctcggattgacgacttattcgatcaacttaaaggagcaagagtcttctcaaaaattgacttgaggtcaggttaccaccaactgaaaatcagatctgaagatattccgaagaccgctttctcgacgcgttatggtctatatgagttcacagtaatgtccttcggactcaccaatgctccagcattcttcatgaacttaatgaacaaaatctttatggaatacctggaccagtttgtagtggtattcatcgatgacatcctgatatactctaagaatgaggaagaacatgctgaacacctgaggctgataatggaaaagctcagagatcatcaactattcgctaaattctcgaaatgcgaattctggttggaccgagtagcttttcttggtcacgtgatctcctccaacggtgtcgaagtagatcccagcaaagttgaagctgtacttgcgtggaacccgcccaagaatgtgtcggagattcgcagcttcctcggcttagctggatattatcgaagattcattgaaggattctctaagctagccagacctatgaccgagctgttaaagaaggaaaagaaatttcaatggtccacagcctgtgaagacagctttcaagaaatgaagaaaagattgaccactgccccagttctcaccttgccagatatccgaaaagacttcgagatcttctgtgatgcatcaagacagggcttaggatgtgtcctaatgcaagaacgaaaggttgtggcctatgcatccaggcagctcaggcctcatgaagtcaattaccccacccatgatctcgagttggcagccgtgattcatgctcttaagatctggaggcactacttaatagggaacagatgcgaagtatacaccgatcacaaaagtcttaagtatatcttcactcagaccgagttaaatatgagacagagaagatggttggaactaatcaaggattacgatcttggaatccactatcatcctggtaaagccaacgtggtcgctgatgcgctaagtcgcaaggcctattgcaatatagctcaaatacggcctgaccaagatcacctgtgcagagaattggagaagttaaggctgaccgtggtgcagtcaggtgtccctgccagcttgacagtacagcctaccctagagtcgcaaatccgggaggctcagaaagacgacgaagggataaaagaattaataaaaagaatacaggagaagaaagacaccaatttctccatagacgatcaaggcacaatttggtgcggtccacgcatctgtgtaccggccaagaaggagttaagaaatctcatcctaaaggaagctcatgagtccgcttactccattcatccaggaagtacgaagatgtaccaagatatcaaggcatacttttggtgggctggaatgaagcgagatgtcgcagaatacgtagccttgtgtgacatttgccaaagagtcaaggcagaacaccaaaggccagctggactgctacaacccctaccgattcccgagtggaaatgggaagagatcggaatggatttcatcaccggtttgccaagaacccccagcggatacgactccatttgggtaatcgtggaccgactcacgaagtcagcacatttcgtgccagtgaagaccacctatgatggaaagaaactagcagaactctacatgactcatgtcgtatgtagatttggctgtcccaagaaaatagtgtcggatcgaggcactcagttcacctcaaggttctggaagcaattgcatgaagcactcggaactgatctgaattttagtacggcctaccacccgcagaccgatggtcagacagaaagagtaaaccagatcctagaagacatgctgcgagcatgtgccttggatttcgaaggcacttgggatcgttgtttgccgtatgccgagttctcatacaacaacagttatcaggccagcattcagatgtcgccgaatgaggcaatgttcggaagaaggtgccgcactcccttgtgctggaatgaggtgggcgaagccttggtattcggtcctgacatactcaagtcagcagaagaacaagttaagctgatacgagaacgtttgaggacagcacagaaccgtcagaagaattacgctgacaatcggaggcgtgaccttgagttcgaaaaaggagatcatgtgtacctacgggtatcaccactccgaggaatgagaaggtttgggatgtccggcaagttagcaccccgctacatcggcccctacctcataaccgccagacgtggcgaagtggcttatcagcttgagctacctgaaggtctcgcagatgtgcacaacgtgttccacgtatcccagttaaagaaatgtcttcgagttccagaagagcaagttcccctaggtaatatcgagctggaaaagaatctgacctacaaggaaagaccgatcaaggttcttgaagaagcagaacgtcagactcgaaggaagacaatcaagttctacaaagtccaatggagcaatcattctgaagatgaagcaacctgggaacgagaagatcttctccgcgccgagtttccggagctgctcccttag

SEQ ID NO: 15479 - DNA, 5454 bp, Oryza sativa
  Clone ID: TFbOSC401237j.C1.o36.fg
atggcagtgaacgccagcttcagttcccacggttttggtgagggtcaccatgtcgctcagcttcgagacctcgcccgcttccttggcttctcgtgtcccgagtacacggggtactccgtggaccgtgttccccctcgctgtgagctctctgtgtacctttaccctcgtggaggtatacacggagctggccttcgcccacaccacttcactgtggccaggcccactctccagatcgcgtgccaggacctctcctggactgcgcttcgtcgcttggcctacgactacagccaccgtctcgggggctctgccttccggcagcttccacgccttccttctggccacgcaaacgccaggtacccttgtccttacagtgagtttcagccagtgctgactcgcatggttgagctttcggaggctcaggccactcagcacgacctactccttgaggcttaccgctcccttgcccgccgctacgccgctctggaggcccgtctggccgaggagggtgtcacctcagttgacactgtctcttgggactcaggtcgcctctaccacgccagccacctgtcctcccacagctcccgcggctctgctcgcactcccagtggcctgcgctcccccagctcgcgtgcgccgtactcaccagtgtactccccctaccctcacccagttagcccctcctacacccctggacacaccccagttgcttcctcccaccgtggcccacgctttatccgcactgcgcggaagcgtgttgttggttcttccaccgtgttccgtttcgactacccagctcccacaccgccagcggcccgtgctgctgtcggccctcgacagatggctagccgcccccgccgtgctgctcgtgcaccagcccgctttggttttgaggaaggtagagttgagccagaagcaaatcatgagtcagctaatgagcagtctcaccacagcaaccgttcgcaccgtactacttcccgcaacgcagaagttgagcaaccccgccgcagcaaccgctcgcatcacacagcttcccgtaatgcagagatggaacagtctcaccgctctcaccgcactgccagtcacaattctggagaagaacgcctcccttccccacctcatgtggaaaacaacatgcaacacttaatggcagttcagacacaaatcttgcaaggattagccgcagccgtagccggttatcagcacaatgcgcatggaaatggccaccctcacatgggcaacaatagatccaatctaacagactttctgaggtctcgtccgccagagttctctcagaccgtcgagcccgtcgaggctgacgattggctgaaagatgttgatagaaaactcaacttagtgcagtgtactcctgttgagaagacgctctacgcctctcaccagctaaaaggacctgctgcagattggtgggagaattactgcaatgcacaccctgaacccactaacattgcttgggatgagtttgctacggctttccgtgcagctcatgtgcctgaaagcaccattgatatgaagaaagaggaattcaacagacttaagcaaggcaacaacagtgtcaatgagtacctaagtatgttcaacaagttggctcggtacgcccctgaggaagtggacacagacaagaagaagatcaggaagttcttgaagggaatcgcagtaggaatgagactccagttgcttgctcatgacttccccacttttcaacatatgatcaacaaggcacttctacttgaggatgccagaaaagaggctaccgaagaatacaagaaacgcaagtctaaccatcagggaaattcttcccgaggcgcacctcgccctcgctatggtcaacccatgcaataccaccagtcggtcactcaggctaaccgccagccaggctacgcccctcgtcctcagatgaaccgtccggcacctcagccacagcagcgtgcccctagtggcaatactgcaccaaacagtgttacctctttcaagtcaccgctaggaccgtcagcagttcagtgtttccggtgcaaccagatgggtcactatgcccgacagtgccctcagaatcctaccaacaccaactcagggcatgctaatggcagcactgccagaactcctactccagcggcagctcagtctcgtcctagctctcaggcaagtggacaaggctctcgtgcttccaacaactttggtcgaggccgggtgaaccacattcaagctgagaccgctcaggatgctccagacgttgtgatgggtatgttctctgtcaactccgtacccgcaatagttctgtttgattcagaagcttcccattctttcatatcacaagcttttgtgaaaagaaatggttggaaaacccaaaatttacgtgtaccaatgatagtacattcccctgggaggaatataagggcaactcaaatatgcccggaagttaaccttagaattgaggaagttgacttcctagccaaaccgatagtcctagactcgcaaagcttggacatcatcctagggatggattggttggctaagcacaaagggcagatagattgtgccgaaaagtccatcaccttgcaaggacctggaggaaagcaagtccgctttacctctaacacccctaccgcgagtcggtctatcctaacctgtttacaagtcacctccttggagtcggtgcccatagtctgtgaatatcccgacgtatttccagaagaattaacaagtatgccaccagaccgagagattgagttcgccatagaactggcaccaggcaccgcaccaattgcaaaaagaccctaccgaatggcagctaatgagttagcagaagttaaaagacaaatcgaagaattggagagtaaaggttatgtgcgacctagctcatccccttggggagccccagtgctcctggtcaagaaaaaggatggctgtgagagaatggtaatcgactatagagccctaaatgaagtaactataaagaacaagtacccgttgccacggattgacgatttgttcgatcaacttaaaggagcaagagttttctctaaaattgacttgagatcaggttaccaccaattgaaaatcagatctgaagatatcccgaagaccgctttctcaacgcgttatggtctatatgagttcacagtgatgtccttcggactcaccaatgctccagcattcttcatgaacataatgaacaaaatcttcatggaatacctggaccagtttgtcgtggtgttcatcgatgacatcctgatatactccaagaatgaggaagaacatgctgaacacctgaggctgataatggaaaagctcagggatcatcaactattcgctaaattctcgaaatgcgaattttggttagaccgagtagcatttcttggacacgtgatctcccccaatggtgtcgaagtagatcccagcaaggttgaagctgtacttgcttggaacccgcccacgaatgtgtcagagattcgcagcttccttggcttagctggatattatcgaagattcattgaaggattctctaagctagccagacctatgaccgagctgttaaagaaggaaaagaaatttcaatggtctacagcctgtgaagacagctttcaagaaatgaagaaaaggtttaccactgccccagttctcaccttgccagatatccgaagagatttcgagatcttctatgatgcaacaagacaaggcttaggatgtgtcctaatgcaagaacgaaaggttgtggcctatgcatccaggcagctcaggcctcatgaagtcaactatcccacccatgacctcgagttggcagccgtggttcatgctcttaagatctggaggcactatttaatcgggaacagatgtgaagtatacaccaatcacaaaagtctcaagtacatcttcactcagaccgagttaaatatgaggcagagaaaatggttggaactaatcaaggattacgatcttggaattcattaccaccccagtaaagctaacgtggtcactgatgcgctaagtcgcaaggcctattgcaatgtagctcaaatacggtcttaccaagatcgcctgtgcagagaattggagaagttaaggctgaccgtggtacagtcaggtgtccctgccagcttgacagtgcagcctaccctagaatcgcaaatccgggaggctcagaaagatgacgaagggataaaagaattaataaaaagaatacaggagaagaatgacaccaatttctccatagacgatcaaggcacagtttggtgcggtccacgcatctgtgtaccggccaagaaggagttaagagatctcatcctaaaggaagctcatgagtccgcctactccattcatccaggaagtacgaagatgtaccaagatatcaaggcatacttctggtgggctggaatgaagcgagatgtcgcagaatgcgtagccttgtgtgacatttgccaaagagtcaaggcagaacatcagaggccagctggtctgctgcaacccctaccgattcccgagtggaaatgggaagagatcggaatggatttcatcaccggtttgccaagaacccctagcgggtacaactccatctgggtaatcgtggaccgactcacgaaatcagctcatttcgtgctagtgaaaaccacctttgatggaaagaaactagcagaactctacatgacccatgtcgtgtgtagatttggctgtcccaagaaaattgtgtcagaccgaggcactcagttcacctcaaagttctggaagcagttgcatgaagccctcggaaccgatctaaatttattacagcctaccatccgcagaccgatggtcagacagaaaggttatcaggccagcattcagatgtcgccgaatgaggcaatgttcggaagaaagtgccgcactcccttgtgctggaatgaggtgggcgaagcactggtattcggtcctgacgtactcaaggcagcagaagaacaagttaaactgatccgagaacgtttaaagacagcgcagaaccgtcagaagaattacgcggacaatcgaaggcgtgaccttgagttcgaaaaaggagatcatgtgtacctgcgggtatcgcctctccgtggtataaggaggtttgggatgtccggcaagttagcaccccgctacatcggcccctacctcataaccgccagacgtggcgaagtggcttatcagcttgagttacctgaaggtctcgcatatgtgcacaacgtgttccacgtatcccagttaaagaaatgtcttcgagttccagaagagcaagtccccctgggtaatatcgagctggaaaagaatctgacctacaaggaaagactgatcaagatttttgaagaggcagaacgtcagactcgaaggaagaccatcaagttctacaaagtccaatggagcaaccattctgaagatgaggcaacctgggagcaagaagatcttctccgcgccgagttcccggagctgctcccttag

SEQ ID NO: 15480 - DNA, 4689 bp, Oryza sativa
  Clone ID: TFbOSC401329j.C1.o28.fg
atggcagtgaacgccagcttcagttcccacggttttggtgagggtcaccacgtcgctcagcttcgtgacctcgcccgtttccttggcttctcgtgtcccgagtacacggggtactccgtggaccgtgttccccctcactgtgagctctctgtgtacctttacccccgtggagacgccaggtacccttgtccgtacagcgagtctcagccagtgctgactcgcatggttgagctttcggaggctcaggccactcagcacgacctactccttgaggcttaccgctcccttgcccgccgctacgccgccttggaggcctgtctggccgaggagggtgtcacctcagttgacactatctcttgggactcaggccgcctctgccacgccagccacctgtcctcccacagctcccgcggctctgcccgcactcccagtggcccgcgctcccccagctcgcgtgcgccgtactcaccagtgtactccccctacccacacccagttagcccttcctacacccccggacacaccccagttgcttcctcccgccgtggcccacgctttatccgcactgcgcggaagcgtgttgttggttcttccaccgtgttccgtttccactacccagctcccccaccgctagcgatggctagccgcccccgccgtacagctcgtgcgccagcccgctttggttttgaagatggtagagtcgaaccagaagcaaatcatgaatcagctaatgagcagtctcaccacagcaaccgttcgcaccgtactgtttcccgcaacgcagaggttgagcaaccccgccgcagcagccgctcgcatcgcacagtttcccgtgatgcagagatggaacagtctcaccgctctcaccacactgccagtcacaattctggagaagaacgcctcccttccccacctcatgtggaaaacaacatgcaacacttaatggcagttcagacacaaatcttgcaaggactaaccacagccatagccagttttcagcataatgcgcatggaaatggccaccctcacatgggcaacaacagatccaagctgacagactttctgaggtctcgtccgccagagttctctcagaccgtcgagcccgtcgaggctgacgattggttgaaagatgttgatagaaaactcaacttagtgcagtgtactccggttgagaagacgctctacgcctctcaccagttaagaggacctgccgcagattggtgggagaattactgcaatgcacaccttgaacccactaacattgcttgggatgagtttgctacggctttccgtgcagctcatgtgcctgaaagcactattgacatgaagaaagaagaattcaacagacttaagcaaggcaacagcagtgtcaatgagtacctaagtcagttcaataagttggctcggtacgcccctgaggaagtggacacagacaagaagaagattaggaaattcttgaaagggatcgcagttggaatgagactccagttgcttgcgcatgacttccccacttttcaacatatgatcaacaaggcacttctacttgaggatgccagaaaagaggctaccgaagaatacaagaaacgcaagtctaaccatcagggaaattcttcccgaggcgcacctcgccctcgctacggtcaacccatgcaataccaccagtcggtcactcaggctaaccgccagccaggctacgcccctcgccctcagatgaaccgtccggcacctccgccacagcagcgtgcccctagtggcaacactgcgccaaacagtgttacctctttcaagtcaccacagggaccgtcagcagttcagtgtttccggtgcaaccagatgggtcactatgctagacagtgtcctcagaatcctaccaacaccaactcaggacatgctaatggcagcactgccagaactcctactccagcggcagctcagtctcgtcctagctctcaggcaagtggacaaggttcacgtgcttccaacaactttggtcgaggccgtgtgaatcacattcaagctgaaaccgctcaggatgctccagacgttgtgatgggacctggaggaaagcaaatccgctttacccctaacacccctaccgcaagccggtctattctaacctgtttacaagtcacctccttggagtcggtgcccatagtctgtgcataccccgacgtatttccggaagaattaacaagaatgccaccagaccgagagatcgagttcgccatagaactggcactaggcactgccccaattgcaaagagaccctaccgaatggcagctaatgagttagcagaagttaaaagacaaatcgaagaattggagagtaaaggttatgtgcgacctagctcatccccttggggagccccagtgcttctggttaagaaaaaggatggctctgagagaatggtaatcgactatagagccctgaatgaagtaactataaagaacaagtacccgttgccacggattgacgatttattcgatcaactcaaaggagcaagagttttctcaaaaattgacttgaggtcaggttaccaccaactgaaaatcagatctgaagatattccgaagaccgctttctcaacgcgttatggtctatacgagttcacatttgtcgtggtgttcatcgatgacatcctgatataccccaagaatgtgtcagagattcgcagcttccttggcttagcgggatattatcgaagattcattaaaggattctctaagctagccagacctatgactgagctgttaaagaaggaaaagaaatttcaatggtctgcagcctgtgaagacagctttcaagaaatgaagaaaaggttgaccactgccccagttcttaccttgccagatatccgaaaagatttcgagatcttctgtgacgcatcaagacaaggcttaggatgtgtcctaatgcaagaacgaaaggttgtggcctatgcatccaggcagctcaggcctcatgaagtcaattatcccacccatgatctcgagttggcagccgtggttcatgctcttaagatctggaggcactatttaatcgggaacagatgtgaagtatacaccgatcacaaaagtcttaagtatatcttcacacagaccgagttaaatatgagacagagaagatggttggaactaatcaaggattacgaccttggaatccactatcatcctggtaaagccaacgtggtcgctgatgcgctaagtcgcaaggcctattgcaacgtagctcaaatacggcccgaccaagatcacctgtgcagagaattggagaagttaaggctgaccatggtacagtcaggtgtccctgccagcttgacagtacagcctaccctagagtcgcaaatccgggaggcacagaaagacgacgaagggataaaagagttaataaaaagaatacaggagaagaaagacaccaatttttccatagacgatcaaggcacagtttggtgcggtccacgcatctatgtaccggccaagaaggagttaagagatctcatcctaaaagaagctcatgagtccgcctactccattcatccaggaagtacgaagatgtaccaagatatcaaggcatacttctggtgggctggaatgaagcgagatgtcgcagaatacgtagccttgtgtgacatttgccaaagagtcaaggcagagcatcagaggccagctggtctgctgcaacccctaccgattcccgagtggaaatgggaagagatcggaatggatttcatcaccggtttgccaagaacccctagcgggtacgactccatttgggtaatcgtggatcgcctcacgaaatcagctcatttcgtgctagtgaaaaccacctatgatggaaagaaactagcagaactctacatgacccatgtcgtatgtagatttggctgtcccaagaagatcgtgtcagaccgaggcactcagttcacctcaaggttctggaagcagttgcatgaagctctcggaactgatctaaattttagtacagcctaccatccgcagaccgatggtcagaccgaaagggtaaaccaaatcctagaagacatgctacgtgcgtgtgccctggatttcgaaggcacttgggatcgttgtttgccgtatgccgagttctcatacaacaacagctatcaggccagcattcagatgtcgccgaatgaggcaatgttcggaagaaagtgccgcactcccttgtgctggaatgaggtgggcgaagcgctagtattcggtcctgacatactcaagtcagcagaagaacaagttaagctgatccgagaacgtttgaagacagcgcagaaccgccaaaagaattacgctgacaatcggagacgtgaccttgagttcgaaaaaggagatcatgtatacctgcgagtatcacccctccatggtatgagaaggtttgggatgtccggcaagttagcaccccgctacatcggcccctacctcataaccgccagacgtggcgaagtggcttatcagcttgagctacctgaaggtctcgcagatgtgcacaacgtgttccacgtatcccagttaaagaaatgtcttcgaattccagaagagcaagttcccctggtttcagagcccgaagacccgcagtgcgaggatttcgaggatcaagctccagatctcgagcaaggcaagccacctttgaacatcttgaacctatatttgaaatttaattatgttgcttga

SEQ ID NO: 15481 - DNA, 4490 bp, Oryza sativa
  Clone ID: TFbOSC401436j.C1.o1.np
atgactgtactcctactctataataaagagacctctgttgctgtgatattctgtcttcctgtgataccagcactgtttcctgggactggtatcgattaacagatggcagtgaacgccagcttcagctcccacggttttggtgagggtcaccacgtcgctcagcttcgtgacctcgctcgtttccttggcttctcgtgtcccgagtacacggggtactccgtggaccgtgttccccctcactgtgagctctctgtgtacctttaccctcgtggaggtatacacggagctggccttcgcccacaccacttcaccgtggccaggcccactctccagatcgcccaccatctcgggggcttcgccttccggcagctaccacgccttccttctggccactcagacgccaggtacccttgtccgtacagcgagtctcagccagtgctgactcgcatggttgagctttcggaggctcaggccactcagcacgacctactccttgaggcttaccgctcccttgcccgccgctacgccgccgcctctgtcacggcagccacctgtcctcccacagctcccgcggctctgcccgcactcccagtggcccgcgctcccccagctcgcgtgcgccgtactcaccagtgtactccccctacccacacccagttagcccctcctacacccccggacacaccccagttgcttcctcccgccgtggcccacgctttatccgcaccgcgcggaagcgtgttgttggttcttccaccgtgttccgtttccactacccagctcccccaccgccagcggcccgtgctgctgtcggccctcgacaggttccgccggtcccttcgcgtcagccgatcgacatttcttcgactgaggagccgactacaggagcccgctttggttttgaagatggtagagccgagccagaagcaaatcatgagcagtctcaccacagcaaccgttcgcaccgtactgcttcccgcaatgcagaagttgagcaaccccgccgcagcaaccgctcgcatcgcacggcttcctgtgatgtagagatggaacagtctcaccgctctcaccgcactgccagtcacaattctggagaagaacgcctcccttccccacctcatgtggaaaacaacatgcagcacttaatggcagtttagacacaaatcttgcaaggattagccgcagccgtagccggttttcagcatactgcgcatggaaatggccaccgtcacatgagcaacaatagatccaagctgacagactttctgaggtctcgtccgccagagttctctcagaccgtcgagcccgtcgaggctgacgattggctgaaagatgtggatagaaaactcaacttggtgcagtgtactccggttgagaagacgctctatgcctctcaccagctaagaggacctgctgcagattggtgggaaaattactgcaatgcacaccctgaacccactaacattgcttgggatgagtttgctacgtctttccgtgcagctcatgtgcctgaaagcaccattgacatgaagaaagtggaattcaacagacttaagcaaggcaacagcagtgtcaatgagtacctaagtatgttcaacaacttggctcgatacgcccctgaggaagtggacacagataagaagaagatcaggaaattcgtgaaaggaatcgcagcgcttctacttgaagatgccagaaaagaggctaccgaagaatacaagaaacgcaactctaaccatcagggaaattcttcccgaggcgcacctcgccctcactacggtcaacccatgcaataccaccagtcggtcactcaggctaaccgccagccaggctacgcccctcgtcctcagatgaactgtccggcacctcagccacagcagcgtgcccctagtggcaatactgcgcccaacagtgttacctctttcaagtcaccacagggaccgtcagcagttcagtgtttccggtgcaaccagatgggccactatgccagacagtgccctcagaatcctaccaacaccagctcagggcatgctaatggcagcactgccagaactcctactccagcggcagctcagtctcgtcctagctctcaggcaagtggacaaggttctcgtgtgtccaacaaccttggtcgaggccgggtgaatcacattcaagccgagaccgctcaggatgctccagacgttgtgatgggtatgttctctgtcaactccatacccgcaatagttctgtttgattcaggagcttcccactctttcatatcacaagcttttgtgaaaagaaatggttggaaaacccaaaatttacgtgtaccaatgatagtacattcccctgggagggatataagggcaactcaaatatgcctggaagttaaccttagaattgaggaagttgacttcctagccaaaccgatagtcctagactcgcaaagcttggacatcatcctagggatggattggttggcaaagcacaaaggacagatagattgtgccgaaaagtccatcaccttgcaaggacctggaggaaagcaagtccgctttacccctaacactcctaccgcaagtcggtctatcttaacctgtttacaagtcacctccttggagtcggtgcccatagtctgtgaatatcccgacgtatttccagaagaattaacgagtatgccaccagaccgggagattgagttcgccatagaactggcaccaggcaccgcaccaattgcaaaaagaccctaccgaatggcagctaatgagttagtagaagttaaaagacaaatcgaagaattggagagtaaaggttatgtgcgacctagctcatccccttggggagccccagtgcttctggttaagaaaaaggatggctctgagagaatgttgaaaatcagatctgaagatatcccgaagaccgctttctcaacgcgttatggtctatatgagttcacagaaatgtccttcggactcaccaatgctccagcgttcttcatgaacttaatgaacaaaatctttatggaatacctggaccagtttgtcgtggtgttcatcgatgacatcctgatatactccaagaatgaggaagaacatgctgaacacctgaggctaataatggaaaagctcagggatcatcaactattcgctaaattctcgaaatgcgaattctggttagaccgagtagcattccttggacacgtgatctcctccaacggtgtcgaggtagatcccagcaaggttgaagctgtacttgcttggaacccgcccaagaatgtgtcagagattcgcagcttccttggcttagttggatattatcgaagattcattgaagaattctctaagctagccagacctatgaccgagctgttaaagaaggaaaagaaatttcaatggtctgcagcctgtgaagacagctttcaagaaatgaagaaaaggttgaccactgccccagttctcaccttgccagatatccgaaaagatttcgagatcttctgtgatgcatcaagacaaggcttaggatgtgtcctaatgcaagaacgaaaggttgtggcctatgcatccaggcagctcaggcctcatgaagtcaattatcccacccatgatctcgaattggcagccgtggttcatgctcttaagatctggaggcactatttaatcgggaacagatgtgaagtatacaccgatcacaaaagtcttaagtacatcttcacacagacggagttaaatatgaggcagagaagatggttggaactaatcaaggattacgatcttggaattcattaccaccccggtaaagccaacgtggtcgctgatgcgctaagtcgcaaggcctattgcaatgtagctcaaatacggcctgaccaagatcgcctgtgcagagaattggagaagttgaggctgaccgtggtacagtcaggtgtccctgccagcttgacagtacagcctaccctagagtcgcaaatccgggaagctcagaaagacgacgaagggataaaagagttaataaaaagaatacaggagaagaaagacaccaatttctccatagacgatcaaggcacagtttggtgcggtccacgtatctgtgtaccggccaagaaggaattaagagatctcatcctaaaggaagctcatgagtccgcctactccattcatccaggaagtacgaagatgtaccaagatatcaaggcatacttctggtgggctggaatgaagcgagatgtcgcagaatacgtagccttgtgtgacatttgccaaagagtcaaggcagagcaccagaggccagctggtctgctacagcccctaccaattcccgagtggaaatgggaagaaatcggaatggatttcatcaccggtttgccaagaacccctagcgggtacgactccatttgggtaatcgtggatcgactcacgaaattggctcatttcgtgccagtgaaaacaacctgggagcgagaagatcttctccgcgccgagttcccgcacattatttttgtttttaaattctct

SEQ ID NO: 15482 - DNA, 5400 bp, Oryza sativa
  Clone ID: TFbOSC401685j.C1.o111.fg
atggcagtgaacgccagcttcagttcccacggttttggtgagggtcaccacgtcgcccagcttcgtgacctcgcccgtttccttggcttctcgtgtcccgagtacacggggtactccgtggaccgcgttccccctcactgtgagctctctgtgtacctttacccccgtggaggtatacacggagctggccttcgcccacaccacttcactgtggccaggcctactctccagatcgcgtaccaggacctctcctggactgcgcttcgtcgcctggcccacgactacagccaccgtctcggaggctccgccttccggcagtttccacgccttccttctggccactcagacgccaggtacccttgcccgtacagcgagtctcagccagtgctgactcacatggttgagctttcggaggctcaggccacccagcacgacctactccttgaggcttaccgctctcttgctcgccgctacgccgctttggaggcccgtctggccgaggagggtgtcacctcagttgacactatctcttgggactcaggtcgcctctgccacgccagccacctgtcctcccacagctcccgcggctctgctcgcactcccagtggcccgcgctcccccagctcgcgtgcgccgtactcaccagtgtactccccctacccacacccagttagcccttcctacacccccggtcacaccccagttgcttcctcccgccgtggcccacgctttatccgcactgcgcggaagcgtgttgttggttcttccaccgtgttccgtttccactacccagctcctccaccgccagcggcccgtgctgctgccggccctcgacagatggctagccgcccccgccgtgcagcccgtgcaccagctcgctttggttttgaagatggtagagtcgaagcagaagcaaatcatgaatcagctaatgagcagtctcaccacagcaaccgttcgcaccgtactgtttcccgcaacgcagaagttgagcaaccccgccgcagcaactgctcgcatcgcacagtttcccgtgatgcagagatggaacagtctcaccgctcttaccgcactgccagtcacaattctggagaagaacgcctcccttccccacctcatgtggaaaacaacatgcaacacttaatggcagttcagacgcaaatcttgcaaggactaaccacagccatagccagttttcagcataatgcgcatggaaatggccacccccacatgggcaacaacagatccaagctgatagactttctgaggtctcgtccgctagagttctctcagaccgtcgagcccgtcgaggctgacgattggttgaaagatgttgatagaaaactcaacttagtgcagtgtactcctgttgagaagacgctctacgcctctcaccagctaagaggacctgccgcagattggtgggaaaattactgcaatgcacatcctgaacccactaacattgcttgggatgagtttgctacggctttccgtgcagctcatgtgcctgaaagcaccattgacatgaagaaagaagaattcaacaggcttaagcaaggcaacagcagtgtcaatgagtacctaagtcagttcaacaagttggctcggtacgcccctgaagaagtggacacagataagaagaagatcaggaaattcttgaaaggcgcacctcgccctcgctacggtcaacccatgcaataccaccagtcggtcactcagactaaccgccagccaggctacgcccctcgtcctcagatgaaccgtccggcacctccgccacagcagcgtgcccctagtggcaatactgcgccaaacagtgttacctctttcaagtcaccacagggaccgtcagcagttcagtgtttccggtgcaaccagatgggtcactatgctagacagtgccctcagaatcctaccaacaccaactcagggcatgctaatggcagcaatgccagaactcctactccagcggcagctcagtctcgtcctagctctcaggcaagtggacaaggttcacgtgcttccaacaacttcggtcgaggccgtgtgaatcacattcaagctgaaaccgctcaggatgctccagaagttgtgatgggtatgttctctgtcaactccgtacccgcaatagttctgtttgattcgggagcttcccattctttcatatcgcaagcttttgtgaaaagaaatggttggaaaacccaaaatttgcgtgtgccaatgatagtacattcccctggaaggaatataagggcaactcaaatatgcccggaagttaaccttagaattgaggaagttgacttcctagccaaaccgatagtcctagactcgcaaagcttggacatcatcctagggatggattggttggcaaagcacaaaggacagatagattgtgccgaaaagtccatcactttgcaaggacctggaggaaagcaagtccgctttacccctaacactcctaccgcaaatcggtctattctaacctgtttacaagtcacctccttggagtcggtgcccatagtctgtgaatatcccgacgtatttccggaagaattaacaagaatgccaccagaccgagaaatcgagttcgccatagaactggcaccaggcactgcaccaattgcaaaaagaccctaccgaatggcagctaatgagttagcagaagttaaaagacaaatcgaagagttggagagtaaaggttatgtgcgacctagctcatctccttggggagccccagtgcttctggttaagaaaaaggatggctctgagagaatggtaatcgactatagagccctgaatgaagtaactataaagaacaagtacccgttgccacggattgacgatttattcgatcaacttaaaggagcaagagttttctcaaaaattgacttgaggtcaggttaccaccaactgaaaatcagatctgaagatatcccgaagaccgctttctcaacgcgttatggtctatacgagttcacagtaatgtccttcggactcaccaatgctccagcatttttcatgaacctaatgaacaaaatctttatggaatacctggaccagtttgtcgtggtattcatcgatgacatcctgatatactccaagaacgagaaagaacatgctgaacacctgaggctgataatggaaaagctcagaaatcatcgactattcacaaaattcttgaaatgcgaattctggttggaccgagtagcatttcttggacacgtgatctcctccaacggtgtcgaagtagatcccagcaaagttgaagctgtacttgcttggaacccgcccaagaacgtgtcagagatccgcagcttccttggcttagctggatattatcgaagattcattgaaggattctctaagctagccagacctatgaccgagctgttaaagaaggaaaagaaatttcaatggtctgcagcctgtgaagacagctttcaggaaatgaagaaaaggttgaccactgccccagttctcaccttgccagatatccgaaaagatttcgagatcttctgtgatgcatcaagacaaggcttaggatgtgtcctaatgcaagaacgaaaggttgtggcctatgcatccaggcagcttaggcctcatgaagtcaattatcccacccatgatctcgagttggcagccgtggttcatgctcttaagatctggaggcattatttaatcgggaacagatgtgaagtatacaccgatcacaaaagtcttaagtatatcttcacacagaccgagttaaatatgaggcagagacgatggttggaactaatcaaagattacgatcttggaatccactatcatcctggcaaagccaacgtggtcgctgatgcgctaagtcgcaaggcctattgcaatatagcccaaatacggcctgaccaagatcacctgtgcaaagaattggagaagttgagggtgaccgtggtacagtcaggtgtccctgccagcttgacggtacaacctaccctagagtcgcaaatccgggaggctcagaaagacgacgaagggataaaagagttaataaaaagaatacaagaaaagaaagacaccaatttctccatagacgatcaaggcacagtttggtgcggtccacgcatctgtgtaccggccaagaaggagttaagagatctcatcctaaaggaagctcatgagtccgcctactccattcatccaggaagtacgaagatgtaccaagatatcaaggcatacttctggtgggctggaatgaagcgagatgtcgcagaatacgtagccttgtgtgacatttgccaaagagtcaaggcagagcatcagaggccagctggtctgctgcaacccctaccgattcccgagtggaaatgggaagaggtcggaatggatttcatcaccggtttgccaagaacccccagcgggtacgactccatctgggtaatcgtggatcgactcacgaaatcagctcatttcgtgccagtgaaaaccacctatgatggaaagaaactagcagaactctacatgacccatgttgtatgtagatttggctgtcctaagaaaattgtgtcggaccgaggcactcagttcacctcaaggttctggaagcagttgcatgaagccctcggaactgatctgaattttagtacagcctaccatccgcagaccgatggtcagaccgaaagggtaaaccaaatcctagaagacatgctacgtgcgtgtgccttggatttcgaaggcacttgggatcgttgtttgccgtatgccgagttctcgtacaacaacagttatcaggccagcattcaaatgtcgccgaatgaggcaatgttcggaagaaagtgccgcacccccttgtgctggaatgaggtgggcgaagccctggtattcggtcctgacatactcaagtcagcagaagaacaagttaagctgatccgagaacgtttaaagacagcgcaaaaccgtcagaaaaattacgctgacaatcggagacgtgaccttgagttcgaaaaaggagatcatgtgtacctacgggtatcacccctccggggtatgagaaggtttgggatgtccggcaagttagcaccccgctacatcggcccctacctcataaccgccagacgtgacgaagtggcttatcagcttgagctacctgaaggtctcgccgatgtgcacaacgtgtttcatgtatcccagttaaagaaatgtcttcgagttccagaagagcaagttcccctgggtaatatcgacctggaaaagaatctgaccaacaaggaaagaccgatcaaggttcttgaagaggcagaacgtcagactcgaaggaagaccatcaagttctacaaagtccaatggagcaatcattctgaagatgaggcaacctgggaacgagaagatcttctccgcgccgagtttccggagctgctcccttag

SEQ ID NO: 15483 - DNA, 4716 bp, Oryza sativa
  Clone ID: TFbOSC401686j.C1.o1.np
atggctagccgtccccgccgtgcagctcgtgcaccagcccgctttggtgttgaggatggtagagttgagccagaagaaaatcatgaatcagctaatgagcagtctcaccacagcaaccgttcgcatcgtactgtttcccgcaacgcagaggttgagcaaccccgccgcagcagccgctcgcatcgcacagtttcccgtgatgcagagatggaacagtctcaccgctctcaccgcactgccagtcacaattctggagaagaacgcctcccttccccacctcatgtggaaaccaacatgcaacacttaatggcagttcagacacaaatcttgcaaggactaaccacagccatagccagttttcagcataatgcgcatggaaatggccaccctcacatgggcaacaacagatccaagctgacagactttttgaggtctcgtccgccagagttctctcagaccgtcgagcccgtcgaggctgacgattggttgaaagatgttgatagaaaactcaacttagtgcagtgtactcctgttgagaagacgctctacgcctctcaccaactaagaggacctgccgcagattggtgggagaattactgcaatgcacaccctgaacccactaacattgcttgggatgagttcgctacggctttccgtgcagctcatgtgcctgaaagcactattgacatgaagaaagaagaattcaacagacttaagcaaggcaacagcagtatcaatgagtacctaagtcagttcaacaagttggctcggtacgcccctgaggaagtggacacagacaagaagaagatcaggaaattcttgaaaggaatcgcagttggaatgagactccagttgcttgctcatgacttccccacttttcaacatatgatcaacaacgcacttctacttgaggatgccagaaaagaggctaccgaagaatacaagaaacgcaagtctaaccatcagggaaattcttcccgaggcgcacctcgccctcgctacggtcaacccatgcaataccaccagtcggtcactcaggctaaccgccagccaggctacgcccctcgtcctcagataaaccgtccggcacctcagccacagcagcgtgcccctagtggcaatactgcgcctaacagcgttacctctttcaagtcaccgtagggaccgtcagcagttcagtgtttccggtgcaaccagatgggtcactatgctagacagtgtcctcagaatcctaccaacaccaactcagggcatgctaatggcagcactgccagaactcctactccagcggcaactcagtctcgtcctagctctcaggcaagtggacaaggttcacgtgcttccaacaactttggtcgaggccgtgtgaatcacattcaagctgaaaccgctcaggatgctccagacgttgtgatgggtatgttctctgtcaactccgtacccgcaatagttctgttcgattcgggagcttcccattctttcatatcgcaagcttttgtgaaaagaaatggttggaaaacccaaaatttgcgtgtaccaatgatagtacattcccctggaaggaatataagggcaactcaaatatgcccggaagttaaccttagaattgaggaagttgacttcctagccaaaccgatagtcctagactcgcaaagcttggacatcattctagggatggattggttggctaagcacaaaggacagatagaatgtgccgaaaagtccatcaccttgcaaggacctagaggaaagcaagtccgctttacccctaacacccctaccgcaagtcggtctatcctaacctgtttacaagtcacctccttggagtcggtgcccatagtctgtgaatatcccgacgtatttccggaagaattaacaagaatgccaccagaccgagagatcgagttcgccatagaactggcaccaggcacagctccaattgcaaaaagaccctaccgaatggcagctaatgagttagcagaagttaaaagacaaatcgaagaactggaaagtaaaggttatgtgcgacctagctcatccccttggggagccccagtgcttctggttaagaaaaaggatggctcggagagaatggtaatcgactatagagccctgaatgaagtaactataaagaacaagtacccgttgccacggattgacgatttattcgatcaacttaaaggagcaagagttttctcaaaaattgacttgaggtcaggttaccaccaactgaaaatcagatctgaagatatcccgaagaccgctttctcaacgcgttatggtctatatgagttcacagttatgtccttcggactcaccaatgctccagcattcttcatgaacttaatgaacaaaatcttcatggaatacctagaccagtttgtcgtggtgttcatcgatgacatcctgatatactccaagaacgaggaagaacatgctgaacacctgaggctgataatggaaaagctcagagatcatcaactattcgctaaattctcgaaatgcgaattctggttggacagagtagcatttcttggacacgtgatttcctccaacggtgtcgaagtagatcccagcaaggttgaagctgtacttgcttggaacccgcccaagaacgtgtcagagatccgcagcttccttggcttagctggatattatcgaagattcattgaaggattctctaagctagccagacctatgaccgagctgttaaagaaggaaaagaaatttcaatggtctgcagcctgtgaagacagcttccaagaattgaagaaaaggttgaccactgccccagttctcaccttgctagatatccaaaaagatttcgagatcttctgtgacgcatcaagacaaggcttaggatgtgtcctaatgcaagaacaaaaggttgtggcctatgcatccaggcagctcaggcctcatgaagccaattatcccacccatgatctcgagttggcagccgtggttcatgctcttaagatctggaggcactatttaatcgggaacagatgtgaagtatacaccgatcacaaaagtcttaagtatatcttcactcagaccgagttaaatatgagacagagaagatggttggaactaatcaaggattacgatcttggaatccactatcatcctggtaaagccaacgtggtcgctgatgcgctaagtcgcaaggcctattgcaatgtagctcaaatacggcctgaccaagatcacctgtgcggagaattggagaagttaagactgaccgtggtacagtcaggtgtccctgccagcttgacagtacagcctaccctagagtcgcgaatccgggaggctcagaaagacgacgaagggataaaagaattaataaaaagaatacaggagaagaaagacacaaatttctccatagacgatcaaggcacagtttggtgcggaccacgcatctgtgtaccggccaagaaggagttaagagatctcatcctaaaggaagctcatgagtccgcctactccattcacccaggaagtacgaagatgtaccaagatatcaaggcatacttctggtgggctggaatgaagcgagacgtcgcagaatacgtagccctgtctgacatttgccaaagagtcaaggcggaacatcagaggccagctggtctgctgcaacccctaccgattcccgagtggaaatgggaagagatcggaatggatttcatcaccggtttgccaagaacccccaacgggtacgactccatttgggtaatcgtggaccgactcacgaaatcagctcatttcgtgccagtgaaaaccacctatgatggaaagaaactagcagaactctacatgacccatgtcgtatgtagatttggctgtcccaagaaaattgtgtcagaccgaggcactcagttcacctcaaggttctggaagcagttgcatgaagccctcggaactgatctgaattttagtacagcctaccatccgcagaccgatggtcagaccgaaagggtaaaccaaatcctagaagacatgctacgtgcgtatgccttggatttcgaaggcacttgggatcgttgtttgccgtatgccgagttctcatacaacaacagttatcaggccagcattcagatgtcgccgaatgaggcaatgttcggaagaaagtgccgcacccccttgtgctggaatgaggtgggcaaagcactggtattcggtcctgacatactcaagtcagcagaagaacaagttaagctgatacgagaacgtttgaagacagcacagaaccgtcagaagaattacgctgacaatcggaggcgtgaccttgagttcgaaaaaggagatcatgtgtacctgcgggtatcacccctccgtggtatgagaaggtttgggatgtccggcaagttagcaccccgctacatcggcccctacctcataaccgccagacgtggcgaagtggcttatcagcttgagctacctgaaggtctcgcagacgtgcacaacgtgttccacgtatcccagttaaagaaatgtcttcgagttccagaagagcaagttcccctgggtaatatcgagctagaaaagaatctgacctacaaggaaagaccgatcaaggttcttgaagaggcagaacgtcagactcgaaggaagaccatcaagttctacaaagtccaatggagcaatcattccgaagacgaggcaacctgggagcgagaagatcttctccgcgccgagttcccggacctgctccct

SEQ ID NO: 15484 - DNA, 5559 bp, Oryza sativa
  Clone ID: TFbOSC401716j.C1.o78.fg
atggcagtgaacgccagcttcagttcccacggttttggtgagggtcaccacgtcgcccagcttcgtgacctcgcccgtttccttggcttctcgtgtcccgagtacacggggtactccgtggaccgtgttccccctcactgtgagctctctgtgtacctttaccctcgtggaggtatacacggagttggccttcgccctcaccacttcactgtggccaggcccactctccagatcgcgtaccaggacctctcctggactgcgcttcgccgcctggcccacgactacggccaccgtctcggaggctccgccttccggcagcttccacgtcttccttctggccactcagacgccaggtacccttgtccgtacagcgagtctcagccagtgctgactcgcatggtcgagctttcggaggctcaggccactcagcacgacctactccttgaggcttaccgttcccttgcccgccgctacgccgccttggaggcccgtctggccgaggagggtgtcacctcagttgacactatctcttgggactcaggccgtctctgccacgccagccacctgtcctcccacagctcccgcggctctgctcgcacacccagtggcccgcgctcccccagctcgcgtgcaccgtactcaccagtgtactccccctacccacacccagttagcccttcctacacccccggacacactccagtcgcttcctcccgccgtggcccacgctttatccgcactgcgcggaagcgtgttgttggttcttccaccgtgttccgtttccgccacccagctcccccaccgccagcggcccgtgctgctgccggccctcgacagtctggttctcctaggaggtgtgcgcacagtcaagctcggcgtagctctgtgactagtccacacccgttgtatcagatggctagccgcccccgtcgtacagctcgtgcaccagtccgctttggttttgatgatggtagagttgaagcagaagcaaatcacgaaccagctaatgagcattctcaccacagcaaccgttcgcaccgtactgtttcccgcgacgcagaggttgagcaacctcgccgcagcaaccgctcgcatcgcacagtttcccgtgaagcagagttggagcagtctcaccgctctcaccacactgccagtcacaattctggaggagaacgcctcccttccccacctcatgtggaaaacaacatgcaacacataatggcagttcagacacaaatcctgcaaggtctaaccacagccatagccagctttcagcataatgcgcatggaaatggccaccctcacgtgggcaacaacagatccaagctgacggactttctgaggtctcgaccgccagagttctctcagaccgtcgagcccgtcgaggctgacgattggttgaaagatgttgatagaaaactcaacttagtgcagtgtactcctgttgagaagacgctctacgcctctcaccagctaagaggacctgccgcagattggtgggagaattactgcaatgcacatcctgaacccactaacattgcttgggatgagtttgcagctgccttccgtgcagctcatgtgcctgaaagcactattgacatgaagaaagaagaatttaacagacttaagcaaggccacagcagtgtcaatgagtacctaagtcagttcaacaagttggctcggtacgcccctgaggaagtagacaccgataagaaaaagatcaggaaattcttgaaaggaatcgcagttggaatgagactccagttgcttgctcatgacttccccacttttcaacatatgatcaacaaagcacttctacttgaggatgccagaaaagaggccaccgaagaatacaagaaacgcaagtctaaccatcagggaaattcttcccgaggcgcacctcgccctcgctacgataaaccgtccggcacctcagccacagaagcatgccctagtggcaacactgcgccaaacagtgttacctccttcaagtcaccacagggaccgtcagcagttcagtgtttccggtgcaaccagatgggtcactatgctagacagtgtcctcagaatcctaccaacaccaactcagggcatgctaatggcagcaccgccagaactcctactccagcggcagctcagtctcgtcctagctctcaggcaagtggacaaggttcccgtgcttccaaccactttggtcgaggacgtgtgaatcacattcaagctgaaaccgctcaggatgctccagacgttgtgatgggtatgttctctgtcaactccgtacccgcaatagttctgtttgattcaggagcttcccattctttcatatcgcaagcttttgtgaaaagaaatggttggaaaacccaaaatttgcgtgtaccaatgatagtacattcccctggaagaaatataagggcaactcaaatatgcccggaagttaaccttagaattgaggaagttgacttcctagccaaaccgatagtcctagactcgcaaagcttggacatcattctagggatggattggttggctaagcacaaaggacagatagattgtgccgaaaagtccatcaccttgcaaggacctggaggaaagcaagtccgctttacccctaacacccctaccgcaagtcggtctatcctaacctgtttgcaagtcacctccttggagtcggtgcccatagtctgtgaatatcccgacgtatttccggaagaattaacaagaatgccaccagatagagagattgagttcgccatagaactggcaccaggcacagctccaattgcaaaaagaccctaccgaatggccgctaatgaattagcagaagttaaaagacaaatcgaagaactggaaagtaaaggttatgtgcgacctagctcatccccttggggagccccagtgcttctggttaagaaaaaggatggctctgagagaatggtaattgactatagagccctgaatgaagtaactataaagaacaagtacccgttgcctcggattgacgacttattcgatcaacttaaaggagcaagagtcttctcaaaaattgacttgaggtcaggttaccaccaactgaaaatcagatctgaagatattccgaagaccgctttctcgacgcgttatggtctatatgagtttacagtaatgtccttcggactcaccaatgctccagcattcttcatgaacttaatgaacaaaatctttatggaatacctggaccagtttgtcgtggtattcatcgatgacatcctgatatactctaagaacgaggaagaacatgctgaacacctgaggctgataatggaaaagctcagagatcatcaactattcgctaaattctcgaaatgcgaattctggttggaccgagtagcttttcttggtcacgtgatctcctccaacggtgtcgaagtagatcccagcaaagttgaagctgtacttgcgtggaacccgcccaagaatgtgtcagagattcgcagcttcctcggcttagctggatattatcgaagattcattgaaggattctctaagctagccagacctatgaccgagctgttaaagaaggagaagaaatttcaatggtccacagcctgtgaagacagctttcaagaaatgaagaaaagattgaccactgccccagttctcaccttgccagatatccgaaaagacttcgagatcttctgtgatgcatcaagacagggcttaggatgtgtcctaatgcaagaacgaaaggttgtggcctatgcatccaggcagctcaggcctcatgaagtcaattaccccacccatgatctcgagttggcagccgtgattcatgctcttaagatctggaggcactatttaatcgggaacagatgtgaagtatacaccgatcacaaaagtcttaagtatatcttcactcagaccgagttaaatatgagacagagaagatggttggaactaatcaaggattacgatcttggaatccactatcatcctggtaaagccaacgtggtcgctgatgcgctaagtcgcaaggcctattgcaatatagctcaaatacggcctgaccaaggtcaactgtgcagagaattggagaagttaaggctgaccgtggtacagtcaggagtccctgccagcttgacagtacagcctaccctagaatcgcaaattcgggaggcacagaaagaagacgaagggataaaagagttaatagaaagaatacaggagaagaaagacaccaacttctccatagacgatcaaggcacagtttggtacggtccacgcatctgtgtaccggccaagaaggagttaagagacctcatcctaaaggaagctcatgagtccgcctactccattcacccaggaagtacgaagatgtaccaagatatcaaggcatacttctggtgggctggaatgaaacgagatgtcgcagaatacgtagccctgtgtgacatttgccaaagagtcaaggcagaacaccaaaggccagctggactgctacaacccttaccgattcccgagtggaaatgggaagagatcggaatggatttcatcaccggtttgccaagaacccccagcggatacgactccatttgggtaatcgtggaccgactcacgaagtcagcacatttcgtgccagtgaagaccacctatgatggaaagaaactagcagaactctacatgactcatgtcgtatgtagatttggctgtcccaagaaaatagtgtcggatcgaggcactcagttcacctcaaggttctggaagcaattgcatgaagcactcggaactgatctgaattttagtacggcctaccacccgcagaccgatggtcagacagaaagagtaaaccagatcctagaagacatgctgcgagcatgtgccttggatttcgaaggcacttgggatcgttgtttgccgtatgccgagttctcatacaacaacagttatcaggccagcattcagatgtcgccgaatgaggcaatgttcggaagaaggtgccgcactcccttgtgctggaatgaggtgggcgaagccttggtattcggtcctgacatactcaagtcagcagaagaacaagttaagctgatacgagaacgtttgaagacagcacagaaccgtcagaagaattacgctgacaatcggaggcgtgaccttgagttcgaaaaaggagatcatgtgtacctacgggtatcaccactccgaggaatgagaaggtttgggatgtccggcaagttagcaccccgctatatcggcccctacctcataaccgccagacgtggcgaagtggcttatcagcttgagctacctgaaggtctcgcagatgtgcacaacgtgttccacgtatcccagttaaagaaatgtcttcgagttccagaagagcaagttcccctgggtaacatcgagctggaaaagaatctgacctacaaggaaagaccgatcaaggttcttgaggaagcagaacgtcagactcgaagaaagaccatcaagttctacaaggtccaatggagcaatcattctgaagatgaggcaacctgggaacgagaagatcttctccgcgccgagtttccggagctgctcccttag

SEQ ID NO: 15485 - DNA, 4044 bp, Oryza sativa
  Clone ID: TFbOSC401828j.C1.o26.fg
atggctagccgcccctgccgtgcagctcgtgcgccagcccacttcggttttgaagaaggtagagtcgaaccagaagcaaatcatgaatcagctaatgagcagtctcaccgcagcaacaattcgcaccgtactgtttcccgtaacgcagaagttgagcaaccccgccgtagcaaccgctcgcatcgcacagcttcccgtgattcagagatggaacagtctcaccgctctcaccgcactgctagtcacaattctggagaagaacgcctcccttccccacctcatgtggaaaacaacatgcaacacttaatggcagttcagacacaaatcttgcaaggaatagccgcagccgtagccggttatcagcataatgtgcatggaaatggccaccctcacatgggcaacaatagatccaagctgacagattttctaaggtcacgtccgccagagttctctcagaccgtcgagcccgtcgaggctgacgattggctgaaggatgttgaaagaaaattcaacttagtgcagtgtactcctgttgagaagacgctctacgcctctcaccaactaagaggacctgctgcagattggtgggagaattactgcaatggacaccctgaacccactaacattgcttgggatgagtttgccacggctttccgtgcagctcatgtgcctgaaagcaccattgacatgaagaaagaggaattcaacaggcttaagcaaggcaacaccagtgtcaatgagtacctaagtcagttcaacaagttggctcggtacgcccctgaggaggtggacacagacaagaagaagatcaggaagttcttgaagggaatcgcagttgggatgagactccagttgcttgctcatgacttccccacttttcaacacatgatcaacaaggcacttctacttgaggatgccagaaaagaggctaccgaagagtacaagaaacacaagtctaaccatcagggaaattcttcccgaggcgcgcctcgccctcgctacggtcaacccgtgcaataccaccagtcggtcactcaggctaaccgccagccaggctacgcccctcgtcctcagataaaccgtccggcacctcagccacagcagcgtgcccctagtggcaatactgcgccaaacagcgttacctccttcaagtcacctcaaggaccgtcagcagttcagtgtttccggtgcaaccagatgggtcactatgctagacagtgccctcagaatcctaccaacaccaactcagggcatgctaatggcagcactgccagaactcctactccagcggcagctaagtctcgtcctagcactcaggcaagtggacaaggttcacgtgcttccaaccactttggtcgaggccgtgtgaatcacattcaagctgaaaccgctcaggatgctccagacgttgtgatgggtatgttctctgtcaactccgtacccgcaatagttctgtttgattcaggagcttcccattctttcatatcacaagcttttgtgaaaagaaatggttggaaaacccaaaatttacgtgtaccaatgatagtacattcccctggaaggaatataaaggcaactcaaatatgcccggaagttaaccttagaattgaggaagttgacttcctagccaaaccgatagtcctagactcgcaaagcttggacatcatcctagggatggattggttggctaagcacaaaggacagatagattgtgccgaaaagtccatcaccttgcaaggacctggaggaaagcaagtccgctttacccctaacactcctaccgcaagtcggtctatcttaacctgtttacaagtcacctccttggagtcggtgcccatagtttgtgaatatcccgacgtatttccggaagaattaacaagaatgccactagaccgagagattgagttcgccatagaactggcaccaggcaccgcaccaattgcaaaaagaccctaccgaatggcagctaatgagttagcagaagttaaaagacaaatcgaagagctggaaagtaaaggttatgtacgacctagctcatccccttggggagccccagtgcttctggttaagaaaaaggaaggctctgagagaatggtaatcgactatagagccctgaatgaagtaactataaagaacaagtacccgttgccacggatcgacgatttattcgatcaacttaaaggagcaagagttttctcaaaaattgacttgaggtcaggttaccaccaactgaaaatcagatctgaagatatcccaaagaccgctttctcaacgcgttatggtctatatgagttcacagtaatgtccttcggactcaccaatgctccagcattcttcatgaacttaatgaacaaaatcttcatggaatacctggaccagtttgttgtggtattcatcgatgacatcctgatatactccaagaacgaggaagaacatgctgaacacctgaggttgataatggaaaatcttagggatcatcaactattcgcaaaattctcgaaatgcgaattctggttagaccgagtagcatttcttggacacgtgatttcctccaatggtgtcgaagtagatcccagcaaggttgaagctgtacttgcttggaacccgcccaagaatgtgtcagagatccgcagcttccttggcttagctggatattatcgaagattcattgaaggattctctaagctagccagacctatgaccgagctgttaaagaaggaaaagaaatttcaatggtctgcagcctgtgaagacagcttccaagaaatgaagaaaaggttgaccactgccccagttctcaccttgccagatatccgaaaagatttcgagatcttctgtgatgcatcaagacaaggcttaggatgtgtcctaatgcaagaacgaaaggttgtggcctatgcatccaggcagctcaggcctcatgaagtcaattatcccacccatgatctcgagttggcagccgtggttcatgctcttaagatctggaggcactatttaatcgggaacagatgtgaagtatacactgatcacaaaagtcttaagtatatcttcacacagaccgagttaaatatgagacagagaagatggttggaactaatcaaggattacgatcttggaatccactatcaccctggtaaagccaacgtggtcgctgatgcgctaagtcgcaaggcctattgcaatgtagctcaaatacggcctgaccaagatcacctgtgcagagaattgcagaagttaatgctgaccgtggtacagtcaggtgtccctgccagcttgacagtacagcctaccctagagtcgcaaatccgggaggctcagaaagacgacgaagggataaaagaattaataaaaagaatacaggagaagaaagacaccaatttctccatagacaaccaaggcacagtttggtgcggtccacgcatctgtgtaccggccaagaaggagttaagagatctcatcctaaaggaagctcatgagtccgcctattccattcatccaggaagtacgaagatgtaccaagatatcaaggcatacttctggtgggctggaatgaagcgagatgtcgcagaatacgtagccctgtgtgacatttgccaaagagtcaaggcggaacatcagaggccagctggtctgctgcaacccctaccgattcccgagtggaaacccgttaggaggtttgggatgtccggcaagttagcaccccgctacatcggcccctacctcataaccgccagacgtggcgaagtggcttatcagcttgagctacctgaaggtctcgcagatgtgcacaacgtgttccacgtatcccagctaaagaaatgtcttcgagttccagaagagcaagttcccctgggtaatatcgtgctggaaaagaatctgacctacaaggaaagaccgatcaaggttcttgaagaggcagaacgtcagactcgaaggaagaccatcaagttctacaaagtccaatggagcaaccattctgaagatgaggcaacctgggagcgagaagatcttctccgcgccgagtttccggagctgctcccttag

SEQ ID NO: 15486 - DNA, 5280 bp, Oryza sativa
  Clone ID: TFbOSC401909j.C1.o14.fg
atggcagtgaacgccagcttcagttcccacggttttggtgagggtcaccacgtcgctcagcttcgtgacctcgcccgcttccttggcttctcgtgtcccgagtacacggggtactccgtggaccgtgttccccctcgctgtgagctctctgtgtacctttaccctcgtggagatcgcgtaccaggacctctcctggactgcgcttcgtcgcttggcccacgactacagccaccgtctcgggggctctgccttccggcagcttccacgccttccttctggccatgcagacgccaggccactcagcactacctactccttgagacttaccgctcccttgcccgccgctacgccgctctggaggcccgtctggccgaggagggtgtcacctcagttgacactgtctcttgggactcaggccgcctctgccacgccagccacctgtcctcccacagctcccgcggctctgctcgcactcctagtggcccgcgctcccccagctcacgtgcgccgtactcaccagtgtactccccctacccacacccagttagcccctcctacacccccggacacaccccagttgcttcctcccgccgtggcccacgctttatccgcactgcgcggaagcgtgttgttggttcttccaccgtgttccgattcgactacccagctcccccaccgccagcggcccgtgctgctatcggccctcgacagatggctagccgcccccgccgtgctgctcgtgcgccagcccgcttcggttttgaagaaggtagagttgagccagaagaaaatcatgagtcagctaatgagcggtctcaccacagcaaccgttcgcaccgtactgcttcccgcaacgcagaagttgagcaaccccgccgcagcaaccgctcgcatcacacagcttcccgtaatgcagagatggaacagtctcaccgctctcaccgcactgctagtcacaattctggagaagaacgcctcccttccccacctcatgtggaaaacaacatgcagcacttaatggcagttcagacacaaatcttgcaaggattagccgcagccatagccggttttcagcatagtgcgcatggaaatggccaccctcacatgggcaacaatagatccaagctgacagactttctgaggtctcgtccgccagagttctctcagaccgtcgagcccgtcgaggctgacgattggctgaaagatgttgatagaaaactcaacttagtgcagtgtactcctgttgagaagacgctctacgcctctcaccagctaagaggacctgctgcagattggtgggagaattactgcaatgcacaccctgaacccactaacattgcttgggctgagtttgctacggctttccgtgcagctcatgtgcctgaaagcgccattgatatgaagaaagaggaattcaacaaacttaagcaaggcaataatagtgtcaatgagtacctaagtctgttcaacaagttggctcgaaaagaggctaccgaagaatacaagaaacgcaagtctaaccatcagggaaattcttcccgaggcgcacctcgccctcgctacggtcaacccatgcaataccaccagtcggtcactcaggctaaccgccagccaggctacgcccctcgtcctcagatgaaccgtcaggcacctcagccacagcagcgtgcccctagtggcaatactgcgccaaacaatgttacctctttcaagtcatcgctaggaccgtcagcagttcagtgtttccggtgcaaccagatgggccactatgcccgacagtgccctcagaatcctaccaacaccaactcagggcatgctaatggcagcactgccagaactcctactccagcggcagctcagtctcgtcctagctctcaggcaagtggacaaggttctcgtgtttccaacaactttggtcgaggccgggtgaaccacattcaagctgagaccgctcaggatgctccagacgttgtgatgggtatgttctctgtcaactccgtacccgcaatagttctgtttgattcaggagcttcccattctttcatatcacaagcttttgtgaaaagaaatggttggaaaacccaaaatttacgtgtaccaatgatagtacatttccctgggaggaatataagggcaactcaaatatgcccggaagttaaccttagaattgaggaagttgacttcctagccaaaccgatagtcctagactcgcaaagcttggacatcatcctagggatggattggttggctaagcacaaagggcagatagattgtgccgaaaagtccatcaccttgcaaggacctggaggaaagcaagtccgctttacctctaacacccctaccgcgagtcggtctatcctaacctgtttacaagtcacctccttggagtcggtgcccatagtctgtgaatatcccaacgtatttccagaagaattaacgagtatgccaccagaccgagagattgagttcgccatagaactggcaccaggcaccgcaccaattgcaaaaagaccctaccgaatggcagctaatgagttagcagaagttaaaagacaaatcgaagaattggagagtaaaggttatgtgcgacctagctcatccccttggggagccccagtgctcctggttaagaaaaaggatggctctgagagaatggtaatcgactatagagccctgaatgaagtaactataaagaacaagtacccgttgccacggattgacgatttgttcgatcaacttaaaggagcaagagttttctcaaaaattgacttgagatcaggttaccaccaattgaaaatcagatcagaagatatcccgaagaccgctttctcaacgcgttatggtctatatgagttcacagtgatgtccttcggactcaccaatgctccagcattcttcatgaacttaatgaacaaaatcttcatggaatacctggaccagtttgtcgtggtgttcatcaatgacatcctgatatactccaagaatgaggaagaacatgctgaacacctgaggctgataatggaaaagctcagggatcatcaactattcgctaaattctcgaaatacgaattctggttagaccgagtagcatttcttggacacgtgatctcccccaacggtgtcgaagtagatcccagcaaggttgaggctgtacttgcttggaacccgcccaagaatgtgtcagagattcgcagcttccttggcttagctggatattatcgaagattcattgaaggattctctaagctagccagacctatgaccgagctgttaaagaaagaaaagaaatttcaatggtctacagcctgtgaagacagctttcaagaaatgaagaaaaggttgaccactgccccagttctcaccttgccagatatccgaaaagatttcgagatcttctgtgatgcatcaagacaaggcttaggatgtgtcctaatgcaagaacgaaaggttgtggcctatgcatccaggcagctcaggcctcatgaagtcaactatcccacccatgatctcgagttggcagccgtggttcatgctcttaagatctggaggcactatttaatcgggaacagatgtgaagtatacaccgatcacaaaagtcttaagtatatcttcacacagaccgagttaaatatgaggcagagaagatggttggaactaatcaaggattacgatcttggaatccattaccaccccggtaaggctaatgtggtcgctgatgcgctaagtcgcaagacctattgtaatgtagatcaaatacggcccgaccaagatcgcctgtgcagagatctggaaaagttaaggctgaccgtagtacagtcaggtgtcgctgccagcttgacagtacagcctaccctagaatcgcaaatccggaaagctcagaaagacgacgaagggataaaagagttaataaaaagaatacaggagaagaaagacaccgatttctccatagacgatcaaggcacagtttggtatggtccacgcatctgtgtaccggccaagaaggagttaagagatctcatcctaaaggaagctcatgagtccgcctactccattcatccaggaagtacgaagatgtaccaagacatcaaggcatacttttggtgggctggaatgaagcgagatgtcgcagaatacgtagccttgtgtgacatttgccaaagagtcaaggcagaacatcagaggccagctggtctgctgcaacccctaccgatccccgagtggaaatgggaagagatcggaatggatttcatcaccggtttgccaagaacccctagcgggtacgactccatctgggtaatcgtggaccgactcacgaaatcagctcatttcgtgccaatgaaaaccacctttgatggaaagaaactagcagaactctacatgacccatgtcgtgtgtagatttggctgtcccaagaagattgtgtcagaccgaggcactcagttcacctcaaggttctggaagcagttgcatgaagccctcggaaccgatctaaattttagtacggcctaccatccgcagaccgatggtcagacagaaagggtaaaccaaatcctagaagacatgctacgtgcgtgtgccctggatttcgaaggcacttgggatcgttgtttgccgtatgcggagttctcatacaacaacagttatcaggccagcattcagatgtcatcgaatgaggaaatgttcggaagaaagtgccgcactcccttgtgctggaatgaggtgggcgaagcgctggtattcggtcctgacatactcaaggcagcagaagaacaagttaagctgatccgagaacgtttaaaggcagcgcagaaccgtcagaagaattacgttgacaatcggaggcgtgaccttgagttcgaaaaaggagatcatgtgtacctgcgggtatcgcctctccgtggtataaggaggtttgggatgtccggcaagttagcaccccgctacatcggcccctacctcataaccgccagacgtggcgaagtggcttatcatcttgagttacctgaaggtctcgcagatgtgcacaacgtgttccacgtatcccagttaaagaaatgtcttcgagttccagaagagcaagtccccctgggtaatatcgagctggaaaagaatctgacctacaaggaaagaccgatcaaggttcttgaagaggcagaacgtcagactcgaaggaagaccatcaagttctacaaagtccaatggagcaaccattctgaagatgaggcaacctgggagcaagaagatcttctccgcgccgagttcccggagctgctcccttag

SEQ ID NO: 15487 - DNA, 5058 bp, Oryza sativa
  Clone ID: TFbOSC404112j.C1.o3.fg
atggcagtgagcgccagcttcagttcccacggttttggtgagggtcaccacgtcgctcagcttcgtgacctcgcctgtttccttggcttctcgtgtcccgagtacacggggtactccgtggaccgtgttccccctcactgtgagctctctgtgtacctttacccccgtggaggtatacacggagccggccttcgtccacaccacttcaccgtggccaggcccactctccagatcgcgtaccaggacctctcctggactgcgcttcatcgcctggcccacgactacaaccaccgtctcggaggctccgccttccggcagcttccacgccttccttctggccactcagacgccaggtacccttgtccgtacagcgagtctcagctagtgctgactcgcatggttgagctttcggaggctcaggccactcagcacgacctactccttgaggcttaccgctcccttgcccgccgctacgccgccttggaggcccgtctggccgaggagggtgtcacctcagttgacactatctcctgggactcaggccgcctctgccacgccagccacctgtcctcccacagctcccgcggctctgcccgcactcccagtggcccgcgctcccccagctcgcgtgcgccgtactcaccagtgtactccccctacccacacccagttagcccttcctacacccccggacacaccccagttgcttcctcccgccgtggcccacgctttatccgcactgcgcggaagcgtgttgttggttcttccaccatgttccgtttccgccacccagctcccccaccgccagcggcccgtgctgctgccggccctcgacagctgacagattttctgaggtcacgtccgccagagttctctcagaccgtcgagcccgtcgaggctgacgattggttgaaagatgttgatagaaaactcaacttagtgcagtgtactccggttgagaagacgctctacgcctctcacaagctaagaggacctgctgcagattggtgggagaattactgcaatgcacaccctgaacccactaacattgcttgggatgagtttgctacggctttccgtgcagctcatgtgcctgaaagcactattgacatgaagaaagaagaattcaacagacttaagcaaggcaacagtagtgtcaatgagtacctaagtcagttcaacaagttagctcagcacgcccctgaagaagtggacacagataagaagaagatcaggaaattcttgaaagggatcgcagttggaatgagactccagttacttgctcatgtcttccccacttttcaacatatgatcaacaaggcacttctgcttgaggatgccagaaaagaggctaccgaagaatacaagaaacgcaagtctaaccatcagggaaattcttcccgaggcacacctcgccctcgctacggtcaatccatgcaataccaccagtcggtcactcaggctaaccgccagccaggctacgcccctcgtcctcagatgaaccgaccggcacctcagccacagcagcgtgcccctagtggcaatactgcgccaaacagtgttacctctttcaagtcaccgcaaggaccgtcagcagttcagtgtttccggtgcaaccagatgggtcactatgcaagacagtgtcctcagaatcctaccaacaccaactcagggcatgctaatggcagcactgctagaactcctactccagcggcagctctgtctcgtcctagctctcaggcaagtggacaaagttcacgtgcttccaaccactttggtcgaggacgtgtgaatcacattcaagctgaaaccgctcaggatgctccagacgttgtgatgggtatgttctctgtcaactccgtacccgcaatagttctgtttgattcaggagcttctcattctttcatatcgcaagcttttgtgaaacgaaatggttggaaaacccaaaatttgcgtgtaccgatgatagtacattcccctgggaggaatataagggcaactcaaatatgcccggaagttaaccttagaattgaggaagttgacttcctagccaaaccgatagtcctagactcgcaaagcatggacatcatcctagggatggattggttggctaagcataaaggacagatagattgtgccgaaaagtccatcaccttgcaaggacctggaggaaagcaagtccgctttacccctaacactcctaccgcaaatcggtctattctaaccagtttacaagtcacctccttggagtcggtgcccgtagtctgtgaatatcccgacgtatttccggaagaattaacgagaatgccaccagaccgagagattgaattcgccatagaactggcgccaggcaccgcaccaattgcaaaaagaccctaccgaatggcagctaatgagttagcagaagttaagagacaaatcgaagagctggaaagtaaaggttatgtgcgacctagctcatccacttggggagccccagtgcttctggttaagaaaaaggatggctctgagagaatggtaatcgactatagagccctaaatgaagtaactataaagaacaagtacccgttgccacggattgacgatttattcgatcaacttaaaggagcaagagttttctcaaaaattgacttgaggtcaggttaccaccaactgaaaattagatctgcagatatcccgaagaccgctttctcaacgtgttatggtctatatgagttcacagttatgtccttcggactcaccaatgctccagcattcttcatgaacttaatgaacaaaatctttatggaatacctggaccagtttgtcgtggtattcatcgatgacatcctgatatactctaagaacggggaagaacatgctgaacacctgaggttgataatggaaaagctcagggaccatcaactattcgcaaaattctcaaaatgcgaattctggttagaccgagtagcatttcttggacacgtgatctcctccaacggtgtcaaagtagatcccagcaaggttgaagctgtacttgcttggaacccgcccaagaatgtgtcagagattcgcagtttccttggcttagctggatattatcgaagattcatcgaaggattctctaagctagccagacctatgaccgagctgttaaagaaggaaaagaaatttcaatggtctgcagcttgtgaagacagctttcaagaaatgaagaaaaggttgaccactgccccagttctcaccttgccagatatccgaaaagatttcgagatcttctgtgatgcatcaagacaaggcttaggatgtgtcctaatgcaggaacgaaaggttgtggcctatgcatccaggcagctcaggcctcatgaagttaattatcccacccatgatctcgagttggcagccgtggttcatgctcttaagatctggaggcattatttaatcgggaacagatgtgaagtatacaccgatcacaaaagtcttaagtatattttcacacagaccgagttaaatatgagacagagaagatggttggaactaatcaaggattacgatcttggaatccactatcatcctggtaaagccaacgtggtcgctgatgcgctaagtcgcaaggcctattgcaatgtagctcaaatacggcctgaccaagatcacctgtgcagagaattagagaagttaaggctgaccgtggtacagtcaggtgtccctgccagcttgacagtacatcctaccctagagtcgcaaatccgggaagctcagaaagacgacgaagggataaaagagttgataaaaagaatacaggagaagaaagacaccaatttctccatagacgatcaaggcacagtttggtgcggtccacgcatctgtgtaccggccaagaaggagttaagagatctcatcctaaaggaagctcatgagtccgcctactccattcacccaggaagtacgaagatgtaccaagatatcaaggcatacttctggtgggctggaatgaagcgagatgtcgcagaatactggaaatgggaagagatcggaatggatttcatcaccggtttgccaagaacccccagcgggtatgactccatctgggtaatcgtggaccgactcacgaaatcagctcatttcgtgccagtgaaaaccacctatgatggaaagaaactagcagaactctacatgacccatgtcgtatgtagatttggctgtcccaagaaaattgtgtcagatcgaggcactcagttcacctcaaggttctggaagcagttgcatgaagctctcggaactgatctaaattttagtacggcctaccatccgcagaccgatggtcagacagaaagggtaaaccaaatcctagaagacatgctacgtgcgtgtgccctggatttcgaaggcacttgggatcgttgtttgccgtatgctgagttctcatacaacaacagctatcaggccagcattcagatgtcgccgaacgaggcaatgttcggaagaaagtgccgcactcccttgtgctggaatgaggtgggcgaagcgctggtattcggtcctgacatactcaagtcagcagaagaacaagttaagctgatacgagaacgtttgaagacagcacagaaccgtcagaagaattacgctgacaatcgaacgcgtgaccttgagttcgaaaaaggagatcatgtatacctgcgggtatcacccctccgtggtatgaggaggtttgggatgtccggcaagttagcaccccgctacatcggcccctacctcataaccgccagacgtggcgaagtggcttatcagcttgagttacctgaaggtctcgcagatgtgcacaacgtgttccacgtatcccagctaaagaaatgtcttcgagttccagaagagcaagtccccctaggtaatatcgagctggaaaagaatctgacctataaggaaagaccgatcaaggttcttgaagaggcagaacgtcatactcgaaggaagaccatcaagttctacaaggtccaatggagcaatcattctgaagatgaggcaacctgggagcgagaagatcttctccgcgccgagttcccggagctgctcccttag

SEQ ID NO: 15488 - DNA, 5556 bp, Oryza sativa
  Clone ID: TFbOSC408311j.C1.o20.fg
atggcagtgaacgccagcttcagttcccacggttttggtgagggtcaccacgtcgctcagcttcgtgacctcgcccgtttccttggcttctcgtgtcccaagtacacggggtactccgtggaccgtgttccccctcactgtgagctctctgtgtacctttacccccgtggaggtatacacggagctggccttcgcccacaccacttcactgtagccaggcccactctccagatcgcgtaccaggacctctcctggactgcgcttcgtcgcctggcccacgactacagccaccgtctcgaaggctccgccttccggcagcttccacgccttccttctggccactcagacgccaggtacccttgtccatacagcgagtctcagccagtgctgactcgcatggttgagctttcggaggctcaggccactcagcacgacctactccttgaggcttaccgctcccttgcccgccgctacgccgccttggaggcccgtctggccgaggagggtgtcacctcagttgacactatctcctgggactcaggccgcctctgccacgccagccacctgtcctcccacagctcccgcggctctgcccgcactcccagtggcccgcgctcccccagctcgcgtgcgccgtactcaccagtgtactcgccctacccacacccagttagcccttcctacaccccaggacacaccccagttgcttcctcccgccgtggcccacgctttatccgcactgcgcggaagcgtgttgttggttcttccaccgtgttccgtttccactacccagctcccccaccgccagcggcctgtgctgctgccggccctcgacagatggctagccgcctccgccgtgcagctcgtgcactagcccgctttggttttgaggatggtagagttgagccagaagaaaatcatgaatcagctaatgagcagtctcaccacagcaaccgttcgcatcgtactgtttcccgcaacgcagaggttgagcaaccccgccgcagcagccgctcgcatcgcatagtttcccgtgatgcagagatggaacagtctcaccgctctcaccgtactgccagtcacaattctggagaagaacgcctcccttcccgacctcatgtggaaaccaacatgcaacacttaatggcagttcagacacaaatcttgcaaggactaaccacagccatagccagttttcagcataatgcgcatggaaatggccaccctcacatgggcaacaacagatccaagctgacagactttctgaggtctcgtccgccagagttctctcagaccgtcgagcccgtcgaggctgacgattggttgaaagatgttgatagaaaactcaacttagtgcagtttactcctgttgagaagacgctctacgcctctcaccaactaagaggacctgccgcagattggtgggagaattactgcaatgcacaccctgaacccactaacattgcttgggatgagtttgctacggctttccgtgcagctcatgtgcctgaaagcactattgacatgaagaaagaggaattcaacagacttaagcaaggcaacagcagtgtcaatgagtacctaagtatgttcaacaagttggctcggtacgcccctgaggaagtggacacagacaagaagaagatcaggaaattcttgaaagggatcgtagttggaatgagactccagttgcttgctcatgacttccctacctttcaacacatgatcaacaaggcacttctacttgaggatgccagaaaagaggctaccgaagaatacaagaaacgcaagtctaaccatcagggaaattcctcccgaggcgcacctcgccctcgctacggtcaacccatgcaataccaccagtcggtcactcaggctaaccgccagccaggctacgcccctcgtcctcagatgaactgcccggcaccccagccacagcagcgtgcccctagtggcaatactgcgccaaacagtgttacctctttcaagtcaccacagggaccgtcagcagttcagtgtttccggtgcaaccagatgggtcactatgctagacagtgccctcagaatcctaccaacaccaactcagggcatgctaatggcagcactgccagaactcctactccagcggcagctcagtctcgtcctagcactcaagcaagtggacaaggttcacgtgcttccaaccactttggtcgaggccgtgtgaatcacattcaagctgaaaccgctcaggatgctccagacgttgtgatgggtatgttctctgtcaactccgtacccgcaatagttctgtttgattcgggagcttcccattctttcatatcacaagcttttgtgaaaagaaatggttggaaaacccaaaatttacgtgtaccaatgatagtacattcccctagaaggaatataagggcaactcaaatatgcccggaagttaaccttagaattgaggaagttgacttcctagccaaaccgatagtcctagactcgcaaagcttggacatcatcctagggatagattggttggctaagcacaaaggacagatagattgtgccgaaaagtccatcaccttgcaaggacctggaggaaagcaagtccgctttacccctaacactcctaccgcaagtcggtctatcttaacctgtttacaagtcacctccttggagtcggtgcccatagtttgtgaatatcccgacgtatttcgggaagaattaacaagaatgccaccagaccgagagattgagttcgccatagaactggcaccaggcaccgcaccaattgcaaaaagaccctaccgaatgacagctaatgagttagcagaagttaaaagacaaatcgaagagttggagagtaaaggttatgtgcgacctagctcatccccttggggagccccagtacttctagttaagaaaaaggatggctctgagagaatggtaatcaactatagagccctgaatgaagtaactataaagaacaagtacccgctgccacggatcgacgatttattcgatcaacttaaaggagcaagagttttctcaaaaattgacttgaggtcaggttaccaccaactgaaaatcagatctgaagatatcccaaagaccgctttctcaacgcgttatggtctatatgagttcacagtaatgtccttcggactcaccaatgctccagcattcttcatgaacttaatgaacaaaatcttcatggaatacctggaccagtttgttgtggtattcatcgatgacattctgatatactccaagaacgaggaagaacatgctgaacacctgaggttgataatggaaaagctcagggatcatcaactattcgcaaaattctcgaaatgcgaattctggttagaccgagtagcatttcttggacacgtgatttcctccaatggtgtcgaagtagatcccagcaaggttgaagctgtacttgcttggaacccgcccaagaatgtgtcggagattcgcagcttcctcggcttagctggatattatcgaagattcattgaaggattccctaagctagccagacctatgaccgagctgttaaagaaggaaaagaaatttcaatggtctgcagcctgtgaagacagcttccaagaaatgaagaaaaggttgaccactgccccagttctcaccttgccagatattcgaaaagatttcgagatcttctgtgatgcatcaagacaaggcttaggatgtgtcctaatgcaagaacgaaaggttgtggcctatgcatccaggcagctcaggcctcatgaagtcaattatcccacccatgatctcgagttggcagccgtggttcatgctcttaagatctggaggcactatttaatcgggaacagatgtgaagtatacaccgatcacaaaagtcttaagtatatcttcacacagaccgagttaaatatgagacagagaagatggttggaactaatcaaggattacgatcttggaatccactatcaccctggtaaagccaacgtggtcgctgatgcgctaagtcgcaaggcctatctcaatgtagctcaaatacggcctgaccaagatcacctgtgcagagaattggagaagttaaggctgaccgtggtacagtcaggtgtccctgccagcttgacagtacagcctaccctagaatcgcaaatccgggaggctcagaaagacgacgaagggataaaagagttaataaaaagaatacaggagaagaaagacatcaatttctccatagacgaccaaagcacggtttggtgcggtccacgcatctgtgtaccggccaaaaaggagttaagagatctcatcctaaaggaagctcatgagtccgcctactccattcacccaggaagtacgaagatgtaccaagatatcaaggcatacttctggtgggctggaatgaagcgagatgtcgcagaatacgtagccctgtgtgacgtatgccaaagagtcaaggcagaacatcagaggccagctggtctgctgcaacccctaccgattcccgagtggaaatgggaagagatcggaatggatttcatcaccggtttgccaagaacccctaacgcgtgcgactccatttgggtaatcgtggaccgactcacgaaatcagctcatttcgtgccagtgaaaaccacctatgatggaaagaaactagcagaactctacatgacccatgtcgtatgtagatttggctgtcccaagaaaattgtgtcagaccgaggcactcagttcacctcaaggttctggaagcagttgcatgaagccctcggaactgatctgaattttagtacagcctaccatccgcagaccgatggtcagaccgaaagggttaaccaaatcctagaagacatgctacgtgcgtgtgccttggatttcgaaggcacttgggatcgttgtttgccgtatgccgagttctcatacaacaacagttatcaggccagcattcagatgtcgtcgaatgaggcaatgttcggaagaaagtgccgcacccccttgtgctggaatgaggtgggcgaagcactggtattcggtcctgacatactcaagtcagctgaagaacaagttaagctgatacgagaacgtttgaagacagcacagaaccgtcagaaaaattacgctgacaatcggagacgtgaccttgagttcgaaaaaggagatcatgtgtacctgcgggtatcacccctccgtggtatgaggaggtttgggatgtccggcaagttagcaccccgctacatcggcccctacctcataaccaccagacgtggcgaagtggcttatcagcttgagctacctgaaggcctcgcagatgtgcacaacgtgttccacgtatcccagctaaagaaatgtcttcgagttccagaagagcaagttcccctgggtaatatcgtactggaaaagaatctgacctacaaggaaagaccgaccaaggttcttgaagaggcagaatgtcagactcgaaggaagaccatcaagttctacaaagtccaatggagcaaccattctgaagatgaggcaacctgggagcgagaagatcttctccgcgccgagtttccggaactgctcccttag

SEQ ID NO: 15489 - DNA, 4092 bp, Oryza sativa
  Clone ID: TFbOSC408596j.C1.o1.fg
atgagcaacaatagatccaagctgacagattttctgaggtctcgtccgccagagttctctcagaccgtcgagcccgtcgaggctgacgattggctgaaagatgttgatagaaaactcaacttagtgcagtgtactcctgttgagaagacgctctacgcctctcaccagctaagaggacctgctgcagattggtgggagaattactgcaatgcacaccctgaacccactaacattgcttgggatgagtttgctacggctttccgtgtagctcatgtgcctgaaagcactattgacatgaagaaagaggaattcaacagacttaagcaaggcaacagcagtgtcaatgagtacctaagtatgttcaacaagttggctcggtacgcccctgaggaagtggacacagacaagaagaagatcaggaaattcttgaaagggatcgctgttggaatgagactccagttgcttgctcatgacttccccacttttcaacatatgatcaacatggcacttctacttgaagatgccagaaaagaggctaccgaagaatacaagaaacgcaagtctaaccatcagggaaattcttcccgaggcgcacctcgccctcgctacggtcaacccatgcaatatcaccagtcggtcactcaggctaaccgccagccaggctacgcccctcgtcctcagatgaaccgtccggcacctcagccacagcagcgtgcccctagtggcaatactgcgccaaacagtgttacctctttcaagtcaccgcagggaccgtcagcagttcagtgtttccggtgcaaccagatgggtcactatgccagacagtgccctcagaatcctaccaacaccaactcagggcatgctaatggcagcactgccagaactcctactccagcggcagctcagcctcgtcctagctctcaggcaagtggacaaggttcacgtgcttccaacaactttggtcgaggccgggtgaaccacattcaagctgagaccgctcaggatgctccagacgtcgtgatgggtatgttctctgtcaactccgtacccgcaatagttctatttgattcaggagctttccattctttcatatcacaagcttttgtgaaaagaaatggttggaaaacccaaaatttgcgtgtaccaatgatagtacattcccctgggaggaatataagggccactcaaatatgcccggaagttaaccttagaattgaggaagttgactttctagccaaaccgatagtcctagactcgcaaagcttggacatcatcctagggatggattggttggctaagcacaaaggacagatagattgtgccgaaaagtccatcaccttgcaaggacctggaggaaagcaagtccgctttacctctaacacccctaccgcaagtcggtctatcctaacctgtttacaagtcacctccttggagtcggtgcccatagtctatgaatatcccgacgtatttccagaagaattaacgagtatgccaccagaccgagagattgagttcaccatagaactggcaccaggcaccgcaccaattgcaaaaagaccctaccgaatggcagctaatgagttagcagaagttaaaagacaaatcgaagaattggagagtaagagttatgtgcgacctagctcatccccttggggagccctagtgcttctggttaagaaaaaggatggctctgagagaatggtaatcgactatagagccctgaatgaagtaactataaagaacaagtacccgttgccacagattgacgatttgttcgatcaacttaaaggagcaagagttttctcaaaaattgacttgagatcaggttaccaccaactgaaaatcagatctgaagatatcccgaagaccgctttctcaacgcgttatggtctatatgagttcacagtgatgtccttcggactcaccaatgctccagcattcttcatgaacttaatgaacaaaatcttcatggaatacctggaccagtttgtcgtggtgttcatcgacgatatcctgatatactccaagaataaggaagaacatgctgaacacctgaggctgataatggaaaagctcagggatcatcaactattcgctaaattctcgaaatgcgaattctggttagaccgagtagcatttcttggacacgtgatctcctccaacggtgtcgaagtagatcccagcaaggttgaagctgtacttgcttggaacccacccaagaatgtgtcagagattcgcagcttccttgacttagctggatattatcgaagattcattgaaggattctctaagctagccagacctatgaccgagctgttaaagaaggaaaataaatttcaatggtctgcagcctgtgaagacagctttcaaaaaatgaagaaaaggttgactactgccccagttctcaccttgctagatatccgaaaagatttcgagatcttctgtgatgcatcaagacaaggcttaggatgtgtcctaatgcaagaacgaaagaggcactatttaatcgggaacagatgtgaagtatacaccgatcacaaaagtcttaagtacatcttcactcagaccgagttaaatatgaggcaaagaagatggttggaactaatcaaggattacgatcttggaattcatgaccaccccggtaaagctaatgtggtcggtgatgcgctaagtcgcaaggcctacagtaatgtagctcaaatacggcctgaccaagaccgcctgtgcagagaattggagaagttgaggctgaccgtggtacagtcaggtgtccctgccagcttgacggtgcagccaaccctagaatcgcaaatccgggaggctcagaaagatgacgaagggataaaagaattaataaaaagaatacaagagaagaaagacaccgatttctccatagacgatcaaggcacagtttggtgcggtccacgcatctgtgtaccggccaagaaggagttaagagatctcatcctaaaggaagctcatgagtccgcctactccattcatccaggaagtacgaagatagtcaaggcagagcatcagaggccagctggtctgctgcaacccctaccgattcccgagtggaaatgggaagagatcggaatggatttcatcaccggtttgccaagaacacctagcgggtacgactccatctgggtaatcgtggaccgactcacgaaatcagctcatttcgtgccagtgaaaaccacctttgatggaaagaaactagcagaactctacatgacccatgtcgtatgtagatttggctgtcccaagaaaattgtgtcagaccgaggcactcagttcacctcaaggttctggaagcagttgcatgaagccctcggaaccgatctaaattttagtacggcctaccatccgcagaccgatggtcagaccgaaagggtaaaccaaatcctagaagacatgttgcgtgcgtgcgccctggatttcgaaggcacttgggattgttgtttgccgtatgcggagttctcatacaacaacagctatcaggccagcattcagatgtcgccgaatgaggcaatgttcggaagaaagtgccgcactcccttgtgctggaatgaggtgggcgaagcactggtattcggtcctgacatactcaaggcagcagaagaacaagttaagctgatccgagaacgtttgaagacagcgcagaaccgtcagaagaattacgctgacaatcggaggcgtgaccttgagttcgaaaaaggagatcatgtgtacctgcgggtatcgcccctccgtggtatgaggaggtttggaatgtccggcaagttagcaccccgctacatcggcccctacctcataaccgccagacgtggcgaagtggcttatcagcttgagttacctgaaggtctcgtagatgtgcacaacgtgttccacgtatcccagttaaagaaatgtctccgtgttccagaagaacaagttcccctgggtaatatcgtgctggaaaagaatctgacctacaaggaaagaccgatcaaggttcttgaagaggcagaacgtcagactcgaaggaagaccatcaagttctacaaagtccaatggagcaaccattctgaagatgaggcaacctag

SEQ ID NO: 15490 - DNA, 5286 bp, Oryza sativa
  Clone ID: TFbOSC414072j.C1.o1.fg
atgactgtacctctactctataataaagagacctctgttgctgtgataatctgtcttcctatgataccagcactgtttcctgggtctggtatcaatttacagatggcagtgaacgcaagcgtcagctcccacggttttggtgagggtcaccacgtcgctcagcttcgtgacctcgcccgtttccttggcttctcgtgtcccgagtacacggggtactccgtggaccgtgttccccctcgctgtgagctctctgtgtacctttacccccgtggaggtatacacggagctggccttcgcccacaccacttcactgtggccaggcccactctccagatcgcgtaccaggacctctcctggactgcgcttcgtcgcctggcccacgactacagccaccgtctcgggggctccgccttccggcagcttccacgccttccttctggccacgcagacgccaggtacccttgtccgtacagcgagtctcagccagtgctgactcgcatggttgagctttcggaggctcaggccactcagcacgacctactccttgaggcttaccgctcccttgcccgccgctacgccgctctggaggcccatatggccgaggagggtgtcacctcagttgacactgtctcttgggactcaggccgcctctgtcacgccagccacctgtcctcccacagctcccgcggctctgcccgcactcccagtggcccgcgctcccctagctcgcgtgcgccgtactcaccagtgtactccccctacccacacccagttagcccctcctacacccccggacacaccccagttgcttcctcccgccgtggcccacgctttatccgcaccgcgcggaagcgtgttgttggttcttccaccgtgttccgtttccactacccagctcccccaccgccagcggcctgtgctgctgccggccctcgacagcacttaatggcagttcagatacaaatcttgcaaggattagccgcagccgtagccggttatcagcacaatgcgcatggaaatggccaccctcacatgggcaataatagatccaagctgacagattttctgaggtctcgtccgccagagttctctcagaccgtcgagcccgtcgaggctgacgattggctgaaagatgttgatagaaaactcaacttggtgcagtgtactccggttgagaagacgctctacgcctctcaccagctaagaggacctactgcagattggtgggagaattactgtaatgcataccctgaacccactaacattgcttgggatgagtttgctacggctttccgtgcagctcatgtgcctgaaagcaccattgacatgaagaaagaggaattcaacagacttaagcaaggcaacagcagtgtcaatgagtacctaagtatgttcaacaagttggctcggtacgcccctgaggaagtggacacagataagaagaagatcaggaaattcttgaaaggaatcgcggttggaatgagactccagttgcttgctcacgacttccccacttttcaacatatgatcaacaaggcacttctacttgaggatgccagaaaagaggctaccgaagaatacaagaaacgcaagtctaaccatcagggaaattcctcccgaggcgcacctcgccctcgctacggtcaacccatgcaataccaccagtcggtcactcaggctaaccgccagccaggctacgccccttgtcctcaaatgaaccgtccggcacctcagccacagcagcgtgcccctagtggcaatactgcgccaaacagtgttacctctttcaagtcaccgcaaggaccgtcagctgttcagtgtttccggtgcaaccagatgggccactatgccagacagtgccctcagaatcctaccaacaccagctcacggcatgctaatggcagcactgccagaactcctactccagcggcagctcagtctcgtcctagctctcaggcaagtggacaaggtacttgtgcttccaacaactttggtcgaggccgggtgaaccacattcaagctgagaccgctcaggatgctccagacgttgtgatgggtatgttctctgtcaactccgtacccgcaatagttctgtttgattcaggagcttcccattctttcatatcacaagcttttgtgaaaagaaatggttggaaaacccaaaatttacgtgtaccaatgatagtacattcccctgggaggaatataagggcaactcaaatatgcccggaagttaaccttagaattgaggaagttgacttcctagccaaaccgatagtcctagactcgcaaagcttggacatcatcctagggatggattggttggctaagcacaaaggacagatagattgtgccgaaaagtccatcaccttgcaaggacctggaggaaagcaagtccgttttacctctaacacccctaccgcaagtcggtctatcttaacctgtttacaagtcacctccttggagtcggtgcccgtagtctgtgaatatcccgacgtatttccagaagaattaacgagtatgccaccagaccgagagattgagttcgccatagaactggcaccaggcaccgcaccaattgcaaaaagaccctaccgaatggtagccaatgagctagcagaagttaaaagacaaatcgaagaattgaagagtaaaggttatgtgcgacctagctcatccccttggggagccccagtgcttctggttaagaagaaggatggctctgagagaatgataatcgactatagagccctgaatgaagtgactataaagaacaagtacccgttgccacggattgacgatttgttcgatcaacttaaaggagcaagagttttctcaaagattgacttaagatcaggttaccaccaattgaaaatcagatctgaagatatcccgaagactgctttctcaacgcgttatggtctatatgagttcacactggaccagtttgtcgtggtgttcatcgatgacatcctgatatactccaagaatgaggaagaacatgctgaacacctgaggctaataatggaaaagctcagggatcatcaactattcgctaaattctcgaaatgcgaattctggttagaccgagaagcattccttggacacgtgatctcctccaacggtgtcgatgtagatcccagcaaggttgaagctgtacttgcttggaacccgcccaagaacgtgttagagattcgcagcctccttggcttagctggatattatcgaagattcattgaaggattctctaagctagtcagacctatgaccgagctgttaaagaaggaaaagaagtttcactggtctgcagcctgtgaagacagctttcaagaaatgaagaaaaggttgaccactgccccagttctcaccttgccagatatccgaaaagatttcgagatcttctgtgatgcatcaagacaaggcttaggatgtgtcctaatgcaagaacgaaaggttgtggcctatgcattcaggcagctcaggcctcatgaagtcaactatcccacccatgatctcgagttggcagccgtgtttcatgctcttaagatctggaggcactatttaatcgggaacagatgtgaagtatacactgatcacaaaagtcttaagtatatcttcactcagaccaaattaaatatgaggcagagaagatggttggaactaatcaaggattacgatcttggaattcattaccaccccggtaaagctaatgtggtcgctgatgcgctaagtcgcaaggcctattgcaatgtagctcaaatacggcctgaccaagatcgcctgtgcagagaattggagaagttgaggctgaccgtggtacagtcaggtgtccctgccagcttgacagtacagcctaccctagagtcgcaaatccgggaagctcagaaagacgacgaagggataaaagagttaataaaaagaatacaggagaagaaagacaccaatttctccatagacgatcaaggcacagtttggtgcggtccacgcatctgtgtaccggccaagaaggaattaagagatctcatcctaaaggaagctcatgagtccgcctactccattcatccaggaagtacgaagatgtaccaagatatcaaggcatacttctggtggactggaatgaagcgagatgtcgcagaatacgtagccttgtgtgacatttgccaaagagtcaaggcagagcaccagaggccagctggtctgctacagcccctaccaattcccgagtggaaatgggaagaaatcggaatgtatttcatcaccggtttgccaagaacccctagcgggtacgactccatctgggtaatcgtggatcgactcacgaaatcggctcatttcgtgccagtgaaaaccatctttgatggaaagaaactagcagaactctacatgacccatgtcgtatgtagatttggctgtcccaagaagatcgtgtcagaccgaggcactcagttcacctcaaggttctggaaacagttgcatgaagctctcggaaccgatctaaattttagtacagcctaccatccgcagaccgatggtcagaccgaaagggtaaaccaaatcctagaagacatgctacgtgcgtgtgccctggatttcgaaggcacttgggatcgttgtttgccgtatgctgagttctcatacaacaacagttaccaggccagtattcagatgtcgccgaatgaggcaatgttcggaagaaagtgccgcacccccttgtgctggaatgaggtgggcgaagcgctggtattcggtcctgacatactcaaggcagcagaagaacaagttaagctgatccgagaacgtttaaagacagcgcagaaccgccaaaagaattacgctgacaatcggaggcgtgaccttgagttcgaaaaaggagatcatgtgtacctgcgggtatcacctctccgtggtatgaggaggtttgggatgtccggcaagttagcaccccgctacatcggcccctaccttataaccgccagacgtggcgaagtggcttaccagcttgagttacctgaaggtctcgcagatgtgcacaacgtgttccacgtatcccagttaaagaaatgtcttcgagttccagaagaacaagtccccctgggtaacatcgagctggaaaagaatctgacctacaaggaaagaccgatcaaggttcttgaagaggcagtacgtcagactcgaaggaagaccattaagttctacaaagtccaatggagcaaccactctgaagatgaggcaacctgggagcgagaagatcttctccgcgccgagttcccggagctgctcccttag

SEQ ID NO: 15491 - DNA, 2847 bp, Oryza sativa
  Clone ID: TFbOSC415317j.C1.o1.gm
atgggcaacaatagatccaagctgacagattttctgaggtcacgtccgccagagttctctcagaccgtcgagctcgtcgaggctgacgattggttgaaagatgttgatagaaaactcaacttagtgcagtgtacaccggtcgagaagacgctctacgcctctcaccagctaagaggacctgcggcagattggtgggagaattactgcaatgcacaccctgaacccactaacattgcttgggatgagtttgctacggctttccgtgtagctcatgtgcctgaaagcaccattgacatgaagaaagaggaattcaacagacttaagcaaggcaacagcagtgtcaatgagtacctaagtatgttcaacaagttggctcggtacgcccctgaggaagtggactcagataagaagaagatcaggaaattcttgaaaggaatcgcagttggaatgagactccagttgctagcgcatgacttccccacttttcaacatatgatcaacaaggcacttctacttgaggatgccaaaaaagaggctaccgaagaatacaagaaacgcaaatctaaccaccaggggaattcctcccgaggcgcacctcgccctcgctatggtcaacccatgcaataccaccagtcggtcactcaggctaaccgccagccaggctacgcccctcgtcctcagatgaaccgcccggcaccccagccacagcagcgtgcccctagtggcaatactgcgccaaacagtgttacctctttcaagtcaccacagggaccgtcagcagttcagtgtttccggtgcaaccagatgggtcactatgctagacagtgccctcagaatcctacaaacaccaactcagggcatgctaatggcagcactgccagaactcctactccagcggcagctcagtctcgtcctagcactcaggcaagtggacaaggttcacgtgcttccaaccactttggtcgaggccgtgtgaatcacattcaagctgaaactgctcaggatgctccagacgttgtgatgggagcaagagttttctcaaaaattgacttgaggtcaggttaccaccaactgaaaatcagatctgaagatatcccaaagaccgctttctcaacgcgttatggtctatatgagttcacagtaatgtccttcggactcaccaatgctccagcattcttcatgaacttaatgaacaaaatcttcatggaatacctggaccagtttgttgtggtattcatcgatgacatcctgatatactccaagaacgaggaagaacatgctgaacacctgaggttgataatggaaaagctcagggatcatcaactattcgcaaaattctcgaaatgcgaattctggttagaccgagtagcatttcttggacacgtgatttcctccaatggtgtcgaagtaaatcccagcaaggttgaagctgtacttgcttggaacccacccaagaatgtgtcagagattcgcagcttcctcggcttagctggatattatcgaagattcattgaaggattctctaagctagccagacctatgaccgagctgttaaagaaggaaaagaaatttcaatggtctgcagcctgtgaagacagcttccaagaaatgaagaaaaggttgaccactgccccagttctcaccttgccagatatccgaaaagatttcgagatcttctgtgatgcatcaagacaaggcttaggatgtgtcctaatgcaagaacgaaaggttgtggcctatgcatccaggcagctcaggcctcatgaagccaattatcccacccatgatctcgagttggcagccgtggttcatgctcttaagatctggaggcactatttaatcgggaacagatgtgaagtatacaccgatcacaaaagtcttaagtatatcttcacacagaccgagttaaatatgagacagagaagatggttggaactaatcaaggattacgatcttggaatccactatcaccctggtaaagccaacgtggtcgctgatgcgctaagtcgcaaggcctatcgcaatgtagctcaaatacggcctgaccaagatcacctgtgcagagaattggagaagttaaggctgaccgtggagaagaaagacaccaatttctccatagacaaccaaggcacagtttggtgcggtccacgcatctgcgtaccggccaagaaggagttaagagatctcatcctaaaggaagctcatgagtccgcctattccattcatccaggaagtacgaagatgtaccaagatatcaaggcatacttctggtgggctggaatgaagcgagatgtcgcagaatacgtagccctgtgtgacgtttgccaaagagtcaaggcagaacatcagaggccagctggtctgctgcaacccctaccgattcccgagtggaaatgggaagagattggaatggatttcatcaccggtttgccaagaacccctaacgggtacgactccatctgggaccgtcagaaaagttacgctgacaatcgaaggcgtgaccttgagttcgaaaaaggagatcatgtgtacctgcgggtatcacccctccatggtatgaggaggtttgggatgtccggcaagttagcaccccgctacatcggcccctacctcataaccgccagacgtggcgaagtggcttatcagcttgagctacctgaaggtctcgcatatgtgcacaacgtgttccacgtatcccagctaaagaaatgtcttcgagttccagaagagcaagttcccctgggtaatatcgtgctggaaaagaatctgacctacaaggaaagaccaatcaaggttcttgaagaggcagaacgtcagactcgaaggaagaccatcaagttctacaaa

SEQ ID NO: 15492 - DNA, 5610 bp, Oryza sativa
  Clone ID: TFbOSC415507j.C1.o7.fg
atgactgtacctctactctataataaagagacctctgttgctgtgtacacggggtactccgtggaccgtgttccccctcactgtgagctctctgtgtacctttacccccgtggaggtatacacggagctggccttcgcccacaccacttcaccgtggccaggcccactctccagatcgcgtaccaggacctctcctggactgcgcttcgtcacctggcccacgactacagccaccgtctcggaggctccgccttccggcagcttccacgccttccctctggccactcagacgccaggtacccttgtccgtacagcgagtctcagccagtgctgactcgcatggttgagctttcggaggctcaggccactcagcacgacctactccttgaggcttaccgctcccttgcccgccgctacgccgccttggaggcccgtctggccgaggagggtgtcacctcagttgacactatctcttgggactcaggacgcctctgccacgccagccacctgtcctcccacagctcccgcggctctgcctgcactcccagtggcccgcgctcccccagctcgcgtgcgccgtactcaccagtgtactccccctacccacacccagttagcccttcctacaccccggacacaccccagttgcttcctcccgccgtggcccacgctttatccgcaccgcgcggaagcgtgttgttggttcttccaccgtgttccgtttccgccacccagctcccccaccgccagcggcccgtgctgctgccggccctcgacaggttccgccggtcccttcgcgccagccgatcgacgtttcttcgactgaggagccgactacaggaggcagccaggccgacgaggagtagaggaggcagtcttcagcagccgtccatggctagccgcccccgccgtgcagctcgtgcaccagcccgctttggttttgaagatggtagagttgaagcagaagcaaatcatgaatcagctaatgagcagtctcaccacagcaaccgttcgcaccgtactgtttcccgcaacgcagaggttgagcaaccccgccgcagcaaccgctcgcatcgcacagttttccgtaatgcagagatggaacaatctcaccgctctcaccgcactgccagtcacaattctggagaagaacacctccctcccccacctcatgtggaaaacaacatgcaacacataatggcagttcagacacaaatcttgcaaggactaaccacagccatagccagttttcagcataatgcgcatggaaatggccaccctcacgtgagcagcaatagatccaagctgacagattttctgaggtcacatccgccagagttctctcagaccgtcgagcccgtcgaggctgacgattggctgaaagatgttgataggaaactcaacttagtgcagtgtactccggttgagaagacgctctacgcctctcaccagctaagaggacacgctgcagattggtgggagaattactgcaatgcacaccctgaacccactaacattgcttgggatgagttcgctacggctttccgtgcagctcatgtgcctgaaagcactattgacatgaagaaagaagaattcaacagacttaagcaaggcaacatcagtgtcaatgagtacctaagtatgttcaacaagttggctcggtacgcccctgaggaagtggacacagacaagaagaagatcaggaaattcttgaaagggatcgcagttggaatgagactccagttgcttgctcatgacttccccacctttcaacatatgatcaacaaggcacttctacttgaggatgccagaaaagaggctaccgaagaatacaagaaacgcaagtctaaccatcagggaaattcttcccgaggcgcacctcgccctcgctacggtcaacccatgcaataccaccagtcggtcactcaggctaaccgccagccaggctacgcccctcgtcctcagatgaaccgtccggcacctcagccacagcagcgtgcccctagtagcaataccgcgccaaacagtgttacctccttcaagtcaccacagggaccgtcagcagttcagtgtttccggtgcaaccagatgggtcactatgctagacagtgccctcagaatcctaccaacaccaactcagggcatgctaatggcagcaccgccagaactcctactccagcggcagctcagtctcgtcctagctctcaggcaagtggacaaggttctcgtgcttccaaccactttggtcgaggaagtgtgaatcacattcaagctgaaaccgctcaggatgctccagacgttgtgatgggtatgttctctgtcaactccgtacccgcaatagttctatttgattcaggagcttcccattctttcatatcacaagcttttgtgaaaagaaatggttggaaaacccaaaatttgcgtgtaccaatgatagtacattcccctggaaggaatataagggcaactcaaatatgcccggaagttaaccttagaattgaggaagttgacttcctagccaaaccgatagtcctagactcgcaaagcttggatatcatcctagggatggattggttggctaagcacaaaggacagatagattgtgccgaaaagtccatcaccttgcaaggacctggaggaaagcaagtccgctttacccctaacacccctaccgcaagtcggtctatcctaacctgtttacaagtcacctccctggagtcggtacccatagtctgtgaatatcccgacgtatttccagaagaattaacgagtatgccaccagaccgagagattgagttcgccatagaactggcaccaggcactgcaccaattgcaaaaagaccataccgaatggcagctaatgaattagcagaagttaaaagacaaatcaaagaactggaaagtaaaggttatgtgcgacctagctcatccccttggggagccccagtgcttctggttaagaaaaaggatggctctgagagaatggtaatcgactatagagccctgaatgaagtaactataaagaacaagtacccgttgccacggattgacgatttattcgatcaacttaaaggagcaagagttttctcaaaaattgacttgaggtcaggttaccaccaactgaaaatcagatctgaagatatcccgaagaccgctttctcaacgcgttatggtctatatgagttcacagttatgtccttcggactcactaatgctccagcattcttcatgaacttaatgaacaaaatcttcatggaatacctggaccagtttgtcgtggtgttcatcgatgacatcctgatatactccaagaacgaggaagaacatgttgaacacctgaggctgataatggaaaagctcagagatcatcaactattcgctaaattctcgaaatgcgaattctggttggaccgagtagcatttcttggacacgtgatttcctccaacggtgtcgaagtagatcccagcaaggttgaagctgtacttgcttggaacccgcccaagaacgtgtcagagatccgcagcttccttggcttagcgggatattatcgaagattcattgaaggattctctaagctagccagacctatgaccgagctgttaaagaaggaaaagaaatttcaatggtctgcagcctgtgaagacagctttcaagaaatgaagaaaaggttgaccactgcaccagttctcaccttgccagatatccgaaaagatttcgagatcttctgtgacgcatcaagacaaggcttaggatgtgtcctaatgcaagaacgaaaggttgtggcctatgcatccaggcagctcaggcctcatgaagtcaattatcccacccatgatctcgagttggcagccgtggttcatgctcttaagatctggaggcattatttaatcgggaacagatgtgaagtgtacaccgatcacaaaagtcttaaatatatcttcacacagaccgagttaaatatgaggcagagaagatggttggaactaatcaaggattacgatcttggaatccactatcatcctggtaaagccaacgtggtcgctgatgcgctaagtcgcaaggcctattgcaatgtagctcaaatacggcctgaccaagatcatctgtgcagagaattggagaagttaaggctgaccgtggtacagtcaggagtccctgccagcttgacagtacagcctaccctagaatcgcaaatccgggaggctcagaaagatgacgaagggataaaagagttaataaaaagaatacaggagaagaaggacaccaatttctccatagacaatcaaggcacagtttggtgcggtccacgcatctgtgtaccggccaagaaggagttaagagatctcatcctaaaggaagctcatgagtccgcttactccattcatccaggaagtacgaagatgtaccaagatatcaaggcatacttttggtgggctggaatgaagcgagatgtcgcagaatacgtagccttgtgtgacatttgccaaagagtcaaggcagagcatcagaggccagcaggtctgctgcaacccctaccgattcccgggtggaaatgggaagagatcggaatggatttcatcaccggtttgccaagaacccccagcgggtacgactccatttgggtaatcgtggaccgactcacgaaatcagctcatttcgtgccagtgaaaaccacctatgatggaaagaaactagcagaactctacatgacccatgtcgtatgtagatttggctgtcccaagaaaattgtgtcagaccgaggcactcagttcacctcaaggttctggaagcagttgcatgaagccctcggaactgatctgaattttagtacagcctaccatccgcagaccgatggtcagaccgaaagggtaaaccaaatcctagaagacatgctacgtgcgtgtgccttggatttcgaaggcacttgggatcgttgtttgccgtatgccgagttctcatacaacaacagttatcaggccagcattcagatgtcgccgaatgaggcaatgtacggaagaaagtgccgcacccccttgtgctggaatgaggtgggcgaagcactggtattcggtcctcacatactcaagtcagcagaagaacaagttaagctgatacgagaacgtttgaagacagcacagaaccgtcagaagaattacgctgacaatcggaggcgtgaccttgagttcgaaaaaggagatcatgtgtacctgcgggtatcacccctccgtggtatgagaaggtttgggatgtccggcaagttagcaccccgctacatcggcccctacctcataaccgccagacgtggcgaagtggcttatcagcttgagctacctgaaggtctcgcagatgtgcacaacgtgttccacgtatcccagttaaagaaatgtattcgagttccagaagagcaagttcccctgggtaatatcgagctggaaaagaatctgacctacaaggaaagaccgatcaaggttcttgaagaggcagaacgtcagactcgaaggaagaccatcaagttctacaaagtccaatggagcaatcattctgaagatgaggcaacctgggaacgagaagatcttctccgcgccgagtttccggagctgctcccttag

SEQ ID NO: 15493 - DNA, 3414 bp, Oryza sativa
  Clone ID: TFbOSC415705j.C1.o1.fg
atggcagtgaacgccagcttcagttcccacggtttcggtgagggtcaccacgtcgctcagcttcgtgacctcgcccgcttccttggcttctcgtgtcccgagtacacggggtactccgtggaccgtgttccccctcgctgtgagctctctgtgtacctttaccctcgtggaggtatacacggagctggccttcgcccacaccacttctctgtggccaggcccactctccagatcgcgtaccaggacctctcctggactgcgcttcgtcgcctggcccacgactacagccaccatctcgggggctctgccttccggcagcttccacgccttccttctggccacgcagacgccagatggctagccgcccccgccgtgcagctcgtgcaccagcccgcttcggttttgaagaagctaagaggacctgctgcagattggtgggagaattactgcaatgcacaccctgaacccactaacattgcttgggatgagtttgctacggctttccgtgcagctcatgtgcctgaaagcactattgacatgaagaaagaggaattcaacagacttaagcaaggcaacagcagtgtcaatgagtacctaagtatgttcaacaagttggctcggtacgcccctgaggaagtggacacagacaagaagaagatcaggaaattcttgaaagggatcgcagttggaatgagactccagttgcttgctcatgacttccccacttttcaacatatgatcaacaaggcacttctacttgaagatgccagaaaagaggctaccgaagaatacaagaaacgcaatgttacctctttcaagtcaccgcagggaccgtcagcagttcagtgtttccggtgcaaccagatgggtcactatgccagacagtgccctcagaatcctaccaacaccaactcagggcatgctaatggcagcactgccagaactcctactccagcggcagctcagtcttgtcctagctctcaggcaagtggacaaggttctcgtgcttccaacaaccttggtcgaggccgggtgaaccacattcaagccgagaccgctcaggatgctccagacgttgtgatggtgcttctggttaagaaaaaggatggctctaagagaatggtaatcgactatagagccctgaatgaagtaactataaagaacaagtacccgttgccacagattgacgatttattcgatcaacttaaaggagcaagagttttctcaaaaattgacttgagatcaggttaccaccaactgaaaatcagatctgaagatatcccgaagaccgctttctcaacgcgctatggtctatatgagttcacagtgatgtccttcggactcaccaatgctccagcgttcttcatgaacttaatgaacaaaatcttcatggaatacctggaccagtttgtcgtggtgttcatcgatgacatcctgatatactccaagaatgaggaagaacatgctgaacacctgaggctgataatggaaaagctcagagatcatcaactattcgctaaattctcgaaatgcgaattctggttagaccgagtagcatttcttggacacgtgatctcctccaatggtgtcgaggtagatcccagcaaggttgaagctgtacttgcttggaacccgcccaagaatgtgtcagagattcgcagcttccttggcttagctggatattatcgaagattcattgaaggattctctaagctagccagacctatgaccgagctgttaaagaaagaaaagaaatttcaatggtctgcagcctgtgaagacagctttcaagagatgaagaaaaggcagctcaggcctcatgaagtcaattatcccacccatgatctcgagttggcagccgtggttcatgctcttaagatctggaggcactatttaatcgggaacagatgtgaagtatacaccgatcacaaaagtcttaagtacatcttcactcagaccgagttaaatatgaggcagagaagatggttggaactaatcaaggattacaatcttggaattcattaccaccccggtaaagctaatgtggtcgctgatgcgctaagtcgcaaggcctattgcaatgtagctcgaatacggcctgaccaagatcgcctgtgcagagaattggagaagttaaggctgaccgtggtacagtcaggtgtccctgccagcttgacagtgcagcctaccctagaatcgcaagtccgggaggctcagaaagatgacgaagggataaaagagttaataaaaagaatacaggagaagaaagacaccgatttctccatagacgaccaaggcacagtttggtgcggtccacgcatctgtgtaccggccaagaaggagttaagagatctcatcctaaaggaagctcatgagtccgcctactccattcatccaggaagtacgaagatgtaccaagatatcaaggcatacttctggtgggctggaatgaagcgagatgtcgcagaatacgtagccttgtgtgacatttgccaaagagtcaaggcagagcatcagaggccagctggtctgttgcaacccctaccaattcccgagtggaaatgggaagagatcggaatggatttcatcaccggtttgccaagaacccctagcgggtacgactccatttgggtaatcgtggaccgactcacgaaatcagctcatttcgtgccagtgaaaaccacctttgatggaaagaaactagcagaactctacatgacccatgtcgtatgtagatttggctgtcccaagaagattgtgtcagaccgaggcactcagttcacctcaaggttctggaagcagttgcatgaagccctcggaaccgatctaaattttagtacggcctaccatccgcagaccgatgcgctggtattcggtcctgacatactcaaggcagcagaagaacaagttaagctaatccgagaacgtttaaagacagcgcagaaccgtcagaagaattacgctgacaatcggaggcgtgaccttgagttcgaaaaaggagatcatgtgtacctgcgggtatcacccctccgtggtatgaggaggtttgggatgtccggcaagttagcaccccgctacatcggcccctacctcataaccgccagacgtggcgaagtggcttatcagcttgagttacctgaaggtctcgcagatgtgcacaacgtgttccacgtatcccagttaaagaaatgtcttcgagttccagaagagcaagtccccctgggtagtatcgagctggaaaagaatctgacctacaaggaaagaccgatcaaggttcttgaagaggcagaacgtcagactcaaaggaagaccatcaagttctacaaagtccaatggagcaaccattctgaagatgaggcaacctgggagcgagaagatcttctccgcgccgagttcccggagctgctcccttag

SEQ ID NO: 15494 - DNA, 5463 bp, Oryza sativa
  Clone ID: TFbOSC416839j.C1.o10.fg
atggcagtgaacgccagcttcagttcccacggttttggtgagggtcaccacgtcgctcagcttcgtgacctcacccgtttccttggcttctcgtgtcccgagtacacggggtactccgtggaccgcgttccccctcactgtgagctctctgtgtacctttacccccgtggaggtatacacggagctggccttcgccctcaccacttcactgtggccaggcccactctccagatcgcgtaccaggacctctcctggactgcgcttcgtcgcctggcccacgactacagccaccgtctcggaggctccgccttccggcagcttccacgccttccatctggccactcagacgccagatacccttgtccgtacagcgagtctcagccagtgctgactcgcatggttgagctttcggaggctcaggccactcagcacgaccttctccttgaggcttaccgctcccttgcacgtcgctacgccgccttggaggcccgtctggccgaggagggtgtcacctcagttgacactatctcctgggactcaggacgcctctgccacgccagccacctgtcctcccacagctcccgcggctctgcccgcactcccagtggcccgcgctcccccagctcgcgtgcgccgtactctccagtgtactccccctacccacacccagttagcccttcctacactccaggacacaccccagttgcttcctcccgccgtggcccacgctttatccgcactgcgcggaagcgtgttgttggttcttccaccgtgttccgtttccaccacccagctcccccaccgccagcagcccgtgctgctgccggccctcgacagatggctagccgcccccgccgtgcaactcgtgcaccagcccgcttgggtttcgaagatggtagagtcgaagcagaagcaaatcatgaacccgctaatgagcagtctcaccacagcaaccgttcgcaccgtaccgctccccgcaacgcagaagttgagcaaccccgccgcagcaaccgctcgcatcgcacagtttcccgtgatgcagaaatggagcagtctctccgctctcaccgcactgccagtcacagttctggagaagaacgtatcccttccccacctcatgtggaaaacaacatacaacacataatggcagtacagacacaaatcttgcaaggactaaccacagccatagccagttttcagcataatgcgcatggaaatggccaccctcacgtgggcaataatagatccaagctgacagactttctgaggtcacgtccgccagagttctctcagaccgtcgagcctgtcgaggctgacgattggttgaaagatgttgatagaaaactcaacttagtgcagtgtactcctgttgagaagacgctctacgcctctcaccagctaagaggacctgccgcagattggtgggagaattactgcaatgcacaccctgaacccactaacattgcttgggatgagttcgctacggctttccgtgcagctcatgtgcccgaaagcactattgatatgaagaaagaagaatttaacagacttaagcaaggcaacagcaatgacaatgagtacctaagtcagttcaacaagttggctcggtacgcccctgaggaagtaaacaccgataagaaaaagatcaggagattcttgaaaggaatcgcagttggaatgagactccagttgcttgttcatgacttccccacttttcaacatatgatcaacaaagcacttctacttgaagatgccagaaaagaggccaccgaagaatacaagaaacgcaagtctaaccaccagggaaattcttcccgaggcgcacctcgccctcgctacggtcaacccatgcaatatcaccagtcggtcactcaggctaaccgccagccaggttacgcccctcgccctcagatgaaccgtccggcaccccagccacagcagcgtgcccctagtggcaatacggcgccaaacagtgttacctctttcaagtcaccgcagggaccgtcagtagttcagtgtttccggtgcaaccagatgggtcactatgccagacagtgccctcagaatcctaccaacaccaactccgggcatgctaatggcagcaccgccagaactcctactccagcggcagctcagtctcgtcctagctctcaggcaagtggacaaggatctcgtgcgtccaacaacttcggtcgaggacgtgtgaatcacattcaagctgaaaccgctcaggatgctccagacgttgtgatgggtatgttctctgtcaactccgtacccgcaatagttctatttgattcaggagcttcccattctttcatatcacaagcttttgtgaaaagaaatggttggaaaacccaaaatttgcgtgtaccaatgatagtacattcccctgggaggaatataagggccactcaaatatgcccggaagttaaccttagaattgaggaagttgacttcctagccaaaccgatagtcctagactcgcaaagcttggacatcatcctaggaatggattggttggctaagcacaaaggacagatagattgtgccgaaaagtccatcaccttgcaaggacctggagggaagcaagtccgctttacccctaacacccctaccgcaagtcgaatgccaccagaccgagagatcgagttcgccatagaactggcaccaggcacagctccaattgcaaaaagaccctaccgaatggcagctaatgagttagcagaagtcaaaagacaaattgaagagttggagagtaaaggttatgtgcgacctagttcatccccttggggagccccagtgcttctggttaagaaaaaggatggctctgagagaatggtaatcgactatagagccctgaatgaagtaactataaagaacaagtacccgttgccacggattgacgatttattcgatcaacttaaaggagcaagagttttctcaaaaattgacttgaggtcaggttaccaccaattgaaaatcaggtctgaagatatcccgaagaccgctttctcaacgcgttatggtctatatgagttcacagtaatgtccttcggactcaccaatgctccagcattcttcatgaacttaatgaacaaaatctttatggaatacctggaccagtttgtcgtggtattcatcgatgacatcctgatatactctaagaacgaggaagaacatgctgagcacctgaggctgataatggaaaagcttagagatcatcaactattcgctaaattctcgaaatgcgaattctggttagaccgagtagcatttcttggacacgtaatctcctccaacggtgtcgaagtagatcccagcaaggttgaagctgtacttgcttggaacccgcccaagaatgtgtcagagattcgcagcttccttggcttagctggatattatcgaagattcattgaaggattctctaagctagccagacctatgaccgagctgttaaagaaggaaaagaaatttcaatggtctgcagcctgtgaaggcagctttcaagaaatgaagaaaaggttgaccactgccccagtacttaccttgccagatatccgaaaagatttcgagatcttctgtgatgcatcaagacaaggcttaggatgtgtcctaatgcaagaacgaaaggttgtggcctatgcatccaggcagctccggcctcatgaagtcaattatcccacccatgatctcgagttggcagccgtggttcatgctcttaagatctggaggcactatttaatcgggaacagatgtgaagtatacaccgatcacaaaagccttaaatatatcttcacacagaccgagttaaatatgagacagagaagatggttggaactaatcaaggattacgaccttggaatccactatcatcctggtaaagccaacgtggtcgccgatgcgctaagtcgcaaggcctattgcaatgtagctcaaatacggcctgaccaagatcatctgtgcagagaattggagaagttaaggctgaccgtagtacagtcaggagtcccagccagcttgacagtacagcctaccctagagtcgcaaatccgggaggctcagaaagatgacgaagggataaaagagttaataaaaagaatacaggagaagaaagacaccaatttctccatagacgatcaaggcacagtttggtgcggcccacgcatctttgtaccggccaaggagttaagagatctcatcctaaaggaagctcatgagtccgcttactccattcatccaggaagtacgaagatgtaccaagatatcaaggcatacttctggtgggctggaatgaagcgagatgtcgcagaatacgtagccttgtgtgacatttgccaaagaatcaaggcagagcatcagaggccagctggtctgctgcaacccctaccgattcccgagtggaagtgggaagagatcggaatggatttcatcaccggtttaccaagaacccccagcgggtacgactccatttgggtaatcgtggaccgactcacgaaatccgcacatttcgtgcccgtaaaaaccacctatgatgggaagaagctagcagaactctacatgacccatgtcgtatgtagatttggctgtcccaagaaaattgtgtcagaccgaggcactcagttcacctcaaggttctggaagcagttgcatgaagccctcggaactgatctgaattttagtacggcctaccatccgcagaccgatggtcagacagaaagagtaaaccaaatcctagaagacatgctacgagcgtgtgccttggatttcgaaggcacttgggatcgttgtttaccgtacgcggagttctcatacaacaacagttatcaggccaacattcagatgtcgccgaatgaggcaatgttcggaagaaagtgccgcactcccttgtgctggaatgaggtgggcgaagccctggtattcggtcctgacatactcaagtcagcagaagaacaagttaagctaatccgaggacgattaaagacagcgcagaaccgtcagaagaactacgctgacaatcggaggcgtgaccttgagttcgaaacaggagatcatgtatacctgcgggtatcacccctccgtggtatgaagaggtttgggatgtccggcaagttagcaccccgctacatcggcccctacctcataaccgccagacgtggcgaagtggcttatcagcttgagctacctgaaggactcgcagatgtgcacaacgtgttccacgtatcccagctaaagaaatgtcttcgagttccagaagagcaagttctcctgggtaatatcgagctggaaaggaatctgacctacaaggaaagaccgatcaaggttcttgaagaggcagaacgtcagactcgaaggaagaccatcaagttctacaaagtccaatggagcaatcattctgaagatgaggcaacatgggaacgagaagatcttctccgcgccgagtttccggagctgctcccttag

SEQ ID NO: 15495 - DNA, 4689 bp, Oryza sativa
  Clone ID: TFbOSC417333j.C1.o7.fg
atggcagtgaacgccagcttcagttcccacggttttggtgagggtcaccacgtcgctcagcttcgtgacctcgcccgtttccttggcttctcgtgtcccgagtacacggggtactccgtggaccgtgttccccctcactgtgagctctctgtgtacctttacccccgtggagacgccaggtacccttgtccgtacagcgagtctcagccagtgctgactcgcatggttgagctttcggaggctcaggccactcagcacgacctactccttgaggcttaccgctcccttgcccgccgctacgccgccttggaggcctgtctggccgaggagggtgtcacctcagttgacactatctcttgggactcaggccgcctctgccacgccagccacctgtcctcccacagctcccgcggctctgcccgcactcccagtggcccgcgctcccccagctcgcgtgcgccgtactcaccagtgtactccccctacccacacccagttagcccttcctacacccccggacacaccccagttgcttcctcccgccgtggcccacgctttatccgcactgcgcggaagcgtgttgttggttcttccaccgtgttccgtttccactacccagctcccccaccgctagcgatggctagccgcccccgccgtacagctcgtgcgccagcccgctttggttttgaagatggtagagtcgaaccagaagcaaatcatgaatcagctaatgagcagtctcaccacagcaaccgttcgcaccgtactgtttcccgcaacgcagaggttgagcaaccccgccgcagcagccgctcgcatcgcacagtttcccgtgatgcagagatggaacagtctcaccgctctcaccacactgccagtcacaattctggagaagaacgcctcccttccccacctcatgtggaaaacaacatgcaacacttaatggcagttcagacacaaatcttgcaaggactaaccacagccatagccagttttcagcataatgcgcatggaaatggccaccctcacatgggcaacaacagatccaagctgacagactttctgaggtctcgtccgccagagttctctcagaccgtcgagcccgtcgaggctgacgattggttgaaagatgttgatagaaaactcaacttagtgcagtgtactccggttgagaagacgctctacgcctctcaccagttaagaggacctgccgcagattggtgggagaattactgcaatgcacaccttgaacccactaacattgcttgggatgagtttgctacggctttccgtgcagctcatgtgcctgaaagcactattgacatgaagaaagaagaattcaacagacttaagcaaggcaacagcagtgtcaatgagtacctaagtcagttcaataagttggctcggtacgcccctgaggaagtggacacagacaagaagaagattaggaaattcttgaaagggatcgcagttggaatgagactccagttgcttgcgcatgacttccccacttttcaacatatgatcaacaaggcacttctacttgaggatgccagaaaagaggctaccgaagaatacaagaaacgcaagtctaaccatcagggaaattcttcccgaggcgcacctcgccctcgctacggtcaacccatgcaataccaccagtcggtcactcaggctaaccgccagccaggctacgcccctcgccctcagatgaaccgtccggcacctccgccacagcagcgtgcccctagtggcaacactgcgccaaacagtgttacctctttcaagtcaccacagggaccgtcagcagttcagtgtttccggtgcaaccagatgggtcactatgctagacagtgtcctcagaatcctaccaacaccaactcaggacatgctaatggcagcactgccagaactcctactccagcggcagctcagtctcgtcctagctctcaggcaagtggacaaggttcacgtgcttccaacaactttggtcgaggccgtgtgaatcacattcaagctgaaaccgctcaggatgctccagacgttgtgatgggacctggaggaaagcaaatccgctttacccctaacacccctaccgcaagccggtctattctaacctgtttacaagtcacctccttggagtcggtgcccatagtctgtgcataccccgacgtatttccggaagaattaacaagaatgccaccagaccgagagatcgagttcgccatagaactggcactaggcactgccccaattgcaaagagaccctaccgaatggcagctaatgagttagcagaagttaaaagacaaatcgaagaattggagagtaaaggttatgtgcgacctagctcatccccttggggagccccagtgcttctggttaagaaaaaggatggctctgagagaatggtaatcgactatagagccctgaatgaagtaactataaagaacaagtacccgttgccacggattgacgatttattcgatcaactcaaaggagcaagagttttctcaaaaattgacttgaggtcaggttaccaccaactgaaaatcagatctgaagatattccgaagaccgctttctcaacgcgttatggtctatacgagttcacatttgtcgtggtgttcatcgatgacatcctgatataccccaagaatgtgtcagagattcgcagcttccttggcttagcgggatattatcgaagattcattaaaggattctctaagctagccagacctatgactgagctgttaaagaaggaaaagaaatttcaatggtctgcagcctgtgaagacagctttcaagaaatgaagaaaaggttgaccactgccccagttcttaccttgccagatatccgaaaagatttcgagatcttctgtgacgcatcaagacaaggcttaggatgtgtcctaatgcaagaacgaaaggttgtggcctatgcatccaggcagctcaggcctcatgaagtcaattatcccacccatgatctcgagttggcagccgtggttcatgctcttaagatctggaggcactatttaatcgggaacagatgtgaagtatacaccgatcacaaaagtcttaagtatatcttcacacagaccgagttaaatatgagacagagaagatggttggaactaatcaaggattacgaccttggaatccactatcatcctggtaaagccaacgtggtcgctgatgcgctaagtcgcaaggcctattgcaacgtagctcaaatacggcccgaccaagatcacctgtgcagagaattggagaagttaaggctgaccatggtacagtcaggtgtccctgccagcttgacagtacagcctaccctagagtcgcaaatccgggaggcacagaaagacgacgaagggataaaagagttaataaaaagaatacaggagaagaaagacaccaatttttccatagacgatcaaggcacagtttggtgcggtccacgcatctatgtaccggccaagaaggagttaagagatctcatcctaaaagaagctcatgagtccgcctactccattcatccaggaagtacgaagatgtaccaagatatcaaggcatacttctggtgggctggaatgaagcgagatgtcgcagaatacgtagccttgtgtgacatttgccaaagagtcaaggcagagcatcagaggccagctggtctgctgcaacccctaccgattcccgagtggaaatgggaagagatcggaatggatttcatcaccggtttgccaagaacccctagcgggtacgactccatttgggtaatcgcggatcgcctcacgaaatcagctcatttcgtgctagtgaaaaccacctatgatggaaagaaactagcagaactctacatgacccatgtcgtatgtagatttggctgtcccaagaagatcgtgtcagaccgaggcactcagttcacctcaaggttctggaagcagttgcatgaagctctcggaactgatctaaattttagtacagcctaccatccgcagaccgatggtcagaccgaaagggtaaaccaaatcctagaagacatgctacgtgcgtgtgccctggatttcgaaggcacttgggatcgttgtttgccgtatgccgagttctcatacaacaacagctatcaggccagcattcagatgtcgccgaatgaggcaatgttcggaagaaagtgccgcactcccttgtgctggaatgaggtgggcgaagcgctagtattcggtcctgacatactcaagtcagcagaagaacaagttaagctgatccgagaacgtttgaagacagcgcagaaccgccaaaagaattacgctgacaatcggagacgtgaccttgagttcgaaaaaggagatcatgtatacctgcgagtatcacccctccatggtatgagaaggtttgggatgtccggcaagttagcaccccgctacatcggcccctacctcataaccgccagacgtggcgaagtggcttatcagcttgagctacctgaaggtctcgcagatgtgcacaacgtgttccacgtatcccagttaaagaaatgtcttcgaattccagaagagcaagttcccctggtttcagagcccgaagacccgcagtgcgaggatttcgaggatcaagctccagatctcgagcaaggcaagccacctttgaacatcttgaacctatatttgaaatttaattatgttgcttga

SEQ ID NO: 15496 - DNA, 4863 bp, Oryza sativa
  Clone ID: TFbOSC4900j.C1.o6.fg
atggggtactccgtggacgtgttccccctcgctgtgagctctctgtgtacctttaccctcgcggaggtatacacggagctggccttcgcccacaccacttcactgtggctaggcccaccctccagatcgcgtaccaggacctctcctggactgcgcttcgtcgcttggcccacgactacagccaccgtctcgggggctctgccttccggcagctcccacgtcttccttctggctacgcagatgccagcccgcttcagttttgaggaaggtagagttgagccagaagcaaatcatgagtcagctaatgagcagtctcaccacagcatccgttcgcaccatactgcttcccgcaatgcagaagttgagcaaccccaccgcagcaatcgctcgcatcacacagcttcccgtaatgcagaagtggaacaatctcaccgctctcaccgcactgccagtcacaattctggagaagaacgcatcccttccccacctcatgtggaaaacaacatgcagcacttaatgacagttcagacacaaatcttgcaaggattagccgcagccatagccggctttcagcataatgcccatggaaatggccaccctcacatgggcaacaatagatccaagctgacagactttctgaggtctcgtccgccagagttctctcagaccgtcgagcccgtcgaggctgacgattggctgaaagatgttgatagaaaactcaacttagtgcagtgtactcctgttgagaagatgctctacgcctctcaccagctaagaggacatgctgcagattggtgggagaattactgcaatgcacaccctgaacccactaacattgcttgggatgagtttgctacggctttccgtggagctcatgtgcctgaaagcaccattgatacgaagaaagaggaatttaacaggcttaagcaaggcaacaacagtgtcaatgagtacctaagtcagttcaacaagttggctcggtacgcccctaaggaagtggacacagacaagaagaaaatcaggaagttcttgaagggaatcgcagttggaatgagactccagttgcttgctcatgacttccccacttttcaacatatgatcaacaaggcacttctacttgaggatgccagaaaagaggctaccgaagaatacaagaaacgcaagtttaaccatcaggggaattcttcccgaggcgcacctcgccctcgctatggtcaacccatgcaatatcaccaatcggtcactcaggctaaccgccagccaggctacgcccctcgtcctcagatgaaccgtccggcacctcagccacagcagcatgccccaagtggcaatactgcgccaaatagtgttacctctttcaagtcaccactaggactatcagcagttcagtgtttccggtgcaaccagatgggtcactatgccagacagtgccctcagaatcctaccaacaccaactcagggcatgctaatggcagcactgccagaactcctactccagcggcagctcagtctcgtcctagctctcaggcaagtggacaaggttctcgtgcttccaacaactttggtcgaggccgggtgaaccacattcaagctgagaccgctcaggatgctccagacgttgtgatggtacattcccctgggaggaatataagggcaacccaaatatgcccggaagttaaccttagaattgaggaagttgacttcctagccaaaccgatagtcctagactcgcaaagcttggacatcatcctagggatggattggttggctaagcacaaaggacagatagattatgccgaaaggtccatcaccttgcaaggacctagaggaaagcaagtctgcttcaccactaacacccctaccgcaagtcggtctatcctaacctatttacaagtcacctccttggagtcggtgcccatagtctgtgaatatcccgacgtatttcccgaagaattaacaagtatgccaccagaccgagagattgagttcgccatagaactggcaccaggcaccgcaccaattgcaaaaagaccctaccaaatggcagctaatgagttagcagaagtcaaaagacaaatcgaagaattggagagtaaaggttatgtgcgacctagctcatccccttggggagccccagtgctcctggttaagaaaaaggatggctctgagagaatggtaatcgactatagagccctgaatgaagtaactataaagaacaagtacgcattgccacggattgacgatttgttcgatcaacttaaaggagcaagagttttctctaaaattgacttgagatcaggttaccaccaattgaaaattagatctgaagatatcccgaagaccgctttctcaacgcgttatggtctatatgagttcacagtgatgtccttcggaatcaccaatgctccagcattcttcatgaacttaatgaacaagatcttcatggaatacctggaccagtttgtcgtggtattcatcgatgacatcctgatatactccaagaatgaggaagaacatgctgaacacctgaggctgataatggggaagctcagggatcatcaactattcgctaaattctcgaaatgcgaattctggttggaccgagtagcatttcttggacacgtgatctccttcaacggtgtcgaagtagatcccagcaaggttggagctgtacttgcttggaacccgcccaagaatgtgtcagagatccacagcttccttggcttagctggatattatcgaagatttattgaaggattctctaagctagccagacctatgaccgagctgttaaagaatgaaaagaaatttcaatggtctacagcctgtgaagacagctttcaagaaatgaagaaaaggttgaccaccgccccagttctcaccttgccagatatccgaaaggatttcgagatcttctgtgatgcatcaagacaaggcgtaggatgtgtcctaatgcaagaacgaaaggttgtggcctatgcatccaggcagctcaggcctcatgaagtcaactatcccacccatgatctcgagttggcagccgtggttcatgctcttaagatctggaggcactatttaatcgggaacagatgtgaagtatacaccgatcacaaaagtcttaagtacatcttcacccagaccgagttaaatatgaggcagagaagatggttggaactaatcaaggattacgatcttggaattcattaccatcccggtaaagctaatgtggtcgctgatgcgctaagtcgcaagacctactacaatgtagctcaaatatggccagaccaagatcgcctgtgcggagaattggagaagttaaggctgaccgtggtacagtcaggtgtccctgccagcttgaccgtgcagcctaccctagagtcgcaaatccgggaagctcagaaagatgatgaagggataaaagaattaataaaaagaatacaggagaagaaggacaccgatttctcaaatagacgatcaaggcacagtttgaaggagttaagagatcccatcctaaaggaagctcatgagtccgcctactccattcatccaggaagtacgaagatgtaccaggatatcaaggcatatttctggtgggctggaatgaagcgagatgtcgcagaatacgtggcgttgtgtaacatttgccaaagagtcaaggcagagaatcagaggccagcgggtctgctgcaacccctaccgattcccgagtggaaatgggaagagatcggaatggatttcatcaccggtttgccaagaacccctagcgggtacgactccatctgggtaatcgtggaccgactcacgaaatcagctcatttcgtgccagtgaaaaccacctttgatggaaagaaactagcagaactctacatgacccatgtcgtgtgtagatttggctgtcccaagaagattgtgtcagaccgaggcactcagttcacctcaaggttctggaagcagttgcatgaagctctcggaaccgatctaaattttagtacagcttaccatccgcagaccgatggtcaaacagaaagggtaaaccaaatcctagaagacatgctacccttggtcacatcactgacctcgcggcagtcggatcttgtcaccggccttggtctagtcgccgcatccgcccacgcccccgcctccgtgtccaactccgtcggtccaagcaagctccagaatggctctttgaggtcagaggtcaccacctccttcgccgatccatcgctttacccccttccccttcagatccatcgctgccacctctcagtgccgccagatctggcctatttgaggtcagaagctgcggtggggactacaaagtcgttagcaattttgatgaaggcgctcatactcttggtccccgcccgcgtcgctcaagggttgggcgacacgggcgtcgcctccctccccagccgacccatcatctcctcccacctctacctcattgccgcccaagcaagccaccagaaaaccgtgcctttcttctcctccctgaaagtcttgagactagagcccgtggcccgatccacgatggggcagccgccgcgacatagggtggaaagccggtggcgtagttttagagagggcaccggtgaccagcggcacgcgcgtaggagcctgagggtggcctccatgcaggcggagaggagggcatcttcgcagcgaagtcggaactattatgtcgcttgtggaaagcttggtaacgataacacatgtgggggtgatggaattcttactgggatttggggggaggcaagggtgacgaaaaaatcaccgcacctatcaggcaacgaatggaaaaatacgaatatttatattagttatagaaatgtcggcaacaacctaaccatcgaaaagaaataa

SEQ ID NO: 15497 - DNA, 5157 bp, Oryza sativa
  Clone ID: TFbOSC832j.C1.o1.fg
atggcagtgaacgccagcttcagttcccacggttttggtgagggtcaccacgtcgctcagcttcgtgacctcgcccgcttccttggcttctcatgtcccgagtacacggggtactccgtggaccgtgttccccctcgctgtgagctctctgtgtacctttaccctcgtggaggtatacacggagctggccttcgcccacaccacttcactatggccaggcccactctccagatcgcgtaccaggacctctcctggactgcgctttgtcgtttggcccacgactacagccaccgtcttgggggctctgccttccggcagctcccacaccttccttctagccacgcagacgccaggtacccttgtccgtacaacgagtctcagccagtgctgactcgcatggttgagctttcggaggctcaggccactcagcacaacctactcctcgaggcttactgctcccttgcccgccgctacgccgctctggaggcccatctggccgaggagggtgtcacctcagttgacactgtctcttgggactcaggccgcctctgccacgccagccacctgtcctcccacagctctcgcggctctgcccgcactcccagtggcccgcgctcccccagctcgcgtgcgccgtactcacaagtgtactccccctacccacacccagttagcccctcctacacccccggacacaccccagttgcttcctcccgccgtggcccacgctttatccgcactgcgcggaagcgtgttgttggttcttccaccgtgttctgcttcgactacccagctcccccaccgctagcggcccgtgctgttgggggccctcgacagatggctagccacccccaccgtgctgctcgtacaccagcctgcttcggttttgaggaaggtagagttgagccagaagcaaatcatgagtcagctaatgagcagtctcaccagagcaaccgttcgcaccgtactgcttcccgcaatgcagaagttgagcaaccccaccgcagcaatcgctcgcatcacacagcttcccgtaatacagaagtggaacagtctcaccgctctcaccgcactgccagtcacaattctggagaagaacgcatcccttccccacctcatgtggaaaacaacatgcagcacttgatggcagtacagacacaaatcttgcaaggattagccgcagccatagccggctttcagcataatgcacatggaaatggccaccctcacatgggcaacaatagatccaagctgacagactttctgaggtctcgtccgccagagttctctcagaccatcgagcccatcgaggctgacgattggctgaaagatgttgatagaaaactcaacttagtgcaatgtactcctgttgagaagacgctctacgcctctcaccagctaagaggacctgctgcagattggtgggagaattactgcaatgcacaccctgaacccactaacattgcttggggtgagtttgctatggctttccgcgcagctcatgtgcctgaaagcgccattgatatgaagaaagaggaatttaacaggcttaagcaaggcaacaacggtgtcaatgagtacctaagtcagttcaacaagttggctcggtatgcccctgaggaagtggacacagacaagaagaagatcaggaagttcttgaagggaattgcagttggaatgagactccagttgcttgctcatgacttccccacttttcaacatatgatcaacaagacacttctacttgaggatgctagaaaagaggctaccgaagaatataagaaacgcaagtctaaccatcaggggaattcttccctaggcgcacctcaccctcgctatggtcaacccatgcaatatcaccagtcagtcactcaggctaaccgccagccgggctacgcccctcgtcctcagatgaaccgtccggcacctcagccacagcaacataccccaagtggcaatactgcaccaaacagtgttacctctttcaagtcaccgctaggactgtcagcagttcagtgtttccggtgcaaccagatgggtcactatgccagacagtgccctcagaatcctaccaacaccaactcagggcatgctaatggcagcactgccagaactcgtactccagcggcagctcagtctcgacctagctctcaggcaagtggacaaggttctcgtgcttccaacaactttggtcgaggccgggtgaaccacattcaagctgagacagctcaggatgctccagacgttgtgatggtacattcccctggaaggaatataagggcaactcaaatatgcccgggagttaaccttagaattgaggaagttgacttcctagccaaaccgatagtcctagactcgcaaagcttggacatcatcctagggatggattggttggctaagcacaaaggacagatagattgtgccgaaaggtccatcaccttgcaaggacctggaggaaagcaagtccgctttacctctaacgcccctaccgcaagtcggtctatcctaacctgtttacaagtcacctccttggagtcggtgcccatagtctgtgaatatcccgacgtatttccagaagaattaacgagtatgccaccagaccgagagattcagttcgccatagaactagcaccaggcactgcaccaattgcaaaaagaccctaccgaatggcagctaatgagttagcagaagtcaaaagacaaatcgaagagttggaaagtaaaggttatgtgcgacctagctcatccccttggggagccccagtgcttctggttaagaaaaaggatggctctgagagaatggtaatcgactatagagccctgaatgaagtaactataaagaacaagtacccgttgccacggattgacgatttgttcgatcaacttaaaggagcaagagttttctctaaaattgacctgagatcaggttaccgccaattgaaaatcagatctgaagatatcccgaagaccgctttctcgacgcgttatggtctatatgagttcacagtgatgtccttcggactcaccaatgctccagcattcttcatgaacttaatgaacaaaatcttcgtggaatacctggaccagtttgtcgtggtattcatcgatgacatcctgatatactccaagaatgaggaagaacatgctgaacacctgaggctgataatgggaaagctcagggatcatcaactattcgctaagttctcaaaatgcgaattctgcaaggttgaagctgtacttgcttggaacccgcccaagaatgtgtcagagatccgcaacttccttggcttagctggatattatcgaatattcattgaaggattctctaagctagccagacctatgaccgagctgttaaagaaggaaaagaaatttgaatggacagcagcctgtgaagacggctttcaagaaatgaagaaaaggttgaccactgtcccagttctcaccttgccagatatccgaaaagatttcgagatcttctgtgatgcatcaagacaaggcttaggatgtgtcctaatgcaagaacgaaaggttgtggcctatgcatccaggcagctcaggcctcatgaagtcaactatcctacccatgatctcgagttggcagccgtggttcatgctcttaagatctggaggcactatttaatcgggaatagatgtgaagtatacaccgatcacaaaagtcttaagtatatcttcacacagaccgagttaaatatgaggcagagaagatggttggaactaatcaaggattacgaccttggaattcattaccatcccggtaaagctaatgtggtcgcggatgcgctaagtcgcaagacctattgcaatgaagctcaaatatggccagcccaagatcgcctgtgcagagaattggagaagttaaagctgaccgtggtacagtcaggtgtccctgccagcttgacagtgcagcctaccctagaatcgcaaatccgggaagctcagaaagatgatgaagggataaaagaattaataaaaagaatacaggagaagaaggacaccgatttctccatagacgatcaaggcacagtttggtgcggtccacgcatctgtgtaccggccaagaaggagttaagaaatctcattctaaaggaagctcatgagtccgcctactccattcatccaggaagtacgaagatgtaccaggatatcaaggcatacttctggtgggcgggaatgaagcgagatgtcgcagaatacgtagccctgtgtgacatttgccagagagtcaaggcagagcatcagaggccagctggtctgctgcaacccctaccgattcccgagtggaaatgggaagagatcggaatggatttcatcaccggcttgccaacaacccctagcggatttggctgccccaaaaagattgtgtcagaccgaggcactcagttcacctcaaggttctggaagcagttgcatgaagctctcggaaccaatctaaattttagtacagcttaccatccacagaccgatggtcagacagaaagggtaaaccaaatcctagaagacatgctacgtgcgtgtgccctagatttcgaaggcacttgggatcgttgtttgccgtatgctgagttttcatacaacaacagttatcaggccagcattcagatgtcgccgaatgagacaatgtttggaagaaagtgccgcactcccttgtgctggaatgaggtgggcgaagcactgaattacgctgacaatcggaggcgtgaccttgagttcgaaaaaggagaccacgtgtacctgcgggtatcacctctccgtggtatgaggaggtttgggatgtccggcaagttagcaccccgctacatcggcccctacctcataaccgctagacgtggcgaagtggcttatcagcttgagttacctgaaagtctcgcagatgtactcaacgtgttccacgtgtctcagttgaagaagtgtctccgtgttccagaagaacaagttcccctggataatatcgaactggaaaagaatctgacctacaaggaaataccgatcaaggttcttgaagaggcagaacgtcagactcgaaggaagaccatcaagttctacaaggtccaatggagcaatcattctgaagacgaggcaacctgggaacgagaagatctcctccgcgccgagttcccggagctgctcccttag

SEQ ID NO: 15498 - DNA, 4251 bp, Oryza sativa
  Clone ID: TFbOSC900019j.C1.o10.fg
atggaacagtctcaccgctctcaccacactgccagtcacaattctggagaagaacgcctcccttccccacctcatgtggaaaacaacatgcaacacctaatggcagttcagacacaaatcttgcaaggactaaccacagccatagccagttttcagcataatgcgcatggaaatggccaccctcacatgggcaacaacagatccaagctgacagactttctgaggtctcgtccgccagagttctctcagaccgtcgagcccgtcgaggctgacgattggttgaaagatgttgatagaaaactcaacttagtgcagtgtactcctgtggagaagacgctctacgcctctcaccagctaagaggacctgccgcagattggttggagaattactgcaatgcacaccctgaacccactaacatttcttgggatgagttcgctacggctttccgtgcagctcatgtgcctgaaagcactattgacatgaagaaagaagaatttaacagacttaagcaaggcaacagcagtgtcaatgagtacctaagtcagttcaacaagttggctcggtacgcccctgaggaagtagacacagataagaaaaagatcaggaaattcttgaaaggaatcgcagttggaatgagactccagttgcttgctcatgacttccccacttttcaacatatgatcaacaaagcacttctacttgaggatgccagaaaagaggctaccgaagaatacaagaaacgcaagtctaaccatcagggaaattcttcccgaggcgcacttcgccctcgctacggtcaacccatgcaataccaccagtcggtcactcaggctaaccgccagccaggctacgcccctcgtcctcagatgaaccgtccggcacctcagccacagcagcgtgcccctagtggcaatactgcgcctaacagtgttacctctttcaagtcaccgcagggaccgtcagcagttcagtgtttccggtgcaaccagatgggtcactatgctagacagtgtcctcagaatcctaccaacaccaactcagggcatgctaatggcagcactgccagaactcctactccagcggcagctcagtttcgtcctagctctcaggcaagtggacaaggttcacgtgcttccaaccactttggtcgaggccgtgtgaatcacattcaagctgaaaccgctcaggatgctccagacgttgtgatgggtatgttctctgtcaactccgtacccgcaatagttctatttgattcaggagcttcccattctttcatatcacaagcttttgtgaaaagaaatggttggaaaacccaaaatttgcgtgtaccaatgatagtacattcccctgggaggaatataagggcaactcaaatatgcccggaagttaaccttagaattgaggaagttgacttcctagccaaaccgatagtcctagactcgcaaagcttggacatcattctagggatggattggttggctaagcacaaaggacagatagattgtgccgaaaagtccatcaccttgcaaggacctggaggaaagcaagtccgctttacccctaacacccctaccgtaagtcggtctatcctaacctgtctacaagtcacctccttggagtcggtgcccatagtctgtgaatatcccgacgtattcccagaagaattaacgagtatgccaccggaccgagagattgagttcgccatagaactagcaccaggcacagctccaattgcaaaaagaccctaccgaatggcagctaatgagttagcagaagttaaaagacaaatcgaagagttggaaagtaagggttatgtgcgacccatctcatccccttggggagccccagtgcttctggttaagaaaaatgatggctctgagaggatggtaatcgactatagagccctgaatgaagtaactataaagaacaagtacccgttgccacggattgacgacttattcgatcaacttaaaggagcaagagtcttctcaaaaattgacttgaggtcaggttaccaccaactgaaaatcagatctgaagatatcccgaagaccgctttctcaacgcgttatggtctatatgagttcacagtaatgtccttcggactcaccaatgctccagcattcttcatgaacttaatgaacaaaatctttatggaatacctggaccagtttgtcgtagtattcatcgatgacatcctgatatactccaagaacgaggaggaacatgctgaacacctgaggctgataatggaaaagctcagagatcatcaactattcgcaaaattctcgaaatgcgaattctggttagaccgagtagcatttcttggacacgtgatctcctccaacggtgtcgaagtagatcccagcaaggttgaagctgtacttgcttggaacccgcccaagattgtgtcagagattcgcagcttccttggcttagcgggatattatcggagattcattgaaggattctctaagctagccagacctatgaccgagctgttaaagaaggaaaagaaatttcaatggtctgtagcctgtgaagacagctttcaagaaatgaagaaaaggttgaccactgccccagttctcaccttgccagatatccgaaaagatttcgagatcttctgtgatgcatcgagacaaggcataggatgtgtcctaatgcaagaacgaaaggttgtggcctatgcatccaggcagctcaggcctcatgaagccaattatcccacccatgatctcgagttggcagccgtggttcatgctcttaagatctggaggcattatttaatcgggaacagatgtgaagtatacaccgatcacaaaagtcttaagtatattttcacacagaccgagttaaatatgaggcagagaagatggttggaactaatcaaggattacgatcttggaatccactatcatcctggtaaagccaacgtagtcgctgatgcgctaagccgcaaggcctattgcaatgtagctcaaatacggcctgaccaagatcatctgtgcagagaattggagaagttaaggctgaccgtggtacagtcaggagtccctgccagcttgacagtacagcctaccctagaatcgcaaatccgggaggctcagaaagatgacgaagggataaaagagttaataaaaagaatacaggagaagaaagacaccaatttctccatagacgatcaaggcacagtttggtgcggtcaacgcatctgtgtaccgaccaagaaggagttaagagatctcatcctaaaggaagctcatgagtccgcttactccattcatccaggaagtacgaagatgtaccaggatatcaaggcatacttctggtgggctggaatgaagcgagacgtcgcagaatacgtagccctgtgtgacatttgccaaagagtcaaggcagaacatcagaggccagctggtctgctgcaacccctaccgattcccgagtggaaatgggaagagatcggaatggatttcatcaccggtttggcaagaacccccagcggatacgactccatttgggtaatcgtggaccgactcacgaaatcagctcatttcgtgccagtgaaaaccacctatgatggaaagaaactggcagaactctacatgactcatgtcgtatgtagatttggctgtcccaagaaaattgtgtcggaccgaggcactcagttcacctcaaggttctggaagcagttgcatgaagctctcggaactgatctgaattttagtacagcctaccatccgcagaccgatggtcagaccgaaaggacagcacaaagccgtcagaagaattacgctgacaatcgaaggcgtgaccttgagttcgaaaaaggagatcatgtgtacctgcgggtatcacccctccgtggtatgagaaggtttgggatgtccggcaagttagcaccccgctacatcggcccctacctcataaccgccagacgtggcgaagtgacttatcagcttgagctacctgaaggtctcgcagatgtgcacaacgtgttccacgtatcccagctaaagaaatgtcttcgagttccagaagagcaagtccccttgggtaacatcgagctggaaaagaatctgacctacaaggaaagaccgatcaaggttcttgaagaggcagaacgtcagactcgaaggaagaccatcaagttctacaaagtccaatggagcaatcattctgaagatgaggcaacctgggaacgagaagatcttctccgcgccgagtttccagagctgctcccttag

SEQ ID NO: 15499 - DNA, 3981 bp, Oryza sativa
  Clone ID: TFbOSC900174j.C1.o21.fg
gtcgactctagaggatccccgggtaccgagctcgaattcaacagacttaagcaaggcaacagcagtgtcaatgagtacctaagtatgttcaacaagttggctcggtacgcccctgaggaagtggacacagataagaagaagatcaggaaattcttgaaaggaatcgcggttggaatgagactccagttgcttgctcacgacttccccacttttcaacatatgatcaacaaggcacttctacttgaggatgccagaaaagaggctaccgaagaatacaagaaacgcaagtctaaccatcagggaaattcctcccgaggcgcacctcgccctcgctacggtcaacccatgcaataccaccagtcggtcactcaggctaaccgccagccaggctacgccccttgtcctcaaatgaaccgtccggcacctcagccacagcagcgtgcccctagtggcaatactgcgccaaacagtgttacctctttcaagtcaccgcaaggaccgtcagctgttcagtgtttccggtgcaaccagatgggccactatgccagacagtgccctcagaatcctaccaacaccagctcacggcatgctaatggcagcactgccagaactcctactccagcggcagctcagtctcgtcctagctctcaggcaagtggacaaggtacttgtgcttccaacaactttggtcgaggccgggtgaaccacattcaagctgagaccgctcaggatgctccagacgttgtgatgggtatgttctctgtcaactccgtacccgcaatagttctgtttgattcaggagcttcccattctttcatatcacaagcttttgtgaaaagaaatggttggaaaacccaaaatttacgtgtaccaatgatagtacattcccctgggaggaatataagggcaactcaaatatgcccggaagttaaccttagaattgaggaagttgacttcctagccaaaccgatagtcctagactcgcaaagcttggacatcatcctagggatggattggttggctaagcacaaaggacagatagattgtgccgaaaagtccatcaccttgcaaggacctggaggaaagcaagtccgttttacctctaacacccctaccgcaagtcggtctatcttaacctgtttacaagtcacctccttggagtcggtgcccgtagtctgtgaatatcccgacgtatttccagaagaattaacgagtatgccaccagaccgagagattgagttcgccatagaactggcaccaggcaccgcaccaattgcaaaaagaccctaccgaatggtagccaatgagctagcagaagttaaaagacaaatcgaagaattgaagagtaaaggttatgtgcgacctagctcatccccttggggagccccagtgcttctggttaagaagaaggatggctctgagagaatgataatcgactatagagccctgaatgaagtgactataaagaacaagtacccgttgccacggattgacgatttgttcgatcaacttaaaggagcaagagttttctcaaagattgacttaagatcaggttaccaccaattgaaaatcagatctgaagatatcccgaagactgctttctcaacgcgttatggtctatatgagttcacactggaccagtttgtcgtggtgttcatcgatgacatcctgatatactccaagaatgaggaagaacatgctgaacacctgaggctaataatggaaaagctcagggatcatcaactattcgctaaattctcgaaatgcgaattctggttagaccgagaagcattccttggacacgtgatctcctccaacggtgtcgatgtagatcccagcaaggttgaagctgtacttgcttggaacccgcccaagaacgtgttagagattcgcagcctccttggcttagctggatattatcgaagattcattgaaggattctctaagctagtcagacctatgaccgagctgttaaagaaggaaaagaagtttcactggtctgcagcctgtgaagacagctttcaagaaatgaagaaaaggttgaccactgccccagttctcaccttgccagatatccgaaaagatttcgagatcttctgtgatgcatcaagacaaggcttaggatgtgtcctaatgcaagaacgaaaggttgtggcctatgcattcaggcagctcaggcctcatgaagtcaactatcccacccatgatctcgagttggcagccgtgtttcatgctcttaagatctggaggcactatttaatcgggaacagatgtgaagtatacactgatcacaaaagtcttaagtatatcttcactcagaccaaattaaatatgaggcagagaagatggttggaactaatcaaggattacgatcttggaattcattaccaccccggtaaagctaatgtggtcgctgatgcgctaagtcgcaaggcctattgcaatgtagctcaaatacggcctgaccaagatcgcctgtgcagagaattggagaagttgaggctgaccgtggtacagtcaggtgtccctgccagcttgacagtacagcctaccctagagtcgcaaatccgggaagctcagaaagacgacgaagggataaaagagttaataaaaagaatacaggagaagaaagacaccaatttctccatagacgatcaaggcacagtttggtgcggtccacgcatctgtgtaccggccaagaaggaattaagagatctcatcctaaaggaagctcatgagtccgcctactccattcatccaggaagtacgaagatgtaccaagatatcaaggcatacttctggtggactggaatgaagcgagatgtcgcagaatacgtagccttgtgtgacatttgccaaagagtcaaggcagagcaccagaggccagctggtctgctacagcccctaccaattcccgagtggaaatgggaagaaatcggaatgtatttcatcaccggtttgccaagaacccctagcgggtacgactccatctgggtaatcgtggatcgactcacgaaatcggctcatttcgtgccagtgaaaaccatctttgatggaaagaaactagcagaactctacatgacccatgtcgtatgtagatttggctgtcccaagaagatcgtgtcagaccgaggcactcagttcacctcaaggttctggaaacagttgcatgaagctctcggaaccgatctaaattttagtacagcctaccatccgcagaccgatggtcagaccgaaagggtaaaccaaatcctagaagacatgctacgtgcgtgtgccctggatttcgaaggcacttgggatcgttgtttgccgtatgctgagttctcatacaacaacagttaccaggccagtattcagatgtcgccgaatgaggcaatgttcggaagaaagtgccgcacccccttgtgctggaatgaggtgggcgaagcgctggtattcggtcctgacatactcaaggcagcagaagaacaagttaagctgatccgagaacgtttaaagacagcgcagaaccgccaaaagaattacgctgacaatcggaggcgtgaccttgagttcgaaaaaggagatcatgtgtacctgcgggtatcacctctccgtggtatgaggaggtttgggatgtccggcaagttagcaccccgctacatcggcccctaccttataaccgccagacgtggcgaagtggcttaccagcttgagttacctgaaggtctcgcagatgtgcacaacgtgttccacgtatcccagttaaagaaatgtcttcgagttccagaagaacaagtccccctgggtaacatcgagctggaaaagaatctgacctacaaggaaagaccgatcaaggttcttgaagaggcagtacgtcagactcgaaggaagaccattaagttctacaaagtccaatggagcaaccactctgaagatgaggcaacctgggagcgagaagatcttctccgcgccgagttcccggagctgctcccttag

SEQ ID NO: 15500 - DNA, 5280 bp, Oryza sativa
  Clone ID: TFbOSC900225j.C1.o12.fg
atgtggtcgtacttgtcttatgtttggatgaaattccaaggaaatcggtccttaagtgcgagagcgggaaaccgtacacccgttatggcagtgaacgctagcttcagttcccacggttttggtgagggtcaccacgtcgcccagcttcgtgacctcgcccgtttccttggcttctcgtgtcccgagtacacggggtactccgtggaccgtgttccccctcactgtgagctctctgtgtacctttacccccgtggaggtatacacggggctggccacttcactgtggccaggcccaccctccagatcgcgtaccaggacctctcctggactgcgcttcgtcgcctggcccacgactacagccaccgtctcggaggctccgccttccggcagcttccacgtcttccttctgggcactcagacgccaggtacccttgtccgtacagcgagtctcagccagtgctgactcgcatggtcgagctttcggaggctcaggccactcagcacgacctactccttgaggcttaccgctcccttgcccgccgctacgccgccttggaggcccgtctggccgaggagggtgtcacctcagttgacactatctcttgggactcaggccgtctctgccacgccagccacctgtcctcccacagctcccgcggctctgctcgcactcccagtggcccacgctcccccagctcgcgtgcgccgtactcaccagtgtactccccctacccacacccagttagcccttcctacacccccggacacactccagtcgcttcctcccgccgtggcccacgttttatccgcactgcgcggaagcgtgttgttggttcttccaccgtgttccgtttctgccacccagctcccccaccgccagcggcccgtgctgctgccggccctcgacagacacaaatcttacaaggtctaaccacagccatagccagctttcagcataatgcgcatggaaatggccaccctcacgtgggcaacaatagatccaagctgacagactttctgaggtcacgtccaccaaagttctctcagaccgtcgagcccgtcgaggctgacgattggttgaaagatgttgatagaaaactcaacttagtgcagtgtactcctgttgagaagacgctctacgcctctcaccagctaagaggacctgccgcagattggtgggagaattactgcaatgcacaccctgaacccactaacattgcttgggatgagttcgctacggctttccgtgcagctcatgtgcctgaaagcactattgacatgaagaaagaagaatttaacagacttaagcaaggccacagcagtgtcaatgagtacctaagtcagttcaacaagttggctcggtacgcccctgaggaagtagacaccgataagaaaaagatcaggaaattcttgaaaggaatcgcagttggaatgagactccagttgcttgctcatgacttccccacttttcaacatatgatcaacaaagcacttctacttgaggatgccagaaaagaggccaccgaaaaatacaagaaacgcaagtctaaccatcagggaaattcttcccgaggcgcacctcgccctcgctacggtcaacccatgcaataccatcagtcgctcactcaggctaaccgccagccaggctacgcccctcgtcctcagataaaccgtccggcacctcagccacagaagcatgcccctagtggcaacactgcgccaaacagtgttacctccttcaagtcaccacagggaccgtcagcagttcagtgtttccggtgcaaccagatgggtcactatgctagacagtgtcctcagaatcctaccaacaccaactcagggcatgctaatggcagcaccgccagaactcctactccagcggcagctcagtctcgtcctagctctcaggcaagtggacaaggttctcgtgcttccaaccactttggtcgaggacgtgtgaatcacattcaagctgaaaccgctcaggatgctccagacgttgtgatgggtatgttctctgtcaactccgtacccgcaatagttctgtttgattcgggagcttcccattctttcatatcgcaagcttttgtgaaaagaaatggttggaaaacccaaaatttgcgtgtaccaatgatagtacattcccctggaaagaatataggggcaactcaaatatgcccggaagttaaccttagaattgaggaagttgacttcctagccaaaccgatagtcctagactcgcaaagcttgaacatcatccttgggatggattggttggctaagcacaaaggacagatagattgtgccgaaaagtccatcaccttgcaaggacctggaggaaagcaagtccgctttacccctaacacccctaccgcaagtcggtctatcctaacctgtttgcaagtcacctccttggagtcggtgcccatagtctgtgaatatcccgacgtatttccggaagaattaacaagaatgccaccagaccgagagatcgagttcgccatagaactggcaccaggcacagctccaattgcaaaaagaccctaccgaatggccgctaatgagttagcagaagttaaaagacaaatcgaagaactggaaagtaaaggagccccagtgcttctggttaagaaaaaggatggctctgagagaatggtaattgactatagagccctgaatgaagtaactataaagaacaagtacccgttgcctcggattgacgacttattcgatcaacttaaaggagcaagagtcttctcaaaaattgacttgaggtcaggttaccaccaactgaaaatcagatctgaagatattccgaagaccgctttctcgatgcgttatggtctatatgagttcacagtaatgtccttcggactcaccaatgctccagcattcttcatgaacttaatgaacaaaatctttatggaatacctggaccagtttgtcgtggtattcatcgatgacatcctgatatactctaagaacgaggaagaacatgctgaacacctgaggctgataatggaaaagctcagagatcatcaactattcgctaaattctcgaaatgcgaattctggttggaccgagtagcatttcttggacacgtgatctcctccaacggtgacgaagtagatcccagcaaggttgaagctgtacttgcttggaacccgcccaagaatgtgtcagtgattcgcagcttcctcggcttagctagatattatcgaagattcattgaaggattctctaagctagccagacctatgaccgagctgttaaagaaggaaaagaaatttcaatggtctacagcctgtgaagacagctttcaagaaatgaagaaaagattgaccactgccccagttctcaccttgccagatatccgaaaagatttcgagatcttctgtgacgcatcaagacagggcttaggatgtgtcctaatgcaagaacgaaaggttgtggcctatgcatccaggcagctcaggcctcatgaagtcaattatcccacccatgatctcgagttggcagccgtgattcatgctcttaagatctggaggcactacttaataggaaacagatgtgaagtatacaccgatcacaaaagtcttaaatatatcttcacacagaccgagttaaatatgaggcagagaagatggttggaactaatcaaggattacgatcttggaatccactatcatcctggtaaagccaacgtggtcgctgatgcgctaagtcgcaaggcctattgcaatgtagctcaaatacggcctgaccaagatcatctgtgcagagaattggagaagttaaggctgaccgtggtacagtcaggagtcccagccagcttgacagtacagcctaccctagagtcgcaaatccgggaggctcagaaagatgacgaagggataaaagagttaataaaaagaatacaggagaagaaagacaccaatttctccatagacgatcaaggcacagtttggtgcggttcacgcatctgtgtaccggccaagaaggagttaagagatctcatcctaaaggaagctcatgagtccgcttactccattcatccaggaagtacgaagatgtaccaggatatcaaggcatacttttggtgggctggaatgaagcgagatgtcgctgaatacgtagccttgtgtgacatttgccaaagagtcaaggcagagcatcagaggccagctggtctgctgcaacccctaccgattcccgagtggaaatgggaagagatcggaatggatttcatcaccggtttgccaagaacccccagcgggtacgactccatttgggtaatcgtggaccgactcacgaaatcagctcatttcgtgccagtgaaaaccacctatgatggaaagaaactggcagaactctacatgacccatgtcgtatgtagatttggctgccccaagaaaattgtgtcagaccgaggcactcagttcacctcaaggttctggaagcagttgcatgaagccctcgggactgatctaaactttagtacagcctaccatccgcagaccgatggtcagacagaaagggtaaaccaaatcctagaagacatgctgcgtgcgtgtgccttggatttcgaaggcacttgggatcgttgtttgccgtatgccgagttctcttacaacaacagttatcaggccagcattcagatgtcaccgaatgaggcaatgttcggaagaaagtgccgtacccccttgtgctggaacgaggtgggcgaagccctggtattcggtcctgacatactcaagtcagcagaagaacaagttaagctaatccgagaacgattaaagacagcgcaggaccgtcagaagaattacgctgacaatcggaggcgtgaccttgagttcgaaaaaggagatcatgtatacctgcgggtatcacccctccgtggtatgagaaggtttgggatgtccggcaagttagcaccccgctacatcggcccctacctcataaccgccagacgtggcgaagtggcttatcagcttgagctacctgaaggtctcgcagatgtgcacaacgtgttccacgtatcccagttaaagaaatgtcttcgagttccagaagagcaagttcccctgggtaatatcgagctggaaaagaatctgacctacaaggaaagaccgatcaaggttcttgaagaagcagaacgtcagactcgaaggaagacaatcaagttctacaaagtccaatggagcaatcattctgaagatgaagcaacctgggaacgagaagatcttctccgcgccaagtttccggagctgctcccttag

SEQ ID NO: 15501 - DNA, 4890 bp, Oryza sativa
  Clone ID: TFbOSC900240j.C1.o1.fg
atggtcgagctttcggaggctcaggccactcagcacgacctactccttgaggcttaccgctcccttgcccgccgctacgccgctttggaggcctgtctagccgaggagggtgtcacctcagttgacactatctcttgggactcaggccgcctctgccacgccagccacctgtcctcccacagctcccgcggctctgccctcactcccagtggcccgcgctcccccagctcgcgtgcgccgtactcaccagtgtactccccctacccacacccagttagcccttcctacacccccggacacaccccagttgcttcctcccgccgtggcccacgctttatccgcaccgcgcggaagcgtgttgttggttcttccaacgtgttccgtttccactacccagctcccccaccgccagcggcccgtgctgctgctggccctcgacagatggctagccgtccccgccgtgcagctcgtgcaccagcccgctttggttttgaggatggtagagttgagccagaagaaaatcatgaatcagctaatgagcagtctcaccacagcaaccgttcgcatcgtactgtttcccgcaacgcagaggttgagcaaccccgccacagcagccgctcgcatcgcacagtttcccgtgatgcagagatggaacagtctcaccgctctcaccgcactgccagtcacaattctggagaagaacgcctcccttccccacctcatgtggaaaccaacatgcaacacttaatggcagttcagacacaaatcttgcaaggactaaccacagccatagccagttttcagcataatgcgcatggaaatggccaccctcacatgggcaacaacagatccaagctgacagactttctgaggtctcgtccgccagagttctctcagaccgtcgagcccgtcgaggctgacgattggttgaaagatgttgatagaaaactcaacttagtgcagtgtactcctgttgagaagacgctctacgcctctcaccaactaagaggacctgccgcagattggtgggagaattactgcaatgcacaccctgaacccactaacattgcttgggatgagttcgctacggctttccgtgcagctcatgtgcctgaaagcactattgacatgaagaaagaagaattcaacagacttaagcaaggcaacagcagtgtcaatgagtacctaagtcagttcaacaagttggctcggtacgcccctgaggaagtagacacagataagaagaagatcaggaaattcttgaaaggaatcgcagttggaatgagactccagttgcttgctcatgacttccccacttttcaacatatgatcaacaaggcacttctacttgaggatgccagaaaagaggctaccgaagaatacaagaaacgcaagtctaaccatcagggaaattcttcccgaggcgcacctcgccctcgctacggtcaacccatgcaataccaccagtcggtcacccaggctaaccgccagccaggctacgcccctcgtcctcagataaaccgtccggcacctcagccacagcagcgtgcccctagtagcgatactgcgcctaacagtgttacctctttcaagtcaccgcagggaccgtcagcagttcagtgtttccggtgcaaccagatgggtcactatgctagacagtgtcctcagaatcctaccaacaccaactcagggcatgctaatggtagcactgccagaactcctactctagcggcagctcagtctcgtcctagctctcaggcaagtggacaaggttcacgtgcttccaacaactttggtcgaggccgtgtgaatcacattcaagcagaaaccactcaggatgctccagacgttgtgatgggtatgttctctgtcaactccgtacccgcaatagttctgttcgattcgggagcttcccattctttcatatcgcaagcttttgtgaaaagaaatggttggaaaacccaaaatttgcgtgtaccaatgatagtacattcccctggaaggaatataagggcaactcaaatatgcccggaagttaaccttagaattgaggaagttgacttcctagccaaaccgatagtcctagactcgcaaagcttggacatcattctagggatggattggttggctaagcacaaaggacagatagattgtgccgaaaagtccatcaccttgcaaggacctggaggaaagcaagtccgctttacccctaacacccctaccgcaagtcggtctatcctaacctgtttacaagtcacctccttggagtcggtgcccatagtctatgaatatcccgacaaaaaggatggctcagagagaatggtaatcgactatagagccctgaatgaagtaactataaagaacaagtacccgttgccacggattgacgatttattcgatcaacttaaaggagcaagagttttctcaaaaattgacttgaggtcaggttaccaccaactgaaaatcagatctgaagatatcccgaagaccgctttctcaacgcgttatggtctatatgagttcacagttatgtccttcggactcaccaatgctccagcattcttcatgaacttaatgaacaaaatcttcatggaatacctagaccagtttgtcatggtgttcatcgatgacatcctgatatactccaagaacaaggaagaacatgctgaacacctgaggctgataatggaaaagctcagagatcatcaactattcgctaaattctcgaaatgcgaattctggttggaccgagtagcatttcttggacacgtgatttcctccaacggtgtcgaagtagatcccaacaaggttgaagctgtacttgcttggaacccgcccaagaacgtgtcagagatccgcagcttccttggcttagctggatattatcgaagattcattgaaggattctctaagctagccagacctatgaccgagctgttaaagaaggaaaagaaatttcaatggtctgcagcctgtgaagacagcttccaagaattgaagaaaaggttgaccactgccccagttctcaccttgccagatatccgaaaagatttcgagatcttctgtgacgcatcaagacaaggcttaggatgtgtcctaatgcaagaacaaaaggttgtggcctatgcatccaggcagctcaggcctcatgaagccaattatcccacccatgatctcgagttggcagctgtggttcatgctcttaagatctggaggcactatttaatcgggaacagatgtgaagtatacaccgatcacaaaagtcttaagtatatcttcactcagaccgagttaaatatgagacagagaagatggttggaactaatcaaggattacgatcttggaatccactatcatcctggtaaagccaacgtggtcgctgatgcgctaagtcgcaaggcctattgcaatgtagctcaaatacggcctgaccaagatcacctgtgcagagaattggagaagttaagactgaccgtggtacagtcaggtgtccctgccagcttgacaatacagcctaccctggagtcgcaaatccgggaggctcagaaagacgacgaagggataaaagaattaataaaaagaatacaggagaagaaagacacaaatttctccatagacgatcaaggcacagtttggtgcggaccacgcatctgtgtaccggccaagaaggagttaagagatctcatcctaaaggaagctcatgagtccgcctactccattcacccaggaagtacgaagatgtaccaagatatcaaggcatacttctggtgggctggaatgaagcgagatgtcgcagaatacgtagccctgtgtgacatttgccaaagagtcaaggcggaacatcagaggccagctggtctgctgcaacccctaccgattcccgagtggaaatgggaagagatcggaatggatttcatcaccggtttgccaagaacccccaacgggtacgactccatttgggtaatcgtggaccgactcacgaaatcagctcatttcgtgccagtgaaaacctcctatgatggaaagaaactagcagaactctacatgacccatgtcgtatgtagatttggctgtcccaagaaaattgtgtcagaccgaggcactcagttcacctcaaggttctggaagcagttgcatgaagccctcggaactgatctgaattttagtacagcctaccatccgcagaccgatggtcagaccgaaagggtaaaccaaatcctagaagacatgctacgtgcgtgtgccttggatttcgaaggcacttgggatcgttgtttgccgtatgccgagttctcatacaacaacagttatcaggccagcattcagatgtcgccgaatgaggcaatgttcggaagaaagtgccgcacccccttgtgctggaatgaggtgggcaaagcactgcacagaaccgtcagaagaattacgctgacaatcggaggcgtgaccttgagttcgaaaaaggagatcatgtgtggagatcatgtgtacctgcgggtatcacccctccgtggtatgagaaggtttgggatgtccggcaagttagcaccccgctacatcggcccctacctcataaccgccagacgtggcgaagtggcttatcagcttgagctacctgaaggtctcgcagacgtgcacaacgtgttccacgtatcccagttaaagaaatgtcttcgagttccagaagagcaagttcccctgggtaatatcgagctggaaaagaatctgacctacaaggaaagaccgatcaaggttcttgaagaggcagaacgtcagactcgaaggaagaccatcaagttctacaaagtccaatggagcaatcattccgaagacgaggcaacctgggagcgagaagatcttctccgcgccgagttcccggacctgctcccttag

SEQ ID NO: 15502 - DNA, 5475 bp, Oryza sativa
  Clone ID: TFbOSC900246j.C1.o23.fg
atgaaccggatcctgcagatgaggagttcttccaggagcaagccagctacgatggcagtgaacgccagcttcagttcccacggttttggtgagggtcaccacatcgctcagcttcgtgacctcgcccgtttccttggcttctcgtgtcccgagtacacggggtactccgtggaccgtgttccccctcgctgtgagctctctgtgtacctttaccctcgtggaggtatacacggagctggccttcgcccacaccacttcaccgtggccaggccccctctccagatcgagtaccaggacctctcctggactgcgcttcgtcgcctggcccacgactacagccaccgtctcgggggctccgccttccggcagcttccacgccttccttctggccacgtagtcgccaggtacccttgtccgtacagcgagtctcagccagtgctgactcgcatggttgagctttcggaggctcaggccactcagcacgacctactccttgaggcttaccgctcccttgcccgccgctacgccgctttggaggcccgtctggccgaggagggtgtcacctcagttgacactgtctcctgggactcaggccgcctctgccacgccatccacctgtcctcccatagctcccgcggctctgcccgcactcccagtggcccgctctcccccagctcgcgtgcgccgtactcaccagtgtactccccctacccaaacccagttagcccttcctacacccccggacacaccccagttgcttcgtcccgccgtggcccacgctttatccgcactgcgcggaagcgtgttgttggttcttccaccgtgttccgtttcgactacccagctcccccaccgccagtggcccttgctgctgtcggccctcgacagatggctagccgcccccgccgtgcagctcgtgcaccagcccgcttcgtttttgaggaaggtagagttgagccagaagaaaatcatgagtcagctaatgagcggtctcaccacagcaaccgttcgcaccgtactgcttcccgcaacgcagaagttgagcaaccccgccgcatcaaccgctcgcatcgcacagcttcccgtaatgcagagatggaacagtcccaccgctctcaccgcactgccagtcacaattctggagaagaacgcctcccttccccacctcatgtggaaaacaacatgcagcacttaatggcagttcagacacaaatcttgcaaggattagccgcagccgtagccggttttcagcataatgcgcatggaaatggccaccctcacatgagcaacaatagatccaagctgacagattttctgaggtctcgtccgccagaattctctcagaccatcgagcctgtcgaggctgacgattggctgaaagatgttgatagaaaactcaacttagtgcagtgtactccggtagagaagacgctctacacctctcaccagctaagaggacctgctgcagattggtgggagaattactgcaatgcacaccctgaacccactaacattgcttgggatgagtttgctacggctttccgtgcagctcatgtgcctgaaagcactattgacatgaagaaagaggaattcaacagacttaagcaaggcaacagcagtgtcaatgagtacctaagcatgttcaacaagttggctcggtacgcccctgaggaagtggacacagacaagaagaagatcaggaaattcttgaaagggatcgcagttggaatgagactccagttgcttgctcatgacttccccacttttcaacatatgatcaacaaggcacttctacttgaggatgccagaaaagaggctaccgaagaatacaagaaacgcaagtctaaccatcagggaaattcttcccgaggcgcacctcgccctcgctacggtcaacccatgcaataccaccagtcggtcactcaggctaaccgccagccaggctacgcccctcgtcctcagatgaaccgtccggcacctcagccacagcagcgtgcccctagtggcaatactgcgccaaacagtgttacctctttcaagtcaccgcagggaccgtcagcagttcagtgtttccggtgtaaccagatgggtcactatgccagacagtgccctcagaatcctaccaacaccagctcagggcatgctaatggcagcactgccagaactcctactccagcggcagctcagtctcgtcctagctctcaggcaagtggacaaggttctcgtgcttccaacaactttggtcgaggccggatgaaccacattcaagctgaaaccgctcaggatgctccagacgttgtgatgggtatgttctctgtcaactccgtacccgcaatagttctgtttgattcgggagcttcccattctttcatatcacaagcttttgtgaaaagaaatggttggaaaacccaaaatttacgtgtaccaatgatagtacattcccctaggagcaatataagggcaactcaaatatgcccggaagttaaccttagaattgaggaagttgacttcctagccaaaccgatagtcctagactcgcaaagcttggacatcatcctagggatggattggttggctaagcacaagggacagatagattgtgccgaaaagtccatcaccttgcaaggacctggaggaaagcaagcccgctttacctctaacacccctaccgcaagtcggtctatcctaacctgtttacaagtcacctccttggagtcggtgcccatagtctgtgaatatcccgacgttgagttcgccatagaactggcgccaagcaccgcaccaattgcaaaaagaccctaccgaatggcagctaatgagttagcagaagttaaaagacaaatcgaagaattggagagtaaaggttatgtgcgacctagctcatctccttggggagccccagtgcttctggttaagaaaaaggatggctctgagagaatggtaatcgactatagagccctgaatgaagtaactataaagaacaagtacccgttgccacggattgacgatttgttcgatcaacttaaaggagcaagagttttctcaaagattgacttgagatcaggttaccaccaattgaaaatcagatctgaagatatcccgaagaccgctttctcaacgcgttatggtctatatgagttcacagtgatgtccttcggactcaccaatgctccagcattcttcatgaacttaatgaacaaaatctttatggaatacctggaccagtttgtcgtggtgttcattgatgacatcctgatatactccaagaatgaggaagaacatgctgaacacatgaggctgataatggaaaagctcagagatcatcgactattcgctaaattctcgaaatgcgaattctggttagaccgagtagcatttcttggacacgtgatctcctccaacggtgtcgaagtagatcccagcaaggttgaagctgtacttgcttggaacccgcccaagaatgtgtcagagattcgcagcttccttggcttagctggatattatcgaagattcattgaaggattctctaaactagccagacccatgaccgagctgttaaagaaggaaaagaaatttcaatggtctgcagcctgtgaagacagctttcaagaaatgaagaaaaggttgaccactgccccagttctcaccttgccagatatccgaaagcatttcgagatcttctgtgatgcatcaagacaaggcttaggatgtgtcctaatgcaagaacgaaaggttgtggcttatgcatccaggcagctcaggcctcatgaagtcaattatcccacccatgatctcgagttggcagctgtggttcatgctcttaagatctggaggcactatttaatcgggaacagatgtgaagattacgatcttggaattcattatcaccccagtaaagctaacgtggtcgctgatgcgctaagtcgcaaagtctattgcaacgtagctcaaatatggcctgaccaagatcgcctgtgcagagaattggagaagttgaggctgaccgtggtacagtcaggtgtccctgccagcttgacagtacagcctaccctagagtcgcaaatccgggaagctcagaaagacgacgaagggataaaggagttaataaaaagaatacaagagaagaaagacaccgatttctccatagacgaccaaggcacagtttggtgcggtccatgcatctgtgtaccggccaaaaaggagttaagagatctcatcctaaaagaagctcatgagtccgcctactccattcatccaggaagtacgaagatgtaccaagatatcaaggcatacttctggtgggctggaatgaagcgagatgtcgcagaatacgtagccttgtgtgacatttgccaaagagtcaaggcagaacatcagaggccagctggtctgctgcaacccctaccgattcccgagtggaaatgggaagagatcggaatggatttcatcaccggtttgccaagaacccctggcgggtacgactccatttgggtaatcgtggaccgactcacgaaatcagctcatttcgtgccagtgaaaaccacctttgatggaaagaaactagcagaactctacatgacccatgtcgtatgtagatttggctgtcccaagaagattgtgtcagaccgaggcactcagttcacctcaaggttctggaagcagttgcatgaagccctcggaaccgatctaaattttagtacggcctaccatccgcagaccgatggtcagacagaaagggtaaaccaaatcctagaagacatgctacgtgcgtgtgccctggatttcgaaggcacttgggatcattgtttgccgtatgctgagttctcatacaacaacagttatcaggccagcattcagatgtcgccgaatgaggcaatgttcggaagaaagtgccgcactcccttgtgctggaatgaggtgggcgaagcgctggtattcggtcctgacatactcaagtcagcagaagaacaagttaagctaatccgagaacgcttaaagacagcgcagaaccgtcagaaaaattacgctgacaatcggaggcgtgaccttgagttcgaaaaaggagatcatgtgtacctgcgggtatcacccctccgtggtatgaggtttgggatgtccggcaagttagcaccccgctacatcggcccctacctcgtaaccgccagacgtggcgaagtggcttatcaacttgagttacctgaaggtctcgcagatgtgcacaacgtattccacgtatcccagttaaagaaatgtcttcgagttctagaagaacaagttcccctgggtaatatcgagctggaaaagaatctgacctacaaggaaagaccgatcaaggttcttgaagaggcagaacgtcagactcgaaggaagaccgtcaagttctacaaggtccaatggagcaatcattctgaagatgaggcaacctgggagcgagaagatcttctccgcgccgagttcccggagctgctcccttag

SEQ ID NO: 15503 - DNA, 5379 bp, Oryza sativa
  Clone ID: TFbOSC900308j.C1.o18.fg
atgatggcagtgaacgccagcttcagttcccacggttttggtgagggtcaccacgtcgcccagcttcgtgacctcgcccgtttccttggcttctcatgtcccgagtacacggggtactccgtggaccgtgttccccctcactgtgagctctcggtgtacctttacccccgtggaggtatacacggagctggcctttgcccccaccacttcactgtggccaggcccactctccagatcgcgtaccaggacctctcctggactgcgcttcgtcgcctggcccacgactacagccaccgtctcggaggttccgccttccggcagcttccacaccttccctctggccactcagacgccaggtacccttgtccgtacagcgagtctcagccagtgctgactcgcatggtcgagctttcggaggctcaggccactcagcacgacctactccttgaggcttaccgctcccttgcccgccgctacgccgctttggaggcccgtctggccgaggagggtgtcacctcagttgacactatctcttgggactcaggccgcctctgccacgccagccacctgtcctcccacagctcccgcggctctgcccgcactcccagtggcccgcgctcccccagctcgcgtgcgccgtactcaccagtgtactccccctacccacacccagttagcccttcctacacccccggacacaccccagttgcttcctcccgccgtggcccacgctttatccgcaccgcgcggaagcgtgttgttggttcttccaccgtgttccgtttccactacccagctcccccaccgccagcggcccgtgctgctgccggccctcgacagatggctagccgtccccgccgtgcagctcgtgcaccagcccgctttggttttgaggatggtagagttgagccagaagaaaatcatgaatcagctaatgagcagtctcaccacagcaaccgttcgcatcgtactgtttcccgcaacacagaggttgagcaaccccgccgcagcagccgctcgcatcgcacagtttcccgtgatgcagagatggaacagtctcaccgctctcaccgcactgccagtcacaattctggagaagaacgcctcccttccccacctcatgtggaaaccaacatgcaacacttaatggcagttcagacacaaatcttgcaaggactaaccacagccatagccagttttcagcataatgcgcatggaaatggccatcctcacatgggcaacaacagatccaagctgacagactttctgaggtctcgtccgccagagttctctcagaccgtcgagcccgtcgaggctgacgattggttgaaagatgttgatagaaaactcaacttagtgcagtgtactcctgttgagaagatgctctacgcctttcaccaactaagaggacctgccgcagattggtgggagaattactgcaatgcacaccctgaacccactaacattgcttgggatgagttcgctacggctttccgtgcagctcatgtgcctgaaagcactattgacatgaagaaagaagaattcaacagacttaagcaaggcaacagcagtgtcaatgagtacctaagtcagttcaacaagttggctcggtacgcccctgaggaagtagacacagataagaagaagatcaggaaattcttgaagggaatcgcagttggaatgagactccagttgcttgctcatgacttccccacttttcaacatatgatcaacaaggcacttctgcttgaggatgccagaaaagaggctaccgaagaatacaagaaacgcaagtctaaccatcagggaaattcttcccgaggcacacctcgccctcgctatggtcaacccatgcaataccaccagtcggtcacccaggctaaccgccagccaggctacacccctcgccctcagatgaaccgtccggcacctccgccacagcagtgtgcccctagtggcaacactgcgccaaacagtgttacctctttcaagtcaccacagggaccgtcagcagttcagtgtttccggtgcaaccagatgggtcactatgctagacagtgccctcagaatcctaccaacaccaactcagggcatgctaatggcagcaccgccagaactcctactccagcggcagctcagtctcgtcctagctctcaggcaagtagacaaggttctcgtgcttccaaccactttggtcgaggccgtgtgaatcacattcaagctgaaaccgctcaggatgctccagacgctgtgatgggtatgttctctgtcgactccgtacccgcaatagttctgttcgattcgggagcttcccattctttcatatcgcaagcttttgtgaaaagaaatggttggaaaacccaaaaattgcgtgtaccaatgatagtacattcccctgggaggaatataagggcaactcaaatatgcccggaagttaaccttagaattgaggaagttgacttcctagccaaaccgatagtcctagactcgcaaagcttggacatcattctagggatggattggttggctaagcacaaaggacagatagattgtgccgaaaagtccatcaccttgcaaggacctgcaggaaagcaagtccgctttacccctaacacccctaccgcaagtcggtctatcctaacctgtttacaagtcacctccttggagtcggtgcccatagtctatgaatatcccgacgtatttctggaagaattaacaagaatgccaccagaccgagagatcgagttcgccatagaactggcaccaggcacagctccaattgcaaaaagaccctaccgaatggcagctaatgagttagcagaagttaaaagacaaatcgaagagttggagagtaaaggttatgtgcgacctagctcatccccttggggagccccagtacttctggttaagaaaaaggatggctctgagagaatggtaatcgactatagagccctgaatgaagtaactataaagaacaagtacccgttgccacggattgacgatttattcgatcaacttaaaggagcaagagtcttctcaaaaattgacttgaggtcaggttaccatcaactgaaaatcagatctgaagatattccgaagaccgctttctcaacgcgttatggtctatatgagttcacagttatgtccttcggactcaccaatgctccagcattcttcatgaacttaatgagcaaaatcttcatggaatacctggaccagtttgtcgtggtattcatcgatgacattctgatatactctaagaacgaggaagaacatgctgaacacctgaggttgataatggaaaagctcagggaccatcaactattcgcaaaattctcgaaatgcgaattctggttagaccgagtagcatttcttggacacgtgatctcccccaacggtgttgaagtagatcccagcaaggttgaagctgtacttgcttggaacccgcccaagaatgtgtcagagattcgcagtttccttggcttagctggatattatcgaagattcattgaaggattctctaagctagccagacctatgaccgagctgttaaagaaggaaaagaaatttcaatggtctgcagcctgtgaagacagctttcaagaaatgaagaaaaggttgaccactgccccagttctcaccttgccagatatccgaaaagatttcgagatcttctgtgatgcatcaagacaaggcttaggatgtgtcgtaatgcaggaacgaaaggttgtggcctatgcatccaggcagctcaggcctcatgaagtcaattatcccacccatgatcttgagttggcagccgtggttcatgctcttaagatctggaggcattatttaatcgggaacagatgtgaagtatacaccgatcacaaaagtcttaagtatattttcacacagaccgagttaaatatgagacagagaagatggttggaactaattaaggattacgatcttggaatccactatcatcctggtaaagccaacgtggtcgctgatgcgctaagtcgcaaggcctattgcaatgtagctcaaatacggcctgaccaagatcacttgtgcagagaattagagaagttaaggctgaccgtggtacagtcaggtgtccctgccagcttgacagtacagcctaccctagagtcgcaaatccgggaagctcagaaagacgacgaagggataaaagagttgataaaaagaatacaggagaagaaagacaccaatttctccatagacgatcaaggcacagtttggtgcggtccacgcatctgtgtaccggccaagaaggagttaagagatctcatcctaaaggaagctcatgagtccgcctactccattcacccaggaagtacgaagatgtaccaagatatcaaggcatacttctggtgggccggaatgaagcgagatgtcgcggaatacgtagccttgtgtgacatttgccaaagagtcaaggcagagcatcagaggccagctggtctgctgcaacccctaccgattcccgagtggaaatgggaagagatcggaatggatttcatcaccggtttgccaagaacccccaacgggtacgactccatttgggtaatcgtggaccgactcacgaaatcagctcatttcgtgccagtgaaaaccacctatgatggaaagaaactagcagaactctacatgacccatgtcgtatgtagatttggctgtcccaagaaaattgtgtcagatcgaggcactcagttcacctcaaggttctggaagcagttgcatgaagctctcggaactgatctaaattttagtacggcctaccatccgcagaccgatggtcagacagaaagggtgggcgaagcgctgatattcggtcctgacatactcaagtcagcagaagtacaagttaagctgatacgagaacgtttgaagacagcacagaaccgtcagaagaattacgctgacaatcgaaggcatgaccttgagttcgaaaaaggagatcatgtatacctgcgggtatcacccctccgtggtatgaggaggtttgggatgtccggcaagttagcaccccgctacatcggcccctacctcataaccgccagacgtggcgaagtggcttatcagcttgagttacctgaaggtctcgcagatgtgcacaacgtgttccacgtatcccagctaaagaaatgtcttcgagttccagaagagcaagtccccctgggtaatatcgagctggaaaagaatctgacgtacaaggaaagaccgatcaaggttcttgaagaggcaaaacgtcagactcgaaggaagaccatcaagttctacaaggtccaatggagcaatcattctgaagatgaggcaacctgggagcgagaagatcttctccgcgccgagttcccggagctgctcccttag

SEQ ID NO: 15504 - DNA, 4797 bp, Oryza sativa
  Clone ID: TFbOSC900308j.C1.o26.fg
atggcggccaactcgatccgtgcacaggaacttgcctgggtggttgagctgtccatgatggctaactcggtgcagtacatggctagccgtccccgccgtgcagctcgtgcaccagcccgctttggttttgaggatggtagagttgagccagaagaaaatcatgaatcagctaatgagcagtctcaccacagcaaccgttcgcatcgtactgtttcccgcaacgcagaggttgagcaaccccgccgcagcagccgctcgcatcgcacagtttcccgtgatgcagagatggaacagtctcaccgctctcaccgcactgccagtcacaattctggagaagaacgcctcccttccccacctcatgtggaaaccaacatgcaacacttaatggcagttcagacacaaatcttgcaaggactaaccacagccatagccagttttcagcataatgcgcatggaaatggccaccctcacatgggcaacaacagatccaagctgacagactttttgaggtctcgtccgctagagttctctcagaccgtcgagcccgtcgaggctgacgattggttgaaagatgttgatagaaaactcaacttagtgcagtgtactcctgttgagaagacgctctacgcctctcaccaactaagaggacctaccgcagattggtgggagaattactgcaatgcacaccctgaacccactaacattgcttgggatgagttcgctacggctttccgtgcagctcatgtgcctgaaagcactattgacatgaagaaagaagaattcaacagacttaagcaaggcaacagcagtgtcaatgagtacctaagtcagttcaacaagttggctcggtacgcccctgaggaagtagacacagataagaagaagatcaggaaattcttgaaagaaatcgcagttggaatgagactccagttgcttgctcatgacttccccacttttcaacatatgatcaacaaggcacttctacttgaggatgccagaaaagaggctaccgaagaatacaagaaacgcaagtctaaccatcagggaaattcttcccgaggcgcacctcgccctcgctacggtcaacccatgcaataccaccagtcggtcacccaggctaaccgccagccaggctacgcccctcgtcctcagataaaccgtccggcacctcagccacagcagcgtgcccctagtagcgatactgcgcctaacagtgttacctctttcaagtcaccgcagggaccgtcagcagttcagtgtttccggtgcaaccagatgggtcactatgctagacagtgtcctcagaatcctaccaacaccaactcagggcatgctaatggtagcacttccagaactcctactccagcggcagctcagtctcgtcctagctctcaggcaagtggacaaggttcacgtgcttccaacaactttggtcgaggccgtgtgaatcacattcaagcagaaaccgctcaggatgctccagacgttgtgatgggtatgttctctgtcaactccgtacccgcaatagttctgttcgattcgggagcttcccattctttcatatcgcaagcttttgtgaaaagaaatggttggaaaacccaaaatttgcgtgtaccaatgatagtacattcccctggaagcaatataagggcaactcaaatatgcccggaagttaaccttagaattgaggaagttgacttcctagccaaaccgatagtcctagactcgcaaagcttggacatcattctagggatggattggttggctaagcacaaaggacagatagattgtgccgaaaagtccatcaccttgcaaggacctggaggaaagcaagtccgctttacccctaacacccctaccgcaagtcggtctatcctaacctgtttacaagtcacctccttggagtcggtgcccatagtctgtgaatatcccgacgtatttccggaagaattaacaagaatgccaccagaccaagagatcgagttcgccatagaactggcaccaggcacagctccaattgcaaaaagaccctaccgaatggcagctaatgagttagcagaagttaaaagacaaatcgaagaactggaaagtaaaggttatgtgcgacctagctcatccccttggggagccccagtgcttctggttaagaaaaaggatggctcggagagaatggtaatcgactatagagccctgaatgaagtaactataaagaacaagtacccgttgccacggattgacgatttattcgatcaacttaaaggagcaagagttttctcaaaaattgacttgaggtcaggttaccaccaactgaaaatcagatctgaagatatcccgaagaccgctttctcaacgcgttatggtctatatgagttcacagttatgtccttcggactcaccaatgctccagcattcttcatgaacttaatgaacaaaatctttatggaatacctagaccagtttgtcgtggtgttcatcgatgacatcctgatatactccaagaacgaggaagaacatgctgaacacctgaggctgataatggaaaagctcagagatcatcgactattcgctaaattctcgaaatgcgaattctggttggaccgagtagcatttcttggacacatgatttcctccaacggtgtcgaagtagatcccagcaaggttgaagctgtacttgcttggaacccgcccaagaacgtgtcagagatccgcagcttccttggcttagctggatattatcgaagattcattgaaggattctctaagctagctagacctatgaccgagctgttaaagaaggaaaagaaatttcaatggtctgcagcctgtgaagacagcttccaagaattgaagaaaaggttgaccactgccccagttctcaccttgccagatatccgaaaagatttcgagatcttctgtgacgcatcaagacaaggcttaggatgtgtcctaatgcaagaacaaaaggttgtggcctatgcatccaggcagctcaggcctcatgaagccaattatcccacccatgatctcgagttggcagccgtggttcatgctcttaagatctggaggcactatttaatcgggaacagatgtgaagtatacaccgatcacaaaagtcttaagtatatcttcactcagaccgagttaaatatgagacagagaagatggttggaactaatcaaggattacgatcttggaatccactatcatcctggtaaagccaacgtggtcgctgatgcgctaagtcgcaaggcctattgcaatgtagctcaaatacggcctgaccaagatcacctgtgcagagaattggtgaagttaagactgaccatggtacagtcaggtgtccctgccagcttgacagtacagcctaccctagagtcgcaaatccgggaggctcagaaagacgacgaagggataaaagaattaataaaaagaatacaggagaagaaagacacaaatttctccacagacgatcaaggcacagtttggtgcggaccacgcatctgtgtaccggccaagaaggagttaagagatctcatcctaaaggaagctcatgagtccgcctactccattcacccaggaagtacaaagatgtaccaagatatcaaggcatacttctggtgggctggaatgaagcgagacgtcgcagaatacgtagccctgtgtgacatttgccaaagagtcaagccggaacatcagaggccagctggtctgctgcaacccctaccgattcccgagtggaaatgggaagagatcggaatggatttcatcaccggtttgccaagaacccccaacgggtacgactccatttgggtaatcgtggaccgactcacgaaatcagctcatttcgtgccagtgaaaaccacctatgatggaaagaaactagcagatctctacatgacccacgtcgtatgtagatttggctgtcccaagaaaattgtgtcagaccgaggcactcagttcacctcaaggttctggaaccagttgcatgaagccctcggaactgatctgaattttagtacagcctaccatccgcagaccgatggtcagaccgaaagggtaaaccaaatcctagaagacatgctacgtgcgtgtgccttggatttcgaaggcacttgggatcgttgtttgccgtatgccaagttctcatacaacaacagttatcaggccagcattcagatgtcgccgaatgaggcaatgttcggaagaaagtgccgcacccccttgtgctggaatgaggtgggcaaagcactggtattcggtcctgacatactcaagttagcagaagaacaagttaagctgatacgagaacgtttgaagacagcacagaaccgtcagaagaattacgctgacaatcggaggcgtgaccttgagttcgaaaaaggagatcatgtgtacctgcaggtatcacccctccgtggtatgagaaggtttgggatgtccggcaagttagcaccccgctacatcggcccctacctcataaccgccagacgtggcgaagtggcttatcagcttgagctacctgaaggtctcgcagatatgcacaacgtgttccacgtatcccagttaaagaaatgtcttcgagttccagaagagcaagttcccctgggtaatatcgagctagaaaagaatctgacctacaaggaaagaccgatcaaggttcttgaagagacagaacgtcagactcgaaggaagaccatcaagttctacaaagtccaatggagcaatcattccgaagacgagacaacctgggagcgagaagatcttctccgcgccgagttcccggacctgctcccttag

SEQ ID NO: 15505 - DNA, 2067 bp, Oryza sativa
  Clone ID: TFbOSC400732j.C1.o19.fg
atgtcgcatctagagggaaccggggggttggatgacaagggagacgcttctagcaccaaggatactggacccaagggagctactattcactttgattacggcaaacttaatgttcctcctcataactttgtctccgtgccttccgggcgtgttcctcaatttgatgggacacattacgccgcttggaagcacaagatgaagttgcatctaatttctttgcatccaagtatttggaaagttgtttgtacagaggagttcaacaaggttgatggacttgaggaggccaaggagatatgggagaggaggccaaggagatatgggatactttgcaattggctcatgagggatcacccgccgttcagacttctccgtgcttttggtccaagaaatcccactcttgtattaatgatacgggaaaggaaagacttcaagaggctcaccccaagtgacattcttggaagaattgtgtgtcatgagatgcaagaagaggaagctcgtgaagtaaggcaaatggtgaagaatgccaccatgatcaaaaatcaagaagtggttttgaaggcaaaacaagaagaagagtcaagttatgaagaaagtgaagatgaagagatggcttttattgtcaagagattcaagcactttcttcgcaagagtggctatggcaaagggaggaaggaagatgacaagggaaagaggcaatcaaagagagcttgcttcaattgtggcaaatatggccacttcattgccgattgtcccaagtcaaatgaagctaaggttaagggaggcaagaagaagccggagcgtgctcatgtggcggaggcacacatggcggaggagagcctagctaaagaatgtgctaaaaatgaacaactagctaatgagcttaatttggctaatggttctctagctagccttagggatgtcaatgaaactcttcaagacaaatttgctaatttagacaaaagtcataaagatcttgaagttcaatttgacactctttcaaatagcacttatcaaccaaatgtggtttctaatccttccaacccatctactagtaatggttgtgctaggtgttacaatattgatttgaactcttatgatactaatgttgatgctatgcaagctcttaagaaagagaatgaaaggttgggcacattgatgaaatatggatgcatgaagacataccattcaaaagatgccctttacaagaccatcaccgctcatcctaacaaggatggacacgggctcaggttttctggtggaagtcctgtgtctaagcgtgtgatggtaaatgggaaagaatgcttgatgtttgtgagagaaggtaaagctccacaagcaagtgaggtgacttgtcccttcactggtcagacacccggaagttccgggcaaaatgaccggaagttcctgccctgtaagacaggaagtttcaaacattttgtcaggaagttccgggcttctgataggcagaaggggctgaccggaagttccgggtataatacaaggaagttccggccagaggatctttactatgattcatatgtaatttccaaaaattcagagggcaaaatggttgcttattttaatgggaattacaatgatgagtaccgcacttgtgtgggggtgccaaaggctttggcatactcctccggtggctcaagttgggttgtggacagtggctgcaccaattatatgatgggagagaggagtatgtttacaagtcttgatgaggagggtggaagtcgtgaaaatattgtctttggagataatggtaagggaaaggtaatgggtctcggatttaattgcttgtttaccgatgttgatatgaccgtttttaagcgagatgactcttccatagcattgaaaggtgtgttaaagggtgatctctatctcgttgattttgacgtcgatagagtgaatccggaggcatgcttgattgctaaatcctctatgcgttggctatggcaccgtaggctagcccatgttggaatgaggaatttggcatctcttctaaaaggggaacacattattggtctatctaatgtttcttttgagaaggatcgtgtctga

SEQ ID NO: 15506 - DNA, 1464 bp, Oryza sativa
  Clone ID: TFbOSC14509j.C1.o1.fg
atgtcatggcacaaggccggtgtcctgctgctagggggctcaatcctgcctgcctgtcccggaggttccggccgtaggtggggttggatgtttaacagagaaaaagaaaagaatgtcagagggtatgcctccagtaactcaagttttcaactcaatccaccactggcctcaagagagttaacaagggcacacccttggtccattccgagcatgctgcttggttcacagctaccattggttggaagtcaagaccaaaatcagtatgtgtttgatcaagcatttgccacccaggtcaatgagcttccaatgccagaagagcatgtccccttttgtcatgattgtagagagcaaggacactatgccctgaattgtccatgggtatatgccaaagaagccccttcctttggtttagcagggcagacatcgctaaacccgcctcctcgcaccaagtcaagcttgcagcctagtgtgcaaggtagagagcccaatggagagaatccattgaatcccgagaattgctttcctcctagcctttcgtaccacgtggggtcacgtactaagcaagccaaaggcaagaagagtaagagtcagaagagaaaagcgccgatgcgaactaaagaagaagtacgtaagatgactattaccagcgccgaatggcctccagcagggataactattcctagacgtcaaagaggaaataccttccgaggtgcacgacggttgacccagcacctcctaagccatggtggcagagtatctgatcaagtctcctcggatgatgaagatgagtctccccgacatctcggcgaggaagagatggaatcaaaggcatgcacccgttgtggagaaattggacacgttgctagcatgtgtctcacactctgccttcattgtgaggaagaccatccacccgacaggtgtccaacgagcaggatcacttgtttcttttgtgaaggaactgatcatgtaccaaaagattgtcaatccagttttctgctgacgaagaagatggccaaccaacccgccagttccaacggagagaagcatcaaggcaacacaaatcctcgccaagattacagtttcagcctaactccagtgccaggacagaggaaccaaaatgagaaaagaaaatgccgagtccgggaagatatctgttgcttcaattgtcaaggaatgggtcatttcgccgacaagtgcccaaaaccgagaaacatagctgccagcacgtcagtccacgcaactccctgcaatcagaagcttgctcctcagcgaattgtcatccatgcatcccgaagcagtcctatagcccgcgttgcaacagctccaactccagcgagtgcattaccacaaggtgtcaatgctcaatttcagccccagccatcagttgacaagacagaggccagtatcggcattgtacctttggatgttccagcacagcagccaaagaaatcaagtacaagatga

SEQ ID NO: 15507 - DNA, 1233 bp, Oryza sativa
  Clone ID: TFbOSC400775j.C1.o63.fg
atggacatctctaggacaaatgaaggcttcacaagctgcggcccggtagtcgagatgtcatggcacagggctggtgtcctgctgctaggggctcaatcctgcctacctgtcccggaggttccggccgtaggtggggttgggtcggtactcttgtctatggctaggatgggttggaaactatgtcacgtcttccgtccgtataccgtggtggtggatgagcttccaatgccagaagaggatgtccccttttgtcacgattgtagagagcaaggacactatgccctgaattgtccatgggtatatgccaaagaagctccttcctttggtttagcagggcaggcatcgctaaaccagcctcctcgcaccaagtcaagcttgcagcctagtgtgcaaagtagagagcccaatggagagaatccattgaatcccgagaattgctttcctcctatcctttcgtaccacgtggggtcacgtactaagcaagccaaaggcaagaagagtaagaatcagaagagaaaagcaccgatgcgaactgaagaagaagtacgtaagatgactattaccagcaccgaatggcctccagcaaggataactattcctagacgtcaaagaggaaataccttccgaggtgcacgacagttgacccagcacctcctaagccatggtggcagagtatctgatagtgaagggtcagatcaagtctcctcggatgatgaagatgagtctccccgacatctcggcgaggaagaaatggaatcaaaggcatgcacccgttgtggagaaattggacacgttgctagcatgtgtctcacactctgccctcattgtgaggaagaccatccaccaggtgaatgtcccacccgcaaggtgacatgttttctgtgcgaaggtacaaaccatgtgctcaaggattgccaactcagtgtgttgttgaccaagaccgcagaaatccaacgaacaaccctacggttgtctcatcagctagtcagctccaatagcaacatcgacaatatcatccacaacaccaatgctcctcctgctccacctgactctgcaataaatcatagcaataataccttcagcaccaaccattctctgcaccgacagcctcagcaaagaattgttgtcgatggaagaagttgtgtctctccccgacctactccaggccgagcaaagggcaatcaatctcaggagggcgataccaagcagaagaccgttctctgcttcaaatag

SEQ ID NO: 15508 - DNA, 1347 bp, Oryza sativa
  Clone ID: TFbOSC411686j.C1.o1.fg
atggacatctctaggacaaatgaaggctacacgagctgcggcccggtagtcgagatgtcatggcacagggctggtgtcctgctgctaggggctcaatcctgcctacctgtcccggaggttccggccgtaggtggggttgggtcggtactcttgtttatggctaggatgggttgggaactatgtcacgtcttccgtccgtataccatggtgaataagcctaacatacatcataacagcaaaagacttagatctgttaagatggctgacaatgagaaaggcaataaggtcagaagtcaggacattggtacctcaagctcccgagtgaatgaagcaccagacaccagttgtgtgacactggtccaacacctgattaaccagaaccaattgcttatagagatactacagcagcatcagacgccaattctgaacctgagtcagatgcaacctcaagtgcagttggaggcagtccaagcactcacaccacaagtcagcatgccgccagcatcccgaaggacccatggtgacgtgccacatgttgactcaaaagaagcaagtatcatttgttttatgtgtgatgagcaagggcactatgcaagggagtgtcctcagcagaaaagaaaaacaccaatgcgaaccgaagatgaagtccgtaagatgatcattaccagcacagaatggcctccaccaggaatgacaaaacgtcagagaagacataccttccgaggtgcaccacagttgacagagcatcttttagctaatggaggtagagtgtctgatagtgaagattcagatcaagtctcctcagatgatgaagatgaaatggaacgtaaggcatgctctcgttgtggagaaaatcggtcatgttgccagctcttttctgctgacgaagaagatggccaaccaacccgccagttccaacggagagaagcatcaaggcaacacaaatctcgccaagattacagtttcagcctaactccagtgccaggacagaggaatcaaaatgagaaaagaaaatgccgagtccgggaagatatctgttgcttcaattgtcaaggaatgggtcatttcgccgacaagtgcccaaaaccgagaaacatagctgccagcacgtcagtccacgcaactccctgcaatcagaagcttgctcctcagcgaattgtcatccatgcatcccgaagcagtcctatagcccgcgttgcaacagctccaactccagcgagtgcattaccacaaggtgtcaatgctcaatttcagccccagccatcagttgacaagacagaggccagtatcggcattatacctttggatgttccagcacagcagccaaaaaaatcaagtacaagatga

SEQ ID NO: 15509 - DNA, 1056 bp, Oryza sativa
  Clone ID: TFbOSC900406j.C1.o3.fg
atggctgacaatgagaaaggcaataaggtcagaagtcaggacattggtacctcaagctcccgagtgaatgaagcaccagacaccagttgtgtgacactggtccaacacctgattaaccagaaccaattgcttatagagatactacagcagcatcagacgccaattctgaacctgagtcagatgcaacctcaagtgcagttggaggcagtccaagcactcacaccacaagtcagcatgccgccagcatcccgaaggacccatggtgacgtgccacatgttgactcaaaagaagcaagtatcatttgttttatgtgtgatgagcaagggcactatgcaagggagtgtcctcagcagaaaagaaaaacaccaatgcgaaccgaagatgaagtccgtaagatgatcattaccagcacagaatggcctccaccaggaatgacaaaacgtcagagaagacataccttccgaggtgcaccacagttgacagagcatcttttagctaatggaggtagagtgtctgatagtgaagattcagatcaagtctcctcagatgatgaagatgaaatggaacattgtcaattcagttttctgctgacgaagaagatggccaaccaacccgccagttccaacggagagaagcatcaaggcaacacaaatcctcgccaagattacagtttcagcctaactccagtgccaggacagaggaatcaaaatgagaaaagaaaatgccgagtccgggaagatatctgttgcttcaattgtcaaggaatgggtcatttcgccgacaagtgcccaaaaccgagaaacatagctgccagcacgtcagtccacgcaactccctgcaatcagaagcttgctcctcagcgaattgtcatccatgcatcccgaagcagtcctatagcccgcgttgcaacagctccaactccagcgagtgcattaccacaaggtgtcaatgctcaatttcagccccagccatcagttgacaagacagaggccagtatcggcattatacctttggatgttccagcacagcagccaaaaaaatcaagtacaagatga

SEQ ID NO: 15510 - DNA, 4413 bp, Oryza sativa
  Clone ID: TFbOSC14180j.C1.o3.fg
atggcaagccgacgtcgggcaacaaccagcaatgacgaaactcagacacccgacttaaacactctggccggaattatggccacccaaactcaacttctgcaagctatcgcgagcaaccaaggcaaccgcggagggtcaagctttggagagtttatgaggaccaagccgcccacgttcgctacggccgatgagcccatggaagcagaagactggctacgcatcatagaaaagaaactgactctagtcagggtacgcgaagccgacaaggtgatcttcgcagtgaaccagctggaaggacccgctggtgattggtgggatacctacaaggaggcccgagaagacggtgctggagaacccacctgggaggagttcactgcagcgtttcgcgagaatttcgtacctactgcagtgatgcgcatgaagaagaacgagtttagaagactgcggcaagggaatacaacggtgcaggagtatctaaacaagttcactcagttggctcgctacgcaattggagacctggcggatgaagaagaaaagatcgacaagttcatagaagggctgaatgatgaattgcgtggacctatgatcgggcaggatcacgagagtttccagagcctgatcaacaaggtcgtcaggctagagaacgatcaaaggacggtggaacacaaccgcaagaggaggcttgctatgagtcgcccacctcagacaatgcctcagcgacttaagggagccactccgtccggatggaagccccctgtcatggtgaccaaccgtcccgctgcacttagcaacttcaacaggccagttgcacttcagaaccgcacccctacaccaactttggctgcccctggggccaagaagaatgtggactgcttcaactgtgggaaatacgggcactacgctaacaactgccctcatccacgcaaaacccctgtccgaactggcgcgaacgcaatgactgttcgcggcactactacccctgctgtcgggcgaggcctattcaagactccgcaaccgaacaggaccaccactggatttgggcgcgggcaagtgaaccatgttcgagctgaagaggcccaggaagatcaaggcgtactgatgggtatgttttcactcaactccactccaattaaagttctcttcgattcaggagcattgcattcatttatatctttgaaagcaagtcaacaacacaatttaaccagagttaaattaagacaaccaatgttagtacattcgcctgggggtgagatagcagtggatacagcttgcattgacgtacccatccgccttagggatgtggtatttccctccaatcttatggtgctaataccccaaactcttgatgtcattttgggtatggattggttagcaaagcatagaggagtaattgactgtagacgtagagaagttaccctgaccacaccctggggatcggatatgagagcaaccatggatcaagatcctaggctaaccgaacgtgccggaggtatatttaccatgctacccctaaagggaatgccagtagtgcagcgatttcctgatgtgttcccagaagatttacctggaatgccaccagatcgtgacatagagttcattattgacctgatacccggaactgcccccatatccaagagaccatatcggatgccggtcaatgagttagaagaacttaaaaagcaaattagggagttgcaagagaagggatttgtacgccccagttcgtcaccttggggagccccagtgttatttgttaaaaagaaagacggtagcatgagaatgtgtgtagactaccgatcactgaacgaagtgactatcaaaaataagtatcccctaccacggattgatgacctcttcgaccaacttaagggagctaaggtgttttcaaagatagaccttcgatcaggataccaccaactgaagattaggaccgaggatatccccaaaaccgcgttttcaacacgctatgggttgtatgaattcacagtaatgtcgtttggtctaaccaatgccccagcatacttcatgaatcttatgaacaaagtattcatggattacttggataagtttgtggtggtattcattgatgacattctaatctactccaaagatgaggaagaacatgcggaacacttaagattggttctccagaaactccgaaagcacaagttatacgcaaaattcagcaagtgcgaattttggttgaaggaagtcgcttttctgggtcacgtaatctcagccggtggagtagcagtggaccctgctaaagtggaggctgtcacggaatggaaagcacccaaatcggtgactgaaatccggagttttctaggcttggctggatactaccgaaggttcattgaagggttctctaagatagcccgaccaatgacacaattactcaagaaggaaaagaagtttgcatggtcggaacagtgtcaaggaagctttgagcagctcaaagaaaagctgacctcagcacctattttagttcttcccgacatcaggaaagactttgttgtatattgtgatgcgtcgaggcaaggactaggaggtgtactgatgcaggagggaaaagtggtggcctatgcgtcgcgacaattgcgaccacatgaggaaaactaccctacccatgacctagaactcgcagctgtggttcatgcactaaagatttggagacattatctgattggaaaccattgcgatatctacactgaccacaagagtctaaagtatatcttcacccagtcagatctcaacttgaggcaaaggcgatggttagaattaatcaaggactatgatttagaggttcattatcacccaggcaaagcaaacgtcgtagccgacgctctgagtcgtaagagccattgcaatcatctgagaacggaagggatggtccctgagcttagggaggaaatggcgcagctgaacctacatatagtaccccatggacagataaacaccctggatattcaacctcttttgagaacccaaatagaagaagcccagaaggacaatgaggaagtccgagaggtgaaggaacgcttagctgccggacgtgcaaaggaattttcaaccgacgaaaaagatgttctatggtataaaaagagaatttacgtacccgaacagggtggactgaggggattaattttaaaggaagctcacgaatcggcatattcattgcaccccggaagtacgaagatgtaccaagatctgaaggaaggatactggtggcccaacatgaagagagatgtggccgaatacgtagcactctgcgacgtatgccagaaggtgaaggctgaacaccagaggccggcaggtttgttgcaacctctcaggattcccgaatggaaatgggatgagataggtatggatttcattgttggattgcccaagaccgcaacaggatatgattccatttgggtaatcgtggatcgactcaccaagacggcgagattcattcccgttaagacaaattatagcagtgcaaaactcgccgagttgtatatgaccaggatagtgtgtcttcatggtatacctaagaagattatatctgatcgaggcacacagtttacctcacatttctgggagaaagtccatgaagccctgggaagttacctcgcatttagcaccgcttatcatccacagacagatggccagacggagagaaccaaccaggtcctggaggacatgctgagggcttgtgctctggattttagcaaggactgggagaggtgtttgccctacgccgaattctcttacaacaacagctttcaagcaagcctaaagatgtcacccaatgaggcattgtttggtcgacgatgtcgtaccccgctaatgtggtccgagactggagaacgggcggtatttggacctgacattattcaagaagccgaagaaaaggttcgcttgatccgtgatcgtctaaaagtagcacaatcacgacaaaagagttacgccgacactcgaagaagaaacctggaatttaaggaaggagattacgtttatctaaaggtttctccgatgaggggaacaaaaaggtttaaggttaaaggaaaactggcaccaagatatgtggggccattccagatcatcgccaggcgaggagaagtcgcatatcagttacagctaccagaatatatcgccgatgtgcacccagtcttccatgtgtcccaattaaagaaatgcttacgagtgccggaagaacaagccccgctggaagagattcacattagcaatgatctcacatatccagaacacccgatccggatattggatgaagcagaaaagaggactaggagcaaagtgtggcgtatgtacaaggtacaatggagtaatcacactgaggacgaagccacctgggaaggcgaagaattcttgaggacggagtacccgcatctattcggcaactggtaa

SEQ ID NO: 15511 - DNA, 1581 bp, Oryza sativa
  Clone ID: TFbOSC900039j.C1.o14.fg
atggctgacaatgagaaaggcaataaggtcagaagtcaggacattggtacctcaagctcccgaatgaatgaagcaccagacaccagttgtgtgacactggtccaacacctgattaaccagaaccgattgcttatagagatactagagcagcatcagacgccaattctgaacctgagtcaaatacaacctcaagtgcagttggaggcagtccaagcactcacaccacaagtcagcatgccgccagcatcccgaaggacccatggtgatgtgccacatgttggctcaaaagaagcaagtatcatttgttttatgtgtgatgagcaagggcactatgcaagggagtgtcctcagcagaaaagaaaaacaccaatgcgaaccgaagatgaagtccgtaagatgatcattaccagcacagaatggcctccaccaggaatgacaaaacgtcagagaagaaataccttccgaggtgtatcacagttgacagagcatcttttagctaatggaggtagagtgtctgatagtgaagattcagatcaagtctcctcagatgatgaagacgaaatggaacgtaaggcatgctctcgttgtggagaaatcggtcatgttgccagctcgtgtgccactacatgcgttcattgtgaggaagaccatccacccgacaggtgtccaacgagcaggatcacttgtttcttttgtgaaggaactgatcatataccaaaagattgtcaattcaattttctgctgacgaagaagatggccaaccaacccgccagttccaacggagagaagcatcaaggcaacacaaatcctcgccaagattacagtttcagcctaactccagtgccaggacagaggaatcaaaatgagaaaagaaaatgccgagtccgggaagatatctgttgcttcaattgtcaaggaatgggtcatttcgccgacaagtgcccaaaaccgagaaacatagctgccggcacgtcagtccacgcaactccctgcaatcagaagcttgcttctcagcgaattgtcatccatgcatcccgaagcagtcctatatcccgcgttgcaacagctccaactccagcgagtgcattaccacaaggtgtcaatgctcaatttcagccccagccatcagttgataagacagaggccagtatcggcattgtacctttggatgttccagcacagcagccaagaaatcaagtacaagatgaagaacccgagccaataatacctttagcaccaaccattctctgcaccgacagcctcagcaaagaattgtcgtcgatggaagaagttgtgtctctccccgacctactccaggccgagccaagggcaatcaacctctggagggcgataccaagcagaagaccgtcatccgcttcaaacagcactcagaaggaagcttctcctgtgaatgatggcaatatgcagtcctatcacatcatcacagaaccaatcaaggatgatgcagtcactagaacaacgccagctatatctctccagaatcaaaatgagcagccacgcttgtggttttcagttcgctacttatcattgtgtaatcgaaagtttgcagcaatcatgtaa

SEQ ID NO: 15512 - DNA, 2448 bp, Oryza sativa
  Clone ID: TFbOSC29958j.C1.o1.fg
atgtcaggtacaagttccgatgaaccaacactggagaatctagcgcataaactgaagggcatggaaaattggtatgaagagttgatgcgtaatagtaaatcatacaaggaaagcacagataaacatttaaaaaccttaagtgaaaacctagtgaaagtagtggatcaaattgagcaaatgaatcaatcgcataaacaattaactgaaaacatccagaatatgaatattggacatgaaaatattgtgcgatgcattggtttacttgagactgcaggtgaagaaggtgcaggtgccactgctcatcgacaccaaagatatgacgatgaagacgaagagcaatctgttgctgacgatgaggaggaagacgagagtgttggaaatagaagacgacatcgagttagggacaaagatgatcctttatctaaggtaaaatttactatgctttcttttgatggtaagttcgagccttctgtttatctagactgggagctagctgttgagcaaaaattctcttgctatgattttactgataataagaaagttaaagctgccattagtgaacttacatcctttgcatctctatggtggaatgatatatgtggtagaggacttagacctagaacatgggattatatgaaacgtataatgaggtctagatttgtttcttcttactatgcttgtgacatgttaaataaactgcaacttttaagacaaggttccagttctgtagaaacatactatcaagagatgatgattgctttgtcacgatgtgatatgcaagaaactgaggatgctagaatttctaggttctatggaggtcttaatagagagatttgggatattcttgaatataaagaatacaataccatgaatagattattccattttgcttgcaaagctgaaagagaagtgcagggactcaacaagcataggagttcttttgcaggtgctacttccacacgacaattaacaccacgtcaatctactactgcctttcgtccacctacctccacgccatcccatgctcaagaaacaagcaaaaacgcttcagttcagactccagccaagagtgcaacttcagtagcttccactagacgtacccgtgaaattacatgtcataggtgccatgacattggacacattgctcgcgactgtccaaatcggcgagctctatttatgaatgatgatggtgagtatacttctgctagtgattgtgatgatgaatatgctttagctgccactgaccatgcaggaggacaagataacgatgtcatcaaggaagtccatttgcatccagagtcgctagatcagtatcctagcctaattgtcaagctagcacttagtgctaaagagaagtgtgaagagcaaaaccaacatcacaatttgttccaaagcaaagttcttgtgaaaggccataccatcaaaatgattattgataacgggagttgcaacaatttagcaagtgaagagatggtcaagaagcttggcttgactaccatccacatccacatccgtatcatattcagtggctcctaccatgatcaaattgaatgtgatgttgtgcatatgcaagcttgttctgttattttggggcgaccatggcaatatgatagagaagttgtttttgatggtaggactaaaacatataaatttatgttcaatggtaaaagagttgttttgcattctatgactccagccgctgctttgaaagatgatcttgcaagacttgaatgtgaaaagaaagcgaaaagtgaaaatcagattattactaagaatcttgtttcacctagtacaacagaaccaagtgccacaaagaatgaaattaagttgacgggtgctttgttagcttctaaatataatatttgtgcactatatgagccagattcttgttgctatgctctattttgcaaagatcctatactcactttggctactgcttctagttccttatattctttgccacctgctattactaaccttttgcatggatatgagggtgtttttcatgatgagatacatccaaggatgacccctgaacgagagagtgaacatgatcacgaagatgagattgagtcgaggacaactccaattcaagaaggggaggatgatgaggacatcaattcatcggatacgctcataacttcacacgttcaaatgataatttcaagtccaagtccagttcggcctccggagacaacactgacttcaaacggatctagcgccttcatgccaactccgatttgggtgatcttggactttatggaaaacttatctgctaactttcaaacgcatccggtctcatgtccaaattcatctcgagtcaacggaaatcgccaaaacaagacagcgctgttgctgaaactgaatttgggccttgggccttgtaatagattaggcccatctcggaagtgtctcccttcacctccacgaattagcacttatccttag

SEQ ID NO: 15513 - DNA, 389 bp, Oryza sativa
  Clone ID: TFbOSC29958j.C1.o3.np
gtattgaaataatttacattatgttcatgttatactgaatatacggctagcttatctgggagatgctttggtacgggtataatgtttgcatatgcaattactctatgtcatgacgatgatattagattagtatctagtagtttagatgtggtgtctagattacaggatatcattatttagggttatatgctgcggatgagaggtgggccgctgatggtgatagctcagtacgggtattcctccgtgcctgtatataatcctaagttaattccctggggagggtattcctccgtatttagccccggttgtatggtcatgacgggctgtcgtaaggaactcggcagtcaggggtggcttctcgaagtaccaagagggcatcggatagagga

SEQ ID NO: 15514 - DNA, 3012 bp, Oryza sativa
  Clone ID: TFbOSC17176j.C1.o5.fg
atggcgaagtttgtgggggacatcacggcagtggggcaacgtgatgtcgctctcaacattgttggcgccgttggattttccggtgatgccgatgatcttcgaaccaaccttgatgaagtccatgccaataaggtgagcgatagggggtttggtgagctcttcaccaatgttgaagatgctatgtcaatgcagtgtgcacgacatagccgaagtggtcattgtggccatcttgcaagatcagctagaggcgtaaaaaggcttcttggtcctctaatgatggtagagccgctgatcctcatgcatcggtgttaccatctgccacaaaccagagtcgccaaagtttgttgtctagcattgaaccccaaacaacggtgggactctggctcagggaacatcaaggagatcaaaattcgtggcgagctcggactcagagatgaacaatcatcgtcagacgctgcactcacgtggcaatcgacgcggacactgagaaaacatcttctcatacgacgtggtgaatgttggtcggagtactcctccatcgtcaacaccgacgacgaagcaaaggcgacctgcaactcattttgtgagacatgttggaagattctacggtttcgctccaaccagacattccaccagctgaacccgttcctcaatctccgaaacagatgtaatcgggttaagcatggcaatccaatggttgtcttgcagttccacctggagattatttccctttcttttggcaagcttgaaaatagagggcgcaatgtgttgagggggagactgaggtatttgcaggggaaagatttcaggcttcctgtgaaagaagggagaaggccttcaacatcaataccagagcatgatattgggaagatttcagttttgattaaatcattatatgcctataatctcaacaatccaaaaacttattataggcactgtgattttactatggctggttttgccgatgcactgaggccggataaatttaccggtgtgcattttaagagatggcagatcagggtcactctgtggctgacagctatgaaatgcttctgggtgagtactggcaaacctgaaggagttcttactgctgaacagcagaagcaattcgaggaagccactactctctgtgtaggatgcattcttagcgttcttggcgatcgtctggtcgaggtgtatatgcatatgaccgacgcaaaggagttgtgggatgcactgaatactaaattcggtgctactgatgctagcaatgatctgtatatcatggagcagtttcatgactacaagatggctgacaaccgttctgtagtcgaacaggctcatgagatacaaaccatggctaaggaacttgaactccttaagtgtgttttacccgacaaatttgtggccaggtgcattattgcgaaactacctccatcttggagaagtttcggtactgcactcaaacacaagagacaggaatactccgttgaggggttgatagcgtctcttgatgttgaggagaaagctcgggaaaaagatgccgcgtctaagggcgatggtgggcagtccagtgccaatgttgtgcacaaggcccagaacaagagcaaggggaaatacaaagctcagcagaccaccaacttcaagaagcagaagaagaacaacaacaatcctaatcaggatgagaggacttgctttgtgtgtggccaacttggtcatctggctaggaagtgtccacagcgcaaggggatgaaggcacctacagggcagacttctaagtctgctaatgtgaccattagcaacactggagatggaagcgggtatggtaatttacctgctattttttcagttaatcagtctactaattggtgggttgatactaggtccaatgtcgcacggggttccaccgtcctaatggggaatgggtcacatgtttctgttcatggtgttggcacggtagatctgaagtttacttcgggaaagatcgtgcagctgaagaacgtgcagcatgtcccttctatcgacaggaatcttgttagtggctcccgtctgactagagctggatttaagttggtttttgagtctaataaagtagtcgtgtccaaacatggatattttattggtaaaggttatgagtgcggaggcctgttccgcttttccctttctgatttctgcaataagtctgtgaaccatatttgtggcagtgtggatgatgaggctaatgtttggcactcacgtttatgtcatattaattttggcttgatgtctcggctttccagcatgtgtttaattcctaagttttccattgtcaaaggttctaagtgccatagttgtgtgcaatcgaagcaacctcgcaagcctcacaaggttgccgaggaaagaaacttggcaccactagaactcttacattcagatctttgtgaaatgaatggggtgttgacaaagggtggaaaacgatatttcatgactttgattgatgatgctactagattttgctatgtgtacttgttgaaaacgaaagacgaagctctagactattttaaaatttataaggcagaagttgaaaatcaacttgacagaaagataaaaagacttatgtctgatcgtagtggagagtttttctcaaacgagtttgacttattctgtgaggaacaggacatcatacatgagaggacgcccccctattctcccgagtctaatgggattgctaaaaggaagaaccgcacactgactgacttggtgaatgccatgttggacactgcgggactacctaaggcatggtggggggaggcattgttgacctcaaattatgtgttaaacagagttcctaacagaaataaggacaaaacaccatatgagatatggatcgggagaaaaccatcactttcttacttgcgcacatgggggtgcttggcgcaagtcaatgtaccaataacgaataagcacaaacttggacctaagactgtagactgtgtctttctgggatatgcttatcacaacattgcctatagatttttaatagttaaatctgag

SEQ ID NO: 15515 - DNA, 3675 bp, Oryza sativa
  Clone ID: TFbOSC30381j.C1.o1.fg
atggctggttttgccgatgcactgaggccggataaattcaccggtgtgcattttaagagatggcagatcagggtcactctgtggctgacagctatgaaatgcttctgggtgagtactggcaaacctgaaggagttcttactgctgaacagcagaagcaatttgaggaagccactactctctttgtgggatgcattcttagcgttcttagcgatcgtctggtcgaggtgtatatgcatatgaccgacgctaaggagttgtgggatgcactgaatactaaattcgatgctactgatgctagcaatgatctgtatatcatggagcagtttcatgaatacaagatggctgacaaccgttctgtagtcgaacaggctcatgagatacaaaccatggctaaggaactcgaactccttaagtgtgtcttacccgacaaatttgttgccgggtgcattattgcgaaactacctccatcttggagaagtttcggtactgcactcaaacacacgagacaggaatactccgttgaggggttgatagcgtctcttgatgttgaggagaaagctcgggaaaaagatgtcgcatctaagggcgatggtggacagtccagtgccaatgttgtgcgcaaggcccagaacaagagcaaagggaagtacaaagctcaacagaccaccaacttcaagaagcaaaagaagaagaacaacaatcctaatcaggatgagaggacttgctttgtgtgtggccaacttggtcatctggctaggaagtgtccacagcgcaaggggatgaaggcacctgcagggcatacttctaagtctgctaatgtgaccattggcaacactggagatggaagcgggtatggtaatttacctactgttttttcagttaatcagtctactaattggtgggttgatactggggccaatgtacatgtttgtgctgacatctcattgttttcttcttatcaggacgcacggggttccaccgtcctaatggggaatgggtcacatgcttctgttcatggtgttggcacggtagatctgaagtttacttcaggaaagatcgtgcagctgaagaacgtgcagcatgtcccttctatcgacaggaatcttgttagtggctcccgtctgactagagatggatttaagttggtttttgagtctaataaagtagtcgtgtctaaacatggatattttattggtaaagattataagtgcggaggcctgttccgcttttacctttctgatttctgcaacaagtctgtgaaccatatttgtggcagtgtggatgatgaggctaatgtttggcactcacgtttatgtcatattagttttggcttgatgtctcggctttccagcatgtgtttaattcctaagttttccattgtcaaaggttctaagtgccatagttgtatgcaatcgaagcaacctcgcaagcctcacaaggctgccgaggaaagaaacttggcaccactagaactcctacattcagatctttgtgaaatgaatggggtgttgacaaaggatggaaaacgatatttcatgactttgattgatgatgctactagattttgctatgtgtacttgttgaaaacgaaagacgaggctctagactattttaaaatttataaggcagaagttgaaaatcaacttgacagaaaaataaaaagacttaggtctgatcgtggtggagagtttttctcaaacgagtttgacttattctgtgaggaacatgacatcatacatgagaggatgcctccctattctcccgagtctaatgggattgctgaaaggaagaaccgcacactgactgacttggtgaatgccatgttggacactgcgggactacctaaggcatggtggggggaggcattgttgacctcgaatcatgtgttaaacagagttcctaatagaaataaggacaaaacaccatatgagatattgattgggagaaaaccatcactttcttatttgcgcacatgggggtgcttggcgaaagtcaatgtaccaataacgaagaagcgcaaactgggacctaagactgtggactgtgtctttctgggatatgctcatcacagcattgcctatagatttttaatagtcaaatctgaggtacctaacatacatgttggtacaattatggagtctcgtgatgctaccttctttgagagctttttcccaatgaaggatacacatagtagttcgagccaaccatctgaaataattctcagttcaatcacaccaccagaacaaactgaacatacacatgaacatgtcactgaggaggatgacagtgaagctcctcgaaggagtaagagacaaaggacggctaagtcctttggtgatgatttcactgtgtacctcgtggatgacactcctaaatcaatttcagaagcatatgcatctcctgatgcagactactggaaggaggctgtccgtagtgaaatggattccattatcgctaacgggacttgggaggtgacagagcgaccctatgggtataaacctgtgagatgcaagtgggtgttgaagaagaagcttaggcctgacggtactattgaaaagtacaaggctcggcttgttgctaagggctacactcagaaagaaggcgaagatttctttcgcacttactcacctgttgctagattgaccacaattcgtgtgctactttccctagcagcctcacatggtcttctcgttcatcaaatggacgttaagacagcttttcttaatggagagctggatgaggagatctatatggatcagcctgatgggtttgtagttgaaggcttcgcagtcaatgaggcagataaatgtgtatactatcgccatggtgggggtgagggagttattttatgcttgtatgttgatgacatactgatatttgggacaaaccttgaggtgataaatgaggttaaatcatttttgtctcaaaattttgatatgaaggatttgggagtagctgatgttatcttaaacattaagctaattagaggtgagaatgggattacactcttgcagtcccattatgtggagaagatcttgaatcgctttggctacattgatagtaagccttctccaacaccttatgatcctagcttgttacttcgcaagaacaagagaattgctaggaatcaactggaatacttccaaatcattggctcgttgatgtacctggctagtgcaactaggcctgatatctcctttgttgtgagcaagttgagccgatttacctctaatccgggagatgatcattggcgtgcgcttgagcgagtaatgcgctatctgaaaggtactgtggaattggggcttcactatactgggtatcctgcggtactggagggttatagtgattctaactggatctctgatgtggatgagatcaaagccactagtggatatgtcttcacactgggtggtggtgctgtttcatggaggtcttgcaaacagaccattttgacgaggtcaaccatgcaagcagagctgatggcactggataccgctactgttgaggcagaatggctgcgtgatctattaatggatctgactattgttgaaaaaccggtggcggctatccttatgaactgtgacaatcaaacgacatgtgaaaagatgattgaagtctgtcaggaaattaagaaactccggagttataacgttggattacatccaaacagctag

SEQ ID NO: 15516 - DNA, 1301 bp, Oryza sativa
  Clone ID: TFbOSC401605j.C1.o25.np
atggctggttttgccgatgcactgaggccggataaattcaccggtgtgcattttaagagatggcagatcagggtcactctgtggctgacagctatgaaatgcttctgggtgagtactggcaaacctgaaggagttcttattgctgaacagcagaagcaattcgaggaagccactactctctttgtgggatgcattcttagcattcttggcgatcgtctggtcgaggtgtatatgcatatgaccgacgctaaggagttgtgggatgcactgaatactaaattcggtgctattgatgctagcaatgatctgtatatcatggagcagtttcatgactacaagatggctgacaaccgttctgttatcaaacaggctcatgagatacaaaccatggctaaggaactcaaactccttaagtgtgtcttacccgacaaatttgtggccgggtgcattattgcgaaactacctccatcttggagaagtttcggtactgcactcaaacacaagagacaggaatactccgttgaggggttgatagcgtctcttgatgttgaggagaaagctcaggaaaaagatgccgtgtctaagggcgatggtgggcagtccagtgccaatgttgtgcacaaggcccagaacaagagcaaagggaaatacaaagctcagcagaccaccaacttcaagaagcagaagaagaacgacaacaatcctaatcaggatgagaggacttgctttgtgtgtggccaacttggtcatctggctaggaagtgtccacagcgcaaggggatgaaggcacctgcagggcagacttctaagtctgctaatgtgactattggtaacactggagatggaagcgggtatggtaatttacctattgttttttcagttaatcagtctactaattggtgggttgatactggggccaatgtacatgtttgtgctgacatctcattgttttcttcttatcaggacgcacggggttccaccgtcctaatggggaatgggtcacatgcctctgttcatagtgttggcacggtagatctgaagtttacttcgggaaagatcgtgcagctgaagaatgtgcagcatgtcccttctatcgacaggaatcttgttagtggctcccgtatgactagagacggatttaagttagtttttaagtctaataaagtagtcgtgtctaaacatggatattggggcgcgcgaggcgtgggcgctgacggactcagaaagatcacgttgggtgtgcacattcatatctctcttacagcgataaatgcagaaatgaaaatctaagctacgggata

SEQ ID NO: 15517 - DNA, 2607 bp, Oryza sativa
  Clone ID: TFbOSC414535j.C1.o29.gm
atgaggtggaggatgaggtcgtcctccgtccgagcttccttctcgccagcggtgcgcgggctccgccgattctttccaccgacgacacaaagaggggacgaggagcagtgtttggagcagcgacgacgagacacgacggcgtggagtgcgctccccatctcctctgatgccttccatcgcgccaccgttgtctccaccgccatctcccttttcgccttctccacccgccgccggtctacctcgccgtcgcccctctccgcccaccaccggtctacctcatcatcggcccactccgcccgccgccgccccgctccatcctgccggctccatgcgccgccgctccacggtttaacaggtctccagaacctctgccttcgacgtttttgcctccgactctgtgctgcaccgtcgctcgtagattactccatcccgctcgccggcgtgcacctgcgatcgggagagcaggtctccagaacctctgccttcgacgttccgcaccgggagaaggcggcaataaagtttttgggaagcgctttgcgcgactgctccctggtcactctgtggctgacagctatgaaatgcttctgggtgagtactggcaaacctgaaggagttcttactgctgaacagcagaagcaattcgaggaagccactactctctttgtgggatgcattcttagcgttcttggcgatcgtctggtcgaggtgtatatgcatatgaccgacgctaaggagttgtgggatgcactgaatactaaattcggtgctactgatgctagcaatggtctgtatatcatggagcagtttcataactacaagatggctgacaaccgttctgtagtcgaacaggctcatgagatacaaaccatggctaaggaactcgaactccttaagtgtgtcttacccgacaaatttgtggccgggtgcattattgcgaaactacctccatcttggagaagtttcggtactacactcaaacacaagagacaggaatactccgttgaggggttgatagcgtcttttgatgttgaggagaaagctcgggaaaaagatgccgcgtctaagggcgatggtggacagtccagtaccaatgttgtgcacaaggcccagaacaagagcaaagggaaatacaaagctcagcagaccaccaacttcaagaagcagaagaagaataacaacaatcctaatcaggatgaaaggacttgctttgtgtgtggccaacttggtcatctggctaggaagtgtccacagcgcaaggggatgaaggcacctgcagggcagacttctaagtctgctaatgtgaccattgacaacactggagatggaagcaggtatggtaatttacctactgacgcacggggttccaccgtcctaatggggaatgtgtcacatgcttctgttcatggtgttggcacggtagatctgaagtttacttcgggaaagatcgtgcagctgaagaacgtgcagcatgtcccttctatcgacaggaatcttgttagtggctcccgtctgactagagacggatttaagttggtttttgagtctaataaagtagtcgtgtctaaacatggatattttattggtaaaggttatgagtgcggaggcctattccgcttttccctttctgatttctgcaataatgaagctcctcgaaggagtaagagacaaaggacggctaagtcctttggtgatgatttcactgtgtacctcgtggatgacactcctaagtcaatttcagaagcatatgcatctcctgatgcagactactggaaggaggttgtccgtagtgaaatggattccattatcgctaacgggacttgggaggtgacagagcgaccctatgggtgtaaacctgtgggatgcaagtgggtgttcaagaagaagcttaggcctgacgagctggatgatgagatctatatggatcagcctgatgggtttgtagttgaaggtcaagaaggcaaggcttcgcagtcaatgaggtggggcccacctgtcgggtccttcccccacctcccgccgatcccggcgcgccgccgcgccgaaaccgccgccgcgcccacgcctccgtctctcccgggccacgtcggccacgcccgcgcgtgcgccgcgtctcccgcgccctttcccctctccctcccgttcgcgcccgcgcccgagatggccgggattcggaaaccgaatcccgcctctctctcctccccactccccccacgctcgtcgccgtctcgcgccgtcgccgccgttagcttcgcggggtcgagatctacctcggccgcctcttccccgtcgaggttcgtcgccggagccctcatccccacgcgcacggggcacgccgaagctcgtccgccgtcgccgtcgcctcccgtggcccgccgtcgccgttcgccatcgtcttcctccgcgccggccaccctcggtgaggcatctcctctcctctcctttcccgtttccccgtgcgtcgccgccacccgcgctcgccgtcgctttgggtcgttgccgccgtccgctgccgccgcttttgcgtcgcctccgccgccgggtgccgtcgccggcaacccgttcgcgcgcgcgccgtcgccgtcgccgcggccggtcggccggtcttga

SEQ ID NO: 15518 - DNA, 3855 bp, Oryza sativa
  Clone ID: TFbOSC900320j.C1.o19.fg
atggctagttttgccgatgcactgaggccggataaattcactggtgtgcattttaagagatggcagatcagggtcactctgtggctgacagctatgaaatgcttctggaagcaattcgaggaagccactactctctttgtgggatgcattcttagcgttcttggcgatcgtctggtcgaggtgtatatgcatatgaccgacgctaaggagttgtgggatgcactgaatactaaattcggtgctactgatgctagcaatgatctgtatatcatggagcagtttcatgactacaagatggctgacaaccgttctgtagtcgaacaggctcatgagatacaaaccatggctaaggaactcgaactccttaagtgtgtcttacccgacaaatttgtggtcggatgcattattgcgaaactacctccatcttggagaagtttcggtactgtactcaaacacaagagacaggaatactccgttgaggggttgatagcgcctcttgatgttgaggagaaagctcgggaaaaagatgccgcgtctaagggcgatggcgggcagtccagtgccaatgttatgcacaaggcccagaacaagagcaaagggaaatacaaagctcagcagaccaccaacttgaaaaagcagaagaagaacaacaacaatcctaatcaggatgagaggacttgctttgtgtgtggccaacttggtcatctagctaggaagtgtccacagcgcaaggggatgaaggcacctgtagggcagacttctaagtctgctaatgacgcacggggttccaccgtcctaatggggaatgggtcacatgcttctgttcatggtgttggcacggtatatctgaagtttacttcgggaaagatcgtgcagctgaagaacgtgcagcatgtcccttctatcgacaggaatcttgttagtggctcccgtctgattagagacagatttaagttggtttttgagtctaataaagtagtcgtgtctaaacatggatattttattggtaaaggttatgagtgcggaggcctgttccgcttttccctttctgatttctgcaataagtctgtgaaccatatttgtggcagtgtggatgatgaggctaatgtttggcactcatgtttatgtcatattaattttggcttgatgtctcggctttccagcatgtgtttaattcctaagttttccattgtcaaaggttctaagtgccatagttgtgtgcaatcgaagcaacctcgcaagcctcacaaggctgccgaggaaagaaacttggcaccactagaactcctacattcagatctttgtgaaatgaatggggtgttgacaaagggtggaaaaagatatttcatgactttgattgatgatgctactagattttgctatgtgtacttgttgaaaacgaaagacgaggctctagactattttaaaatttataaggcagaagttgaaaatcaacttgacagaaagataaaaagacttaggtctgatcgtggtggagagtttttctcaaacgagtttgacttattttgtgaggaacatggcatcatacatgagaggacgcctccctattctcccgagtctaatgggattgctgaaaggaagaaccgcacactgactgacttgattgggagaaaaccatcactttcttatttgcgcacatgggggtgcttggcgaaagtcaatgtaccaataacgaagaagcgcaaactgggacctaagactgtggactgtgtctttctgggatatgctcattacaacattgcctatagaattttaatagtcaaatctgaggtacctgacatgcatgttggtacaattatggagtctcgtgatgctaccttctttgagagcttttttccaatgaaggatacacatagtagtttgagccaaccatctgaaataattaccagttcaatcacaccaccagaacaaactgaacatacacatgaacatgtcactgaggaggatgacagtgaagctcctcgaaggagtaagagacaaaggacggctaagtcctttggtgatgatttcactgtgtacctcgtggatgacactcctaagtcaatttcagaagcatatgcatctcctgatgcagactactggaaggaggttgtccgtagtgaaatggattccattatcgctaacgggactttggaggtgacagagcgaccctatgagtgtaaacctgtgggatgcaagtgggtgttcaagaagaagcttgggcatgacggtactattgaaaagtacaaggctcggcttgttgctaagggctacactcagaaagaaggcgaagatttctttgacacttactcacctgttgctagattgaccacaattcgtgtgctactttccctagcagcctcacatggtcttctcgttcatcaaatggacgttaagacatcttttcttactggagagctggatgaggagatctatatggatcagcctgatgggtttgtagttgaaggtcaaaaaggcaaggtgtgcaaattgttgaagtctttgtatggtctgaaacaagctcctaagcaatggcatgagaaatttgacaagacattgacatctacaggcttcgcagtcaatgaggcagataaatgtgtgtactatcgctatggtgggggtgagggagttattttatgcttgtatgttgatgacatactgatatttgggacaaaccttgaggtgataaatgaggttaaatcatttttgtctcaaaattttgatacgaaggatttgggagtagttgatgttatcttaaacattaagctaattaaaggtgagaatgggattacactcttgcagtcccattatgtggagaagatcttgaatcgctttggctacattgatagtaagccttctccaacaccttatgatcctagcttgttgcttcgcaagaacaagagaattgctaggaatcaactggaatactcccaaatcattggctcgttgatgtacctggctagtacaactaggcctgatatctcttttgttgtgagcaagttgagccgatttacctctaatccgggagataatcactggcgcgcgcttgagcgagtaatgcgctatctgaaaggtactgtggaattggggcttcactatactgggtatcctgcggtactggagggttatagtgattctaactggatctctgatgtggatgagatcaaagccactagtggatatgtcttcacactgggtggtggtgctgtttcatggagatcttgcaaacagaccattttgacgaggtcaaccatggaagcagagctgacggcactggatactgctactgttgaggcggaatggctacgtgatctattaatggatctgcctattgttgaaaaaccggtgccggctatcgttatgaactgtgacaatcaaacggtaattgtcaaagtgaatagttctaaggataatatgaaatcgtctagacatgtgaaaagacgattgaagtctgtcaggaaattaagaaactccggagttataacgttggattacatccaaacagctagaaacctggcagatcccttcacgaagggactatcacgaaatgtgatagacaatgcatcaaaggagatgggtttgagacccatcgaagatgctgtcctgcagagcattcttgaaagaactcacctttttgagcttgactgttggtcgcagtctatggagattttgggtgaatcttctaggaagcttactaaagacctaggattttgttttgctgcaaattcggattcgtttttgttttggaaacgttccgaaaaatctgattactccatcccgctcgccggcgtgcacctgcgatcgggagagcaggtctccggaacctctgccttcgacgttctgcaccgggagtag

SEQ ID NO: 15519 - DNA, 1350 bp, Oryza sativa
  Clone ID: TFbOSC10753j.C1.o1.fg
atggataacactggtaacaaaggctatgggaatgatggatccgatgactcaagaacccaagccaatgggaatgagaaaagcatcaacgaaacctcaccagagctaatccaaattgtggttaaccaaaccaacatgttggcaacagcctttcaactattacagaatcggaacaacccagcaggggcaaccaacgttcaagtacctacagtccagcaacagtgcaagttatcagaatttctcaaaacggggcctccaacctttgccattgccgtcgatcctatggaagccagtgattggttgcgcacaatcgagaagaagctagggttgattcagtgcaccgaccaggagcgggttggcttcgcaactcatcagctggttggaccggcttcagagtggtgggatagctacgaaacatcacggccagaaggacatgccatcacctggaacgagttttcatctgtattcaagagatcacatgttcccgcaggaatgatcacactaagaaaacgagagtttcgctacctgaagcaaggagatttgaccgtcacagagtacctgcacgagttctatcgtttggctcactatgcaccagaagacgtggaaacggatgaaggcaaacaagagaagtttctccaggggttaaaagatgagctcgcagtgcaactactcctagaggattatgaagattttgagaaacttgtggacaaagccatgcaactcgaaagtgagcataatcggatgacgaactgcaagagaaggattgtcaacatcccagtaattccaggtggtaaccaaagacagcgcactgagccacttcagatcaccggatcttctgttgtgcatcaagagttcctgccccaagaagatgaacgcaatgcagacaacaacactagcaatactaatgatgatgataccaccaacaaccatggttcttgccccattagtgaccactcgaacaaagcgtgcaatgtcagtagcattcaccaagatgtcaacgatagtatcaatgttggaacccagaatgacaaccttagcaattttgactctgggaaggactccaatggtgatagcaataatggtaccactgatgccaatgttagcaaggattcccaaccaccaattccaactccaagtcaaaatgatcgtccccagatggacagctcagtaaagaagacgttgatttgttacaactgcaaagaaccaggtcatttctctagagattgtccacagccgaagcgtaacctgcgccatcactccggccattatgcaagaagaagacaagtcactcgccttgtggtcactggagcaaacgccatacctgtgaggcctcatgttaattctaacccatag

SEQ ID NO: 15520 - DNA, 1700 bp, Oryza sativa
  Clone ID: TFbOSC12554j.C1.o1.np
atggatagtactggtaacaaaggctatgggaatgatggatccgatgactcaagaacccaagccaatgggaatgagaaaagcatcaacgaaacctcaccagagctaatccaagttgtggttaaccaaaccaacatgttggcaacagcctttcaactattacagaatcggaacaacccagcaggggcaaccgacgttcaagtacctacagtccagcaacagtgcaagttatcagaatttctcaaaacggggcctccaacctttgccatggccgtcgatcctatggaagccagtgattggttgcgcacagtcgagaagaagctagggttgattcagtgcaccgaccaggagcgggttggcttcgcaactcatcagctggttggaccggcttcagagtggtgggatagctacgaagcatcacggccagaaggacataccatcacctggaacgagttttcatctgtattccggagatcacatgttcccgccggaatgatcacactaagaaaacgagagttcgctacctgaagcaaggagatttgaccgtcacagagtacctgcatgagttctatcgttcggctcactatgcaccagaagatgtggaaacggatgaagacaaacaagagaagttcctccaggggttaaaagatgagctcgcagtgcaactacttttagaggattatgaagattttgagaaacttgtggacaaagccatgcaactcgaaagtgagcatagtcggatgacgaactgcaagagaaggatggttaacaacccagtatttccaggtggcaaccaaagacagcgcactgagccacttcagatcaccggatcttctgttgtgtatcaagagttcctgccccaaggagatgaacgcaacgcagacaaccacaatagcaatactaatgctgatgataccaccaacaaccatggttctggccccattagtgaccactcgaataaagcgtgcaatgtcagtagcattcaccaagatgtcaacgatagtatcaatgttggaacccagaatgacaaccttagcaattttgactctgagaaagactccaatggtgatagcaactatggtaccactgatgccaatgttagcaaggatttccaaccgccaattccaactccacgtcacaatgatcatccccagatggacagctcagcaaagaagacgttgatttgttacaactgcaaagaaccaggtcatttctctagagattgtccacagccgaagcgtaacctgcgccatcactccggccattatgcaagaagaagacaggtcactcgccttgtggtcactggagcaaacgccgtacctgtttcactgaaaggtagcagaccaaaggacctcatcgccaccagaagcatccacaactctcggagtgaagagtacttagtgaccaaggttgactccaaagatatgaactatgcaaagttctggaactgaagccccatcttcaagtgccgcaacccagtcgaagtcagctaaaggttcaaccagggacaagtcaggtgaagagaagattccatctgcaacaggagatcgagccaagcagtccagagtgaagaagttttgttaggcaagtttgttatagaagacagagcctcctccctctctttctctccctctccttctctccctcctcttgggcctcctcccctctcggcccagctccatttccccccctctctctcccgg

SEQ ID NO: 15521 - DNA, 1587 bp, Oryza sativa
  Clone ID: TFbOSC12554j.C1.o2.np
atgcggaccccacatgtcaacctaaaggaccacggacgagggcggggaagcgagaggacggatccttaccaccacgcgacgaggcgcgggaacgacaacgacgaacgggcgcggcggagacagacgggcacaacggagacgaacggcgaggggacggcttcggcggcgatccttggacgaaggcgagacgcggccggcacgaggcttgacgacgcggaggcgaggacgaagacgatgacgggggctgcagcgaccttgacgaagcgaggacgacgaacgggaacggcttgacggaggggcgaacgccacgacgaccgggaacgacgagaggacgacgacgacgacgacgaccgggaccggcgagggggcgacgagggcagccggcagtggctgcacagagacggggacgacgcggaacacgccgcagcgatgacgatgacggaggcggcgccgcgagacgacgagccgagcgaggatgaacgggacgtcgacgacgagaacgatcggagacgacgatgatggaccgcggaggggtttggatggaggggaaacgatgccgaggacgaccttgccgctgcgatgccgaagatggtggtggaggtggccgaccgatgcacggcgaggagggacgggcggccgaacaactccggtgaggcggacggagaggttcgcggcgacgttccggcgaaaccgagggcaggccggggtggagggcgatgcggcgacgccgagggaggagacggcgacgtcggccgacgctctggcgcggcgaccggggcagccggaggagatgccgccgaggaggaaggagaaaccggcgcgggcgacggtgttccggcgaagttcgggcgaggcggaggtgatgccggggatgagagcggcgtcgtggagccgaggaaggtggtggcgacgtcggccggcgctccggggacgtggcagaggcggccggaggcggagaagtggtggcgacgccactggacgccggcgagggcgcgtctccggtgatttccccgcgaaacggagggctgaccgagggagagggggcagctgcgaggccgagggagaagacggcgcggccgggcggcgttcgggcgaggagaggaaggcggctggaggtggccggcgcgagggaaaggggagggcgacggcgggaacgtagttccgggggtctcctcgcgaaacggagggcaggccggcgtggaggaggtggcggcgatgctgtaggaggcgacgacgcgaccggacggcgctcgggcgaggcgggagaggcggctggaggcggccggcggcacgggagagagaggaggacggcggggagagaatagagcggatttagaggaggaatggcgctagggctcgctcgggagggagagaggaggacggccggcgcgggaggaggaagacgacgctggcgcgtgggccccacgcggtcgggcggcggcgtcagcgcgcgcacgcgcgcgcacgtgcgcggcacggggcgggggcgcggctagggttgggccgggcgaccggcccaggaggagaggaggggaagcggcttgggccgagggaggccgggaggaaggaggggggggggaaaaaaaa

SEQ ID NO: 15522 - DNA, 1350 bp, Oryza sativa
  Clone ID: TFbOSC16506j.C1.o1.fg
atggataacattggtaacaaaggctatgggaatgatggatccgatgactcaagaacccaagccaatgggaatgagaaaagcctcaacgaaacctcaccagagctaatccaaattgtggttaaccaaaccaacatgttggcaacagcctttcatctattacagaatcggaacatcccagcaggggcaaccaacgttcaagtacctacagtcccgcaacagtgcaagttatcagaatttctcaaaacggggcctccaacctttgccatggccgtcgatcctatggaagccagtgattggttgcgcacagtcgagaagaagctagggttgattcagtgcaccgaccaggagcgggttggcttcgcaactcatcagttggttggaccggcttcagagtggtgggatagctacgaagcatcacggccagaaggacataccatcacctggaacgagttttcatctgtattcaagagatcacatgttcccacaggaatgatcacactaagaaaacgagagtttcgctacctgaagcaaggagatttgaccgtcacagagtacctgcatgagttctatcgtttggctcactatgcaccagaagatgtggaaacggatgaagacaaacaagagaagtttctccaggggttaaaagatgagcttgcagtgcaactacttctagaggattatgaagattttgagaaacttgtggacaaagccatgccactcgaaagtgagcataatcggatgacgaactgcaagagaaggattgtcaacatcccagtatttccaggtagtaaccaaagacagcgcactgagccacttcagatcaccggatcttctgttgtgcatcaagagttcctgccccaagaagatgaatgcaatgcagacatcaacactagcaatactaataatgatgacacctccaacaaccaaggttctggccccattagtgaccactcgaataaagcgtgcaatgtcagtagcattcaccaagatgtcaacgatagtatcaatgttggaacccagaatgacaaccttagcaattttgacactgagaaagactccaatggtgatagcaactatggtaccactgatgccaatgttagcaaggatttccaaccaccaattccaactccaagtcacaatgatcatccccagatggacagctcagcaaagaagacgttgatttgttacaactgcaaagaaccaggtcatttctctagagattgtccacagccgaagcgtaacttgcgccatcactccggccattatgcaagaagaagacaggtcactcgccttgtggtcactggagcaaacgccgtacctgtgaggcctcatgttaattctaacccatag

SEQ ID NO: 15523 - DNA, 1350 bp, Oryza sativa
  Clone ID: TFbOSC16879j.C1.o1.fg
atggatagtactggtaacaaaggctatgggaatgatggatccgatgactcaagaacccaagccaatgggaatgagaaaagcatcaacgaaacctcaccagagctaatccaagttgtggttaaccaaaccaacatgttggcaacagcctttcaactattacagaatcggaacaacccagcaggggcaaccgacgttcaagtacctacagtccagcaacagtgcaagttatcagaatttctcaaaacggggcctccaacctttgccatggccgtcgatcctatggaagccagtgattggttgcgcacagtcgagaagaagctagggttgattcagtgcaccgaccaggagcgggttggcttcgcaactcatcagctggttggaccggcttcagagtggtgggatagctacgaagcatcacggccagaaggacataccatcacctggaacgagttttcatctgtattccggagatcacatgttcccgccggaatgatcacactaagaaaacgagagtttcgctacctgaagcaaggagatttgaccgtcacagagtacctgcatgagttctatcgttcggctcactatgcaccagaagatgtggaaacggatgaagacaaacaagagaagttcctccaggggttaaaagatgagctcgcagtgcaactacttttagaggattatgaagattttgagaaacttgtggacaaagccatgcaactcgaaagtgagcatagtcggatgacgaactgcaagagaaggatggttaacaacccagtatttccaggtggcaaccaaagacagcgcactgagccacttcagatcaccggatcttctgttgtgtatcaagagttcctgccccaaggagatgaacgcaacgcagacaaccacaatagcaatactaatgctgatgataccaccaacaaccatggttctggccccattagtgaccactcgaataaagcgtgcaatgtcagtagcattcaccaagatgtcaacgatagtatcaatgttggaacccagaatgacaaccttagcaattttgactctgagaaagactccaatggtgatagcaactatggtaccactgatgccaatgttagcaaggatttccaaccgccaattccaactccacgtcacaatgatcatccccagatggacagctcagcaaagaagacgttgatttgttacaactgcaaagaaccaggtcatttctctagagattgtccacagccgaagcgtaacctgcgccatcactccggccattatgcaagaagaagacaggtcactcgccttgtggtcactggagcaaacgccgtacctgtgaggcctcatgttaattctaacccatag

SEQ ID NO: 15524 - DNA, 1149 bp, Oryza sativa
  Clone ID: TFbOSC17335j.C1.o1.fg
atgttggcaacagcctttcaaaaatcacagaatgggaacagcccagcaggggaaacaaacgttcaagcccttacagtcaagcaccagtgcaagttatcagaatttctcaaaacggggcttccaacctttgccattgccgtcgatcctatggaagccagtgattggttgcgcacaatcgagaagaagctagggttgattcagtgcaccgaccaggagcgggttggcttcgcaactcatcagttggttggaccggcttcagagtggtgggatagctacgaagcatcacggccagaaggacataccatcacctggaacgagttttcatctgtattcaagagatcacatgttcccgcaggaatgatcacactaagaaaacgagagtttcgctacctgaagcaaggagatttgaccgtcacagagtacctgcacgagttctatcgtttggctcactatgcaccagaagatgtggaaacggatgaagacaaacaagagaagtttctccaggggttaaaagatgagcttgcagtgcaactactcctagaggattatgaagattttgagaaacttgtggacaaagccatgcaactcgaaagtgagcataatcggatgacgaactgcaagagaaggattgtcaacatcccagtaattccatgtggtaaccaaagacagcgcactgagccacttcagatcaccggatcttctgttgtgcatcaagagttcctgccccaagaagacggacgcaatacagacaacaaccctagcaatactaatggtgatgataccaccaacaaccatggttcttgccccattagtgaccactcgaatcaagcgtgcaattttgacactgagaaagactccaattgtgatagcaactacggtaccactgatgccaatgttagcaaggatttccaaccaccaattccaactcctagtcagaacgatcgttcccagacggacaactcagcaaagaagacgttgatttgttacaactgcaaagaaccaggtcatttctctagagattgtccacagccgaagcgtaacctgcgccatcactccggccattatgcaagaagaagacaggtcactcgccttgtggtcactggagcaaacgccgtacctgtgaggcctcatgttaattctaacccatag

SEQ ID NO: 15525 - DNA, 1650 bp, Oryza sativa
  Clone ID: TFbOSC1738j.C1.o3.fg
atggataacactggtaacaaaggctatgggaatgatggatccgatgactcaagaacccaagccaatgggaatgagaaaagcatcaacgaaacctcaccagagctaatccaaattgtggttaaccaaaccaacatgttggcaaccgcctttcaactattacagaatcggaacaacccagcaggggcaaccaacgttcaagtacctacagtccagcaacagtgcaagttatcagaatttctcaaaacggggcctccaacctttgccatggccgtcgatcctatggaagccagtgattggttgcgcacagtcgagaagaagctagggttgattcagtgcaccgaccaggagcgggttggcttcgcaactcatcagttggttggaccggcttcagagtggtgggatagctacgaagcatcacggccagaaggacataccatcacctggaacgagttttcatctgtattcaagagatcacatgttcccgcaggaatgatcacactaagaaaacgagagttccgctacctgaagcaaggagatttgaccgtcacagagtacctgcacgagttctatcgtttggctcaatatgcaccagaagatgtggaaacggatgaagacaaacaagagaagtttctccaggggttaaaagatgagcttgcagtgcaactacttctagaggattatgaagattttgagaaacttgtggacaaagccatgcaactcgaaagtgagcataatcggatgacgaactgcaagagaaggatggttaacaacccagtatttccaggtggtaaccaaagacagcgcactgagccacttcagatcaccggatcttctgttgtgtatcaagagttcctgccccaagaagatgaacgcaatgcaggcaacaacaatagcaatactaatgctgatgataccaccaacaaccatggttcttgccccattcatgaccacttagatcaagcgtgcaatgtcaacatcattcaccaagatatcgacgatagtatcaatgaaggcacccagaatgacaaccctagcaattttgactctgggaaggactccaatggtgatagcaataatggtaccactgatgccaatgttagcaaggattcccaaccaccaattccaactccaagtcaaaatgatcgtccccagatggacagctcagtaaagaagacgttgatttgttacaactgcaaagaaccaggtcatttctctagagattgtccacagccgaagcgtaacctgcgccatcactccggccattatgcaagaagaagacaagtcactcgccttgtggtcactggagcaaacgccgtacctgcaaggagtgaaatcttcaactcggtatcagatgctacacgaagtgaaaagtgcaagcaccggttaccagttgataacttgtccgaggttgactccgaagatatgaatcatgagaagttctggaacggaagcatcactgaactaccgcaacttagtctgagtcagccaaaaggtgcaccctggtccaagtcaggtgaagagaagattccatccgcaacaggaggtcaagccaagcagttccgagtggtaaagttttgctggaagttcgtcaagacgcaacggaagaagtcagacaagaagagaagaccgcccaacctatcttcttgctag

SEQ ID NO: 15526 - DNA, 862 bp, Oryza sativa
  unsure (1)..(862): unsure at all n locations
  Clone ID: TFbOSC18196j.C1.o1.gm
gngatcacatgttccctcaggaatgatcacactaagaaaacgagcgtttcgctacctgaagcaaggggatttgaccgtcacagagtacctgcacgagttctatcgtttggctcgctatgcaccagaagatgtggaaacggatgaagaaaaacaagagaagtttctccaggggttaaaagatgagcttgcagtgcaactactcctagaggattatgaaaattttgagaaacttgtggacaaagccatgcaacttgaaagtgagcataatcggatgacgaactgcaagagaaggattgtcaacatcctagtatttccaggtggtaaccaaagacagcgcactgagccacttccgatcatcggatcttctgttgggtatcacgagttcctgccccaagaagatgaacgcaatgtagacaacaacaacatcattcaccaagatatcgacgatagtatcaatgaaggcacccagaatggcaaccctagcaattttgactctgagaaagactccaagggtgatagcaataatggtaccactgatgccgatgttagcaaggatttccaaccaccaattccaactcctagtcaggacgatcgttcccaggcggacaactcagcaaagaagacgttgatttgttacaactgcaaagaaccaggtcatttctcgagagattgtccacagccgaagcgtaacctgcgtcatcactccggccattatgcaagaagaagacaggtcactcgccttgtggtcactggagcaaacgccgtacctgtttcactgaaaggcagcaagccaaaggacctcatcgtcaccagaagcatccacaactctcggagtgaagagtacctggtggacaaagtttaa

SEQ ID NO: 15527 - DNA, 1350 bp, Oryza sativa
  Clone ID: TFbOSC18372j.C1.o3.fg
atggataacactggtaacaaaggctatgggaatgatggatccgatgactcaagaacccaagccaatgggaatgagaaaagcatcaacgaaacctcaccagagctaatccaaattgtggttaaccaaaccaacatgttggcaacagcctttcaactattacagaattggaacaacccagcaggggcaaccaacgttcaagtacctacagtccagcaacagtgcaagttatcagaatttctcaaaactgagcctccaacctttgccattgccgtcgatcctatggaagccagtgattggttgcgcacagtcgagaagaagctagggttgattcagtgcaccgaccaggagcgggttggcttcgcaactcatcagttggttggacaggcttcagagtggtgggatagctacgaagcatcacggccagaaggacataccatcacctggaacgagttttcatctgtattcaagagatcacatgttcccgcaggaatgatcacactaggaaaacgagagtttcgctacctgaagcaaggagatttgaccgtcacagagtacctgcacgagttctatcgtttggctcactatgcaccagaagatgtggaaacggatgaagacaaacaagagaagtttctccaggggttaaaagatgagcttgcagtgcaactactcctagaggattatgaagattttgagaaacttgtggacaaagccatgcaacttgaaaatgagcataatcggatgacgaactgcaagagaaggattgtcaacatcccagtatttctaggtggtaaccaaagacagcgcactgagccacttcagatcaccggatcttctgttgtgcatcaagagttcctgccccaagaagatggacgcaatgcagacaccaacactagcaatactaatgatgatgataccaccaacaaccatggttcttgccccattagtgaccactcgaataaagcgtgcaatgtcagtagcattcaccaagatgtcaacgatagtatcaatgttggaacccagaatgacaaccttagcaatgttgacactgagaaagactccaatggtgatagcaactatggtaccactgatgccaatgttagcaaggatttccaatcaccaattccaactccaagccaaaatgatcgtccccagatggacagctcagtaaagaagacgttgatttgttacaactgcaaagaaccaggtcatttctccagagattgtccacagccgaagcgtaacctgcgccatcactccggccattatgcaagaagaagacaagtcactcgccttgtggtcactggagcaaacgccgtacctgtgaggcctcatgttaatcctaacccatag

SEQ ID NO: 15528 - DNA, 2295 bp, Oryza sativa
  Clone ID: TFbOSC18547j.C1.o2.gm
atggtgcccccaatcgccgggaacggccgcgccaagtccggccgccttcctttgccgccggccgccattcccgtcgccgttcccgctcctcccgtggccggctctctcccccatcctataaaatgggatcctcatccttcgttctatcgttttagccccttcccgagcctccccgtggtcgtatcacctctccccgccttctccttctccctctccgacgccggccggcctccagccacctctccctcctcaccggagcatcgtccggccgtgccgtcgcctccctcggctctgcaacaccgtccccttcaccggccttaccgtctcctcgccggaaactcgccggaacggtgcccccgccggcaaccagtggcattggtgccactgtactccctccagccggctgctgttcatcgccggtgcgccgatcgacgccgccgtctcctccttcgacaccgcggcatcgccttcttccccggcatcacctcctcctcgcccgaatttcgccggaacgccgtcgcccgcgccggcctcaccttcctcctcgtcgacatctcctccggctgccccggtcgccgcgccagagcgtcggccgacgtcgccgtctcctccctcggcgacgccgcatcgccctccaccccggcctgccctcggtttcgccggaacgtcgccgcgaacctctccgtccgcctcgccggagttgttcggccgcccgtccctcctcgccgtgtaccggtcggccacctccaccaccatcttcggcatcgcagtcgcgacgtcgtcctcggcctcgcctccccttcgaccgaaccccgccgcggcgtggtcctcgtcgtcctcgtccccgtgcagccgctgccggctgtcctcgtcgcctcctcgccggtcccggtcgtcgtcgtcgtcgtcgtcctctcgtcgttcccggtcgtcgtggcccccgtcctcgtgttcgtcctcggctccgcgtcgtcaagcctcgtgccggccgcagctcgccttcgcccaaggatcgccgccgaagccgtcccctcgccgttcgtctccgttgtgcccctttcgtcgttccggaggttcccgaagcgtggttcgtggtcgtcgccgaagaattggaacaacccagcaggggcaaccaacgttcaagtgcctacagtccagcaacagtgcaagttatcagaatttctcaaaactgagcctccaacctttgccattgccgtcgatcctatggaagccagtgagtggttgcgcaccatcgagaagaagctagggttgattcagtgcaccgaccaggagcgggttggcttcgcaactcatcagctggttggaccggcttcagagtggtgggataactacgaagcatcacagccagaaggacataccaccacctggaacgagttttcatctgtattcaggagatcacatgttccctcgggaatgatcacactaagaaaacgagagtttcgctacctgaagcaaggagatttgaccgtcgcagagtacctgcacgggttctatcgtttggctcactatgcaccagaagatgtggaaacgggcgaagacaaacaagagaagtttctccaggggttaaaagatgagctcgcagtgcaactacttctagaggattatgaagattttgagaaacttgtggacaaagccatgcaactcgaaagtgagcataatcggatgacgaattgcaagagaaggatggttaacaacccagtatttccaggtggtaaccaaagacagcgcactgagccacttcagatcaccggatcttctgttgtgtatccagagttcctgccccaagaagatgaacgcaatgcagacaacaacaatagcaatactaatgctgatgataccaccaacaaccatggttcttgccccattcatgaccacttagatcaagcgtacaatgtcaacatcattcaccaagatatcgacgatagtatcaatgaaggcacccagaatgacaaccttagcaatttcgacactgagaaagactccaatggtgatagcaataatggcaccactgatgccgatgttagcaaggatttccaaccaccaattccaactcctaatcagaacgatcgttcccagacggacaactcagcaaagaagacgttgatttgttacaactgcaaagaaccaggtcatttctctagagattgtccacagccgaagcgtaacctgcgccatcactccggccattatgcaagaagaagacaggtcactcgtcttgtggtcactggagcaaacgccgtacctgtgaggcctcatattaattctaacccatag

SEQ ID NO: 15529 - DNA, 2409 bp, Oryza sativa
  Clone ID: TFbOSC23013j.C1.o2.np
atggataacactggtaacaaaggctatgggaatgatggatccgatgactcaaaaacccaagccaatgggaatgagaaaagcatcaacgaaacctcaccagagctaatccaaattgtggttaaccaaaccaacatgttggcaacagcctttcaactattacagaatcggaacaacccagcaggggcaaccaatgttcaagtacctacagtccagcaacagtgcaagttatcagaatttctcaaaacggggcctccaacctttgccatggccgtcgatcctatggaagccagtgattggttgcgcacagtcgagaagaagctagggttgattcagtgcaccgaccaggagcgggttggcttcgcaactcatcagttggttggaccggcttcagagtggtgggatagctacgaagcatcacggccagaaggacataccatcacctggaacgagttttcatctgtattcaagagatcacatgttcccgcaggaatgatcacactaagaaaacgagagtttcgctacctgaagcaaggagatttgaccgtcgcagagtacctgcacgagttctatcgtttggctcactatgcaccagaagatgtggaaacggacgaagacaaacaagagaagtttctccaggggttaaaagatgagctcgcagtgcaactacttctagaggattatgaagactttgagaaacttgtggacaaagccatgcaactcgaaagtgagcataatcggatgacgaattgcaagagaaggatggttaacaacccagtatttccaggtggtaaccaaagacagcgcactgagccacttcagatcaccggatcttctgttgtgtatccagagttcctgcctcaagaagatggacgcaatgcagacaacaacactagcaatactaataatgatgataccaccaacaaccatggttcttgccccattagtgaccactcgaataaagcgtgcaatgtcggtagcattcgccaagatgtcaacgatagtatcaatgttggaacccagaatgacaaccttagcaatttttgacactgagaaagactccaatggtgatagcaacgatggtaccgctgatgccaatgttagcaagggtttccaaccaccaattccaactccaagtcacaatgatcatccccagatggacagctcagcaaagaagacgttgatttgttacaactgcaaagaaccaggtcatttctctagagattgtccacagccgaagcgtaacctgcgccatcactccggccattatgcaagaagaagacaggtcactcgccttgtggtcactggagcaaacgccgtacctgtttcactgaaaggcagcaagccaaaggacctcatcgtcaccagaagcatccacaactctcggagtgaagagtacttggttgacaaagttgactccaaagatatgaactatgcaaagttctggaactgaagccccatcttcaagtgccgcaacccagtcgaagtcagctaaaggttcaaccagggacaagtcagctgccccctctccctcggtcagccctccgtttcgcggggaaagcaccggagacgcgtcctcgccggcgtccagtggcgtcgccaccacttctccgcctccggccgcctctgccacgtccccggagcgccggccgacgccgccaccaccttcctcggctccacgacgccgctctcatccccggcatcacctcctcctcgcccgaacttcgccggaacaccgtcgcccgcgccggcttctccttcctcctcggcggcagcaccggtcggccacacctccaccacctccggcatcgcagcggcaaggtcgtcctcggcatcatttcccctccatccaaacccctccgcggtccatcatcgtcgtctccgatcgttctcgtcgtcgacgtcccgtcggtcgcccggctcgtcgtctcgcggcgccgcctccgtcatcgtcatcgtagcggcgtgttccacgtcatcctcgccgccgtgcagccgctgccggctgccctcgtagcctcctcgccggccccggtcgtcgtcgtcctcgtcctctcgtcgttctcggtcgtcgtggcgttcgtccctccgtcaagccgttctcgttcgtcgtcctcgcttcgtcaaggtcgctgcagcccccgtcatcgtcttcgtcctcgcctccgcgtcgtcaagcctcgcgccggccgcgtctcgccttcgtccaaggatcgccgccgaagccgtcccctcgccgttcgtctccgttgcgcccgtctgtctccgccgcgcccgttcgtcgttgtcgttcccacgcctcgtcgcgtggtggtaaggttccctctccctcgctgccctgtcctcgtcctttcggtgtcgcccgtgcccgttgtgcggttgtcggccccggtacccgtgtatcggcgtcgg

SEQ ID NO: 15530 - DNA, 1350 bp, Oryza sativa
  Clone ID: TFbOSC26820j.C1.o1.fg
atggataatactggtaacaaaggctatgggaatgatggatccgatgactcaagaacccaagccaatgggaatgagaaaagcatcaacgaaacctcaccagagctaatccaaattgtggttaaccaaaccaacatgttggcaacagcctttcaactattacagaatcggaacaacccagcaggggcaaccaacgttcaagtacctacagtccagcaacagtgcaagttatcggaatttctcaaaacggggcctccaacctttgccattgccgtcgatcctatggaagccagtgattggttgcgcacaatcgagaagaagctagggttgattcagtgcaccgaccaggagcgggttggcttcgcagctcatcagttggttggaccggcttcagagtggtggtatagctacgaagcatcacggccagaaggacataccatcacctggaacgagttttcatctgtattcaagagatcacatgttcccgcaggaatggtcacactaagaaaacaagagtttcgctacctgaagcaaggagatttgaccgtcacagagtacctgcatgaattctatcgtttggctcactatgcaccagaagatgtggaaacggatgaagacaaacaagagaagtttctccaggggttaaaagatgagcttgcagtgcaactacttctagaggattatgaagattttgagaaccttgtggacaaaaccatgaaactcgaaagtgagcataatcgaagaccgaactgcaaagaaagaattgtcaacatccagtattttccaggtggtaaccaaagacagcgcactgagccacttcagatcaccggatcttctgttgcgcatcaagagtttccgccccaagaagatggacgcaatgcagacaacaacactagcaatactaatgatgatgataccaccaacaaccatggttcttgccccattagtgaccactcgaataaagcgtgcaatgtcagtagcattcaccaagatgtcaacgatagtatcaatgttggaaaccagaatgacaaccttagcaattttgactctgagaaagactccaatggtgatagcaactatggtaccactgatgccaatgttagcaaggatttccaaccaccaattccaactccaagtcacaatgatcgtccccagatggacagctcagtaaagaagacgttgatttgttacaactgcaaagaaccaggtcatttctctagagattgtccacagccgaagcgtaacctgcgccatcactccggccattatgcaagaagaagacgagtcactcgccttgtggtcactggagcaaacgccgtacctgtgaggcctcatgttaattctaacccatag

SEQ ID NO: 15531 - DNA, 2529 bp, Oryza sativa
  Clone ID: TFbOSC400150j.C1.o6.gm
atggtgcccccaatcgccgggaacggccgcgccaagtccggccgccttcctttgccgccggccgccattcccgtcgccgttcccgctcctcccgtggccggctctctcccccatcctataaaatgggatcctcatccttcgttctatcgttttagccccttcccgagcctccccgtggtcgtatcacctctccccgccttctccttctccctctccgacgccggccggcctccagccacctctccctcctcaccggagcatcgtccggccgtgccgtcgcctccctcggctctgcaacaccgtccccttcaccggccttaccgtctcctcgccggaaactcgccggaacggtgcccccgccggcaaccagtggcattggtgccactgtactccctccagccggctgctgttcatcgccggtgcgccgatcgacgccgccgtctcctccttcgacaccgcggcatcgccttcttccccggcatcacctcctcctcgcccgaatttcgccggaacgccgtcgcccgcgccggcctcaccttcctcctcgtcgacatctcctccggctgccccggtcgccgcgccagagcgtcggccgacgtcgccgtctcctccctcggcgacgccgcatcgccctccaccccggcctgccctcggtttcgccggaacgtcgccgcgaacctctccgtccgcctcgccggagttgttcggccgcccgtccctcctcgccgtgtaccggtcggccacctccaccaccatcttcggcatcgcagtcgcgacgtcgtcctcggcctcgcctccccttcgaccgaaccccgccgcggcgtggtcctcgtcgtcctcgtccccgtgcagccgctgccggctgtcctcgtcgcctcctcgccggtcccggtcgtcgtcgtcgtcgtcgtcctctcgtcgttcccggtcgtcgtggcccccgtcctcgtgttcgtcctcggctccgcgtcgtcaagcctcgtgccggccgcagctcgccttcgcccaaggatcgccgccgaagccgtcccctcgccgttcgtctccgttgtgcccgtctgtctccgccgcgcccgttcgtcgttgtcgttcccacgcctcgtcgcgtggtgggcaaatgaaggctacacgagctgcggcccggtagtcgagatgtcatacggcggagggttggtgcccaatgctaggggctcagttctgcctgcctgtcccgggtatcccggccgtagtgaagccagatgtgaagcaggagtgaagatcttcgagaacccgtcgcagaacctaagccaccctctaaattggaacaacccagcaggggcaaccaacgttcaagtgcctacagtccagcaacagtgcaagttatcagaatttctcaaaactgagcctccaacctttgccattgccgtcgatcctatggaagccagtgagtggttgcgcaccatcgagaagaagctagggttgattcagtgcaccgaccaggagcgggttggcttcgcaactcatcagctggttggaccggcttcagagtggtgggataactacgaagcatcacagccagaaggacataccaccacctggaacgagttttcatctgtattcaggagatcacatgttccctcgggaatgatcacactaagaaaacgagagtttcgctacctgaagcaaggagatttgaccgtcgcagagtacctgcacgggttctatcgtttggctcactatgcaccagaagatgtggaaacgggcgaagacaaacaagagaagtttctccaggggttaaaagatgagctcgcagtgcaactacttctagaggattatgaagattttgagaaacttgtggacaaagccatgcaactcgaaagtgagcataatcggatgacgaattgcaagagaaggatggttaacaacccagtatttccaggtggtaaccaaagacagcgcactgagccacttcagatcaccggatcttctgttgtgtatccagagttcctgccccaagaagatgaacgcaatgcagacaacaacaatagcaatactaatgctgatgataccaccaacaaccatggttcttgccccattcatgaccacttagatcaagcgtacaatgtcaacatcattcaccaagatatcgacgatagtatcaatgaaggcacccagaatgacaaccttagcaatttcgacactgagaaagactccaatggtgatagcaataatggcaccactgatgccgatgttagcaaggatttccaaccaccaattccaactcctaatcagaacgatcgttcccagacggacaactcagcaaagaagacgttgatttgttacaactgcaaagaaccaggtcatttctctagagattgtccacagccgaagcgtaacctgcgccatcactccggccattatgcaagaagaagacagctttcggcaaaacacttcaaggtttcactgaaaggcagcaagccaaaggacctcatcgtcaccagaagcatccacaactctcggagtgaagagtacctggtggacaaagtttaa

SEQ ID NO: 15532 - DNA, 2434 bp, Oryza sativa
  Clone ID: TFbOSC400404j.C1.o16.np
atggataacactggtaacaaaggctatgggaatgatggatccgatgactcaagaacccaagccaatgggaatgagaaaagcatcaacgaaacctcaccagagctaatccaaattgtggttaaccaaaccaacatgttggcaacagcctttcaactattacagaattggaacaacccagcagaggcaaccaacgttcaagtacctacagtccagcaacagtgcaagttatcagaatttctcaaaactgagcctccaacctttgccattgccgtcgatcctatggaagccagtgattggttgcgcacaatcgagaagaagctagggttgattcagtgcaccgaccaggagcgggttggcttcgcaactcatcagctggttggaccggcttcagagtggtgggatagctacgaagcatcacggccagaaggacataccatcacctggaacgagttttcatctgtattcaggagatcacatgttcccgcaggaatgatcacactaagaaaacgagagtttcgctacttgaagcaaggagatttgaccgtcacagagtacctgcacgagttctatcgtttggctcactatgcaccagaagatgtggaaacggatgaagacaaacaagagaagtttctccaggggttaaaagatgagcttgcggtgcaactacttctagaggattatggaaattttgagaaactcgtggacaaagccatgcaacttgaaagtgagcataatcggatgacgaactgcaagagaaggattgtcaacatcccagtatttccatgtggtaaccaaagacagcgcactgagccacttcagatcaccggaccttctgttgtgcatcaagagttcccgccccaagaagatggacgcaatgcagacaacaacactagcaatactaatgatgatgataccaccaacaaccatggttcttgccccattagtgaccactcgaacaaagcgtgcaatgtcagtagcattcaccaagatgtcaacgatagtatcaatgttggaacccagaatgacaaccttagcaatgttgacactgagaaagactccaatggtgatagcaactatggtaccactgatgccaatgttagcaaggatttccaaccaccaattccaactccaagtcaaaatgatcgtccccagatggacagctcagtacagaagacgttgatttgttacaactgcaaagaaccaggtcatttctctagagattgtccacagccgaagcgtaacctgtgccatcactccggccattatgcaagaagaagacaagtcactcgccttgtggtcactggagcaaacgccgtacctgtttctctgaaaggcagcaggctcaagtaccacatcgtcaccaaaagcatccacaactctcggagtgaagagtacttagttgacaaagttgacgccaaagatatgaattatgagaagttctggaactgaagtcccatcttcaagtgccacaacccagtcgaagtcagctaaaaggtgcaccctggttcaagtcagccacctcctctccctcggtcagccctccgtttcgcggggaaagcaccggagacgcgttctcgccggcaaaacagtggcgttgccgccactgttccacctccggccgccactgtcgcgtttcccgtgcgccggccgacgtcgccaccacctccctcggctccgcgacgccgccctccaccccggctgctcctcggtttcgccggaacaccgtcgccgcgccggcctctccatcctcttcgtcgccggcgtcctttcggccacccattcctcctcgtcggctcgtcgccccgctgcaccaccaccttctccaacatcgcagcagcgcgttccacgccgtcccctcctccgctcagccgctgctgcctgccatcatcgtttcctcgtcaccgttcgtcctcgccgatcgacgtcccgtcggtcgcctggctcatcgtctcgcggcgccgcctccgtcgtcggcatcgcagcggcgtggtccgcgccatcctcgcctccgtgcagccgctgccggcagccctcatcgcctcctcgccggccccggtcgtcgccgtcgtcgtcctctcgtcgttcccggtcgtcgtggcgttcgtccctccgtcgagccgttctcgtccgtcgtccgcgttcgtcaagcgaaccgctgcagccccgtcctcgtcttcgtcctcggctccgcgtcgtcaagcctcgtgccggccgcgtctcgccttcgtccaaggatcgccgccgaagccgtcccctcgccgttcgtctccgttgtgcccgtctgtctccgccgcgcccgttcgtcgttgtcgttcccacgcctcgtcgcgtggtggtaaggttccctctccctcgctgccccgtcctcgtcctttcggtgtcccccgtacccgttgtgcggttgtcgaccccggtacccatgtaccggtgtcgg

SEQ ID NO: 15533 - DNA, 2380 bp, Oryza sativa
  Clone ID: TFbOSC400628j.C1.o5.np
atggataacactggtaacaaaggctatgggaatgatggatccgatgactcaagaacccaagccagtgggaatgagaaaagcatcaacaaaacctcaccagagctaatccaaattgtggttaaccaaaccaacatgttggcaacagcctttcaactattacagaattggaacaacccagcagggacaaccaacgttcaagtacctacagtccagcaacagtgcaagttatcagaatttctcaaaactgagcctccaacctttgccattgccgtcgatcctatggaagccagtgattggttgcgcacaatcgagaagaagctagggttgattcagtgcaccgaccaggagcgggttggcttcgcaactcctcagctggttggaccggcttcagagtggtgggatagctacgaagcatcacggccagaaggacataccatcacctggaacgagttttcatctgtattcaggagatcacatgttcccgcaggaatgatcacattaagaaaatgagagtttcgctatctgaagcaaggagatttgaccgtcacaaagtacctgcacgagttctatcgtttggctcactatgcaccagaagatgtggaaacagatgaagacaaacaagagaagtttctccaggggttaaaagatgagcttgcagtgcaactccttctagaggattactaagattttgagaaacttgtggacaaagccatgcaactcgaaagtgagcataatcggatgacgaactgcaagaggaggattgtcaacatcccagtatttccatgtggtaaccaaagacagcgcactgagccacttcagatcaccggatcttctgttgtgcatcaagagttcctgccccaagaagatggacgcaatgcagacaacaacactagcaatactaatgatgatgataccaccaacaaccatggttcttgcctcattagcgaccactcgaataaagcgtgcaatgtcagtagcattcaccaagatgtcaacgatagtatcaatgttggaatccagaatgacaaccttagcaattttgacactgagaaagactccaatggtgatagcaactatggtaccactgatgccaatgttagcaaggatttccaaccaccaattccaactccaagtcaaaatgatcgtccccagatggacagctcaacaaagaagacgttgatttgttacaactgcaaagaaccaggtcatttctctagagattgtccacagccgaagcgtaacctacgccatcactccggccattatgcaagaagaagacaagtcactcgccttgtggtcactggagcaaacgccatacctgtttctctgaaaggcagcaagccaaaggacctcatcgtccccagaagcgtccgcaatccacattaaagaataccacctgttagagataagccgaaaggactcctcccgcaagaaatcgatccgggaaatcaaaaactcggttttggagataaactcgaaaacgagttcgattcggataagatactcaacgattagctccgatttttgggggtccgcaaacttcgccggcgtcattgatggagccgagatcgcccgcgccggcctctccttcctcctcgtcgacgtctcctccggcagccccttccaccgcgcccgtgcatcagccggcgctgccgtcccctccctcggcgtcgccgcatcgccctccaccccggctgctcctcggtttcgccggaacgccgtcgcagcgccggcctctccatcctcttcatcgccagtgtcctttcggccgccccttccacctccccggctcgtcggcttgctgcacctctaccatcttcggcatcgcagccgcgacgtcgtcctcggcctcgcctcccctccgaccgaacaccgccggtgtccgtcgtcgtcttcaccgttcatcctcgccggctcgccgtctcgcggcgccgcctccgtcgtcggcatcgcagcggtgtgttccacgccatcctcgcctccgtgcagccgctgccggctgccctcgtcgtctcctcgctggccccggtcgtcgtcgtcgtcgtcctctcgtcgttcccggtcgttgtggcgttcgtccctccgtcaagccgttctcgtctgccgcccgcgtttcgtcaagtgtgcagcagccccgtcgtcgtcttcgtcctcgcctccgcgtcgtcaagcctcgtgccggccgtgtctcgccttcgtcccaggatcgctgccgaagtcgttccctcgccgtccgccgcgcccgttcgtcgttgtcgttcccacgcctcgtcgcgtggtggtaaggatccgtcctctcgctgccccgtcctcgtccttttggtgtcgccccgtacccgttgtgcggtcgtcgaccccggtacccgtgtaccggtgtcgg

SEQ ID NO: 15534 - DNA, 1863 bp, Oryza sativa
  Clone ID: TFbOSC400689j.C1.o2.gm
atgttggcaacagcatttcaactattacagaattggaacaacccagcaggggcaaccaacgttcaagggttaaaagatgagcttgcagtgcaactactaatagaggattatgaagattttgagaaacttgtggacaaagccatacaactcgaaagtgagcataatcggatgaagaactgcaagagaaggattgtcaacatcccagtatttccatgtggtaaccaaacacagcgcaccgagccacttcagatcaccggatcctccgttgcgcatcaagagttcctaccccaagaagatggacacaatgcagacaacaacattagcaatactaatgctgatgacaccaccaacaaccatggttcttgccccattagtgaccactcggatcaagcgtgcaatgtcaacagcattcaccaagatatcgacgatagtatcaatgaaggcacccagaatgacaaccctagcaattttgactctgagaaagacaccaatggtgatagcaactatggtaccactgatgccaatgttagcaaggatttccaaccaccaattccaactccaagtcagaatgatcgttctcagacgaacagctcagtaaagaagacattgatttgttacaactgcaaagaaccaggtcatttctccagagattgtccacagccgaagcgtaacctgcgtcatcactccggccattatgcaagaagaagacaagtcactcgccttgtggtcactggagcaaacgccatacctgtttctctgaaaggcaacaggctcaagtaccacatcgtcaccagaagcatccacaactctcggagtgaagagtacttagttgacaaaggtgtcgacacaagacatgaagttgataacttgtgtgaggttgacgccgaagatatgaatcatgagaagttctggaacggaagcatcattaaactaccgcaacctagtctgagtcagctaaaaggtgcaccctggttcgagtcaggtgaagagaagattccatctgcaataggagaccaagccaagcagttccaagtggggaagtttgctggacaagccgcctccgggcccaagccgagcggcgccctcccgcccgtgccgcgcacccgcccctaccgccgcgtcagcacgccggccggccgtgccgtcgccttccccttcgtcgcagtggcgttgccgccactgtaccacctccagccgcctgtgccgctttgccggagcatcggctttcgtcgtcgctgcctctcccggcaccggaacgtcgtcctcttccccggccatgccacggcgtcgctcatatttagccggaacaccgccgtgccgcaccggcctctccatccgcctcgccggaatttccccggtcggtccttcctccacccgtgcgccgtcggccgcaccaccaccacctccagcatcgcagcggcaagcggcgtgttccacgccgtcctcgtctccatgcagctgccgccggctgccctcgttgcctcctcgccggtcccggtcatcgtcctcatcgtcgtggcgttcgtccctccgtcaagccgttcgcgttcgtcgtccgcgttccgtcaagtgagccgctgcagccccgtcgtcgtcttcgtcctcggctccgcgtcgtcaagcgttgcgccggcggcgtctcgccttcgtccaaggatcgccgccgaagtcgtcccctcgcctttcgtctccgtcgttcccggccgtctccgccgcgcccacgtcgaagccctgtcgccgacggtcacactgcctgcctgccgccggtcggaccgtcgaagcctcgccggtcagaccgcccgaacaactgcggtcagaccaccactatcccaccggtcagaccgcgcgtacaactgccgttag

SEQ ID NO: 15535 - DNA, 1728 bp, Oryza sativa
  Clone ID: TFbOSC400773j.C1.o64.gm
atggtcacactaagaaaacgagagtttcgctacctgaagcaaggagatttgaccgtcacagagtacctgcacgagttctatcgtttggctcgctatgcaccagaagatgtggaaacggatgaagacaaacaagagaagtttctccaggggttaaaagatgagcttgcagtgcaactactcctagaggattatgaagattttgagaaacttgtggacaaagccgtgcaactcgaaagtgagcataatcggatgacgaactgcaagagaaggattgtcaacatcccagtaattccatgtggtaaccaaagacagcgcactgagccacttcagatcaccggatcttctgttgtgcatcaagagttcctgccccaagaagacggacgcaatgcagacaacaacactagcaatactaatgatgatgataccaccaacaaccatggttcttgccccattcatgaccacttagatcaagcgtgcaatgtcaacatcattcaccaagatatcgacgatagtatcaatgaaggcacccagaatgacaaccctagcaattttgactctgagaaagactccaatggtgatagcaataatggcaccactgatgccaatgttagcaaggatttccaaccaccaattccaactcctagtcagaacgatcgttcccagacggacaactcagcaaagaagacgttgatttgttacaactgcaaagaaccaggtcatttctccagagattgtccacagccgaagcgccgagccaagggcaatcaacatccggagggcgataccaagcagaagaccgtcatccgcttcaaccagcaatcagaaggaagcttctcctgtgaagagaagattccatccgcaacaggaggtcaagccaagcagttccgaaaggtaaagatttgctggaagtttgtcaagacgcaacggaagaagcgggcccgcccgccgctctcgctgacgggtggggcccacctgtcatcgccttcctcccgccgcgcccgccgccgcgcccgtgccctagcgccgccgccgccgcggattgcgccgcatcccgccgtccccgcgcgcattaaagagaggggaattactccccgcgtttccctctcccgattccccctcttttccctctctctctccctcggattcgtccggattcatcccgcgaagttcgccggcgtcttcaatggcgcccgagatctccgcgcgcggtttcctctctccccggccgcgctctccccctcccgttgctatatattcgatccccgtgcttcgctcttccgtttccgccgctcgccgctcgctctcgccgtcggattcgtgctcgcgccgtgctcctctctctccgccgtcgccgtcgaccttcggttcgccgccgacgtcgctccggtcctccgcccgactcggcgccacccccatcggcttcgccgagtggttgccgaccccgtccgccgctccgcttcgcccgccgactgccggagcaccgtcgccctcggcatcccgaaccgcgccgtcgccttcctccgctccggttcgccgccgccgtcgctccggtcttcctcccggctcggcgccacctccctcggcatcgccgcatcgccgtcgacctcgtccgcgcctccgtttcgctcgccgaccgtcggagcgccgccgtcatcgtcatcccgagccgcgccgccgtctttctccgctccgtccgccgtttccgccgccttcgctgcctcggggtga

SEQ ID NO: 15536 - DNA, 1506 bp, Oryza sativa
  Clone ID: TFbOSC400946j.C1.o3.fg
atgtcatggcatcgggttggtgtcctgctgctggtggctcagtcctgcctacctgtcccgggggttccggccgtaggtggggttgggtcggtactcttgtttatggctaggatgggttgggaactatgtcatgtcttccgtccgtataccgtggtgatggataacactggtaacaaaggctatgggaatgatggatccgatgactcaagaacccaagccaatgggaatgagaaaagcatcaacaaaacctcaccagagctaatccaaattgtggttaaccaaaccaacatgttggcaacagcctttcaactattacagaattggaacaacccagcaggggcaaccaacgttcaagtacctacagtccagcaacagtgcaagttatcagaatttctcaaaactgagcctccaacctttgccattgccgtcgatcctatggaagccagtgattggttgcgcacagtcgagaagaagctagggttgattcagtgcaccgaccaggagcgggttggcttcgcaacacatcagttggttggaccggcttcagagtggtgggatagctacgaagcatcacggccagaaggacataccatcacctggaacgagttttcatctgtattcaagagatcacatgttcccgcaggaatgatcacactaagaaaacgagagtttcgctaccggaagcaaggagatttgaccgtcacagagtacctgcacgagttctatcgtttggctcactatgcaccagaagatgtggaaacggatgaagacaaacaagagaagtttctccaagggttaaaagatgagcttgcagtgcaactactcctagaggattatgaagattttgagaaacttgtggacaaagccatgcaactcgaaagtgagcataatcggatgacgaactacaagagaaggattgtcaacatcccagtatttccatgtggtaaccaaagacagcgcactgagccacttcagatcaccggatcttctgttgcgcatcaagagttactaccccaagaagatggacacaacgcagacaacaacattagcaatactaatgctgatgataccaccaacaaccatggttcttgccccattcatgaccacttagatcaagcgtgcaatgtcaacagcattcaccaagatatcgacgatagtatcaatgaaggcacccagaatgacaaccctagcaattttgactctgagaaagactccaatggtgatagcaaatatggtaccactgatgccaatgttagcaaggatttccaaccaccaattccaactccaagtcagaatgatcgttcccagacggacaactcagtaaagaagacattgatttgttacaactgcaaagaaccaggtcatttctccagagattgtccacagccgaagcgtaacctgcgtcatcactccggccattatgcaagaagaagacaagtcactcgccttgtggtcactggagcaaacgccatacctgtgaggcctcgtgttaatcataacccatag

SEQ ID NO: 15537 - DNA, 1948 bp, Oryza sativa
  Clone ID: TFbOSC401006j.C1.o29.np
atggataacactggtaacaaaggctatgggaatgatggatccgatgactcaagaacccaagccaatgggaatgagaaaagcatcaacgaaaccttaccatagctaatccaaattgtggttaaccaaaccaacatgttggcaacagcatttcaactattacagaatcggaacaacccagcatgggcaaccaacgttcaagtacctatagtccagcaacagtgcaagttatcagaatttctcaaaactgggcctccaacctttgccattgccgtcgatcctatggaagccaatgattggttgcgcacagtcgagaagaatctggggttgattcagtgcacagaccaggagcgggttgtcttcgcaactcatcagttggttgggctagcttcagaatggtgggatagctacgaagtatcacggccagaaggacataccatcacttgggacgagtttttagctgtattcaagagatcacatgttcccgcaggaatgatcacactaagaaaatgagagttccgctacctaaagcaagaatatttgaccgtcatagagtacctgcacgagttccatcgtttggctcactatgcaccagaagatgtggaaacggatgaagataaacaagagaagtttctccaggggttaaaagatgagcttgcagtgcaactactcctagaggattatgaagattttgagaaacttctggacaaagccatacaactcgaaagtgagcataatcagatgaagaactgcaagagaaggattgtcaacatcccagtaattccatgtggtaaccaaagacagcgaactgagccacttcagatcaccggatcttctgttgcgcatcaagagttcctgccccaagaagatggatacaatgcagacaacaacattagcaatactaatgatgatgataccaccaccaaccatggttcttgccccattagtgaccactcgaatcaagcgtgcaatgtcaacaacattcaccaagatgtcgacgatagtatcaatgaaggcacccagaatgacaaccctagcaattgtgactctgagaaagaatccaatggtgatagcaactatggtaccactgatgccaatgttagcaaggatttccaaccaccaattccaactccaagtcagaatgatcgttcccagacggacagctcagtaaagaagaagttgatttgttacaactgcaaagaaccaggtcatttctctagagattgtccacaaccgaagcgtaacctgcgccatcactccgggcattatgcaagaagaagacaagtcactcgccttgtggtcactggagcaaacgccatacctgtttctctgaaaggcagcaagcccaaggaccacattgccaccagaagcatccacaactctcagagtgaagagtacttggttgagaaagttgacacccaagatatgaactatgagaagttctcgaactgaagccccatcttcaagtgccgcaacccagtcgaagtcagctagaggtgcaaccagggataagtcaagtgcatcctcttccccgacgtcgcctctgtttcgtggggaaaccatcggagacgcgtcctcgccggtaaacagtggcgttgctgccactgcaccacctccggcagccccttccgccgtgcccgagcaccgaccgacgtcgctgtctcctccgtcgacgtcgcagcgtcgtcctctcctccggctgtgtcacggggtcgataatatttacgttattacaaaggcacttaaggcctgacaatcaaaaataaacagcagcggactagcgggcctatggctccatcttcacaggcgctcaactggggtataagccaggactccacctaagacctcttctcaaaagcttctcttactggaggggggagaaaaaaccccccacttaattttggaatccccggtttgaatgaggcggatttggaggagggagcgagctagg

SEQ ID NO: 15538 - DNA, 1350 bp, Oryza sativa
  Clone ID: TFbOSC401130j.C1.o3.fg
atggataatactggtaacaaaggctatgggaatgatggatccgatgactcaagaacccaagccaatgggaatgagagaagcatcaacgaaacctcaccagagctaatccaaattgtggttaaccaaaccaacatgttggcaacagcctttcaactattacagaattggaacaacccagcaggggcaaccaacgttcaagtacctacagtccagcaacagtgcaagttatcagaatttctcaaaacggggcctccaacctttgccatggccgtcgatcctatggaagccagtgattggttgcgcacagtcgagaagaagctagggttgattcagtgcaccgaccaggagcgggttggcttcgcaactcatcagttggttggaccagcttcagagtggtgggatagctacgaagcatcacggccagaaggacataccatcacctggaacgagttttcctctgtattcaggagatcacatgttcccgcaggaatgatcacactaagaaaacgagagtttcgctacctgaagcaaggagatttgaccgtcacagagtacctgcacgagttctatcgtttggctcactatgcaccagaagatgtggaaacggatgaagacaaacaagagaagtttctccaggggttaaaagatgagcttgcagtgcaactacttctagaggattatgaagattttgagaaacttgtggacaaagccatgcaactcgaaagtgagcataatcggatgacgaactgcaagagaaggattgtcaacatcccagtaattccaggtggtaaccaaagacagcgcactgagccacttcagatcaccggatcttctgttgtgtatcaagagttcctgccccaagaagatgaacgcaatgcagacaacaacactagcaatactaatgctgatgataccaccaacaaccatggttcttgccccattagcgaccactcgaacaaagcgtgcaatgtcagtagcattcaccaagatgtcaacgatagtatcaatgttggaacccagaatgacaaccttagcaattttgactctgagaaagactccaatggtgatagcaataatggcaccactgatgccaatgttagcaaggatttccaaccaccaattccaactcctagtcagaacgatcgttcccagacggacaactcagcaaagaagacgttgatttgttacaactgcaaagaaccaggtcatttctccagagattgtccacagccgaagcgtaacctgcgtcatcactccggccattatgcaagaagaagacaagtcactcgccttgtggtcactggagcaaacgccgtacctgtgaggcctcatgttaattctaacccatag

SEQ ID NO: 15539 - DNA, 1046 bp, Oryza sativa
  Clone ID: TFbOSC401498j.C1.o2.np
atggatgaagtcgggcgtcgatggacattctccagggcaaatgaaggctacacgagctgcggctcggtagtcgagatgtcatacggcggagggttggtgcccaatgctaggggctcagttctgcctgcctgtcccgggtatcccggccgtaggtaggattgggtcggtactcttgtctaaggctaggatgggttggaaactatgtcacatctttacgacgggttccaaggccatggaatgcggagtaaagatgtgtcttgtgggttggcctgggttggcttgggacgagttgggacccaggtcgggttgccagttcggtccaattcatcgtaggccttgggttaaggcagtactagatggtcagctttgcgaagaagaagatgtcgtcagttgtttgccgaagctccggaagactgcaggatccgctagcgaagcgaaggaagcagtgaagccagctgtgaagcaggaaaaaagagttagttcctttaaggtcctgtccctagctctggtctattctttccttgtatgcttcctctctcaacccctaccttgtgacagatggataacactggtaacaaaggctatgggaatgatggatccgatgactcaagaacccaagccaatgggaatgagaaaagcatcaacgaaacctcaccagagctaatccaagttgtggttaaccaaaccaacatgttggcaacagcctttcaactcttacagaatcggaacaacccagcaggggcaaccaacgttcaagtacctacagtccagcaacataccgctgatgccaatgttagcaagggtttccaaccaccaattccaactccaagtcacaatgatcatccccagatggacagctcagcaaagaagacgttgatttgttacaactgcaaagaaccaggtcatttctccagagattgtccacagccgaagcgtaacctgcgccatcactccggccattatgcaagaagaagacaggtcactcgccttgtggtcactggagcaaacgccccctcgcccgacatctcccggaaaccggagctccc

SEQ ID NO: 15540 - DNA, 1143 bp, Oryza sativa
  Clone ID: TFbOSC401523j.C1.o3.gm
atggatgaagtcgggcgtcgatggacattctccagggcaaatgaaggctacacgagctgcggcccggtagtcgagatgtcatacggcggagggttggtgcccaatgctaggggctcagttctgcctgcctgtcccgggtatcccggccgtagtgaagccagctgtgaagcaggagtgaagatcttggagaacccgtcgcagaacctaagccaccctctaaatcggaacaacccagcaggggcaaccaacgttcaagtacctacagtccagcaacagtgcaagagatcacatgttccctcaggaatgatcacactaagaaaacgagcgtttcgctacctgaagcaaggggatttgaccgtcacagagtacctgcacgagttctatcgtttggctcgctatgcaccagaagatgtggaaacggatgaagaaaaacaagagaagtttctccaggggttaaaagatgagcttgcagtgcaactactcctagaggattatgaaaattttgagaaacttgtggacaaagccatgcaacttgaaagtgagcataatcggatgacgaactgcaagagaaggattgtcaacatcccagtatttccaggtggtaaccaaagacagcgcactgagccacttccgatcatcggatcttctgttgggtatcacgagttcctgccccaagaagatgaacgcaatgtagacaacaacaacatcattcaccaagatatcgacgatagtatcaatgaaggcacccagaatggcaaccctagcaattttgactctgagaaagactccaagggtgatagcaataatggtaccactgatgccgatgttagcaaggatttccaaccaccaattccaactcctagtcaggacgatcgttcccaggcggacaactcagcaaagaagacgttgatttgttacaactgcaaagaaccaggtcatttctcgagagattgtccacagccgaagcgtaacctgcgtcatcactccggccattatgcaagaagaagacaggtcactcgccttgtggtcactggagcaaacgccgtacctgtttcactgaaaggcagcaagccaaaggacctcatcgtcaccagaagcatccacaactctcggagtgaagagtacctggtggacaaagtttaa

SEQ ID NO: 15541 - DNA, 1350 bp, Oryza sativa
  Clone ID: TFbOSC411286j.C1.o2.fg
atggataacactggtaacaaaggctatgggaatgatggatccgatgactcaagaacccaagccaatgggaatgagaaaagcatcaacgaaacctcaccagagctaatccaaattgtggttaaccaaaccaacatgttggcaacagcctttcaactattacagaatcggaacaacccagcaggggcaaccaacgttcaagtacctacagtccagcaacagtgcaagttatcagaatttctcaaaacggggcctccaacctttgccatggccgtcgatcctatggaagccagtgattggttgcgcacagtcgagaagaagctagggttgattcagtgcaccgaccaggagcgggttggcttcgcaactcatcagttggttggaccggcttcagagtggtgggatagctacgaagcatcacggccagaaggacataccatcacctggaacgagttttcatctgaattcaggagatcacatgttcccgcaggaatgatcacactaagaaaacgagagtttcgctacctgaagcaaggagatttgaccgtcacagagtacctgcatgagttctatcgtttggctcactatgcaccagaagatgtggaaacggatgaagacaaacaagagaagtttctccaggggttaaaagatgagcttgcagtgcaactacttctagaggattatgaagattttgagaaacttgtggacaaagccatgcaactcgaaagtgagcataatcggatgacgaactgcaagagaaggattgtcaacatcccagtatttccaggtggtaaccaaagacagcgcactgagccacttcagatcaccggatcttctgttgtgcatcaagagttcctgccccaagaagatgaacacaatgcagacaacaacactagcaatactaatgatgatgataccaccaacaaccatggttcttgccccattagtgaccactcgaataaagcgtgcaatgtcagtagcattcaccaagatgtcaacgatagtatcaatgttggaacccagaatgacaaccttagcaatttcgacactgagaaagactccaatggtgatagcaactatggtaccactgatgccaatgttagcaaggattcccaaccaccaattccaactccaagtcaaaatgatcgtccccagatggacagctcagtaaagaagacgttgatttgttacaactgcaaagaaccaggtcatttctctagagattgtccacagccgaagcgtaacctgcgccatcactccggccattatgcaagaagaagacaagtcactcgccttgtggtcactggagcaaacgctgtacctgtgaggcctcatgttaattctaacccatag

SEQ ID NO: 15542 - DNA, 1206 bp, Oryza sativa
  Clone ID: TFbOSC414125j.C1.o2.fg
atgcaactcgaaagtgagcataatcggatgacgaactgcaagagaaggattgtcaacatcccagtaattccaggtggtaaccaaagacagcgcactgagccacttcagatcaccggaccttctgttgtgcatcaagagtccccgccccaagaagatggacgcaatgcagacaacaacactagcaatactaatgatgatgataccaccaacaaccatggttcttgccccattagtgaccactcgaacaaagcgtgcaatgtcagtagcattcaccaagatgtcaacgatagtatcaatgttggaacccagaatgacaaccttagcaattttgacactgagaaagactccaatggtgatagcaactatggtaccactgatgccaatgttagcaaggatttccaaccaccaattccaactccaagtcacaatgatcatccccagatggacagctcagcaaagaagacgttgatttgttacaactgcaaagaaccaggtcatttctctagagattgtccacagccgaagcgtaacctgcgccatccctccggccattatgcaagaagaagacaggtcactcgccttgtggtcactggagcaaacgccgtacccgcagcaagccaaaggacctcatcatccccagaagcgtccgcaatccacattaaagaataccacctgttagagataagccgaaagatgattgataaaaagagattggcaaagatgttctctagcataaaagaagtaggccgaaaggtgattgataaacagaaacatgctctgcatcgctcaaggaagacccctgattgtaattgccccgcaacagtcaccttgtcattaagtaagcaagatgacctaggtaaaagtgtttctatgaaggcaaggagtgaaatcttcaactcggtatcagatgctacacgaagtgaaaagtgcaagcaccggttaccagttgataacttgtctgaggttgactccgaagatatgaatcatgagaagttctggaacggaagcatcactgaactaccgcaacctagtctgagtcagccaaaaggtgcaccctggtccaagtcaggtgaagagaagattccatccgcaacaggaggtcaagccaagcagttccgagtggtaaagttttgctggaagttcgtcaagacgcaacggaagaagtcagacaagaagagaagaccgcccaacctaccttcttgctag

SEQ ID NO: 15543 - DNA, 1917 bp, Oryza sativa
  Clone ID: TFbOSC414146j.C1.o1.fg
atggataacactggtaacaaaggctatgggaatgatggatccgatgactcaagaacccaagccaatgggaatgagaaaagcatcaacaaaacctcaccagagctaatccaaaaagtggttaaccaaaccaacatgttgacaacagcttttcaactattacagaattggaacaacccagcaggggcaaccaacgttcaagtacctacagtccagcaacagttcaagttatcagaatttctcaaaactgagcctccaacctttgccattgccgtcgatcctatggaagccagtgattggttgcgcacagtcgagaagaagctagggttgattcagtgcaccgaccaggagcgggttggcttcgcaactcatcagttggttggaccggcttcagagtggtgggatagctacgaagcatcacggccagaaggacataccatcacctggaacgagttttcatctgtattcaagagatcacatgttcccgcaggaatgatcacactaagaaaacgagagtttcgctacctgaagcaaggagatttgaccgtcacagagtacctgcacgagttctatcgtttggctcgctatgcaccagaagatgtggaaacggatgaagacaaacaagagaagtttctccaggggttaaaagatgagcttgtagtgcaactacttctagaggattatgaagattttgagaaacttgtggacaaagccatgcaactcgaaagtgagcataatcggatgacgaactgcaagagaaggattgtcaacatcccagtaattccaggtggtaaccaaagacagcgcactgagccacttcagatcaccggaccttctgttgtgcatcaagagtccccgccccaagaagatggacgcaatgcagacaacaacactagcaatactaatgatgatgataccaccaacaaccatggttcttgccccattagtgaccactcgaacaaagcgtgcaatgtcagtagcattcaccaagatgtcaacgatagtatcaatgttggaacccagaatgacaaccttagcaattttgacactgagaaagactccaatggtgatagcaactatggtaccactgatgccaatgttagcaaggatttccaaccaccaattccaactccaagtcacaatgatcatccccagatggacagctcagcaaagaagacgttgatttgttacaactgcaaagaaccaggtcatttctctagagattgtccacagccgaagcgtaacctgcgccatccctccggccattatgcaagaagaagacaggtcactcgccttgtggtcactggagcaaacgccgtacccgcagcaagccaaaggacctcatcatccccagaagcgtccgcaatccacattaaagaataccacctgttagagataagccgaaagatgattgataaaaagagattggcaaagatgttctctagcataaaagaagtaggccgaaaggtgattgataaacagaaacatgctctgcatcgctcaaggaagacccctgattgtaattgccccgcaacagtcaccttgtcattaagtaagcaagatgacctaggtaaaagtgtttctatgaaggcaaggagtgaaatcttcaactcggtatcagatgctacacgaagtgaaaagtgcaagcaccggttaccagttgataacttgtctgaggttgactccgaagatatgaatcatgagaagttctggaacggaagcatcactgaactaccgcaacctagtctgagtcagccaaaaggtgcaccctggtccaagtcaggtgaagagaagattccatccgcaacaggaggtcaagccaagcagttccgagtggtaaagttttgctggaagttcgtcaagacgcaacggaagaagtcagacaagaagagaagaccgcccaacctaccttcttgctag

SEQ ID NO: 15544 - DNA, 2115 bp, Oryza sativa
  Clone ID: TFbOSC415189j.C1.o2.gm
atggataatactggtaacaaaggctatgggaatgatggatccgatgactcaagaacccaagccaatgggaatgagagaagcaccaacgaaacctcaccagagctaatccaagttgtggttaaccaaaccaacatgttggcaacagcctttcaactattacagaattggagcagcccagcaggggcaaccaacgttcaagtgcctacagtccagcaacagtgcaagttatcagaatttctcaaaactgagcctccaacctttgccattgccgtcgatcctatggaagccagtgattggttgcgcacaatcgagaagaagctagggttgattcagtgcaccgaccaggagcgggttggcttcgcaactcatcagctggttggaccggcttcagagtggtggggaagctacgaagcatcacggccagaaggacataccatcacctggaacgagttttcatctgtattcaagagatcacatgttcccgcaggaatgatcacactaagaaaacgagagttccgctacctgaagcaaggagatttgaccgtcacagagtacctgcacgagttctatcgtttggctcactatgcaccagaagatgtggaaacggatgaagacaaacaagagaagtttctccaggggttaaaagatgagcttgcagtgcaactactcctagaggattatgaagattttgagaaacttgtggacaaagccatgcaactcgaaagtgagcataatcggatgacgaactgcaagagaaggattgtcaacatcccagtaattccatgtggtaaccaaagacagcgcactgagccacttcagatcaccggatcttctgttgtgcatcaagagttcctgccccaagaagacggacgcaatgcagacaacaacagtagcaatactaacgatgatgataccaccaacaaccatggttcttgccccattagtgaccactcgaataaagcgtgcaatgtcagtagcattcaccaagatgtcaacgatagtatcaatgttggaacccagaatgacaaccttagcaattttgacactgagaaagactccaatggtgatagcaactatggtaccactgatgccaatgttagcaaggatttccaaccaccaattccaactccaagtcaaaatgatcgtccccagatgggcagctcagtaaagaagacgttgatttgttacaactgcaaagaaccaggtcatttctctagagattgtccacagccgaagcgtaacctgcgccatcactccggccattatgcaagaagaagacaagtcactcgccttgtggtcactggagcaaacgccgtacctgcgggcccgcccgccactctcgctgacgggtgggacccacctgtcatcgccttcctcccgccgcgcccgccgcccgcccgtgccctagcgccgccgccgccgctgaatccgccgcatcccgccttccccgcgcgccttaatgaggggggaatcactccccgtgattccctctcccgtttccccctcttttccctctctctctccctcggattcgtccggattcatcccgcgaagttcgccggcgtcttcaatggcgcccgagatctccgcgcgcggtttcctctctccccggccgcgctctccccctcccgttgctatatattcgatccccgtgcttcgctcttccgtttccgccgctcgccgctcgctctcgccgtcggtttcgtgcccgcgccgtgctcctctctctccgccgtcgccgccgaccttcggttcgccgccgacgtcgctccggtcctccgcccgactcggcgccacctccttcggcttcgccgagtggttgccgaccccgtccgccgctccgcttcgcccgccgactgccggagcaccgtcgccctcggcatcccgaaccgcgccgtcgccttcctccgctccggttcgccgccgccgtcgctccggtcttcctcccggctcggcgccacctccctcggcatcgccgcatcgccgtcgacctcgtccgcgccttcgtttcgctcgccgaccgtcggagcgccgccgtcatcgtcatcccgagccgtgccgccgccttcttccgctccggccgccgttctcgtcgtcgtcgttgtcccggggtga

SEQ ID NO: 15545 - DNA, 1505 bp, Oryza sativa
  Clone ID: TFbOSC417492j.C1.o2.np
cataccggcggaggggttggtgcccaaatgctaaggggctcagttctgccctgcctgtcccgggtatcccggccgtaggtaggattgggtcggtactcttgtctaaggctaggatgggttggaaactatgtcacatctttacgacgggttccaaggccatggataacactggtaacaaaggctatgggaatgatggatccgatgactcaagaacccaagccaatgggaatgagaaaagcatcaacgaaacctcaccagagctaatccaagttgtggttaaccaaaccaacatgttggcaacagcctttcaactcttacagaatcggaacaacccagcaggggcaaccaacgttcaagtacctacagtccagcaacagtgcaagttatcagaatttctcaaaacggggcctccaacctttgccatggccgtcgatcctatggaagccagtgattggttgcgcacagtcgagaagaagctagggttgattcagtgcaccgaccaggagcgggttggcttcgcaactcatcagttggttggaccggcttcagagtggtgggatagctacgaagcatcacggccagaaggacataccatcacctggaacgagttttcatctgtattcaagagatcacatgttcccgcaggaatgatcacactaagaaaacgagagtttcgctacctgaagcaaggagatttgaccgtcacagagtacctgcatgagttctatcgtttggctcactatgcaccagaagatgtggaaacggatgaagacaaacaagagaagtttctccaggggttaaaagatgagcttgcagtgcaactacttctagaggattatgaagattttgagaaacttgtggacaaagccatgcaactcgaaagtgagcataatcggatgacgaactgcaagagaaggattgtcaacatcccagtatttccaggtggtaaccaaagacagcgcactgagccacttcagatcaccggatctcctgttgtgcatcaagagttcctgccccaagaagatgaatgcaatgcagacaacaacactagcaatactaataatgatgataccaccaacaaccatggttcttgccccattagtgaccactcgaataaagcgtgcaatgtcggtagcattcgccaagatgtcaacgatagtatcaatgttggaacccagaatgacaaccttagcaattttgacactgagaaagactccaatggtgatagcaacgatggtaccgctgatgccaatgttagcaagggtttccaaccaccaattccaactccaagtcacaatgatcatccccagatggacagctcagcaaagaagacgttgatttgttacaactgcaaagaaccaggtcatttctccagagattgtccacagccgaagcgtaacctgcgccatcactccggccattatgcaagaagaagacaggtcactcgccttgtggtcactggagcaaacgccgtacctgtgaggcctcatgttaattctaaccca

SEQ ID NO: 15546 - DNA, 1676 bp, Oryza sativa
  unsure (1)..(1676): unsure at all n locations
  Clone ID: TFbOSC422569j.C1.o2.np
atggataacactggtaacaaaggctatgggaatgatggatccgatgactcaagaacccaagccaatgggaatgagaaaagcatcaacgaaacctcacccgagctaatccaaattgtggttaaccaaaccaacatgttggcaacagcctttcaactattacagaatcggaacaacccagcaggggcaaccaacgttcaagtacctacagtccagcaacaatgcaagttatcagaatttctcaaaacggggcctccaacctttgccatggccgtcgatcctatggaagctagtgattggttgcgcacagtcgagaagaagctagggttgattcagtgcaccgaccaggagcgggttggcttcgcaactcatcagttggttgaaccggcttcagagtggtgggatagctacgaagcatcacggccagaaggacataccatcacctggaacgagttttcatctgtattcaagagatcacatgttcccgcaggaatgatcacactaagaaaacgagagttccgctacctgaagcaaggagatttgaccgtcacagagtacctgcacgagttctatcgtttggctcactatgcaccagaagatgtggaaacggatgaagacaaacaagagaagtttctccaggggttaaaagatgagcttgcagtgcaactacttctagaggattatgaagattttgagaaacttgtggacaaagccatgcaactcgaaagtgagcataatcggatgacgaactgcaagagaaggattgtcaacatcccagtatttccaggtggtaaccaaagacagcgcactgagccacttcagatcaccggatcttctgttgcgcatcaagagtttccgccccaagaagatggacgcaatgcagacaacaacactagcaatactaatgatgatgataccaccaacaaccatggttcttgccccattagtgaccactcgaataaagcgtgccatgtcagtagcattcaccaagatgtcaacgatagtatcaatgatggcacccaaaatgacaaccctagtaattgggactctgggaaggactccaatggtgatagcaataatggtaccactgatgccaatgttagcaaggattcccaaccaccaattccaactccaagtcaaaatgatcgtccccagatggacagctcagtaaagaagacgttgatttgttacaactgcaaagaaccaggtcatttctctagagattgtccacagccgaagcgtaacctgcgccatcactccggccattatgcaagaagaagacaggtcactcgccttgtggtcactggagcaaacgccgtacctgtttcactgaaaggcagcaagccaaaggacctcatcgtcaccagaagcatccacaactctcggagtgaagagtacctggtggacaaagttgacgccaaagatatgaattatgagaagttctggaactgaagtcccatcttcaagtgccacaatccagtcgaagtcagctagaggtgcaaccagggaaaagtcaggtgaagagaagattccatctgcaaccccagcccgaagtccttccctcctccctctctttctctccctctccttctctccctcctcttgggcctcctcccctcggcccagctccctttcccccccctctttttncccgnctgcctccttttctcccccctctt

SEQ ID NO: 15547 - DNA, 1506 bp, Oryza sativa
  Clone ID: TFbOSC6122j.C1.o1.fg
atgtcatggcagagggttggtgccctgctgctagggggctcagtcctgcctgcctgtcccgggtgtcccggccgtaggaggattgggtcggtactcttgtttatggctaggatgggttgggaactatgtcacgtcttccgtccgtataccgtggtgatggataatactggtaacaaaggctatgggaatgatggatccgatgactcaagaacccaagccaatgggaatgagagaagcatcaacgaaacctcaccagagctaatccaagttgtggttaaccaaaccaacatgttggcaacagcctttcaactattacagaattggaacaacccagcaggggcaaccaacgttcaagtgcctacagtccagcaacagtgcaagttatcagaatttctcaaaactgagcctccaacctttgccattgccgtcgatcctatggaagccagtgattggttgcgcacaatcgagaagaagctagggttgattcagtgcaccgaccaggagcgggttggcttcgcaactcatcagctggttggaccggcttcagagtggtgggatagctacgaagcatcacggccagaaggacataccatcacctggaacgagttttcatctgtattcaagagatcacatgttcccgcaggaatgatcacactaagaaaacgagagtttcgctacctgaagcaaggagatttgaccgtcacagagtacctgcatgagttctatcgtttggctcactatgcaccagaagatgtggaaaatgatgaagaccaacaagagaagtttctccaggggttaaaagatgagctcgcagtgcaactactcctagaggattatgaagattttgagaaacttgtggacaaagccatgcaacttgaaagtgagcataatcggatgacgaactgcaagagaaggattgtcaacatcccagtaattccaggtggtaaccaaagacagcgcactgagccacttcagatcaccggatcttctgttgtgcatcaagagttcctgccccaagaagatgaacgcaatgcagacaacaacactagcaatactaatgatgatgataccaccaacaaccatggttcttgccccattagtgaccactcgaacaaagcgtgcaatgtcagtagcattcaccaagatgtcaacgatagtatcaatgttggaacccagaatgacaaccttagcaattttgacgctgagaaagactccaatggtgatagcaactatggtaccactgatgccaatgttagcaaggatttccaaccaccaattccaactccaagtcacaatgatcatccccagatggacagctcagcaaagaagacgttgatttgttacaactgcaaagaaccaggtcatttctctagagattgtccacagccgaagcgtaacctgcgccatcactccggccattatgcaagaagaagacaggtcactcgccttgtggtcactggagcaaacgccgtacccgtgaggccttgtgttaatcagaatccatag

SEQ ID NO: 15548 - DNA, 1503 bp, Oryza sativa
  Clone ID: TFbOSC6489j.C1.o1.np
gtcatatggcagagggttggtgccctgctgctaggggctcagttctgcctgcctgtcccgggtattccggccgtaggcgggattgggtcggtactcttgtctatggctaggatgggtcggaaactatgtcacgtcttccgtccgtataccgtggtgatggataatactagtaacaaaggctatgggaatgatggatccgatgactcaagaacccaagccaatgggaatgagagaagcaccaacgaaacctcaccagagctaatccaagttgtggttaaccaaaccaacatgttggcaacagcctttcaactattacagaattggaaccacccagcaggggcaaccaacgttcaagtgcctacagtccagcaacagtgcaagttatcagaatttctcaaaactgagcctccaacctttgccattgccgtcgatcctatggaagccagtgattggttgcgcacagtcgagaagaagctagggttgattcagtgcaccgaccaggagcgggttggcttcgcaactcatcagttggttggaccggcttcagagtggtgggatagctacgaagcatcacggccagaaggacataccatcacctggaacgagttttcatctgtattcaagagatcacatgttcccgcaggaatggtcacactaagaaaacgagagtttcgctacctgaagcaaggagatttgaccgtcacagagtacctgcacgagttctatcgtttggctcactatgcaccagaagatgtggaaacggatgaagacaaacaagagaagtttctccaggggttaaaagatgagcttgcagtgcaactacttctagaggattatgaagattttgagaaacttgtggacaaagccatgcaactcgaaagtgagcataatcggatgacgaactgcaagagaaggattgtcaacatcccagtatttccaggtggtaaccaaagacagcgcactgagccacttcagatcaccggatcttctgttgcgcatcaagagtttccgccccaagaagatggacgcaatgcagacaacaacactagcaatactaatgatgatgataccaccaacaaccatggttcttgccccattagtgaccactcgaataaggcgtgcaatgtcagtagcattcaccaagatgtcaacgatagtatcaatgttggaacccagaatgacaaccttagcaatttcgacactgagaaagactccaatggtgatagcaactatggtaccactgatgccaatgttagcaaggatttccaaccaccaattccaactccaagtcacaatgatcatccccagatggacagctcagcaaagaagacgttgatttgttacaactgcaaagaaccaggtcatttctctagagattgtccacagccgaagcgtaacctgcgccatcactccggccattatgcaagaagaagacaagtcactcgccttgtggtcactggagcaaacgccgtacctgtgaggcctcatgttaattctaaccca

SEQ ID NO: 15549 - DNA, 2376 bp, Oryza sativa
  Clone ID: TFbOSC900179j.C1.o6.gm
atggagagctcaccggcgtgcgatggaaacggcgcttcggcgacgtttggcggcaagcgagcggcggccgaggtagctctagctgcggcggcggttgcgcggcgcggcggcgagcctagcagcgacggcgtgcggccgaaggtcggcagcgggcggcggaggcaagaaaaaggggaaacttcagggcgtgacaagaagccttccatgagcccaccaccctcttgcctcaccttcctcggctccggcctactccgactcagctccctcttcctcaccgcgcgccatctccttgccgccaacagctacgccagtcacctcgtctgcgtcgatgatccttgcaccgaccaggagcgggttggcttcgcaactcatcagctggttggaccggcttcagagtggtgggatagctacgaagcatcacggccagaaggacataccatcacctggaacgagttttcatctgtattccggagatcacatgttcccgccggaatgatcacactaagaaaacgagagtttcgctacctgaagcaaggagatttgaccgtcacagagtacctgcatgagttctatcgttcggctcactatgcaccagaagatgtggaaacggatgaagacaaacaagagaagttcctccaggggttaaaagatgagctcgcagtgcaactacttttagaggattatgaagattttgagaaacttgtggacaaagccatgcaactcgaaagtgagcatagtcggatgacgaactgcaagagaaggatggttaacaacccagtatttccaggtggcaaccaaagacagcgcactgagccacttcagatcaccggatcttctgttgtgtatcaagagttcctgccccaaggagatgaacgcaacgcagacaaccacaatagcaatactaatgctgatgataccaccaacaaccatggttctggccccattagtgaccactcgaataaagcgtgcaatgtcagtagcattcaccaagatgtcaacgatagtatcaatgttggaacccagaatgacaaccttagcaattttgactctgagaaagactccaatggtgatagcaactatggtaccactgatgccaatgttagcaaggatttccaaccgccaattccaactccacgtcacaatgatcatccccagatggacagctcagcaaagaagacgttgatttgttacaactgcaaagaaccaggtcatttctctagagattgtccacagccgaagcgtaacctgcgccatcactccggccattatgcaagaagaagacagcatcgccgccacctcctccacgccggcctgccctccgtttcgcgaggagacccccggaactacgttcccgccgtcgccctcccctttccctcgcgccggccacctccagccgccttcctctcctcgcccgaacgccgcccggccgcgccgtcttctccctcggcctcgcagctgccccctctccctcggtcagccctccgtttcgcggggaaatcaccggagacgcgccctcgccggcgtccagtggcgtcgccaccacttctccgcctccggccgcctctgccacgtccccggagcgccggccgacgtcgccaccaccttcctcggctccacgacgccgctctcatccccggcatcacctccgcctcgcccgaacttcgccggaacaccgtcgcccgcgccggtttctccttcctcctcggcggcatctcctccggctgccccggtcgccgcgccagagcgtcggccgacgtcgccgtctcctccctcggcgtcgccgcatcgccctccaccccggcctgccctcggtttcgccggaacgtcgccgcgaacctctccgtccgcctcaccggagttgttcggccgcccgtccctcctcgccgtgcatcggtcggccacctccaccaccatcttcggcatcgcagcggcaaggtcgtcctcggcatcgtttcccctccatccaaacccctccgcggtccatcatcgtcgtctccgatcgttctcgtcgtcgacgtcccgttcatcctcgctcggctcgtcgtctcgcggcgccgcctccgtcatcgtcatcgctgcggcgtgttccgcgtcgtccccgtctctgtgcagccactgccggctgccctcgtcgccccctcgccggtcccggtcgtcgtcgtcgtcgtcgtcctctcgtcgttcccggtcgctgcagcccccgtcatcgtcttcgtcctcgcctccgcgtcgtcaagcctcgtgccggccgcgtctcgccttcgtccaaggatcgccgccgaagccgtcccctcgccgttcgtctccgttgtgcccgtctgtctccgccgcgcccgttcgtcgttgtcgttcccgcgcctcgtcgcgtggtggtaa

SEQ ID NO: 15550 - DNA, 1518 bp, Oryza sativa
  Clone ID: TFbOSC900319j.C1.o14.fg
atggataatactggtaacaaaggctatgggaatgatggatccgatgactcaagaacccaagccaatgggaatgagaaaagcatcaacgaaacctcaccagagctaatccaaattgtggttaaccaaaccaacatgttggcaacagcctttcaactattacagaatcggaacaacccagcaggggcaaccaacgttcaagtacctacagtccagcaacagtgcaagttatccgaatttctcaaaacggggcctccaacctttgccattgccgtcgatcctatggaagccagtgattggttgcgcacaatcgagaagaagctagggttgattcagtgcaccgaccaggagcgggttggcttcgcagctcatcagttggttggaccggcttcagagtggtggtatagctacgaagcatcacggccagaaggacataccatcacctggaacgagttttcatctgtattcaagagatcacatgttcccgcaggaatggtcacactaagaaaacaagagtttcgctacctgaagcaaggagatttgaccgtcacagagtacctgcatgaattctatcgtttggctcactatgcaccagaagatgtggaaacggatgaagacaaacaagagaagtttctccaggggttaaaagatgagcttgcagtgcaactacttctagaggattatgaagattttgagaaacttgtggacaaaaccatgaaactcgaaagtgagcataatcggaggacgaactgcaagagaaggattgtcaacatcccagtatttccaggtggtaaccaaagacagcgcactgagccacttcagatcaccggatcttctgttgcgcatcaagagtttccgccccaagaagatggacgcaatgcagacaacaacactagcaatactaatgatgatgataccaccaacaaccatggttcttgccccattagtgaccactcgaataaagcgtgcaatgtcagtagcattcaccaagatgtcaacgatagtatcaatgttggaaaccagaatgacaaccttagcaattttgactctgagaaagactccaatggtgatagcaactatggtaccactgatgccaatgttagcaaggatttccaaccaccaattccaactccaagtcacaatgatcgtccccagatggacagctcagtaaagaagacgttgatttgttacaactgcaaagaaccaggtcatttctctagagattgtccacagccgaagcgtaacctgcgccatcactccggccattatgcaagaagaagacgagtcactcgccttgtggtcactggagcaaacgccgtacctgtttcactgaaaggcagcaagccaaaggacctcatcgtcaccagaagcatccacaactctcggagtgaagagtacttggttgacaaagtttacgaggtgattgatagaagataccagcaaaggtgtttattatcgaaccaagaagtaggtcgaaaggtgattgataagagaaatctaaaaagaatacgtcagggctga

SEQ ID NO: 15551 - DNA, 1266 bp, Oryza sativa
  Clone ID: TFbOSC900373j.C1.o9.fg
atggataatcctggtaaccaaggctatgggaatgatggatccgatgactcaagaacccaagccaatgggaatgagagaagcatcaacgcaacctcaccagagctaatccaagttgtggttaaccaaaccaacatgttggcaacagcctttcaactattacagaattggaacaacccagcaggggcaaccaacgttcaagtgcctacagtccagcaacagtgcaagttatcagaatttctcaaaactgagcctccaacctttgccattgccgtcgatcctatggaagccagtgagtggttgcgcaccatcgagaagaagctagggttgattcagtgcaccgaccaggagcgggttggcttcgcaactcatcagctggttggaccggcttcagagtggtgggatagctacgaagcatcacggccagaaggacataccatcacctggaacgagttttcatctgtattcaggagatcacatgttcccgcaggaatgatcacactaagaaaacgagagtttcgctacctgaagcaaggggatttgaccgtcacagagtacctgcacgagttctatcgtttggctcgccatgcaccagaagatgtggaaacggatgaagaaaaacaagagaagtttctccaggggttaaaagatgagcttgcagtgcaactactcctagaggattatgaaaattttgagaaacttgtggacaaagccatgcaacttgaaagtgagcataatcggatgacgaactgcaagagaaggattgtcaacatcccagtatttccaggtggtaaccaaagacagcgcactgagccacttcagatcatcggatcttctgttgggtatcacgagttcctgccccaagaagatgaacgcaatgtagacaacaacaacatcattcaccaagatatcgacgatagtatcaatgaaggcacccagaatggcaaccctagcaattttgactctgagaaagactccaagggtgatagcaataatggtaccactgatgccaatgttagcaaggatttccaaccaccaattccaactcctagtcaggacgatcgttcccaggcggacaactcagcaaagaagacgttgatttgttacaactgcaaagaaccaggtcatttctcgagagattgtccacagccgaagcgtaacctgcgtcatcactccggccattatgcaagaagaagacaagtcactcgccttgtggtcactggagcaaacgtcatacctgtgaggcctcgtgttaatcataacccatag

SEQ ID NO: 15552 - DNA, 3836 bp, Oryza sativa
  Clone ID: TFbOSC14917j.C1.o1.np
atggctggttttaccgatgcactgaggctggataaatttaccggtgtgcactttaagagatggcagatcagggtcactctgtggctaacagctatgaaatgcttctgggtgagtactggcaagcctataggcgttcttaatgctgatcagcagaaagaaatcgatgaggccactactctctttgtgggatgcattcttagtgtgcttagcgatcgtctggtcgaggtgtatatgcatatgaccgacgctaaggagttgtgggatgcactgaatactaaattcggtgctactgatgctagcaatgatctgtatatcatggagcagtttcatgactacaagatggctgacaaccgttctgtagtcgaataggctcatgagatacaaaccatggctaaggaactcgaactccttaagtgtgtcttatctaacaaatttgtggccgggtgcattatcgcgatactacctccatcttggagaggtttcggtactgcactcaaacacaagagacaggaatactccgttgaggggttgatagcgtctcttgatgttgaggagaaagctcgggaaaaagataccgcgtctaagggcgatggtgggcagtctactaccaatgttgtgcacaaggcccagaacaaaagcaagggaaaacacaaaactcagcagaccaccaacttcaagaagaagaagaacaacaacaatcctaatcaggatgagaagacttgctttgtgtgtggtcaacctagccatctagccaggaagtgtccacaacgcaaggggatgaaggcacctgcagggcagacctctaagtctgctaatgtgaccattggcaacactagagatggaagcgggtagtaatttacctactgttttttcagttaatcagtctactaattggtgggttgatacaggggccaatgtacatgtttgtgctgacatctcattgttttcttcttatcaggccgcacggggttccaccgtcctaatggggaatgggtcacatgcttctgttcatggtgttggcacggtagatctgaagtttactttgggaaagatcgtgcagctgaagaacgtgcagcatgtcccttctatcgataggaatctcgttagtggctcccgtctgactagagacggatttaagttggtcttttgagtctaataaagtagttgtgtctaaacatggatattttattggtaaaggttatgagtgcggaggcctgttccgcttttccctttctgatttctgcaataagtctgtgaactatatttgtggcagtgtggatgatgaggctaatgtttggcactcacgtttatgtcatattaattttggtttgatgtctcggctttccagcatgtgtttaattcctaagttttccattgtcaaaggttctaaatgccatagttgtatgcaaacgaagcaatctcgcaagcctcacaaggctgccgaggagagaaacttggcaccactagaacttctacattcagatctttgtgaaatgaatggggtgttgacgaagggtggaaaacgatatttcatgacgttgattgatgatgctactagattttgctatgtgtacttgttgaaaacgaaagacgaggctctagactattttaaaatttataaggcagaagttgaaaatcaacttgacagaaagataaaaaggcttaggtctgatcgtggtggagagtttttctcaaacgagtttgacttattttgtgaggaacatggcatcatacatgagaggatgcctccttattctcctgagtctaatgggattgctgaaaggaagaaccgcactctgactgacttggtgaacgcattgttgaactcgaatcatgtgttaaacagagttcctaacagaaataaggacaaaacaccatatgagatatggattgggagaaaaccatcactttcttatttgcgcacatgggggtgtttggcgaaagtcaatgtaccaataacgaaaaagcgcaaacttggacctaagactgtggactgtatctttctgggatatgctcatcacagcattgcctatagatttttaatatttaaatctgaggtacctgacatgcatgttggtacaattatggagtctcgtgatgctaccttctttgagagctttttcccaatgaaggatacacatagtagttcgagccaaccctctgaaataattcccagttcaatcacaccaccagaacaaactgaacatacacatgaacatgtcattgaggaggatgtcagtgaagctcctcgaaggagtaagagacaaaggacggctaagtcctttggtgatgatttcactgtgtacctcgtggatgacactcttaagtcaatttcagaagcatatgcatctcctgatgcagactactggaaggaggctttccgtagtgaaatggattctattatcgctaacgggacttgggaggtgatagagtgaccctatgggtgtaaacctgtggggtgcaagtgggtgttcaagaagaagcttaggcctgacggtactattgaaaagtacaaggcttggcttgttgctaagggctacactcagaaagaaggcgaatatttctttgacacttactcacctgttgctagactgaccacaatttgtgtgctactttccctagcagcctcacatggtcttttcgttcaccaaatgaacgttaagacagcttttcttaatggagagctggatgaggagatctatatggatcagcctgataggtttgtagttgaaggtcaagaaggcaaagtgtgcaaattgttaaagtctttgtatggcctgaaacaagctcctaagcaatggcatgagaaatttgacaaaacattgacatctccaggctttgctgtcaatgaggcagataaatgtgtgtattatcgccatggtgggggtgagggagttattctgtgcttgtttgttgatgacatactgatatttgggacaaaccttgaggtgataaatgaggttaaatcattcttgtctcaaaattttgatataaaggatttgggagtagctgatgttatcttaaacattaagctaattagaggtgagaatgggattacactcttgcagtcccattatgtggagaagatcttgaatcgctctggctacattgatagtaagccttctccaacacctggctagaacaagagaattgctaggaatcaactggaatactccgaaatcattggctcactgatgtacctggctagtgcaactaggcctgatatctcctttgctgtgagcaagttgagccgatttacctctaatccaggagatgatcactggcgtgtacttgagcgagtaatgcgctatctgaaaggtactatggaattggggcttcactattctgggtatcctgcggtactggagggatatagtgattataactggatctctgatgtggatgagatcaaagccactagtggatatgttttcacactaggtggtggtgctgtttcgtggagatcttgcaaacagaccattttgatgaggtcaaccatggaagcagagttgacggcactggatactgctactgttgaggcagaatggctgcgtgatctattaatggatctgcctattgttgaaaaaccggtgccggctatccttatgaactgtgacaatcaaacggtaatcgtcaaagtgaatagttctaagaataatatgaaatcatctagacatgtgaaaagacgattgaagtctgtcaggaaattgagaaactccggagttataacgttggattacatccaaacagctagaaacctagcagatcccttcacgaagggactatcacgaaatgtgatagacaatgcatcgaaggagatgggcttgagacccatg

SEQ ID NO: 15553 - DNA, 1458 bp, Oryza sativa
  Clone ID: TFbOSC900099j.C1.o19.fg
atgaagcaacagatgattgacaatagtgccaaaatcgtatccccagatactgtgaccacatcaacacgctattgtcacaagtttgcagagttcatgaaaacaaggccacccacttttgcaggatcagccacatcttggtatactgaccaatggcttggcaccattgaaaacaaattagatatggtgcaatgcgatgagaagaacaaagtattctatgctgctcatcagttacaaggagctgcattggaatgttggaaaggttattgtgcaaccgataaagacccacaagccatcagttgggctgagttttcttctattttgcactatatggatgtttctccagggtttattaaaacaaaggaccacacaaaggatggtgtttgcacactctgcagccaaggctatcgctatgagctgatgtggtgcccacggaacaagccaagaaactgtgcatgtgctcgttgtggggagattggacacagcgccagcgagcacgaaatcagctgctctagctgtgaacaaagccatctactcggagagtgccccatgagcaagctcacttgttacctttgtgaaggtgatgatcatgtcccaattaaatgccccttgagttcaatactcactactgtgactcaacatcaacgagaagcttaccaagaagttatacaacaggtaataggagaaacaaataagataatagtaactccagttaagaagttcagagaagtagatgatagtagccttcaataccaatgtaaaaggggcagtgaatcagcatccaaagttgcatgctctgcttgtggtgagcaaggtgaagcagcctcctataaagccaagtgtatgtcaaagacacgaaaggcttcatcgaaaacgaaaaatgtcgtatgtttcagctgcaatgagatgggccattttgctaatcgatgtccacttagacatcagacacctgctcaagacaaaaccattccaaaagctattctgaccaagagaacaacaccaacaacaggtggtgaagtgctctggtggcgtggtcgcggtggattcttgccggcgtcggcggtgaacggcggccgatctcgcaatgcaagcaaaagagaaaacgtagctgagtcttttgcgcatctaatggtggtggtttcatggactgaggtggccgggatcgatggtgacggtggcacaagcggcggcgaacctcgcttgggcgacgacgacgatgcgtggagcgacccggcggcggtggaaaacggtggtgcgacggcgacagcctcctccagcctccggtctgccaagaaaggatgcttcatgaatgaggacttgcgccgaaactcacccgggagcgaggaatcgacaaagaagtggtttggcctgagatccaccggatggacgggaacagagaaggaagccggcgacggcgctctggagcagaagacggcgacgcgcacggcacaaggtggttga

SEQ ID NO: 15554 - DNA, 1101 bp, Oryza sativa
  Clone ID: TFbOSC900327j.C1.o7.fg
atgaagcaacagatgattgacaatagtgccaaaatcgtatccccagatactgtgaccacatcaacacgctattgtcacaagtttgcagagttcatgaaaacaaggccacccacttttgcaggatcagccacatcttggtatactgaccaatggcttggcaccattgaaaacaaattagatatggtgcaatgcgatgagaagaacaaagtattctatgctgctcatcagttacaaggagctgcattggaatgttggaaaggttattgtgcaaccgataaagacccacaagccatcagttgggctgagttttcttctattttgcactatatggatgtttctccagggtttattaaaacaaaggaccacacaaaggatggtgtttgcacactctgcagccaaggctatcgctatgagctgatgtggtgcccacggaacaagccaagaaactgtgcatgtgctcgttgtggggagattggacacagcgccagcgagcacgaaatcagctgctctagctgtgaacaaagccatctactcggagagtgccccatgagcaagctcacttgttacctttgtgaaggtgatgatcatgtcccaattaaatgccccttgagttcaatactcactactgtgactcaacatcaacgagaagcttaccaagaagttatacaacaggtaataggagaaacaaataagataatagtaactccagttaagaagttcagagaagtagatgatagtagccttcaataccaatgtaaaaggggcagtgaatcagcatccaaagttgcatgctctgcttgtggtgagcaaggtgaagcagcctcctataaagccaagtgtatgtcaaagacacgaaaggcttcatcgaaaacgaaaaatgtcgtatgtttcagctgcaatgagatgggccattttgctaatcgatgtccacttagacatcagacacctgctcaagacaaaaccattccaaaagctattctgaccaagagaacaacaccaacaacaggtggtgaagttgaacttatcaggaatggaagaggtcggtgcttgcttgtcttcgtcatcggattctaccatctgggcatcctcatcgtcgcctag

SEQ ID NO: 15555 - DNA, 3408 bp, Oryza sativa
  Clone ID: TFbOSC14678j.C1.o1.fg
atgccgcgtcgtcgctcgtcgtcaccgatcgtgcgcactcctcatgactccggcggccgcgccacgggcagcggcgggggtgaccgcgggctggtgatccaccgcgtggtgaaagaaggaggcggctcggtgaactacccgctgctgaccaagaccaactacaacgactgggcgctactgatgaagatcaagctgcaggctcactgcctgtgggcggcgatcgagcccgacggcgtggacgtccctctgcatgaggaccggatggctcttgacgctatctgcagtgccgtgccgccggagatgattggcaccctggcgaccaaagcgtcggcccgggaagcctgggaatgcatcaagacaatgcgagtcggcaacgaccggattcgcaaggcgagtgcacagaaagtgcgcgctgagtatgaatcgcttgcgttccgcggtgacgagaccgtggaagatttcgctctatggctcacaaccatcgtcaaccagcttgcaaccctcggtgatcctgaacctgctgataaagtcatcgaaaagtaccttcgggtagctcgtcccaggttcaatcaactcatcttgtctattgaaactcttctcgatatctctactctgtccatggaggaagttactggcagactgaaagccgctgaggattctgggcaatcctcgtcgcacaccgccggtgggaagctgtacctaactgaggaggagtgggctgaacgtcagaagaagaaggatcaagaggcaaagcggggtgactcgggcggctctggcggccgcggcaagcgccgtggcgggagagggcgcactggtggcggcgggactgcgagccccgagagcacgaactctggttcggcgcgcaagggagacaaatgccgaaattgcggcaaacttgggcactgggcgaaggactgtaggagcaagtccaagcgcgaagaacaggctcacgtcgcccaggaggatgaagaagagcacaccttgatgttgctcaccggcggccgcgttgacacggtcgacgcggcggcgccggagggcgacacgcccacaccgccccaccaagccgtggtggaactcgtggagatgaaagtatttccagcgctcgacgacgtggctgaccatgatcccgggcgctggattatggattccggcgcgtcaaaccatatgacgggcagcaggatggcgttcgccgacctcgacacgaacatcaccgggaacgtgcgactcagcgatggatccgtggtccggatcgcaggacggggcacaattctctttgcctgcaagaatggtgagcaccgcactctgtcgaacacctattatcttccccgtcttgctgccaatattatcagcattgggcaattggatgagaccggcttcaaagtgctggcggaggatggcatcatgcgggtctgggatgagcagcggcgtctgcttgcccggatccctcgcaccccagggcgactgtacatgcttgacatcaacctggcgcgcctggtctgtttggcggcacacgccgacgaagacgcgtggcgctggcatgctcgcctcgggcacataaacttcagggcgctctgcaagatgggcaaggaggagctggtacgtggtctaccatgtttgtcgcaggttgatcaggtctgtgaggcctgtctcgccgggaaacaccggaggtcgccgttcccgcggcaggcactttgccggtctgacgagccgctggcgctgctacatggagatctctgtggaccgatcacgccggcgacacccagtggcaaccgctatttccttctactcgtcgacgactacagctggtacatgtgggtcgccctcctctccaccaaagatgcggcgccggctgccatcaagcgtattcaggcggcggcagaaaggaagagtggacgcaagctccgcgcgttgcggacggatcgcgggggagaattcacgtctacacagttcgccgagtactgcgccgagctgggaatgcggcgcgagctcacggcgccctactctccgcaacagaacggcgttgtcgagcggcgaaaccaatccgtggtgggcacggcgcggagtatgctcaaggcgaaggggctaccaggtatgttttggggagaggcgataaataccgccgggtatctgctcaacaggtcgtcgtccaagggtatcggcggcaagaccccgtacgcgctgtggaatggcgttccgccggccgtgcaccatctgcgcacgtttgggtgtgtggcacacgtgaagacgaccaccccgaacctgaagaaactggatgacaggagttgtccaatgatctttgtcggctacgagccggggtccaaggcgtatcgcgcctatgatccggctactcggcgtgttcacatctcccgtgacatcgtcttcgacgaagcggcccagtgggactgggatgctgaggcggccgctgatctcgacaccgacttcgtcgttgagtacaccacggtgtaccatcctggctcgctgtcaggaacacgccaagatgctggggagccgcctgctcgatcttcatcatcgccgcgaacgccatcagactcaccgacagccggccgaacaccttcggtgcatggcgatgcgccggcggttgattttgtgtcgccaccaactggagcagctgctaatcttgatgcagaccacgacgacgcaccactccgtttccgcacgatggacaatgtgctggggccggccatgctgccaggtctcgctaatcgtgaggtccaggaagagctgatgatggtgagcggagaagaaccggcaacgttcgctcaagctgaacgcgacgaggattggcgtcgggcaatgctcgatgaaatctcttcgatagaggagaacaagacctggaggctcgtcgatctgccttcgggacatcggccaattgggctgaaatgggtgtataaactgaagaaagatgctcagggcgtcgtcgtcaaacacaaggcgagattggtggcaaagggctacgtgcagagggctggaattgactttgatgaggaaggttggatggtgcatcatatggacgttaaatcagcgttcctcaatggggaactgattgaggaggtgtatgttgttcagccaccggggtttgagatcgatggacaggagaacaaggtttacaggcttgataaggcgttgtatggtcttcgccaagcacccagagcttggaacaccaagctagactgcacactgaagaaacttggcttcaagcaaagcccgttggagcatgggctgtacgcgcgcggcgatggcagtgggcgactgctcgtcggtgtgtatgtggatgatctggtaattgtcgggggtgacagtggcatgatcaagggattcaaagagcagatgaaggctgaatttaagatgagtgatcttggtcctttgagtttttatcttgggatcgag

SEQ ID NO: 15556 - DNA, 4341 bp, Oryza sativa
  Clone ID: TFbOSC14686j.C1.o3.fg
atgccgcgtcgtcgctcgtcgtcaccgatcgtgcgcactcctcatgactccggcggccgcgccacgggcagcggcgggggtgaccgcgggctggtgatccaccgcgtggtgaaagaaggaggcggctcggtgaactacccgctgctgaccaagaccaactacaacgactgggcgctactgatgaagatcaagctgcaggctcactgcctgtgggcggcgatcgagcccgacggcgtggacgtccctctgcatgaggaccggatggctcttgacgctatctgcagtgccgtgccgccggagatgattggcaccctggcgaccaaagcgtcggcccgggaagcctgggaatgcatcaagacaatgcgagtcggcaacgaccggattcgcaaggcgagtgcacagaaagtgcgcgctgagtatgaatcgcttgcgttccgcggtgacgagaccgtggaagatttcgctctatggctcacaaccatcgtcaaccagcttgcaaccctcggtgatcctgaacctgctgataaagtcatcgaaaagtaccttcgggtagctcgtcccaggttcaatcaactcatcttgtctattgaaactcttctcgatatctctactctgtccatggaggaagttactggcagactgaaagccgctgaggattctgggcaatcctcgtcgcacaccgccggtgggaagctgtacctaactgaggaggagtgggctgaacgtcagaagaagaaggatcaagaggcaaagcggggtgactcgggcggctctggcggccgcggcaagcgccgtggcgggagagggcgcactggtggcggcgggactgcgagccccgagagcacgaactctggttcggcgcgcaagggagacaaatgccgaaattgcggcaaacttgggcactgggcgaaggactgtaggagcaagtccaagcgcgaagaacaggctcacgtcgcccaggaggatgaagaagagcacaccttgatgttgctcaccggcggccgcgttgacacggtcgacgcggcggcgccggagggcgacacgcccacaccgccccaccaagccgtggtggaactcgtggagatgaaagtatttgcagcgctcgacgacgtggctgaccatgatcccgggcgctggattatggattccggcgcgtcaaaccatatgacgggcagcaggatggcgttcgccgacctcgacacgaacatcaccgggaacgtgcgactcagcgatggatccgtggtccggatcgcaggacggggcacaattctctttgcctgcaagaatggtgagcaccgcactctgtcgaacacctattatcttccccgtcttgctgccaatattatcagcattgggcaattggatgagaccggcttcaaagtgctggcggaggatggcatcatgcgggtctgggatgagcagcggcgtctgcttgcccggatccctcgcaccccagggcgactgtacatgcttgacatcaacctggcgcgcctggtctgtttggcggcacacgccgacgaagacgcgtggcgctggcatgctcgcctcgggcacataaacttcagggcgctctgcaagatgggcaaggaggagctggtacgtggtctaccatgtttgtcgcaggttgatcaggtctgtgaggcctgtctcgccgggaaacaccggaggtcgccgttcccgcggcaggcactttgccggtctgacgagccgctggcgctgctacatggagatctctgtggaccgatcacgccggcgacacccagtggcaaccgctatttccttctactcgtcgacgactacagctggtacatgtgggtcgccctcctctccaccaaagatgcggcgccggctgccatcaagcgtattcaggcggcggcagaaaggaagagtggacgcaagctccgcgcgttgcggacggatcgcgggggagaattcacgtctacacagttcgccgagtactgcgccgagctgggaatgcggcgcgagctcacggcgccctactctccgcaacagaacggcgttgtcgagcggcgaaaccaatccgtggtgggcacggcgcggagtatgctcaaggcgaaggggctaccaggtatgttttggggagaggcgataaataccgccgtgtatctgctcaacaggtcgtcgtccaagggtatcggcggcaagaccccgtacgcgctgtggaatggcgttccgccggccgtgcaccatctgcgcacgtttgggtgtgtggcacacgtgaagacgaccaccccgaacctgaagaaactggatgacaggagttgtccaatgatctttgtcggctacgagccggggtccaaggcgtatcgcgcctatgatccggctactcggcgtgttcacatctcccgtgacatcgtcttcgacgaagcggcccagtgggactgggatgctgaggcggccgctgatctcgacaccgacttcgtcgttgagtacaccacggtgtaccatcctggctcgctgtcaggaacacgccaagatgctggggagccgcctgctcgatcttcatcatcgccgcgaacgccatcagactcaccgacagccggccgaacaccttcggtgcatggcgatgcgccggcggttgattttgtgtcgccaccaactggagcagctgctaatcttgatgcagaccacgacgacgcaccactccgtttccgcacgatggacaatgtgctggggccggccatgctgccaggtctcgctaatcgtgaggtccaggaagagctgatgatggtgagcggagaagaaccggcaacgttcgctcaagctgaacgcgacgaggattggcgtcgggcaatgctcgatgaaatctcttcgatagaggagaacaagacctggaggctcgtcgatctgccttcgggacatcggccaattgggctgaaatgggtgtataaactgaagaaagatgctcagggcgtcgtcgtcaaacacaaggcgagattggtggcaaagggctacgtgcagagggctggaattgactttgatgaggtattcgctcctgttgctcgtcttgattctattcgtttgttgctcgctctcgctgcgcaggaaggttggatggtgcatcatatggacgttaaatcagcgttcctcaatggggaactgattgaggaggtgtatgttgttcagccaccggggtttgagatcgatggacaggagaacaaggtttacaggcttgataaggcgttgtatggtcttcgccaagcacccagagcttggaacaccaagctagactgcacactgaagaaacttggcttcaagcaaagcccgttggagcatgggctgtacgcgcgcggcgatggcagtgggcgactgctcgtcggtgtgtatgtggatgatctggtaattgtcgggggtgacagtggcatgatcaagggattcaaagagcagatgaaggctgaatttaagatgagtgatcttggtcctttgagtttttatcttgggatcgaggtacatcaagaagctggaatcatcactttaaagcaagcagcgtatgcgtcgcgtattgtggagaaggctgggctcaccggctgcaacccctgtgcaacaccgatggaaccatgtctaaagctgagcaaggaaagtgcaggatcgctagttgatgcgacagaatacagaagtctagtgggaagcttgcgctatctggtgaacacccgaccagaccttgcatattcggttggttatgtcagtcgtttcatggagaaacccacggacgaacacttggcggcagtgaagcgcatcataaggtatgttgctggtaccattcatcttgggtgccgctatgtgaaggaaggtgaaggaggactgcagggttacagtgacagtgatatggctggagacattgacactcgcaagagcaccacaggagtaattttctttctcggcaaaaatcctgttagctggcagtctcaaaaacagagagttgtagcactctcctcctgtgaatctgagtatattgcagctgcaacagctgcatgccagggcatttggcttgcccggctcctcggtgacctcaggaatgcagcaactgaagtcgtcgatctcagggtggacaaccaatccgctctggccctgatgaagaaccctgtttttcacgatcgaagtaagcacattcaaacaaaatttcatttcattcgtgaagccgtggagaatggggaaatcacaccgagttacatcggcatagaagggcaacttgcagatatcctgacgaagccgctttctcgaatcaagtttcaggagctgcgggaacaaattggcttagccacagtacgcatgcgttgtgtcgtctggtttcctgctagcgatcgctggggaaattcctaa

SEQ ID NO: 15557 - DNA, 4536 bp, Oryza sativa
  Clone ID: TFbOSC400016j.C1.o3.fg
atgccgcgtcgtcgctcgtcgtcaccgatcgtgcgcactcctcatgactccggcggccgcgccacgggcagcggcgggggtgaccgcgggctggtgatccaccgcgtggtgaaagaaggaggcggctcggtgaactacccgctgctgaccaagaccaactacaacgactgggcgctactgatgaagatcaagctgcaggctcgctgcctgtgggcggcgatcaagcccgacggcgtggacgtccctctgcatgaggaccggatggctcttgacgctatctgcagtgccgtgccgccggagatgattggcaccctggcgaccaaagcgtcggcccgggaagcctgggaatgcatcaagacaatgcgagtcggcaacgaccggattcgcaaggcgagtgcacagaaagtgcgcgctgagtatgaatcgcttgcgttccgcggtgacgagaccgtggaagatttcgctctacggctcacaaccatcgtcaaccagcttgcaaccctcggtgatcctgaacctgctgataaagtcgtcgaaaagtaccttcgggtagctcgtcccaggttcaatcaactcatcttgtctattgaaactcttctcgatatctctactctgtccatggaggaagttactggcagactgaaagccgctgaggattctgggcaatcctcgtcgcacaccgccggtgggaagctgtacctaactgaggaggagtgggctgaacgtcagaagaagaaggatcaagaggcaaagcggggtgactcgggcggctctggcggccgcggcaagcgccgtggcgggagagggcgcactggtggcggcgggactgcgagccccgagagcacgaactctggttcggcgcgcaagggagacaaatgccgaaattgcggcaaacttgggcactgggcgaaggactgcaggagcaagtccaagcgcgaagaacaggctcacgtcgcccaggaggatgaagaagagcacaccttgatgttgctcaccggcggccgcgttgacacggtcgacgcggcggcgccggagggcgacacgcccacaccgccccaccaagccgtggtggaactcgtggagatgaaagtatttgcagcgctcgacgacgcggctgaccatgatcccgggcgctggattatggattccggcgcgtcaaaccatatgacgggcagcaggatggcgttcgccgacctcgacacgaacatcaccgggaacgtgcgactcggcgatggatccgtggtccggatcgcaggacggggcacaattctctttgcctgcaagaatggtgagcaccgcactctgtcgaacacctattatcttccccgtcttgctgccaatattatcagcattgggcaattggatgagaccggcttcaaagtgctggcggaggatggcatcatgcgggtctgggatgagcagcggcgtctgcttgcccggatccctcgcaccccagggcgactgtacatgcttgacatcaacctggcgcgccctgtctgtttggcggcacacgccgacgaagacgcgtggcgctggcatgctcgcctcgggcacataaacttcagggcgctctgcaagatgggcaaggaggagctggtacgtggtctaccatgtttgtcgcaggttgatcaggtctgtgaggcctgtctcgccgggaaacaccggaggtcgccgttcccgcggcaggcactttgccggtctgacgagccgctggcgctgctacatggagatctctgtggaccgatcacgccggcgacacccagtggcaaccgctatttccttctactcgtcgacgactacagccggtacatgtgggtcgccctcctctccaccaaagatgcggcgccggctgccatcaagcgtattcaggcggcggcagaaaggaagagtggacgcaagctccgcgcgttgcggacggatcgcgggggagaattcacgtctacacagttcgccgagtactgcgccgagctgggaatgcggcgcgagctcatggcgccctactctccgcaacagaacggcgttgtcgagcggcgaaaccaatccgtggtgggcacggcgcggagtatgctcaaggcgaaggggctgccaggaacacgccaagatgctggggagccgcctgctcgatcttcatcatcgccgcgaacgccatcagactcaccgacagccggccgaacaccttcggtgcatggcgatgcgccggcggttgaatttgtgtcgccaccaactggagcagctgctaatcttgatgcagaccacgatgacgcaccactccgtttccgcacgatggacaatgtgctggggccggccatgctgccaggtctcgctaatcgtgaggtccaggaagagctgatgatggtgagcggagaagaaccggcaacgttcgctcaagctgaacgcgacgaggattggcgtcgggcaatgctcgatgaaatctcttcgatagaggagaacaagacctggaggctcgtcgatctgccttcgggacatcggccaattgggctgaaatgggtgtataaactgaagaaagatgctcagggcgtcgtcgtcaaacacaaggcgagattggtggcaaagggctacgtgcagagggctggaattgactttgatgaggtattcgctcctgttgctcgtcttgattctgttcgtttgttgctcgctctcgctgcgcaggaaggttggatggtgcatcatatggacgttaaattagcgttcctcaatggggaactgattgaggaggtgtatgttgttcagccaccggggtttgagatcgatggacaggagaacaaggtttacaggcttgataaggcgctgtatggtcttcgccaagcacccagagcttggaacaccaagctagactgcacactaaagaaacttggcttcaagcagagcccgttggagcatgggctgtacgcgcgcggcgatggcagtgggcgactgctcgtcggtgtgtatgtggatgatctggtaattgtcgggggtgacagtggcatgatcaagggattcaaagagcagatgaaggctgaatttaagatgagtgatcttggtcctttgagtttttatcttgggatcgaggtacatcaagaagctggaatcatcactttaaagcaagcagcgtatgcgtcgcgtattgtggagaaggctgggctcaccggctgcaacccctgtgcaacaccgatggaaccacgtctaaagctgagcaaggaaagtgcaggatcgctagttgatgcgacagaatacagaagtctagtgggaagcttgcgctatctggtgaacacccgaccagaccttgcatattcggttggttatgtcagtcgtttcatggagaaacccacggacgaacacttggcggcagtgaagcgcatcataaggtatgttgctggtaccattcatcttgggtgccgctatgtgaaggaaggtgaaggaggactgcagggttacagtgacagtgatatggttggagacattgacactcgcaagagcaccacaggagtaattttctttctcggcaaaaatcctgttagctgccagtctcaaaaacagagagttgtagcactctcctcctgtgaatctgagtatattgcagctgcaacagctgcatgccagggcatttggcttgcccggctcctcggtgacctcaggaatgcagcaactgaagtcgtcgatctcagggtggacaaccaatccgctctggccctgatgaagaaccctatttttcacgatcgaagtaagcacattcaaacaaaatttcatttcattcgtgaagccgtggagaatggggaaatcacaccgagttacatcggcacagaagggcaacttgcagatatcctgacgaagccgctttctcgaatcaagtttcaggagctgcgggaacaaattggtttagccacaattgctcagtctcaagcgcccgatggggaaaaaggaaaaagtacatcaaaggtccctcaacttgacatcaaagatacaaaatcatcctccaaccgcaaaaccaggtacgggacgtcccttaactgtcaaaaccgggggatggacttgttggacactcttgtagttaggtttcatatgaagggggtattcattttagatgggactaagaagaaatattgtggtggatctgaggccctgtcttatatagatagagacaaagtatcattgcccgagttatttggacacctacgtgatcattgtagtgtgatgtctaggactttgttgcactggttgtttcctggtagagatttgcaaacaggtcttcgtgctctttcgaatgacaaggcttgcaaattgatgtgtgattgtactggagaattggatgtggcatatatctatgttgaagaaccagaaattgttgatttatgtgatgggtcagctgataacagtaattatgaggcagacatggaattaaaagtggacagtgaagaggagtatgtaaacatggatgttgaagttgatgttggtgaggctactggtagtgggtgcaagggtaaagcggttgaagaacatggtgaggctagtggtagtggatctagggcagaatag

SEQ ID NO: 15558 - DNA, 4245 bp, Oryza sativa
  Clone ID: TFbOSC400252j.C1.o3.np
atgccacaacaagcacttggagcacgctcttcaacgggctgctcgccggcgccgccgggggcaggatccggtacatgggcgccgtcgcccggagccgctgcgaacgtcaacgtcaacggaggcagttctgcctcacaatctagcggagggccattctcggggtatatctttctcctgctgttaactcattcgttcatacctctgttagtcatgttagtcgcaattctattgcgttcttggtatgtgcatgatgcttattataccttaagcatgctcctggttatgctacatttcatcactagatcaccccacattgttcatgccatgattattatcttaacattttggattaaaatatgccgatatatgactatatttccaacaatccaaaaacctgatgggtcattttcggtagttggctttgctgctacactgaaaccacatgcatttgatggttctaactataagaggtggaaagcacgtgcactattgtggttgacagcgatgcaatgcttctatgtttcatggggcaaacgaagtgaaccacctctctctcctaaggaagatgttaagtttgaagcttcaaattgcctgttccgtggagcattgatcagtgtactcgctgacaacatagtggacgtgtacattcacatgccttccgggaaggacatgtgggatgcacttgaggccaagttcggagtttccgacgccggcagtgagctatatgtcatggagcagttctatgactacaagatggttgatgaccgttctgtagtagaacaagctcatgagattcagatgctggctaaggaacttgagaacaacaactgtgagttgccagacaagtttgtggcgggtggcattattgccaagttgccaccttcttggtcagactttgccacttctctaaagcacaaacaagagtttagtgtttctgatctcattggctctttgggtgttgaggagaaggcgagggcaaaggacaaccggggcaaaaaggttgagggaggttctagtgccaatatggtacagaagaagaaccctcatgcatcccacaacaacaagaaagtcaagcttgatggcaaacccaaggctacaaccaattttaagaagaaaggcaagggaaaggcaaaggaagactgctttgtgtgtggcaagtctgggcattgggccaaggactgtcctgagcgcaaagaaaggaagtctgccaacatggttattagcgagggcggagaaacatcggggtaaggtaaaatattacctacagttctctctgtttttcactcacctgattggtgggttgatactggtgctaatattcatgtatgtgatgacgggagaggttcctccttgttgatgggaaacgggtcgcttgcggctgttcatggtgttggtacggtcgatctgaagtttacttcgggaaagaccgtgcaactgaagaacgtgcagcatgtcgcttcaacaaagaagaatcttgttagcggctctctattgtgtagagaaggttttagagttgttttttgaatcctataaatgtgtcgtatctaaatatggaacttttattggaaaaggttatgacagcagaggcttgttccacttttctttggatgatatgtgtaataatcataatgttgtgaaccatattagcgagaatgatgagtctaatgtgtggcattcgcgactctgtcatgtgaatttcggttgtacgacgcgcttagctaacatgagtttaattccaaaattcactttggtcaaagtttctaagtgccatacttgtgttcaatcgaaacaacctcgcaagcctcacaaggcatttgaggcgaggaatttggcacttctagaacttgttcattccgatttgtgcgaaatgaacggcgtgttgactaaagggggaaagaaatatttcatgacactgatagatgattgcactagattttgttatgtgtatctattgaaaacaaaggatgaagcattgcattactttaagacctataaagctgaagtagaaaaccaacttgaaaggaaatcaaacggttgaggtctgatagaggtggggagtatttttccaatgagtttgcatccttttgcgaagagtttggaattatccatgagaggacgcctccctatccaccccaatcaaatggggtggccgaaagaaagaactgtactctaactgagatggtgaatgccatgttagacactgcggagctttccaaggaatggtggggtgaggcagttttgactgcgtgttatatcctgaataaaattccaatgaagtataaggaagtgacaccattcgaggaatgggaaaggaaaaaattaaatctctcatacctacgaacatggggctgtttggccaaggtaagtgtacctatagccaaaaagcgaaaacttagaccaaatactgttgattgtatgttccttggttatgctatttacagtgtgggttatagattcttaatagtaaactctggagtacctgacatgcgtgttggtacaattattgagtccagagatgctatattctttgataatgaatttcccatgaaacatacacctagcacttctagtcaagaaactgtcataccccatgagcactttgcaccgatagaacacaatgatcaaacgcctgagggaaatcctgaggacaacattgtagatactcttaagagtaagagacaaagggttgcaaaatcctttggagatgactatattgtatacctcgtggataacaccccaagaaccatagaagaggcatatttatctcctgacgctgactactggaaggaagcagtacgcagtgagatggactcgattatgtctaatgatacttgggaagtcgttgagtatccatatgggtgcaagcctgtaggatgtaaatgggttttcaagaaaaagcttaggcctgatggtacaattgaaaagtacaaggtaaggcttgtggccaaggattatacccaaaaggaaggcgaggattttttcgacacatactcactagttgctcgcttgaccacgattcgattactacttgctctggcagcctctcatggtcttctcgtccatcaaatggacgttaagacagctttcctaaacggagagctggaggaggagatctatatggatcaaccagacgggtatgtactagaaggtcaggagggaatggtgtgtaaactgttcaaatccttgtatggccttaagcaagcacctaaacaatggcatgagaagtttgacactacacttacatctgcaggctttgttgataacgaagctgacaaatgtgtgtactatcgtcatggtgggggagaaggagtgatcttgtgcttatatgtcgatgacatattgatcttttggaccagcctcaatgtgattgaggaggtcaaggactatctgtccaagagttttgaaatgaaggatttgggagaggctgatgttattcttaacattaagctaccaagaggatatgagggtgggattacacttgtgcaatcccactatgtggacaaggttttgactcctactccttatgatcccagcgtgctattaaggaaaaaccgaagaatagcaagggatcaactgagatactctcaaatcattggttcattgatgtacttggctagtgcaacgaggcctaacatctcatttgctgtaagcaagctgagccggtttgtctcaaatccgggagatgatcattggcaggctctggaaagagtaatgcgctatttaaagggcactatgagctatggaattcactataccgggtacccaaaagtactagaagggtatagtgactcaaactggatatctgatgctgatgagataaaagccacaagtggatatgtgttcacacttggaggtggcgctgtttcctagaagtcttacaagcagaccatcttaacgaggtcaacaatggaagcagaactcacagcactagatactgcgacagttgaggccgagtggcttcgtgaactcctgatggatttgccggtggttgaaaaaccagtgtcagctatcctaatgaactgtgataatcaaatagtgattattacagtgaacagttcaaaggacaacatgaagtcatctaggcatatcaagagaagactgaaatctgtcagaaagtagaaaaactccggagtgatagcattggactatgtccaaacggctaataatctggcagatcagtttaccaaggggctaccacgtaatgtgatagacagtgcatcgaggaaaatgggcttgatacccacc

SEQ ID NO: 15559 - DNA, 4500 bp, Oryza sativa
  Clone ID: TFbOSC401205j.C1.o5.fg
atgagggtatccgagtttagctcgttgcccgcgtcttgtgctgggagctcggatcacgtcgtgtggttgtggggatggacgcagctagagcatggcgtgagaagtggtcttggtggtttagccacacgatcgctggggaaattcctaacaattggtatcagagcacggtttaggaagtggactcgtgaccgcgcattggaaggcgtcttcttgccgcgtcgtcgctcgtcgtcaccgatcgtgcacactcctcatgactccggcggccgcgccacgggcagcggcgggggtgaccgcgggctggtgatccaccgcgtggtgaaagaaggaggcggctcggtgaactacccgctgctgaccaagaccaactacaacgactgggcgctactgatgaagatcaagctgcaggctcgctgcctgtgggcggcgatcgagcccgacggcgtggacgtccctctgcatgaggaccggatggctcttgacgctatctgcagtgccgtgccgccggagatgattggcaccctggcgaccaaagcgtcggcccgggaagcctgggaatgcatcaagacaatgcgagtcggcaacgaccggattcgcaaggcgagtgcacagaaagtgcgcgctgagtatgaatcgcttgcgttccgcggtgatgagaccgtggaagatttcgctctacggctcacaaccatcgtcaaccagcttgcaaccctcggtgatcctgaacctgctgataaagtcgtcgaaaagtaccttcgggtagctcgtcccaggttcaatcaactcatcttgtctattgaaactcttctcgatatctctactctgtccatggaggaagttactggcagactgaaagccgctgaggattctgggcaatcctcgtcgcacaccgccggtgggaagctgtacctaactgaggaggagtgggctgaacgtcagaagaagaaggatcaagaggcaaagcggggtgactcgggcggctctggcggccgcggcaagcgccgtggcgggagagggcgcactggtggcggcgggactgcgagccccgagagcacgaactctggttcggcgcgcaagggagacaaatgccgaaattgcggcaaacttgggcactgggcgaaggactgcaggagcaagtccaagcgcgaagaacaggctcacgtcgcccaggaggatgaagaagagcacaccttgatgttgctcaccggcggttgcgttgacacggtcgacgcggcggcgccggagggcgacacgcccacaccgccccaccaagccgtggtggaactcgtggagatgaaagtatttgcagcgctcgacgacgcggctgaccatgatcccgggcgctggattatggattccggcgcgtcaaaccatatgacgggcagcaggatggcgttcgccgacctcgacacgaacatcacttggaacgtgcgactcggcgatggatccgtggtccggatcgcaggacggggcacaattctctttgcctgcaagaatggtgagcaccgcactctgtcgaacacctattttcttccccgtcttgctgccaatattatcagcattgggcaattggatgagaccggcttcaaagtgctggcggaggatggcatcatgcgggtctgggatgagcagcggcgtctgcttgcccggatccctcgcaccccagggcgactgtacatgcttgacatcaacctggcgcgcccggtctgtttggcggcacacgccgacgaagacgcgtggcgctggcatgctcgcctcgggcacataaacttcagggcgctctgcaagatgggcaaggaggagctggtacgtggtctaccatgtttgtcgcaggttgatcaggtctgtgaggcctgtctcgccgggaaacaccggaggtcgccgttcccgcggcaggcactttgccggtctgacgagccgctggcactgctgcatggagatctctgtggaccgatcacgccggcgacacccagtggcaaccgctatttccttctactcgtcgacgactacagccggtacatgtgggtcgccctcctctccaccaaagatgcggcgccggctgccatcaagcgtattcaggcggcggcagaaaggaagagtggacgcaagctccgcgcgttgcggacggatcgcgggggagaattcacgtctacacagttcgccgagtactgcgccgagctgggaatgcggcgcgagctcacggcgccctactctccgcaacagaacggcgttgtcgagcggcgaaaccaatccgtggtgggcacggcgcggagtatgctcaaggcgaaggggctgccaggtatgttttggggagaggcgataaataccgccgtgtatctgctcaacaggtcgtcgtccaagggtatcggcggcaagaccccgtacgcgctgtggaacggcgttccgccggccgtgcaccatctgcgcacgtttgggtgtgtggcacacgtgaagacgaccaccccgaacctgaagaaactggatgacaggagtcgtccaatgatctttgtcggctacgagccggggtccaaggcgtatcgcggctatgatccggctactcggcgtgttcacatctcccgtgacatcgtcttcgatgaagcggcccagtgggactgggatgctgaggcggccgctgatctcgacaccgacttcgtcgttgagtacaccacggtgtaccatcctggctcgctgtcaggaacacgccaagacgctggggagccgcctgctcgatcttcatcatcgccgcgaacgccatcagactcaccgacagccggccgaacaccttcggtgcatggcgatgcgccggcggttgaatttgtgtcgccaccaactggagcagctgctaatcttgatgcagaccacgacgacgcaccactccgtttccgcacgatggacaatgtgctggggctggccatgctgccaggtctcgctaatcgtgaggtccaggaagagctgatgatggtgagcggagaagaaccggcaacgttcgctcaagctgaacgcgacgaggattggcgtcgggcaatgctcgatgaaatctcttcgatagaggagaacaagacctggaggctcgtcgatctgccttcgggacatcggccaattgggctgaaatgggtgtataaactgaagaaagatgctcagggcgtcgtcgtcaaacacaaggcgagattggtggcaaagggctacgtgcagagggctggaattgactttgatgaggtattcgctcctgttgctcgtcttgattctgttcgtttgttgctcgctctcgctgcgcaggaaggttggatggtgcatcatatggacgttaaatcagcgttcctcaatggggaactgattgaggaggtgtatgttgttcagccaccggggtttgagatcgatggacaggagaacaaggtttacaggcttgataaggcgctgtatggacttcgccaagcacccagagcttggaacaccaagctagactgcacactgaagaaacttggcttcaagcagagcccgttggagcatgggctgtacgcgcgcggcgatggcagtgggcgactgctcgtcggtgtgtatgtggatgatctggtaattgtcgggggtgacagtggcatgatcaagggattcaaagagcagatgaaggctgaatttaagatgagtgatcttggtcctttgagtttttatcttgggatcgaggtacatcaagaagctggaatcatcactttaaagcaagcagcgtatgcgtcgcgtattgtggagaaggctgggctcaccggctgcaacccctgtgcaacaccgatggaaccacgtctaaagctgagcaaggaaagtgcaggatcgctagttgatgcgacagaatacagaagtctagtgggaagcttgcgctatctggtgaacacccgaccagaccttgcatattcggttggttatgtcagtcgtttcatggagaaacccacggacgaacacttggcggcagtgaagcgcatcataaggtatgttgctggtaccattcatcttgggtgccgctatgtgaaggaaggtgaaggaggactgcagggttacagtgacagtgatatggctggagacattgacactcgcaagagcaccacaggagtaattttctttctcggcaaaaatcctgttagctggcagtctcaaaaacagagagttgtagcactctcctcctgtgaatctgagtatattgcagctgcaacagctgcatgccagggcatttggcttgcccggctcctcggtgacctcaggaatgcagcaactgaagtcgtcgatctcagggtggacaaccaatccgctctggccctgatgaagaaccctgtttttcacgatcgaagtaagcacattcaaacaaaattacatttcattcgtgaagccgtggagaatggggaaatcacaccgagttacatcggcacagaagggcaacttgcagatatcctgacgaagccgctttctcgaatcaagtttcaggagctgtgggaacaaattggtatgtttcctgtataa

SEQ ID NO: 15560 - DNA, 4341 bp, Oryza sativa
  unsure (1)..(4341): unsure at all n locations
  Clone ID: TFbOSC401652j.C1.o3.fg
atgccgcgtcgtcgctcgtcgtcaccgatcgtgcgcactcctcatgactccggcggccgcgccacgggcagcggcgggggtgaccgcgggctggtgatccaccgcgtggtgaaagaaggaggcggctcggtgaactacccgctgctgaccaagaccaactacaacgactgggcgctactgatgaagatcaagctgcaggctcactgcctgtgggcggcgatcgagcccgacggcgtggacgtccctctgcatgaggaccggatggctcttgacgctatctgcagtgccgtgccgccggagatgattggcaccctggcgaccaaagcgtcggcccgggaagcctgggaatgcatcaagacaatgcgagtcggcaacgaccggattcgcaaggcgagtgcacagaaagtgcgcgctgagtatgaatcgcttgcgttccgcggtgacgagaccgtggaagatttcgctctatggctcacaaccatcgtcaaccagcttgcaaccctcggtgatcctgaacctgctgataaagtcatcgaaaagtaccttcgggtagctcgtcccaggttcaatcaactcatcttgtctattgaaactcttctcgatatctctactctgtccatggaggaagttactggcagactgaaagccgctgaggattctgggcaatcctcgtcgcacaccgccggtgggaagctgtacctaactgaggaggagtgggctgaacgtcagaagaagaaggatcaagaggcaaagcggggtgactcgggcggctctggcggccgcggcaagcgccgtggcgggagagggcgcactggtggcggcgggactgcgagccccgagagcacgaactctggttcggcgcgcaagggagacaaatgccgaaattgcggcaaacttgggcactgggcgaaggactgtaggagcaagtccaagcgcgaagaacaggctcacgtcgcccaggaggatgaagaagagcacaccttgatgttgctcaccggcggccgcgttgacacggtctacgcggcggcgccggagggcgacacgcccacaccgccccaccaagccgtggtggaactcgtggagatgaaagtatttgcagcgctcgacgacgtggctgaccatgatcccgggcgctggattatggattccggcgcgtcaaaccatatgacgggcagcaggatggcgttcgccgacctcgacacgaacatcaccgggaacgtgcgactcagcgatggatccgtggtccggatcgcaggacggggcacaattctctttgcctgcaagaatggtgagcaccgcactctgtcgaacacctattatcttccccgtcttgctgccaatattatcagcattgggcaattggatgagaccggcttcaaagtgctggcggaggatggcatcatgcgggtctgggatgagcagcggcgtctgcttgcccggatccctcgcaccccagggcgactgtacatgcttgacatcaacctggcgcgcctggtctgtttggcggcacacgccgacgaagacgcgtggcgctggcatgctcgcctcgggcacataaacttcagggcgctctgcaagatgggcaaggaggagctggtacgtggtctaccatgtttgtcgcaggttgatcaggtctgtgaggcctgtctcgccgggaaacaccggaggtcgccgttcccgcggcaggcactttgccggtctgacgagccgctggcgctgctacatggagatctctgtggaccgatcacgccggcgacacccagtggcaaccgctatttccttctactcgtcgacgactacagctggtacatgtgggtcgccctcctctccaccaaagatgcggcgccggctgccatcaagcgtattcaggcggcggcagaaaggaagagtggacgcaagctccgcgcgttgcggacggatcgcgggggagaattcacgtctacacagttcgccgagtactgcgccgagctgggaatgcggcgcgagctcacggcgccctactctccgcaacagaacggcgttgtcgagcggcgaaaccaatccgtggtgggcacggcgcggagtatgctcaaggcgaaggggctaccaggtatgttttggggagaggcgataaataccgccgtgtatctgctcaacaggtcgtcgtccaagggtatcggcggcaagaccccgtacgcgctgtggaatggcgttccgccggccgtgcaccatctgcgcacgtttgggtgtgtggcacacgtgaagacgaccaccccgaacctgaagaaactggatgacaggagttgtccaatgatctttgtcggctacgagccggggtccaaggcgtatcgcgcctatgatccggctactcggcgtgttcacatctcccgtgacatcgtcttcgacgaagcggcccagtgggactgggatgctgaggcggccgctgatctcgacaccgacttcgtcgttgagtacaccacggtgtaccatcctggctcgctgtcaggaacacgccaagatgctggggagccgcctgctcgatcttcatcatcgccgcgaacgccatcagactcaccgacagccggccgaacaccttcggtgcatggcgatgcgccggcggttgattttgtgtcgccaccaactggagcagctgctaatcttgatgcagaccacgacgacgcaccactccgtttccgcacgatggacaatgtgctggggccggccatgctgccaggtctcgctaatcgtgaggtccaggaagagctgatgatggtgagcggagaagaaccggcaacgttcgctcaagctgaacgcgacgaggattggcgtcgggcaatgctcgatgaaatctcttcgatagaggagaacaagacctggaggctcgtcgatctgccttcgggacatcggccaattgggctgaaatgggtgtataaactgaagaaagatgctcagggcgtcgtcgtcaaacacaaggcgagattggtggcaaagggctacgtgcagagggctggaattgactttgatgaggtattcgctcctgttgctcgtcttgattctattcgtttgttgctcgctctcgctgcgcaagaaggttggatggtgcatcatatggacgttaaatcagcgttcctcaatggggaactgattgagaaggtgtatgttgttcagccaccggggtttgagatcgatggacaggagaacaaggtttacaggcttgataaggcgttgtatggtcttcgccaagcacccagagcttggaacaccaagctagactgcacactgaagaaacttggcttcaagcaaagcccgttggagcatgggctgtacgcgcgcgncgatggcagtgggcgactgctcgtcggtgtgtatgtggatgatctggtaattgtcgggggtgacagtggcatgatcaagggattcaaagagcagatgaaggctgaatttaagatgagtgatcttggtcctttgagtttttatcttgggatcgaggtacatcaagaagctggaatcatcactttaaagcaagcagcgtatgcgtcgcgtattgtggagaaggctgggctcaccggctgcaacccctgtgcaacaccgatggaaccatgtctaaagctgagcaaggaaagtgcaggatcgctagttgatgcgacagaatacagaagtctagtgggaagcttgcgctatctggtgaacacccgaccagaccttgcatattcggttggttatgtcagtcgtttcatggagaaacccacggacgaacacttggcggcagtgaagcgcatcataaggtatgttgctggtaccattcatcttgggtgccgctatgtgaaggaaggtgaaggaggactgcagggttacagtgacagtgatatggctggagacattgacactcgcaagagcaccacaggagtaattttctttctcggcaaaaatcctgttagctggcagtctcaaaaacagagagttgtagcactctcctcctgtgaatctgagtatattgcagctgcaacagctgcatgccagggcatttggcttgcccggctcctcggtgacctcaggaatgcagcaactgaagtcgtcgatctcagggtggacaaccaatccgctctggccctgatgaagaaccctgtttttcacgatcgaagtaagcacattcaaacaaaatttcatttcattcgtgaagccgtggagaatggggaaatcacaccgagttacatcggcatagaagggcaacttgcagatatcctgacgaagccgctttctcgaatcaagtttcaggagctgcgggaacaaattggcttagccacagtacgcatgcgttgtgtcgtctggtttcctgctagcgatcgctggggaaattcctaa

SEQ ID NO: 15561 - DNA, 4570 bp, Oryza sativa
  Clone ID: TFbOSC401885j.C1.o1.fg
ggaaaagaacttctgggcgcgacaccacggcactccggagcacgctccaagcgccgccgcagccgacatcgtcgtcgttccgaccaccgtagaccaaaccaagccgagccgtcgcgccaacgtcttctctgttagcagtaatcttgtgtgccacggtttagccacacgatcgctggggaaattcctaacaattggtatcagagcacggtttaggaagtggactcgtgaccgcgcattggaaggcgtcttcatgccgcgtcgtcgctcgtcgtcaccgatcgtgcgcactcctcatgactccggcggccgcgccacgggcagcggcgggggtgaccgcgggctggtgatccaccgcgtggtgaaagaaggaggcggctcggtgaactacccgctgctgaccaagaccaactacaacgactgggcgctactgatgaagatcaagctgcaggctcgctgcctgtgggcggcgatcgagcccgacggcgtggacgtccctctgcatgaggaccggatggctcttgacgctatctgcagtgccgtgccgccggagatgattggcaccctggcgaccaaagcgtcggcccgggaagcctgggaatgcatcaagacaatgcgagtcggcaacgaccggattcgcaaggcgagtgcacagaaagtgcgcgctgagtatgaatcgcttgcgttccgcggtgacgagaccgtggaagatttcgctctacggctcacaaccatcgtcaaccagcttgcaaccctcggtgatcctgaacctgctgataaagtcgtcgaaaagtaccttcgggtagctcgtcccaggttcaatcaactcatcttgtctattgaaactcttctcgatatctctactctgtccatggaggaagttactggcagactgaaagccgctgaggattctgggcaatcctcgtcgcacaccgccggtgggaagctgtacctaactgaggaggagtgggctgaacgtcagaagaagaaggatcaagaggcaaagcggggtgactcgggcggctctggcggccgcggcaagcgccgtggcgggagagggcgcactggtggcggcgggattgcgagccccgagagcacgaactctggttcggcgcgcaagggagacaaatgccgaaattgcggcaaacttgggcactgggcgaaggactgcaggagcaagtccaagcgcgaagaacaggctcacgtcgcccaggaggatgaagaagagcacaccttgatgttgctcaccggcggctgcgttgacacggtcgacgcggcggcgccggagggcgacacgcccacaccgccccaccaagccgtggtggaactcgtggagatgaaagtatttgcagcgctcgacgacgcggctgaccatgatcccgggcgctggattatggattccggcgcgtcaaaccatatgacgggcagcaggatggcgttcgccgacctcgacacgaacatcaccgggaacgtgcgactcggcgatggatccgtggtccggatcgcaggacggggcacaattctctttgcctgcaagaatggtgagcaccgcactctgtcgaacacctattatcttccccgtcttgctgccaatattatcagcattgggcaattggatgagaccggcttcaaagtgctggcggaggatggcatcatgcgggtctgggatgagcagcggcgtctgcttgcccggatccctcgcaccccagggcgactgtacatgcttgacatcaacctggcgcgcccggtctgtttggcggcacacgccgacgaagacgcgtggcgctggcatgctcgcctcgggcacataaacttcagggcgctctgcaagatgggcaaggaggagctggtacgtggtctaccatgtttgtcgcaggttgatcaggtctgtgaggcctgtctcgccgggaaacaccggaggtcgccgttcccgcggcaggcactttgccggtctgacgtgccgctggcgctgctacatggagatctctgtggaccgatcacgccggcgacacccagtggcaaccgctatttccttctactcgtcgacgactacagccggtacatgtgggtcgccctcctctccaccaaagatgcggcgccggctgccatcaagcgtactcaggcggcggcagaaaggaagagtggacgcaagctccgcgcgttgcggacggatcgcgggggagaattcacgtctacacagttcgccgagtactgcgccgagctgggaatgcggcgcgagctcacggcgccctactctccgcaacagaacggcgttgtcgagcggcgaaaccaatccgtggtgggcacggcgcggagtatgctcaaggcgaaggggctgccaggtatgttttggggagaggcgataaatactgccgtgtatctgctcaacaggtcgtcgtccaagggtatcggcggcaagaccccgtacgcgctgtggaacggcgttccgccggccgtgcaccatctgcgcacgtttgggtgtgtggcacacgtgaagacgaccaccccgaacctgaagaaactggatgacaggagtcgtccaatgatctttgtcggctacgagccggggtccaaggcgtatcgcgcctatgatccggctactcggcgtgttcacatctcccgtgacatcgtcttcgacgaagcggcccagtgggactgggatgctgaggcggccgctgatctcgacaccgacttcgtcgttgagtacaccacggtgtaccatcctggctcgctgtcaggaacacgccaagacgcttgggagccgcctgctcgatcttcatcatcgccgcgaacgccatcagactcaccgacagccggccgaacaccttcggtgcatggcgatgcgccggcagttgaatttgtgtcgccaccaactggagcagctgctaatcttgatgcagaccacgacgacgcaccactccgtttccgcacgatggacaatgtgctggggccggccatgctgccaggtctcgctaatcgtgaggtccaggaagagctgatgatggtgagcggagaagaaccggcaacgttcgctcaagctgaacgcgacgaggattggcgtcgggcaatgctcgatgaaatctcttcgatagaggagaacaagacctggaggctcgtcgatctgccttcgggacatcggccaattgggctgaaatgggtgtataaactgaagaaagatgctcagggcgtcgtcgtcaaacacaaggcgagattggtggcaaagggctacgtgcagagggctggaattgactttgatgaggtattcgctcctgttgctcgtcttgattctgttcgtttgttgctcgctctcgctgcgcaggaaggttggatggtgcatcatatggacgttaaatcagcgttcctcaatggggaactgattgaggaggtgtatgttgttcagccaccggggtttgagatcgatggacaggagaacaaggtttacaggcttgataaggcgctgtatggtcttcgccaagcacccagagcttggaacaccaagctagactgcacactgaagaaacttggcttcaagcagagcccgttggagcatgggctgtacgcgcgtggcgatggcagtgggcgactgctcgtcggtgtgtatgtggatgatctggtaattgtcgggggtgacagtggcatgatcaagggattcaaagagcagatgaaggctgaatttaagatgagtgatcttggtcctttgagtttttatcttgggatcgaggtacatcaagaagctggaatcatcactttaaagcaagcagcgtatgcgtcgcgtattgtggagaaggctgggctcaccggctgcaacccctgtgcaacaccgatggaaccacgtctaaagctgagcaaggaaagtgcaggatcgctagttgatgcgacagaatacagaagtctagtgggaagcttgcactatctggtgaacacccgaccagaccttgcatattcggttggttatgtcagtcgtttcatggagaaacccacggacgaacacttggcggcagtgaagcgcatcataaggtatgttgctggtaccattcatcttgggtgccgctatgtgaaggaaggtgaaggaggactgcagggttacagtgacagtgatatggctggagacattgacactcgcaagagcaccacaggagtaattttctttctcggcaaaaatcctgttagctggcagtctcaaaaacagagagttgtagcactctcctcctgtgaatctgagtatattgcagctgcaacagctgcatgccagggcatttggcttgcccggctcctcggtgacctcaggaatgcagcaactgaagtcgtcgatctcagggtggacaaccaatccgctctggccctgatgaagaaccctgtttttcacgatcgaagtaagcacattcaaacaaaatttcatttcattcgtgaagccgtggagaatggggaaatcacaccgagttacatcggcacagaagggcaacttgcagatatcctgacgaagccgctttctcgaatcaagtttcaggagctgcgggaacaaattggtttagccacagtacgcgtgcgttgtgttcgtctggtttcctgctag

SEQ ID NO: 15562 - DNA, 1248 bp, Oryza sativa
  Clone ID: TFbOSC401980j.C1.o15.fg
atgtcaggtacaagttccgacgaaccaacactggagaatctagcgcataaactgaagggtatggaaaattggtatgaagagttgatgcgtaatagtaaatcatacaaggaaagcacagataaacatttaaaaaccttaagtgaaagcctggtgaaagtagtggatcaaattgagaaaatgaatcaatcacataaacaattaactgaaaacattcagaatatgattattgaacatgaaaatattgtgcgacgcattggtttacttgaggctgcaggtgaagaaggtgcaggtgccactgctcatcgacaccaaagatatgacgatgaagacgaagagcaatctgttgctgatgatgtggaggaagacgagagtgttggaaatagaagacaacgtcgagttagggacaaagatgatcctttatctaaggtaaaatttactatgccttcttttgatgaaacatactatcaagagatgatgattgctttgtcacgatgtgatttgcaagaaactgaggatgctagaatttctaggttctatggaagtcttaatagagagattcgggatattcttgaatataaagaatacaataccatgaatagattattccattttgcatgcaaagctgaaagagaagtgcagggacgcaacaagcatagaagttcttttgcaggtgctacttccacacgacagtcaacaccacgtcaagctactactgccgttcgttcacctacttctacgccatccaatgctcaagaaaaaagcaaaaacgcttcagttcagactccagccaagagtgcaacttcagtagcttccactggacgtacccgtgatattacatgtcataagtgccatggcattggacacattgcacgtgactgtccaaatcggcgagctctatttgtgaatgatgatggtgagtatacttctactagtgattgtgatgatgaatatgctttagctgccactgaccacgcaggaggacaagataatgatgacatcgaggaagtccatttgcatccagagtcgctagatcagtatcctagcctaattgtcaagctagcacttagtgctaaagagaagtgtgaagagcaaaaccaatgtcacaatttgttccaaagcaaagttcttgtgaaagaccataccgtcaaaatgattattgatagcgggagttgcaacaatttagcaagtgaagagatggtcaagaagcttggcttgactacccatccacctccacgaattagcacttaa

SEQ ID NO: 15563 - DNA, 1248 bp, Oryza sativa
  Clone ID: TFbOSC900308j.C1.o9.fg
atgtcaggtacaagttccgacgaaccaacactggagaatctagcgcataaactgaagggtatggaaaattggtatgaagagttgatgcgtaatagtaaatcatacaaggaaagcacagataaacatttaaaaaccttaagtgaaagcctggtgaaagtagtggatcaaattgagaaaatgaatcaatcacataaacaattaactgaaaacattcagaatatgattattgaacatgaaaatattgtgcgacgcattggtttacttgaggctgcaggtgaagaaggtgcaggtgccactgctcatcgacaccaaatatatgacgatgaagacgaagagcaatctgttgctgatgatgtggaggaagacgagagtgttggaaatagaagacaacgtcgagttagggacaaagatgatcctttatctaaggtaaaatttactatgccttcttttgatgaaacatactatcaagagatgatgattgctttgtcacgatgtgatttgcaagaaactgaggatgctagaatttctaggttctatggaagtcttaatagagagattcgggatattcttgaatataaagaatacaataccatgaatagattattccattttgcatgcaaagctgaaagagaagtgcagggacgcaacaagcatagaagttcttttgcaggtgctacttccacacgacagtcaacaccacgtcaagctactactgccgttcgttcacctacttctacgccatccaatgctcaagaaaaaagcaaaaacgcttcagttcagactccagccaagagtgcaacttcagtagcttccactggacgtacccgtgatattacatgtcataagtgccatggcattggacacattgcacgtgactgtccaaatcggcgagctctatttgtgaatgatgatggtgagtatacttctactagtgattgtgatgatgaatatgctttagctgccactgaccacgcaggaggacaagataatgatgacatcgaggaagtccatttgcatccagagtcgctagatcagtatcctagcctaattgtcaagctagcacttagtgctaaagagaagtgtgaagagcaaaaccaatgtcacaatttgttccaaagcaaagttcttgtgaaagaccataccgtcaaaatgattattgatagcgggagttgcaacaatttagcaagtgaagagatggtcaagaagcttggcttgactacccatccacctccacgaattagcacttaa

SEQ ID NO: 15564 - DNA, 960 bp, Oryza sativa
  Clone ID: TFbOSC10377j.C1.o4.fg
atggcgactgagtgcttagggtttcaagagagggcgactccagtgggagagtcctcgtcggtcctcccccgccggcgatcgccggagaagggtctgcctagaggatacacccacgcggatatcctcacggtagctgcccgtggtccagttagttctggcgcaaaaatttcgggtgaatttgcacacgaattccggcccgagagacctagcaatggcggtgggagcccgatggctacagtgcagcccagagtcgcgagaggcccagcgagttccacgatgatgaattgcggaaaaaaagtgggtgagattaatttggaggatattttccccaaatttcgccccactgagccgcaaaagtggatctggatcaagcgaggtgaggttcgccctcttctagggttcccggcgagagacgacgagatccggcgttttggcgacggagctcgtcggatttggaaggtgcccgagaagaggtgtgatcaccgcaccttcgcccaggttgtgatggagcgtcgtcctcccaatcgcctggattggcaagccaacaagcgacgagcgacagagcaaggcggcggcgattggggtgcacgaggcggaggtgactggggggcgtgcggagctcgcgaggaggaggaactgcatcggcaactccttgctcaaaaccctagggcgaatcaaggtgctcaatggaaacctcaagggctccctggtaccgatggagagaggggggcaagagctcctaagatcaagtgcttcaagtgtggtcgtgagggccatcaccaggcggcgcgccctaacccttccctctgctactcgtgccatagctcaggtcatatttcttcccaatgccccttgatgatgagaaagggtgttaaactttgtggttttggcattccgggacaggggttctatagtttgaatgttgagttgtctgatatgagattgctaaagcccctgtga

SEQ ID NO: 15565 - DNA, 1908 bp, Oryza sativa
  Clone ID: TFbOSC420025j.C1.o1.fg
atggtaacgccggcaccgccggggggctgggacttctcccccggtgatgcaattcgagaggaagttcgtcttcgatttcgttctccggtgcatttctcttcaaagttctgccctacacacttccggttagttgatctcccgagagccaattttcggctaaccaattcttctgtggctttggctttaagagccgccattggtggttctcctgcggatcttaatgaccagcatttgttagaccggagtttctcttttgatgtttgctctaagcaagttggtctatggatttatcgtcttagatctttttcctgtgatgattttgcccttcgtttttatctatggagaaatgggggtcctaattggcaatgggaatttgagtcttggagccgtgattgtgctgaggagtggacattggtctcttctaagaagaggttggtgcacaacagttctaaggttcagaaagggaaatcttatgcccaagctgttcaacaaagagacgtcttggttaaatcagtgtttcaacatttgaaggcccctctccaggagagaagatcggttttcacgagacttcaagggttgaaggttcctatcgccggtgaaactccggcgaccaagacggtggagccaatcatggaggaagatcctatttctgcgcgtaacttgaattcaaatttcatgctttcctgtacgcgttgtttggataagggccatattgcttctgattgctctgagcctgtttggtgccattcttgcctggaggctggtcatatggcccgtttctgtgccactaggcctgctaaggcccatcaacctgtggggaagtttccaaaactgagttctcggaataacttagtttggagagctaaatcttctccggccaaaaagatggcggtttatccccgtatcccttcctctcccaggaacactgttcaatctaatccccaaaacttcccctcgcttgcaatggctaatctcaaccctaacccgcaacgttttcttcgtcaagggcaagtggttcatcaaggtggtaacttgcgtgtgccgcgtgttgatctcaccatcccacagcgtctgccccgacgccatgaggatgcctgcatcgccattgtggagccggccatccctgagcatgaatgggatcatcaccgggcgcttatctcggatcacctttttgaagtacacatgtatgaggttcgtactgcttaccgtcacccttcggcagttggtatgttccagcttcgttcggtcatgcatagagatgcgttagtaaactctccccctgctgcgtatgatgggatgcatactgttgagtttgtgaagcatgaccaagggccgaactggcgtgcttgccactttaatcaagaaggctggtttcttctcttggatttcccactagattttgtcgatcatcaccatataaatctagcagtagcttcttttggacaactttctttctggcttgatagggaccagatgttgggcagagtgtttgtgagagcaaagtatagagatcttgactcggtcccccggaaaatagtgttgcaggatcctttgggtaatggtggtggaggtgaatcatggactatttctatttttgtactagatggggattttgctgacattccacctgaagaggatttacctcctgctggactgcagcctgggcctaatgaggataatgctgatgacccagatgatggaaatatttggcaactgggacatcctggtaatcaggggggagggggtgcttgggatgatctcgtgcaacagcaacaggcggcggaagcagaaatagaggatgcttggggtcaggatcacccaatgggccaggttgaagaaaacccgggacaattgattatcttgcctaatcaaaaggagcaggagcttaatctgtttgaacaggagtaa

SEQ ID NO: 15566 - DNA, 3026 bp, Oryza sativa
  Clone ID: TFbOSC17665j.C1.o1.np
atgtcgaacgaggtgaaccatgtagggaaggctcccatgtttaatggcacaaactactccacttggaaaattaaaatgtctactcacctcaaagctatgagtttccatatttggagtattgtggatgtaggctttactatcaccgacacgcccttgacggagattgatcaccacaacctccaactcaatgcccaagctatgaatgctttgttcaactctttgagccaagaggagttcgatagagtgagcaaccttaagaccgcatatgagatttggaacaagttggcggagatccatgagggcacaagcgagtacaaggatgccaagcttcatttcctaaagatccaatatgagacattctccatgctcaatgtcattgtgaatgatctcaaggggcttggggcaaactacatcgatcttgaggttgcccaaaagatgcttagacctctaccggagaagtatgagacccttgtcaccatgctcatcaactccgacatgtcaaggatgacactcgcaagcctcttggggaagatcaacaccaatgacatgtacaagttgaagaaggaggagatgaaggaagcctcaccttccaagaagtgcattgctctccaagccgaagttgaagacaagggcaagggcaaggtaaatgaagccaatgaggacttggaggaagagattgcccttcttgctagaaggttcaatgatctcttgggaaggagaaaggagagaggaagaggctctaactccaataggagaagaaatagaagacccaagaagactctctccaacttgagctccaagaagaagaagatggccgttgttgccatcaaggaggctccatcactctttgctccactttgtctcatggcaaagggctcctctaaggtaatatctcttagtgatggtgggagtgatgatgattgtgatgatgtttcctatgatgagcttgtgagtatgtttgaggagctctatgcttatagtgagaaggagattgtcaagttcaaggatctaaagaaggatcatgcttctttggaggtcttgtatgaggagctaaagacttctcatgagagactcaccatttctcatgagaagcttaaggaagctcatgacaacctcctttccactacttaacatagagctctcattgatgttggcatatcttgtgatttgcttgatgatagtgctacttgccatattgctcatgttgcatcatctagcatttctacctcttttaatgatcttgtggatatgcctagctctggctctagcccttgtgtttctatttgtgatgcctcacttgttgttgagaacaataagcttaaggagtgtcgtgaggttgggcatttggtgaatgattgccccggtagtaagccccctaagacatgcatgtttgattcccattatatgcttaggaaggcttatgatggtagcattgttgctagatatgtggattcccctatactcggtggtaaaaagaatgccatttgggtgcccaaagctttagtctctaatctccaaagacccaaacaagtttgggtgaactaccgcaccggtgggagcctgtcacaccctgaagttcttttcccaagcctaaattgaatatttaattggcctcaagaaaatatcggtgtaaaagcaagagagaaaccctaaataaattaatgcgaataatagtcggaattggcatgtgggacagagccattggatgcttgatagtggatgcacttaacacatgaccggtgatagggctatgttcaccacatttgaagtaggagggaatgaacaagagaaagtgacttttgaagacaatagcaaaggaaaggtaattgggaggctagcccatgttggcatgaatcaattgagcaaactttcaaaatgtgatctagttgtgggcttgaaagatgtgaagtttgagaaagataagctttgtagtgcttgtcaagccggcaagcaagttgcatgttctcatcctactaaaagtatcatgtccacatctagaccattggagctcttgcatatggatttgtttggcccaacaacctataagagcattggtggaaatagtcattgtcttgtgattgttgatgattattctcgctatacttgggtgttctttttgcatgataagtctattgttgccgagcttttcaaaaagtttgcaaaaaaggcccaaaatgaatttagttgcactcttgtgaaaattagaagtgacaatggttccgagtttaagaataccaatatcgaggactattgtgatgatcttggtattaaacacgaactttccgctacctactcacctcaacaaaatggtgtagtggagaggaaaaatcgtacattgattgagatggcaaggactatgcttgatgaatatggtgtttccgatttcttttgggcggaagccataaataccgcttgccatgcaatcaataggctttatttgcatcgtctcttgaaaaagacttcctatgagctaattgttgggaggaagccaaatgttgcctattttcgagtttttggttgcaagtgttatatttatcgaaagggtgttagactaaccaaatttgaaagtcggtgtgatgaagggtttcttctaggttatgcctcaaatagcaaggcataccgggtctacaacaagaacaaaggtattgtggaagaaaccgccgatgttcaatttgatgagactaatggctcccaagaggggcacgagaatttggatgatgtaggtgatgaaggcttgatgagagctatgaagaacatgtcaattggagatgtcaagcctattgaagtagaagacaagccatccacctccactcaagatgagccatctacttccgctacgccaagtcaagctcaagttgaagtggaggaggagaaggcacaaaatccacctatgccaccaaggatacacaccgttctttccaaggatcacccaattgactaagtgttgggtgacattagtaagggtgttcaaactcgatctcgtgtcgcttcgatttgtgaacattactcgtttgtttcttgtcttg

SEQ ID NO: 15567 - DNA, 648 bp, Oryza sativa
  Clone ID: TFbOSC30726j.C1.o1.fg
atgagggcagaaataccaccaaaaccgatgccacattcaccctatccaaaacctatgtatcagcaatttcgtagacaaggaactacaccacattggtggaagggaaaacggaaaagaaaagcgtcatcactaataacatatgctgaacttgatctcagtaaaatgggaatagaaatcggtgatttgcctgaagaagttgaagagctacaactatggcaacgaaagagagatggctgttgtttttcttgtggacaatttggacattatgcgataggctgtactcaagacaccaatgaagaacaagaaacactgccttcacagatcagcccggaagagcatagagtttcagacccatccaaagaagtttcgaagattaaggcatatagtcgttgcggagagataggacactacggtagtaattgcgttactcaatgcccctactgtgacgaagaccatcaaaatggagaatgccctacaacgaagatcgcgtgcttcctttgcgaaaagacggatcatgtgccacaagactgccaactaagtccgttgctgaccaagacagcggaagtacaaagagtgtcgcttcgcttcgctcatcaactcatgacgtccggaagccacgaagaccctggatttcctacattcgattag

SEQ ID NO: 15568 - DNA, 4715 bp, Oryza sativa
  Clone ID: TFbOSC400850j.C1.o68.np
atggctagccgtccccgccgtgcagctcgtgcaccagcccgctttggttttgaggatggtagagttgagccagaagaaaatcatgagtcggctaatgaacagtcacaccacagcaatagttcgcaccgtactgtttcccgcaacgcagaggttgagcaaccccgccgcagcaaccgctcgcatcgcacagtttcccgtgatgcagagatggaacagtctcaccgctctcaccgcactgccagtcacaattctggagaagaacgcctcccttccccacctcatgtggaaaccaacatgcaacacttaatggcagttcagacacaaatcttgcaaggactaaccacagccatagccagttttcagcataatgcgcatggaaatggccaccctcacatgggcaacaacagatccaagctgacagactttctgaggtctcgtccgccagagttctctcagaccatcgagcccgtcgaggctgacgattggttgaaagatgttgatagaaaactcaacttagtgcagtgtactcctgttgagaagacgctctacgcctctcaccagctaagaggacctgccgcagattggtcggagaattactgcaatgcacaccctgaacccactaacattgcttgggatgagttcgctacggctttccgtgcagctcacgtgcctgaaagcactattgacatgaagaaagaagaattcaacagacttaagcaaggcaacagcagtgtcaatgagtacctaagtcagttcaacaagttggctcggtacgcccctgaggaagtggacacagacaagaagaagatcaggaaattcttgaaaggaatcgcagttggaatgagactccagttgattgctcatgacttccccacctttcaacacatgatcaacaaggcacttctacttgaggatgccagaaaagaggccaccgaagaatacaagaagcgcaagtctaaccatcagggaaattcttcccgaggcgcacctcgccctcgctacggtcaacccatgcaataccatcagtcggtcactcaggctaaccaccagccaggctacgcccctcgtcctcagataaaccgtccggcacctcagccacagaagcatgcccctagtggcaatactgcgcctaacagtgttacctctttcaaatcaccgcagggaccgtcagcagttcagtgtttccggtgcaaccagatgggtcactatgttagacagtgtcctcagaatcctaccaacaccaactcaggacatgctaatggcagcactgccaaaactcctactccagcggcagctcagtctcgtccaagctctcaggcaagtggacaaggttcacgtgcttccaacaacattggtcgaggccgcgtgaatcacatccaagctgaaaccgcccaggatgctccagacgttgtgatgggtatgttctctgtcaactccgtacccgcaatagttctgtttgattcgggagcttcccattctttcatatcgcaagcttttgtgaaaagaaatggttggaaaacccaaaatttgcgtgtaccaatgatagtacattcccctggaaggaatataagggcaactcaaatatgcccggaagttaaccttagaattgaggaagttgacttcctagccaaaccgatagtcctagactcgcaaagcttggacatcatcctagggatggattggttggctaagcacaaaggacagatagattgtgccgaaaagtccatcaccttgcaaggacctggaggaaagcaagtccgctttacccctaacacccctaccgcaagtcagtctatcctaacctgtttacaagtcacctccttggagtcggtgcccatagtctgtgaatatcccgacgtatttccggaagaattaacaagaatgccaccagaccgagagatcgagttcgccatagaactggcaccaggcacagctccaattgcaaaaagaccctaccgaatggcagctaatgagttagcagaagtcaaaagacaaatcgaagagttggagagtaaaggttatgtgcgacctagctcatccccttggggagccccagtgcttctggttaagaaaaaggatggctctgagagaatggtaatcgactatagagccctgaatgaagtaactataaataacaagtacccgttgccacggattgacgatttattcgatcaacttaaaggagcaagagttttctcaaaaattgacttgaggtcaggttaccaccaattgaaaatcaggtctgaagatatcccgaagaccgctttctcaacgcgttatggtctatatgagttcacagttatgtccttcggactcaccaatgctccagcattcttcatgaacttaatgaacaaaatctttatggaatacctggaccagtttgtcgtggtgttcatcgatgacatcctgatatactccaagagcgaggaggaacatgctgaacacctgaggctgataatggaaaagctcagagatcatcaactattcgctaaattctcgaaatgcgaattctggttagaccgagtagcatttcttggacacgtaatctcctccaacggtgtcgaagtagatcccagcaaggttgaagctgtacttgcttggaacccgcccaagaatgtgtcagagattcgcagcttccttggcttagcgggatattatcgaagattcattgaaggattctctaagctagccagacctatgaccgagctgttaaggaaggaaaagaaatttcaatggtctgcagcctgtgaagacagctttcaagaaatgaagaaaaggttgaccactgccccagttcttaccttgccagatatccaaaagatttcgagatcttctgtgacgcatcaagacaaggcttaggatgtgtcctaatgcaagaacgaaaggttgtggcctatgcatccaggcagctcaggcctcatgaagtcaattatcccacccatgatctcgagttggcagccgtggttcatgctcttaagatctggaggcactatttaatcgggaacagatgtgaagtatacaccgatcacaaaagtcttaagtatattttcacacagaccgagttaaatatgagacagagaagatggttggaactaatcaaggattacgatcttggaatccactatcatcctggtaaagccaacgtggtcgctgatgcgctaagtcgcaaggcctattgcaatgtagctcaaatacggcctgaccaagatcatctgtgcagagaattggagaagttaagactgaccgtggtacagtcaggagtccctgccagcttgacagtacagcctaccctagaatcgcaaatccgggaggctcagaaagatgacgaagggataaaagagttaataaaaagaatacaggataagaaagacaccaatttctccatagacgatcaaggcacagtttggtgcggtccacgcatctgtgtaccggccaaaaaggagttaagagatctcatcctaaaggaagctcatgagtccgcttactccattcatccaggaagtacgaagatgtaccaagatatcaaggcatacttctggtgggctggaatgaagcgagatgtcgcagaatacgtagccttgtgtgacatttgccaaagagtcaaggcagagcatcagaggccagctggtctgctgcaacccctaccgattcccgagtggaaatgggaagagatcggaatggatttcatcaccggtttgccaagaacccccagcgggtacgactccatttgggtaatcgtggaccgactcatgaaatcagctcatttcgtgccagtaaaaaccacctttgatggaaagaaactagcagaactctacatgacccatgtcgtatgtagatttggctgtcccaagaaaattgtgtcagaccgaggcactcagttcacctcaaggttctggaagcagttgcatgaagccctcggaactgatctgaattttagtacggcctaccatccgcagaccgatggtcagacagaaagggtaaaccaaatcctagaagacatgctacgagcgtgtgccttggatttcgaaggcacttgggatcgttgtttaccgtacgcggagttctcatacaacaacagttatcaggccagcattcagatgtcgccgaatgaggcaatgttcggaagaaagtgccgcactcccttgtgctggaatgaggtgggcgaagccctggtattcggtcctgacatactcaagtcagcagaagaacaagttaagctaatccgagaacgattaaagacagcgcagaaccgtcagaagaattacgctgacaatcggaggcgtgaccttgagttcgaaaaaggagatcatgtatacctgcgggtatcacccctccgtggtataaagaggtttgggatgtccggcaagttagcaccccgctacatcggcccctacctcataaccgccagacgtggcgaagtggcttatcagcttgagctacctgaaggtctcgcagatgtgcacaacgtgttccacgtatcccagttaaagaaatgtctacgagttccagaagagcaagttcccctgggtaatatcgagctggaaaggaatctgacctacaaggaaagaccgatcaaggttcttgaagaggcagaacgtcagactcgaaggaagaccatcaagttctacaaagtccaatggagcaatcattctgaagatgaggcaacatgggaacgagaagatcttctccgcgccgagtttccggagctgctccct

SEQ ID NO: 15569 - DNA, 3630 bp, Oryza sativa
  Clone ID: TFbOSC415532j.C1.o8.fg
atgtctggagttgccgccgccgctgctggaggagatggcggaggtggtgcgccgccgacaggagccggagctggtgcgccaggaggtgccgtgaacgacaacaacaacggaggcaattctgcctcaccatccagcggagagccattctcggggacattttcggtagttggctttgctgctgcactgaaaccacatgcttttgatggttcaaactataagagatggaaagcacgtgcactattgtggttgacagcgatgcagtgcttctatgtttcacggggcaaacgaagtgaaccacctctttctcctgaggaagaggctaagttcgaggcttcggattgcctgttccgtggagcattgatcagtgtactcgctgacaacatagtggacgtgtacatgcacatgccttctgggaaggacatgtgggatgcacttgaggccaagttcggagtttctgacgccggcagtgagttgtatgtcatggagcagttctatgactataaaatggtcgatgaccgttctgtagtagaacaagctcatgagattcagatgctggctaaggaacttgagaacaacaactgtgaattgccggacaagtttgtggcgggtggcattattgccaaactaccaccttcttggtcggactttgccacttctctaaagcacaagagacaagagttcagtgtttctgatctcattggctctttgggtgttgaggagaaggcgagggcaaaagacgtccggggcaaaaaggttgagggaggttctagtgccaatatggtacagaagaagaaccctcatgcatcccacaacaacaagaaagtcaagcttgatgtcaaacccaaggctgcaaccaattttaagaagaaaggcaagggaaaggcaaagggagactgctttgtgtgtggcaagtctgagcattgggccaaggactgtccagagcgcaaagacaggaagtctgccaacatggtcattagcgagggcggaggaacatcggggtatggtaaaatattacctacagttctctctgtttttcattcacctgattggtgggtggacactggtgctaatattcatgtcgggagaggttcctccttgttgatgggaaatgggtcgcttgcggctgttcatggtgttggtacggtcgatctgaagtttacttcgggaaagaccgtgcagctgaagaacgtgcagcatgtcccttcaataaagaagaatctagttagcggctctctattgtgtagagaaggttttagacttgtgtttgagtccaataaatgtgtcgtatctaaatatgggacttttgttggaaaaggttatgacagcggaggcttgttccgcttttctttgaatgacatgtgtaataatcataatgctgtgaaccatattagcgagaatgatgagtctaatgtgtggcattcacgactctgtcatatgaatttcggttgtatgacgcgcttagctaacatgagtttaattccaaaattcactttggtcaaaggttccaagtgccatacttgcgttcaatcgaaacaacctcgcaagcctcacaaggcatctgaggcgaggaatttggcacctctagaacttgttcattccgatttgtgcgaaatgaacggcgtgttgactaaagggggaaagaaatatttcatgacactgatagatgattgcactagattttgctatgtgtatctattgaaaacaaaggatgaggcattgcattactttaaaatctataaagctgaggtagaaaaccaacttgaaaggaaaatcaaacggttgaggtctgatagaggtggggagtatttttccaatgagtttgcatccttttgcaaagagtttggaattattcatgagaggacgcctccctattcaccccaatcaaatggggtggccgaaagaaagaaccgtactctaactgagatggtgaatgccatgttagacactgcggggctttccaaggaatggtggggtgaggcagttttgactgcgtgtcatgtcctgaataaaattccaatgaagtataaggaagtaacaccattcgaggaatgggaaaggaagaaattaaatctctcatacctacgaacatggggctgtttggccaaggtaaatatacctatagccaaaaagcggaaacttggaccaaatactgttgattgtgtgtcccttggttatgctatccacagtgtgggttatagattcttaatagtaaactctggagtacccgacatgcatgttggtacaattcttgagtccagagatgctacattctttgagaatgaatttcctatgaaacatacacctagcacttctagtaaagaaactgtcatgccccatgagcactttgcaccgatagaacacaatgatcaaacgcctgaggaaaatcctgaggaggacaacattgtagatactcgcaagagtaagagacaaagggttgcaaaatcctttggagatgactacattgtatacctcgtggatgacactccaagaaccatagaagaggcatattcatctcctgacgctgactactggaaggaagcagtacgcagtgaaatggactcgattatgtctaatggtacttgggaagtcgttgagcgtccatatgggtgcaagcccgtaggatgcaaatgggttttcaagaaaaagcttaggcctgatggtacaatcgaaaagtacaaggcaaggcttgtggccaagggttatacccaaaaggaaggcgaggacttcttcgacacatactcaccaattgctcgcttgaccacgattcgagtactacttgctctggcagcctctcatggtcttctcgtccatcagatggacgttaagacagctttcttaaacggagagctggaggaggagatctatatggatcaaccagacgggtatgtactagaatgtcaggagggaatggtgtgtaaactgttgaaatccttgtatggcctcaagcaagcacctaagcaatggcatgagaagtttgacaccacgcttacatctgcaggctttgttgtgaacgaagctgacaaatgtgtatactatcgctatggtgggggagaaggggtgatcttgtgcttatatgtcgatgacatattgatctttgggaccagccttaatgtgattgaggaggtcaaagactatctgtccaagagttttgaaatgaaggatttgggagaggctgatgttattcttaacatcaaactacaaagaggagatgagggtgggattacacttgtgcaatcccactatgtggacaaggttttgagtcgctttggatatagtgactgcaagccagctcctactccttatgatcccagcgtgctattaaggaaaacccgaagaatagcaagggatcaactgagatactctcaaatcattggttcattgatgtacttggctagcacaacgaggcctgacatctcatttgttgtaagcaagctgagccggtttgtctcaaatctgggagatgatcattggcaggctctagaaagagtaatgcgctatctaaagggcactatgagctatggaattcattataccgggtatccaaaagtactagaagggtatagtgactcaaactggatatctgatgctgatgagataaaagccacaagtggatatgtgttcacactttga

SEQ ID NO: 15570 - DNA, 2940 bp, Oryza sativa
  Clone ID: TFbOSC419079j.C1.o8.fg
atgagtcaagttggagatagcttggtctcggaatatagtggagcattgatcagtgtactcgctgacaatataatggacgtgtatatgcacatgccttcagggaaggacatgtgggatacacttgaggccaaatttggagtttccgacgccggtagtgagctgtatgtcatggagcagctctatgactacaagatggtcgatgaccgttctatagtagaacaagctcatgagattcaaatgctggctaaggaacttgagaacaacaactgtgagttgccggacaagtttgtggcgggtggcattattgccaaattgccaccttcttggtcggactttgccacttctctaaagcacaagagacaagagttcagtgtttctgatctcattggctctttgggtgttgaagagaagacgagggcaaaggacaaccggggcaaaaaggttgagggaggttctagtgccaatatggtacagaagaagaatcctcatgcatcccacaacaacaagaaagtcaagcctgatgtcaaacccaaggctacaaccaattttaagaagaaaggcaagggaaaggctaagggagactgctttgtgtgtggcaagtctgagcattgggccaaggactgtcctgagcgcaaagacaggaagtctgccaacatggtcgggagaggttcctccttgttgatgggaaacgggtcacttgcggctgttaatggtgttgttacggtcgatctgaagtttacttcgggaaagaccatgcagctgaagaacgtgcagcatgtcccttcaatagagaagaatctagttagcggctctctactgtgtagagaaggttttagacttgtgtttgaatccaataaatgtgtcatatttaaatctggaacttttattggaaaaggttacgacagcggaggcttattccgcttttctttggatgacatgtgtaataataataatgttgtgaaccatattagcgagaatgatgagtccaatgatgaagcattgcattactttaagacctataaagctgaggtagaaaaccaacttgaaaggaaaatcaaacggttaaggtctgatagaggtggggagtttttttccaatgagtttacatctttttgcgaagagtttggaattattcatgagaggacgcctccctattcaccccaatcaaatggggtagccgaaagaaagaaccgtactctaactgagatggtgaatgccatgttagacactgcgggactttccaaggaatggtggggtgaggcagttttgactacatgtcatgtcctgaataaaattccaatgaagcataaggaagtaacaccattcgaggtatgggaaaggaagaaattaaatctctcatacctaagaacatggggctgtttggccaaggtaaatatacctatagccaaaaagcgtaaacttggaccaaatactgttgattgtgtgtttcttggttatgctattcacagcgtgggttatagattcttaatagtaaactctagagtacccgacatgcgtgttggtacaattattgagtccagagatgctacattctttgagaatgaatttcccatgaaaaatacacctagcacttctagtcaagaaactgtcatacccaatgagcactttgcaccgatagaacacaatgatcaaacgcctgagggaaatcctgaggaggataacattgtagatactcgtaagacctctcatggtcttctcatccatcagatggacgttaagacagctttcctaaacggagagctggagaaggagatctatatggatcaaccagacgggtatgtactagaaggtcaggagggaatggtgtgtaaactgttgaaatccttgtatggccttaagcaagcacctaagcaatggcatgagaagtttgagaccacacttacatctgctggctttgttgtgaacgaaactgacaaatgtgtgtactatcgctatggtgggggagaaggattgatcttgtgcttatatgtcgatgacatattgatctttgggaccagtctcaatgtgattgaggaggtcaagaactttctgtccaagagttttgaaatgaaggatttgggagaggctgatgttattcttaacattaagctactaagaggagatgagggtgggattacacttgtgcaatcccactatgtggacaaggttttgagtcgttttggatatagtgactgcaagccagctcctactccttatgatcccagcgtgctattaaggaaaaaccgaagaatagcaagggatcaactgagatactctcaaatcattggttcattgatgtacttggctagtgcatcgaggcctgacatctcatttgccgtaagcaagctgagccggtttgtctcaaatccgggagatgatcattggcaggctctggaaagagtaatgcgctatctaaagggcactatgagctatggagttcactatatcgggaacccaaaagtactagaagggtacagtgactcaaactggatatctgatgctgatgagataaaagccacaagtggatatgtgttcacacttggaggtggcgttgtttcctggaagtcttgcaagcagaccatcttaacgaggtcaacaatagaagcagaacttacagcactagatactatgacagttgaggccgagtggcttcgtgaactcctgatggatttgccaatggttgaaaaaccagtgccagctatcctaatgaactatgataatcaaacaataattattaaagtgaacagttcaaaggacaacatgaagtcatctagtaatatcaagagaagaccgaaatctgtcagaaagcagaaaaactccggagtgatagcattggactatgcccaaacggctaaaaatctgacagatcagtttaccaaggggctaccatgtaatgtgatagacagtacatcgaggggaatgggcttgatatccacctaa

SEQ ID NO: 15571 - DNA, 2575 bp, Oryza sativa
  Clone ID: TFbOSC900115j.C1.o1.fg
atgtctggagttgccgccgccgctgctggaggagatggcggaggtggtgcgccgccgacaggagccggagctggtgcgccaggaggtgccgtgaacgacaacaacaacggaggcaattctgcctcaccatccagcggagagccattctcggggacattttcggtagttggctttgctgctgcactgaaaccacatgcttttgatggttcaaactataagagatggaaagcacgtgcactattgtggttgacagcgatgcagtgcttctatgtttcacggggcaaacgaagtgaaccacctctttctcctgaggaagaggctaagttcgaggcttcggattgcctgttccgtggagcattgatcagtgtactcgctgacaacatagtggacgtgtacatgcacatgccttctgggaaggacatgtgggatgcacttgaggccaagttcggagtttctgacgccggcagtgagttgtatgtcatggagcagttctatgactataaaatggtcgatgaccgttctgtagtagaacaagctcatgagattcagatgctggctaaggaacttgagaacaacaactgtgaattgccggacaagtttgtggcgggtggcattattgccaaactaccaccttcttggtcggactttgccacttctctaaagcacaagagacaagagttcagtgtttctgatctcattggctctttgggtgttgaggagaaggcgagggcaaaagacgtccggggcaaaaaggttgagggaggttctagtgccaatatggtacagaagaagaaccctcatgcatcccacaacaacaagaaagtcaagcttgatgtcaaacccaaggctgcaaccaattttaagaagaaaggcaagggaaaggcaaagggagactgctttgtgtgtggcaagtctgagcattgggccaaggactgtccagagcgcaaagacaggaagtctgccaacatggtcattagcgagggcggaggaacatcggggtatggtaaaatattacctacagttctctctgtttttcattcacctgattggtgggtggacactggtgctaatattcatgtcgggagaggttcctccttgttgatgggaaatgggtcgcttgcggctgttcatggtgttggtacggtcgatctgaagtttacttcgggaaagaccgtgcagctgaagaacgtgcagcatgtcccttcaataaagaagaatctagttagcggctctctattgtgtagagaaggttttagacttgtgtttgagtccaataaatgtgtcgtatctaaatatgggacttttgttggaaaaggttatgacagcggaggcttgttccgcttttctttgaatgacatgtgtaataatcataatgctgtgaaccatattagcgagaatgatgagtctaatgtgtggcattcacgactctgtcatatgaatttcggttgtatgacgcgcttagctaacatgagtttaattccaaaattcactttggtcaaaggttccaagtgccatacttgcgttcaatcgaaacaacctcgcaagcctcacaaggcatctgaggcgaggaatttggcacctctagaacttgttcattccgatttgtgcgaaatgaacggcgtgttgactaaagggggaaagaaatatttcatgacactgatagatgattgcactagattttgctatgtgtatctattgaaaacaaaggatgaggcattgcattactttaaaatctataaagctgaggtagaaaaccaacttgaaaggaaaatcaaacggttgaggtctgatagaggtggggagtatttttccaatgagtttgcatccttttgcaaagagtttggaattattcatgagaggacgcctccctattcaccccaatcaaatggggtggccgaaagaaagaaccgtactctaactgagatggtgaatgccatgttagacactgcggggctttccaaggaatggtggggtgaggcagttttgactgcgtgtcatgtcctgaataaaattccaatgaagtataaggaagtaacaccattcgaggaatgggaaaggaagaaattaaatctctcatacctacgaacatggggctgtttggccaaggtaaatatacctatagccaaaaagcggaaacttggaccaaatactgttgattgtgtgtcccttggttatgctatccacagtgtgggttatagattcttaatagtaaactctggagtacccgacatgcatgttggtacaattcttgagtccagagatgctacattctttgagaatgaatttcctatgaaacatacacctagcacttctagtaaagaaactgtcatgccccatgagcactttgcaccgatagaacacaatgatcaaacgcctgaggaaaatcctgaggaggacaacattgtagatactcgcaagagtaagagacaaagggttgcaaaatcctttggagatgactacattgtatacctcgtggatgacactccaagaaccatagaagaggcatattcatctcctgacgctgactactggaaggaagcagtacgcagtgaaatggactcgattatgtctaatg

SEQ ID NO: 15572 - DNA, 3687 bp, Oryza sativa
  Clone ID: TFbOSC400060j.C1.o7.fg
atgtctggagttgccgccgccactgctggcggtggtggtacgccgccgacaggagctggatccggagctggtgcgccaggaggtgccgtgaacgacaacaacaacggaggcaattctgcctcaccatccagcggagggccattctcggggtatactcttctcctcctgctactgttgttagcgctattcctgttcccattgttagcgctatcgctatactatgtgcgctatgttcttgttcctgttctacataatgcctctagcatgttatcgtgttactggtatgttcctgttcctgacattcatgatgcgcatagtatgctactggttatgttaagatcaccctacactgcttatgccatgatcattgctttaactttttggattaaaatatgccgattaatgactatatttccaacaatccaaaaacctgataggtcattttcggtagttggctttgctgctgcactgaaaccacatgcttttgatggttcaaactataagagatggaaagcacgtgcactattgtggttgacagcgatgcagtgcttctatgtttcacggggcaaacgaagtgaaccacctctttctcctgaggaagaggctaagttcgaggcttcggattgcctgttccgtggagcattgatcagtgtactcgctgacaacatagtggacgtgtacatgcacatgccttctgggaaggacatgtgggatgcacttgaggccaagttcggagtttctgacgccggcagtgagctgtatgtcatggagcagttctatgactacaagatggtcgatgaccgttctgtagtagaacaagctcatgagattcagatgctggctaaagaacttgagaacaacaactgtgagttgccggacaagtttgtggcgggtggcattattgccaaactaccaccttcttggtcggactttgccacttctctaaagcacaagagacaagagttcagtgttcctgatctcattggctctttgggtgttgaggagaaggcgagggcaaaggacgtgcggggcaaaaaggttgagggaggttctagtgccaatatggtacagaagaagaaccctcatgcatcccacaacaacaagaaagtcaagcctgatgtcaaacccaaggctgcaaccaattttaagaagaaaggcaagggaaaggcaaagggagactgctttgtgtgtggcaagtatgggcattgggccaaggactgtcctgagcgcaaagacaggaagtctgccaacatggtcattagcgagggcggaggaacatcggggtacggtaaaatattacctacagttctctctgtttttcattcacctgattggtgggtggatactggtgctaatattcatgtcgggagaggttcctccttgttgatgggaaacgggtcgcttgcggctgttcatggtgttggtacggtcgatctgaagtttacttcgggaaagaccgtgcagctgaagaacgtgcagcatgtcccttcaataaagaagaatctagttagcggctctctattgtgtagagaaggttttagacttgtgtttgagtccaataaatgtgtcgtttctaaatatgggacttttgttggaaaaggttccaagtgccatacttgtgttcaatcgaaacaacctcgcaaggctcacaaggcgtctgaggcgaggaatttggcacctctagaacttgttcattccgatttgtgcgaaatgaacggcgtgttgactaaagggggaaagaaatatttcatgacactgatagatgattgcactagattttgctatgtgtatctattgaaaacaaaggatgaggcattgcattactttaaaatctataaagctgaggtagaaaaccaacttgaaaggaaaatcaaacggttgaggtctgatagaggtggggagtatttttccaatgagtttgcatccttttgcgaagagtttggaattattcatgagatgatgcctccctattcaccccaatcaaatggggtggccgaaagaaagaaccgtactctaactgagatggtgaatgccatgttagacactgcggggctttccaaggaatggtggggtgaggcagttttgactgcgtgtcatgtcctgaataaaattccaatgaagcataaggaagtaaatgtacctatagccaaaaagcggaaacttggaccaaaaactgttgattgtgtgttttttggttatgctatccacagtgtgggttatagattcttaatagtaaactctggagtacccgacatgcatgctggtacaattcttgagtctagagatgctacattctttgagaatgaatttcctatgaaatatacacctagcacttctagtaaagaaactgtcatgccccatgagcactttgcaccgatagaacacaatgatcaaacgcctgaggaaaatcctgaggaggacaacattgtagatactcgcaagcgtaagagacaaagggttgcaaaatcctttggagatgactacattgtatacctcgtggatgacaccccaagaaccatagaagaggcatattcatctcctgacgctgactactggaaggaagcagtacgcagtgaaatggactcgattatgtctaatggtacttgggaagtcgttgagcgtccatatgggtgcaagcccgtaggatgcaaatgggttttcaagaaaaaacttaggcctgatggtacaatcgaaaagtacaaggcaagacttgtggccaagggttatacccaaaaggaaggcgaggacttcttcgacacatactcaccagttgctcgcttgaccacgattcgagtactacttgctctggcagcctctcatggtcttctcgtccatcagatggacgttaagacagctttcctaaacggagagctggaggaggagatctatatggatcaaccagacaggtatgtactagaaggtcaggagggaatggtgtgtaaactattgaaatccttgtatggcctcaagcaagcaccaaagcaatggcatgagaagtttgacaccacgcttacatctgcaggctttgttgtgaacgaagctgacaaatgtctatactatcgctatggtgggggagaaggggtgatcttgtgcttatatgtcgatgacatactgatctttgggaccagccttaatgtgattgaggaggtcaaagactatctgtccaagagttttgaaaagaaggatttgggagaggctgatgttattcttaacatcaaactacaaaaaggagatgagggtgggattacacttgtgcaatcccactatgtggacaaggttttaagtcgctttggatatagtgactgcaagccagctcctactccttatgatcccagcgtgctattaaggaaaaaccgaagaatagtaagggatcaactgagatactctcaaatcattggttcattgatgtacttggctagcgcaacgaggcctgacatctcatttgctgtaagcaagctgagccggtttgtctcaaatccgggagatgatcattggcaggctctggaaagagtaatgcgctatttaaagggcactacgagctatggaattcactataccgggtatccaaaagtactagaagggtatagtgactcaaactggatatctgatgctgatgagataaaagccacaagtggatatgtgttcacacttggaggtggcgctgtttcctggaagtcttgcaagtag

SEQ ID NO: 15573 - DNA, 780 bp, Oryza sativa
  Clone ID: TFbOSC400775j.C1.o8.fg
atgtcgactgatggaggcgtaaacggtggacatgtcggtggcggtactggaggaggcgagaacgacaacatcaacggaggcaacaacaacaatagcaatatctcattctctggagcattctctagcaaaccgagtgaaccgcctctctctcctaaggaggaggctatgttcgagtctgcggattgcttgttccatggagcattgatcagtgtactagctgacaatatattggacgtttacatgcacatgccttcagcgaaggatatgtgggatgcagttgaggccaagttcggagtttccgatgctggcaagttcggtgttactgatctcattggctctttgggtgttgaggagaaggtgagggcaaaggacaaccccgataaaaagatcaagagaggttctagcgctaacttggtgcaaaagaagaaccctaatgcaccccacaacaataacaagaaagtcaaacgtgatgtcaaactaaaggcaacaaccaattttaagaagaaatgcaagggaaaggcgaagggcaactgctttgtgtgcggtaagtctgggcattgggccaaggattgtcctgatcacaacgacaaaaagtctgcaaacatggtcattagcgagggcgaaggaacatcggggtacggtaaatttttacctacagttctctctattttccactcacctgattggtgggttgatacttttcgacattttaggtcacgactacggtatttgcatggtttggagatcgttggtgccagggtatatgcgagattgaagtaa

SEQ ID NO: 15574 - DNA, 2229 bp, Oryza sativa
  Clone ID: TFbOSC402610j.C1.o17.fg
atgtcgacaaccggcgacaacaacaacactggagacaaggagaaggagcctcccgtcaacaccaacagaggcaataccgcctcaaactccagcggagggccattatcaggtgtactcgctgacaatatagtggatgtgtacatgcacatgccttcggggaaggacatgtgggatgcacttgaggccaagttcggagttttcgacgccggcagcgagctttatgtcatggagcaattctatgactacaagatggtcgatgaccgttctgtagtggaacaggctcatgagattcagatgttggcaaaggaacttgagaacaacaattgtgagttgccggacaagtttgtggcggctggcattattgccaagttgccaccttcttggtcggactttgctacttctctaaaacacaagaggcaagagttcggtgttactgatctcattggctctttgggtgttgaggagaaggcgagggcaaaggacaaccggagtaaaaagatcaagggaggttctagcgccaatttggtgcagaagaagaaccctcacgcatcccacaacaacaacaagaaagtcaaacctgacgtcaaacccaaggctacaaccaattttaagaagaaaggcaagggaaaggcaaaaggagattgctttgtgtgtggcaagtatgggcattgggccaaggattgtcctgagtgcaaggataagaagtctgcaagcatggttattggtgagggcggaggaacattgaggtatggtaaatttttacctacagttctctttgtctgtcactcacctgattggtgggttgatactggtgctaatattcatgtcgggagatgttcctccttgttgatgggaaacggatcgcttgcagctgttcatggtgttggttatgacagcggaggcttgtttcgcttttccttggatgatatgtgtaataaagttgtcaaccatgatgaagcattacattactttaagatctataaggctgaggtagaaaaccaaactggaaaggaaaatcaaacggttgagtatggaattattcatgagaggacgcctccctattcaccccagtcaaacggggtagccgaaagaaagaaccgcactctaactgagatggtgaatgccatgttagacactgcaggactttccaaggaatggtggggtgaggcaatattgactgcgtgtcatgtcctgaatagaattcctactaagcataaggaagtaacacaattcgaggaatgggaaaggaagaaattaaatctctctcacctgcgcacatggggctatttggccaaggtaaatgtacctatagccaaaaagcgtaaacttggaccaaagaccgtagattgtgtgttccttggttatgctatccacagtgtgggatataggttcttaatagtaaattctagagtacccgacatgcgtattggtacaattactgagtctagagatgccacattttttgagaatgaatttcctatgaaaaatgcacctagcacttctagtcaagaacctattttatcccctgagcactttgcgccgatagaatacattgatcaaacacttgaggaaaatcctgtggaggataacattatggatgttaagacagctttcctcaatggagagttggaggaggagatctatatggatcaaccagatggcctcaatgtgattggggaggtcaaggacttcttgtccaaaagctttgaaatgaaggatttgggagtggctgatgttattcttgacattaaactaccgagaggagatgatggtgggattacacttgtgcaatctcactatgtggacaaggtcctgagtcgctttggttacagtgactgcaaggcagctcctactccttatgatcctagtgtgctattaaggaaaaaccgaagaatagcaagggatcaattgagatactcccagattattggttcattgatgtacttagctaatgtaacgaggcctaacatctcatttgctgtgagcaagttgagccggtttgtttcaaatccgggagatgatcattggcatgctcttgaaagagtaatgcgctatctaaaagggacaatgagctttggaattcactacactgggtacccaaaagtactggagggttatagtgattcaaactggatatctgatgctgatgagataaaggccacaagtgggtatgtgttcacacttggaggggctctgtttcctggaagtcttgcgagcagaccatcttaa

SEQ ID NO: 15575 - DNA, 1602 bp, Oryza sativa
  Clone ID: TFbOSC6126j.C1.o2.fg
atggctgacaatgagaaaggcaataaggtcagaagtcaggacattagtaccttaagctcccgagtgaatgaagcaccagacaccagttgtgtgacactggtccaacacctgattaaccagaaccgattgcttatagagatactacagcagcatcagacgccaattctgaacccgagtcaaatacgacctcaagtgcagttggaggcagtccaagcactcacaccacaagtcagcatgccgccagcatcccgaaggacccatggtgacgtgccacatgttgacccaaaagaagcaagtaacatttgctttatgtgtgaggagcaagggcactatgcaagggagcgtcctcagcagaaaagaaaaacaccaatgcgaaccgaagatgaagtccgtaagatgatcattactagcacagaatggcctccaccaggaatgaccagacgtcagagaagaaataccttccgaggtgcaccacagttgacagagcatcttttagctaatggaggtagagtgtctgatagtgaagattcagatcaagtctcctcagatgatgaagatgaaatggaacgtaaggcatgctctcgttgtggagaaatcggtcatgtcgccagctcatgtgccactatatgcgttcattgcgaggaagaccatccacccgacaggtgtccaacgagcaggatcacttgtttcttttgtgaaggaactgatcatgtaccaaaagattgtcaattcagttttctgctgacgaagaagatggctaaccaacccgccagttccaacggagagaagcatcaaggcaacaccaatcctcgccaagattacagtttcagcctaactccagtgccaggacagaggaatcgaaatgagaaaagaaaatgccgagtccgggaagacatctgttgcttcaattgtcaaggaatgggtcatttcgccgacaagtgcccaaaaccgagaaacatagctgccggcacgtcagtccacgcaactccctgcaatcagaagcttgcacctcaacgaattgtcatccatgcatcccgaagcagtcctatagcccgcgttgcaacagctccaattccaatgaatgcactaccacaaggtgtcaatgctcaatttcagccccagccaccagctgacaagacagaggccagtatctgcgttgtacctttggaggttccaatacagcagctgagaaatcaagtacaagatgaagaacccgagttgaagaagggcattactccgaaaactgtccccaaccaaggcaaaatcgacctccacattaccgccaatttacacgaagcagacattccaatcgtattgtggtcactggagcaaacgccgtaccctggtaacttgtctgaggttgactccgaagataggaatcatgagaagttctggaacggaagcatcactgcactaccgcaacctagtctgagtcagccaaaaggtgcaccctggtccaagtcaggtgaagagaagattccatcctcaacaggaggtcaagccaagcagttccgagtggtgaagttttgctggaagtttgtcaagacgcaacggaagaagtcagacaagaagagaagaccgcccaacctatcttcttgctag

SEQ ID NO: 15576 - DNA, 1707 bp, Oryza sativa
  Clone ID: TFbOSC14149j.C1.o1.np
ttctccttcccctaatgctatttgcaaaaggtttctccgttcttccttcttcggattttcaactagtactagatggtcagctttgcgaagaagaagatgtcgtcaattgtttgccgaagctccggaagactgcaaggatccgctagtgaagtggaggaagcagtgaagccagctgtgaagcaggacaaaagacttagatctgttaaggtcctatccttagtttctaatctgtctctcccctttgttttccctctctccctctccaaacctttgcaacagatggctgacaatgagaaaggcaataaggtcagaagtcaggacattggtacctcaagctccgagtgaatgaagcaccagacaccagttgtgtggcagtgtccaacacctgattaaccagaaccaattgcttatagagatactacagcagcattggattgcaattttgaacccgagtcagatgcaacatcaagtgcagttggaggcagtccaagctctctctccacaagtcagcgctccgccaacatcccagaaggcccctcatgccatgccacatgttgacccaaaagaagcaagtatcatctgttttatgtgtgatgagcaagggcactacgcaaggaactgtcctcagcagaaaagaaaagcccaatgcgaaccgaagatgaagtccgtaagatgatcattaccagcacagaatggcctccaccaggaatgacaaaacatcagagaagaaattcctcccaaggtgcacaacagttgacagagcatcttttagctaatggaggtagagtgtctggtagtgaagattcagatcaagtctcctcagatgatgaagatgcgaagtctccccaaggctttaaccagaataaaatagaacttaaggcatgctctcgttgtggagaaatcggtcatgttgccagctcgtgtgcctctacatgcgttcattgtgaggaagaccatccacccgacaggtgtccaacgagcaggatcacttgtttcttttgtgaaggaactgatcatgtaccaaaagattgtcaattcagttttctgctgacgaagaagatggccaaccaacccgccagttccaacggagagaagcatcaaggcaacacaaatccccgccaaggtcaccgtttcagcctaactccagtgccaggacagaggaatcgaaatgagaaaagaaaatgccgagtccgggaagacatctgttgcttcaattgtcaaggaatgggtcatttcgccgacaagtgcccaaaaccgagaaacatagctgccggcacgtcagtccacgcaactccctgcaatcagaagcttgctcctcaacgaattgtcatccatgcatcccgaagcagtcctatagcccgcgttgcaacagctccaattccaatgaatgcactaccacaaggtgtcaatgctcaatttcagccccagccaccagctgacaagacaggggccagtatctgcgttgtacctttggaagttccaatacagcagctgagaaatcaagtacaagatgaagaacccgagtgtaagaaagttattgtttgttacaactgcagtgaagaagggcattactccaaaaactgtccccaaccaaggcaaaatcgacctccacattaccgccaatttacacgaagcagacattccaatcgtattgtggtcactggagcaaacgccgtacccgtaaggcctcgtgttaatcagaaccca

SEQ ID NO: 15577 - DNA, 1938 bp, Oryza sativa
  Clone ID: TFbOSC18542j.C1.o1.fg
atggctgacaatgagaaaggcaataaggtcagaagtcaggacattggtacctcaagctcccgagtgaatgaagcaccagacaccagttgtgtggcagtggtccaacacctgattaaccagaaccaattgcttatagagatactacagcagcatcggatgccaattttgaacccgagtcagatgcaacctcaagtgcagttggaggcagtccaagcactcacaccacaagtcagcgcaccgccaacatcccagaaggcccctcatgccatgccacatgttgacccaaaagaagcaagtatcatctgttttatgtgtgatgagcaagggcactacgcaaggaactgtcctcagcagaaaagaaaagcaccaatgcgaaccgaagatgaagtccgtaagatgatcattaccagcacagaatggcctccaccaggaatgacaaaacatcagagaagaaattccttccgaggtgcacaacagttgacagagcatcttttagctaatggaggtagagtgtctggtagtgaagattcagatcaagtctcctcagatgatgaagatgagaagtctccccaaggttttaaccagaataaaatagaacttaaggcatgctctcgttgtggagaaatcggtcatgttgccagctcgtgtgcctctacatgcgttcattgtaaggaagaccatccacccgacaggtgtccaacgagcaggatcacttgtttcttttgtgaaggaactgatcatgtaccaaaagattgtcaattcagttttctgctgacgaagaagatggccaaccaacccgccagttccaacggagagaagcatcaaggcaatacaaatccccgccaagatcaccgtttcagcctaactccagtgccaggacagaggaatcgaaatgagaaaagaaaatgccgagtccgggaagacatctgttgcttcaattgtcaaggaatgggtcatttcgccgacaagtgcccaaaaccgagaaacatagctgccggcacgtcagtccacgcaactccctgcaatcagaagcttgctcctcaacgaattgtcatccatgcatcccgaagcagtcctatagcccgcgttgcaacaactccaattccaatgagtgcactaacacaaggtgtcaatgctcaatttcagccccagccaccagctgacaagacagaggccagtatctgcgttgtacctttggaagttccaatacagcagctgagaaatcaagtacaagatgaagaacccgagtgtaagaaagttattgtttgttacaactgcagtgaagaagggcattactccaaaaactgtccccaaccaaggcaaaatcgacctccacattaccgccaatttacacgaagcagacattccaatcgtattgtggtcactggagcaaacgccgtacccgccgagccaagggcaatcaacctccggagggcgataccaagcagaagaccgtcatccgcttcaaccagcaatcagaaggaagcttctcctgtgaatgatagcagtatgcagtcctatcacatcatcacagaaccaatcgaggatgcagtcactggaacaatgccagctatatctctccagaatcaaaatgagcagccatgtttgtggttttcagtccgctacttatcatggtgtaatcgaaagtttgcagcaatcatattcatgtctataaacattgataacttgtccgaggttgactccgaagatatgaatcatgagaagttctggaacggaagcatcacagaactaccgcaacctagtctgagtcagccaaaaggtgcaccctggtccaagtcaggtgaagagaagattccatccgcaacaggaggtcaagccaagcagttccgagtggtaaagttttgctggaagttcgtcaagacgcaacggaagaagtcagacaagaagagaagcccgcccaacctatcttcttgctag

SEQ ID NO: 15578 - DNA, 1434 bp, Oryza sativa
  Clone ID: TFbOSC23131j.C1.o4.fg
atggctgacaatgagaaaggcaataaggtcagaagtcaggacattggtacctcaagctcccgagtgaatgaagcaccagacaccagttgtgtggcagtggtccaacacctgattaaccagaaccaattgcttatagagatactacagcagcatcggatgccaattttgaacccgagtcagatgcaacatcaagtgcagttggaggcagtccaagcactcacaccacaagtcagcgcaccgccaacatcccagaaggcccctcatgccatgccacatgttgacccaaaagaagcaagtatcatctgttttatgtgtgatgagcaagggcactacgcaaggaactgtcctcagcagaaaagaaaagcaccaatgcgaaccgaagatgaagtccgtaagatgatcattaccagcacagaatggcctccaccaggaatgacaaaacatcagagaagaaattcctcccgaggtgcacaacagttgacagagcatcttttagctaatggaggtagagtgtctggtagtgaagattcagatcaagtctcctcagatgatgaagatgcgaagtctccccaaggctttaaccagaataaaatagaacttaaggcatgctctcgttgtggagaaatcggtcatgttgccagctcgtgtgcctctacatgcgttcattgtgaggaagaccatccacccgacaggtgtccaacgagcaggatcacttgtttcttttgtgaaggaactgatcatgtaccaaaagattgtcaattcagttttctgctgacgaagaagatggccaaccaacccgccagttccaacggagagaagcatcaaggcaacacaaatccccgccaaggtcaccgtttcagcctaactccagtgccaggacagaggaatcgaaatgagaaaagaaaatgccgagtccgggaagacatctgttgcttcaattgtcaaggaatgggtcatttcgccgacaagtgcccaaaaccgagaaacatagctgccggcacgtcagtccacgcaactccctgcaatcagaagcttgctcctcaacgaattgtcatccatgcatcccgaagcagtcctatagcccgcgttgcaacagctccaattccaatgaatgcactaccacaaggtgtcaatgctcaatttcagccccagccaccagctgacaagacaggggccagtatctgcgttgtacctttggaagttccaatacagcagctgagaaatcaagtacaagatgaagaacccgagtgtaagaaagttattgtttgttacaactgcagtgaagaagggcattactccaaaaactgtccccaaccaaggcaaaatcgacctccacattaccgccaatttacacgaagcagacattccaatcgtattgtggtcactggagcaaacgccgtacccgtaaggcctcgtgttaatcagaacccatag

SEQ ID NO: 15579 - DNA, 451 bp, Oryza sativa
  unsure (1)..(451): unsure at all n locations
  Clone ID: TFbOSC18181j.C1.o1.np
cgcaataacgcccataaaaatctgactttaataanccccgataaacaccctccccttacaaatgagacttaaacgtccttctaatcaagtacaagatgaagaacccgagtgtacaaccattctctgcatcgacagcctcagcaaagaattgtcgtaaatggaagaagttgtgtctcttcccgacctactccaggccgagccaagggcaatcaacctccggagggcgataccaagcagaagaccgtcatccgcttcaaccagcaatcagaaggaagcttctcctgtgaatgatagcattatgcagtcctgtcacatcatcacagaaccaatcaaggatgcagtcactagaacaatgccagctatatctctccagaatcaaaatgagcagccatgtttgtggtttttagttcgctacttatcatggtgtaatcgaaagtttgcagcaatcatg

SEQ ID NO: 15580 - DNA, 2448 bp, Oryza sativa
  Clone ID: TFbOSC414329j.C1.o9.fg
atgtcgaacgaggtgaaacatgtagggaagacacccatgctccatagcactaactactctacttggaaaattaaaatgtctactcacctcaaagctatgagcttccatatttggagttttgtggatgtaggctttgctatcactggcacgcccttgacagagattgatcaccgcaatctccaactcaatgctcaagccatgaatgctttgttcaactctttgagccaagaggagttcgatagagtgagcaaccttgagaccgcatatgagatttggaacaagttggcggagatccatgagggcacaagtgagtacaaggatgccaagcttcatttcctcaagatccaatatgagacattctccatgttgccttatgagagtgtgaatgacatgggcttggggcaacctacaccgatggagatggaggaagcctcaccatccaagaaggagatggaggaagcctcaccatccaagaagtgcattgctctccaagccgaagttgaagacaagggcaagagcaaggtgaatgaagtcaatgatgacttggaggaagagattgcccttcttgctagaaggttcaataatctcttaggaagaagaaaggagagaggaaggggctccaactccaataagagaagaaataaaagacccaacaagactctctctaacttgaggtgctttgagtgtggtgagaagggatactttgcttccaagtgcccttccaaggataatgatggagacaagtcatccaaaaagaagagtggaggttacaagctcatgaagaagctcaagaaggaagggaagaagattgaggccttcatcggggaatggaactcaaatgaggagagctccgcctcatccgggtccgaagaagaaggtggtgatgatgcaagctccaagaagaagaagatggccgttgtagccatcaaggaggctccatcactcttcgctccactttgtctcatggctaagggctcttctaaggtagcatctcttagtgatagtgagagtgacgatgattgtgatgatgtttcctatgatgagcttgtgagtatgtttgagaagctccatgcgtatagtgaaaaggagattgtcaagtttaaggccctagagaaggatcatgcttctttggaggtcttgtatgaggagctaaagacttctcatgagagactcaccatttcttatgagaagattaaggaagctcatgataacctcctttccactactcaacatggagctcacattgatgttggcatatcttgtgacttgcttgatgatagtgcttctagtcatattcctcatgttgcatcatctagcatttctacctcttgtgatgatcttatggatatgcctagctctagctatagctcttgtgtttctatttgtgatgcctcacttgttgttgagaacaatgagcttaaggagcaagtggccaagctcaacaagagtttggagaggtgcttcaagggtaagaacactcttgacaagattttcagtgagcaacggtgcatccttaacaataagggacttggatacattccaaagaagggtaagaaaccttctcaccgtgtcactcgttttgtcaagagcaacggtaagtattgctccaagtgtcatgaggttgggcatttggtgaatgattgccccggtagtaagccttccaagacatgcatgtttgattctcattatatgcttaagaaggctcatgatggtagtattgttgctagatatgtgggttcccctatacttggtggtaaaaagaatgccatttgggtgcccaaagctttggtctctaacctccaaggacccaaacaagtttgggtgaactaccgcatcggtgggagccattgggtgcttaatagtggatgcattcaacacatgaccggtgatagggctatgttcaccatatttgaagtaggaggaaaagaacaagagaaagtgacatttagagacaatagtaaaggaaaggaagagattgcccttcttgctagaaggttcaatgatctcttgggaagaagaaaggagagaggaaggggctccaactccaataagagaagaaataaaagacccaacaagactatctccaacttgaggtgctttgagtgtggtgagaagggacactttgcttccaagtgcccttccaaggatgatgatggagacaagtcatccaagaagaagagtggaggctacaagctcatgaagaaactcaagaaggaagggaagaagattgacactaaaccccaccctttgaggaatattgtttcatcgcacccatattccgttcctctccttctgtgcgttgtttcctccaccgttttccgctcctatcgccatgtccttccctgtttccacccccatcgccatttcatttccacagcaaacccttcaccgctggaaccacaccatgatgaaaccggatgtaaattagaaaatggttatctaatatag

SEQ ID NO: 15581 - DNA, 2469 bp, Oryza sativa
  Clone ID: TFbOSC900209j.C1.o21.gm
atggatctcccacaatttgtcgtcgacatcgatgcactggcaaagctgcagcttgagggcatgctgccaagccagcagaatcccgaggatcccaccaaggaggacgatgagaacgagcacaagaacgctcaagccgctaatgcaattcttagcgccttcagtggaagtgagttcaaccgtgtggacggcattgagagtgccaaagtgatttgggacacgcttaggaatttgcatgaaggcacggatagtgctagcgagtccaaggtggagattctcaaggggcagtttgaacggtttgtgatgttggatggtgagagcccaagcgacatgtatgatcgattgagcaagatcgttaatgagatcaagcgacttggctccaaggacatgaccgatgaggttgtggtcaagaagatggttcaggcaatcactccaaggaactctaccttggtgaccatcattcgtgagcgtccggactacaagactcttacacctcatgacttgcacgggtgtatccttgcccatgacatgctcgagcaagagtccaaggaggtcatccaatatatcaaccaaacctcaaccacaagcatcaagaaggaagacttggcattgaaggcaaaggaagaagaagaagagagttgcaagagtaagagcaaggcggagatcgatgatgaagagatggctctcttcgtcaagaagttcggcaagttcatgaagcaaagtggcttcgccaagggaagttcgtccaagtattcctccaacaagtcaagtggaagacactccgcaagggtgtgctatgtgtgcaaaaagcccgggcacttcattgcggattgcccccacatcaaggattgcccccacctcaaggaagacaagaagaagcttgagaagaaagagaagcacaagcatagcaagcatgatcgctatggccaagctcaccttgggatgatcttcggcttcgactccgagtcaagctcaagtgatgaagaaggagttgccacgttcaccgtcaagccttcatcaccaccgagactcttcaactactcaagtgatgaggatgctcccatttgcctcatggcaaaggagactaaggtaccctctcccctcaagtcatttaatgttgatcttgttagtgatgaggaggatgatgttgaggatgaggttatggatgaggagttgttcaagtccataaccaaggagtctctgccacacttgagtgagttgcttgggagaattgaggatcaatatgcaacccttgagaggcaagaggcattactcattcgtgagaaagagcggtctcatgaactcaagggtagtaaggccctaaaggagtacttaggttatcaaagggacaacttcaaccatgaaggccttggtgcatgtcaagccgggaaacaaattggagcacatcacccggtcaagaacgtaatggctactacaagaccgttggagcttcttcacatggagctcttcgggccaattgcttatctaagcgttggaggtaacaaatatggtcttgttattgttgatgacttttcacgcttcacgtgggtgttcttcttgcatgacaagagtgagacacaagccctcttcaagaagtttgcaagaagagcccaaaacgagtttgacctcaagatcaagaacattcgaagcgactacggcaaggagtttaagaacacgtgcatcgagagtttccttgatgaagaaggcatcaagcatgagttctcgtctccatactcacctcaacaaaacttgaaggaactcatgggcttgcaatacccacggaacaagatgagaggagaatacaatcctttcaactgcacgtcctcgaggaaatactggagggacaactggttttaccttcatgatgccgatacctctccatgccttgtcgtccctgaagagcaacctccgcattcctggtgctggactgctaaacctgttctaacccccacattgaagggtttcattgacaaaatccacaacctccgagaacatggcttgaccgggtacgaagtcgtttgcgacttcacctgttcttggatccgtcctcttcaggcttgtgctcatcctacgtttgagtacacgagggcagaagacacgacgaggataatgcgatttggcctctctcggacagcagtggcgaagtgcgttgtacaggtggtggtcgatccgccatcagccgttgataacatcccaacaacggtttgcgacctcctacaaaccgagaaggatgctgtcgtgaacataaactacgtccagcatgaagtcgggcgtgaccaagaggggactgctgttgaagaagcaaaaagttggccacactcatctggccccgggcaaagcaccagggcccgtgaagatgccgtgtcatcggccaatgatcttgtcgtggcgtttgaagcccaactaaaaaaggagcacgccgacaacgccaggctaagcgaggtggtagccggaaatgatgcgcaacgctga

SEQ ID NO: 15582 - DNA, 1476 bp, Oryza sativa
  Clone ID: TFbOSC900013j.C1.o20.fg
atggtcatgtcgtcagcagacagccatgttcccacgtcgcgcctgcttccggcggaagtggagaccaagagtttagaacctcacccagggcccccggccgaaccggcaaaggggggcctgcgcggtctcccggtgaggagccccaagctccgtcagaaggtgttcgccaggtcacctgaaaaagacgagaagcagtgcccagggagtaaccaagctccatgtcagtctaccgacaagaaggatggtactttgcagcccaactctggagcaaacaggacagtgatatggaagatggataatggcaggaccatgatcatcaccggttcagaatttactcctgaagacgcagcaaggatacccaagcgtcagagaggaagaaataccttccgaggagcgcgtcagctaacccgtcatctcataaagtacggtccgcctagacccgaagatgatgaatcaggagaacggttttctgctgatgacgatgacgacaacgatgatgataatgatgacaatgatgatgcgacccttgacagtttcagggaaagagagttgaagttcaaagcatgtgctagatgtgggatagtcggacacactgctagtttatgcctccccacatgccgctgtggtgaatatacccattactcaaatgcatgccctttaaggaaggtcacatgtttcttgtgtgaaggaacagatcatgtgcctaaggactgtcagttaaacgcggtcatagctaagaccaagaaagaacaagggacaaccgtgcaacccattcgtcaaccaatgacaatcgacaacagcggtcacaatccttctgctcttcctccaactccagctccagtggaagccaaccatggaagaagcaacgtcaccaaggatgttcataagtctctgcttgttcccgtttcagctgccaaagtgcataatcagaagcctgcaccccgagaccaagcaagtcgattctgtcgcaactgtcataagccaggacatcgtttcagtgattgtcctcttccaagagcagcaaaggcagttcgtcgtgattcacaagttaccagcactgcccatgacaccaatcgacacctgaatgtgcaacctccgccccaacggattatcgtcaagggcaccgtcaaaggtcgcattgttccaccggcaatcgtttcaagcctacagcaccaacgccagcagggtaagcaatgtcaggagaacaacagctcgctacagctacaaagaggcggtacgctccctcgtcagcacccgcggcaagtgttgtcagcaacaggtcgtccaactgttgtcagttctagcaatgcacctcgtattgctccaatctggaggcccatcgacaaatcaccgctcggtaaccccacgggcaagaagatcctacccgttacagctgacaagacagttgcccctccaccatcgaagatcaacaagcagagcaacgttcccggtgagacttctggtagtaggaactaa

SEQ ID NO: 15583 - DNA, 1540 bp, Oryza sativa
  Clone ID: TFbOSC416144j.C1.o2.np
ggcatcttaaccaattcagagtttcagatgaatatcaaattttgttttatcaatatgcatatctaaatcaatttcagagctccagataaaaagaaatcaattatttgtattgatgcatgcatctaaatcaattcattcagagtttcaaataaaaaaagaatcattagctgttgccaaattggtatatatgaagaagaaattagggaggtggaggcggaggagggggtcgtctcctcgtccaggtccaagcgggtccggccgaagcgacccaagaaggtgatgactccgatggaggcagtggagaggcggaagctgaagagggaggagcaggaggagaggaggaaggtgaagaaggagaagaggcggattaggaggttgatggagacggaggcggcgggcgaagtgggtgaggcggcggcggaggaggaggaggaggaacatgaggcggaaacggagggtgaggaagaggcggcggcggaggagcaaaaggtgtatgttgggggcatcccatactattcctccgaggatgacataagaagtttctttgaagcatgtggcagcatcacatcagtggattgcatgacatttcccgagagcgggaaattcaggggcattgccattctcacgtttaagactgatgctgccgcacaaagggcattggctcttgatggtgcagatatgggaggattttttttgaaaattcaaccatacaaatctgtccgtgaaaaggaagattttgcaccaaagatgatagagggatacaatagggtttatgttggaaacctggcatgggacataacagaggatgacttgaagaagttcttttctgattgcaaaatctcatccatccgattcggaacagacaaggagacaggtgatttcaaaggctatgtgcatgtggatttttctgagggtacatctgttgctgttgcaatgaagcttgatcagaaggtgattaaggggcggccagtcagaattagatgtgctgtccccaagaaggacaatcagaagctcaatggcaatgcaaatccagattcatcaaataataagatacggatttgttatgaatgtggcacgcctggtcatatctcttcttcttgccctaataagaaggcttctgaagccatttctgatgaaaagaaggctaatgttgactcagtcacagcatcgtcaaagaaaaggcggacatgctatgaatgtggcattcctggccatctctcatcggcttgcccaaacaagaaggccggcgatgctgtttctagtgacaaggggcctgatgatgagacaaagtctgcaccatctatcactcccgaggataataaaataggtgaagaatcaaattcagctccctccaagaagaggcggaaatgctatgaatccacttcagatggaaataaggctagtgatgacacaaaccctgtgcctgcgaagaaaaagaagaggcggacatgttatgaatgtggcatcgctggccatctcgcgtcggaatgcccaaacaaaactacctgatcgaatggttgtgttactgttttggattttt

SEQ ID NO: 15584 - DNA, 5191 bp, Oryza sativa
  Clone ID: TFbOSC400057j.C1.o11.np
attccgacgttccgggagagtccgattttgcaggagaagaatttgaggaattccaaggccagcaaggcaactcctggtttggaatggttaattcctggtttggagattgaactgtacagccggggttggttgttcagtatggttgggcctatgcaagaggatgccgcgatacaagcctgagtatttgttcggtaccgaaggatttgtccaagagttgcgtacgatgtccttcctcataggatttgggattgcccctttgtatgcccagatccctcatgatcgtgatgaagagaagtgccgggtcaaagtcgccttgaacagcaatcgtgaagatattccatcagtaatgttcgaggctggaggaggaagctacattcatgcttgtcaggaggtggcaaggatcgccataggagagctccgtaaaagctacaatgaccggttggccgacaccgagtatcgctaccatcctcgtcaaccctagggaagtgaccgtggcagctaccttgaacctgcggggatcgagaatgatgctaccacaaggcatttggttgagatgctgtgggctaggatgaaacccgcgctgagattgtgatagccgctcaagaccgtgaagaccggaattgcgacaagatttgcaagctagaagacaaggtggatcgtttggagaaggaactagctgcattgaagggagaagcaccaccgcagaaggccagagttcgtcttaccgcaaggaagagagctctattcgtccctcgctaccagttggcaccaaagatggtgctcactcgcagcaatgggaatggccccaaccccaacaacaacaacaatgcagagaatcccatgcttgctcaagtcctggctcaccaggcacagttgatgaatttgatgatgcagcaactccaaaaccagcagaaccaagggaacaatcatgcacctccccaaaacaagctggcagagtttcttcgcgtgaggccacctgttttgtctagcaccactaatcctgttgaagctggcgattggctgcacgccatagagaagaagttggatctgcttcagtgcacagaccaggagaaggtctcttttgcttcacaccagctgcatggccctgcatcggagtggtgggatcacttccgccttaacaggactactgctgaacctatctcttggcttgaattcaccgctgctttccggaagacgcacataccatcgggagtggtgtctctcaagaagaagaaattcaggtcgctcacacagggttcccgcacagtcactgagtatctgcatgagttcaatcgtctggctcgttatgctccggaggatgtgcgcactgatgaagagcgccaggagaagttcttggaaggacttaatgatgagctttcttacccactcatggctggggattatcatgatttccagaagttagtggataaggctattcgtcaggaggacaagtataaccgcatggagcagaagaaacgccggatcgctcacttcaaggcacaacagggaaatagttagaggctgcgacttgctttgggaccccagtccatgccacagggaggttcttcatctgttgctcgtccgcagcgtcagttcttcaacaacaacacgggcaacaacaaccgcaatcaagctccacgccctgttgcagctccatcacagcaacagcctgccaagagggagcaaggcagcaagcccagtgtgtgcttcaactgtggagacccaggacattatgctgacaagtgtccgaagccccgtcgcgcgaaggtcgtccctgctcaaaacaactcctccgcaccagcagccaaggctcgtgtcaaccatgttgctgccgcagaagctcaaggtgctccagatgtgattttgggtatgttccctgttaactcagttcctgcaacagtgcttttcgattctggtgctacgcattcatttttatctatgagttttgcgggaaatcatgggatggaggtagaagagcttagacgtcctttgatggttactactccgagtaaccaagcactctcatcacaacgtagcccctctgtcagaatagagatccaaggtgtaccctttctggccaaccttattctgttagaatccaaagatcttgatgtcatcctagggatggactagttagccagatataaaggtgtgatagattgtgccagtagaaaagtaactctcaccagcaatgatggtcaagttgtaaccgttcatgcattgccctttggacctctacggtcaagcctgaaccaaataactttggaagagattcccatagtgcgggagtacctagatgtgttccctgatgatttacctggtatgccgcctaaaagggatatagaattccgaatagatctagtaccaggaacaactccgatccataaacgaccctatagaatggcagccaatgaattagcagaagtgaaaaggcaagtagatgatttgctttagaaaggatacaacagaccgagttcatctccatggggagttcctgttatctttgtagaaaagaaagaccatactcagcggatgtgtgtggactatcatgcccttaatgatgtgactatcaagaataagtacccgctgccgagaattgatgatttgtttgatcaactcaaaggtgccaccgttttctccaagatagatcttcgatcaggatatcaccagttaaggattaaagaagaagatatacctaagacagcttttaccacccggtatgggttgttcgaatgtacattatgtcttttggacttaccaatgcccccgctttcttcatgaacttgatgaacaaggtgttcatgtaatacctggataagttcgtggtagtctttattgatgacattctcatttattcccgaaccaaagaagagcatgaagaacatcttcgccttgcattagagaagctgcgagaacatcagttgtatgccaagtttagcaaatgtgaattctggttgtctgaagtgaagtttctgggtcacgccatctcagccggaggagttgccgttgatcctagtaatgtggaatccgtaaccaactggaaacaaccgaagatcgtttcagagattcgcagtttcctaggcctcgcatgatattaccggagattcatagagaatttttccaagattgccaagcccatgacacgactgcttcagaaagatgtgaagtacaagtggtcagaagaatgtgagcagagttttcaagagttgaaaagtcgcttaatatcagctcccattttgattttgcctgatccaaagaagggtttccaagtgtactgcgatgcatccaagcttgggttaggctgtgttttgatgcaagatggaaaggtggttgcctatgcatctcgtcaactacgtccgcatgagaagaactaccctactcatgatcttgagttagccgcagtggttcatgcattaaagatttggcaccactatctttttggtactcgaacagaggtgtatacggatcacaaaagtttgaagtatatctttacccagccggatctgaacatgagacagcggagatggttggaattgattaaggattatgacctgggaattcattatcacccgggaaaggctaatgtcgtagcagatgcccttagtaagaaaggctattgtaatgctatggaaggacaacagttgccattggaattgtgcaaggaatttgaaagattgaatctggaaattatcagtagaggctttgttgcagctttggaagcaaagcctactctcattgatcaagttagagaagcccaaatcaatgatcatgatattcatgagatcaaaaagaatatgagaagaggtaaagctatcggtttcttggaagatgagcaaggaactgtatggttgggtgagagaatctgtgtcccccagacaacaaagatttgaaagatgcaattctgaaggaagcccatgatacgttatactccattcaccctggtagtactaagatgtaccaggatctcaaggaaagattttggtgggcaagtatgaagcgcgagatcgcggaatatgtagcagtatgtgatgtttgtcatcgagtcaaggcagaacatcagaaacccgcaggtttgctgtagcctttgaagattcctgaatggaagtgggaggaaatcggtatggatttcatcactggtctacccagaacgtcgtcaggtcatgactctatttgggtgatagtcgacagacttaccaaagtggctcatttcatcccagtaaggatcacctattccggaagtcatttagcagaattgtatatggcaaggattgtttgtttgcatggtgttcctaagaagatcgtgtccgatcgaggtagccagtttacttcaaagttttggaagaaacttcaggaggagatgggttccaagctgaacttcagtactgcctatcatccgcagatagatggacaaaccgaaagggtaaattagatattggaagacatgttgagagcttgtgctttagacttcggtggaagttgggataagaatttgccttacgccgaattctcgtacaacaacagttatcaagctagtctccagatggctccttatgaagcactgtatggtcggaagtgttgcactccgcttttgtgggatcaaacggtagaacgtcaggttttcggaactgatatcctgagggaagcagaggaaaaggtaaaaatcattcaagaaagactgcgggtggctcagtctcgtcataagagctacgccgacaatcgccgcagagatctaagttttgaagaaggagattatgtgtaccttcgtgtcacgccacttcgaggggttcatcgttttcacactaaaggaaaattggcaccgcgtttcgtgggaccttacaagattgtcagtagaagaggagaggtcgcttatcagttggagttacctcaatctttggcaggagtccataatgtgttccacgtgtcgcagttgaaaaagtgtttaagggtacctaccgaagaggctaatcttgaacagatagaagtccaagaggatctgacatatgttgagaaaccaatccgtatcttggagacagatgagagaagaaccaggaatagagttatccgtttttgcaaggtccaatggagtaatcactcagatgaagaatccacttgggaacgagaagatgaattaaagtcagctcattcgcatctgttcgctagttcttccgaatctcgaggacgagattccgtt

SEQ ID NO: 15585 - DNA, 7548 bp, Oryza sativa
  Clone ID: TFbOSC401341j.C1.o12.fg
atggcaggtccagaggataaagatgaggagggtgcatctcattccccacgcaccaaaggcatcatccaatactttacaaggcaagtgaagcagcacacagaaggacttgatacagatttgcaggtgacaaatgagaagattggacaattggagtccacgcagatctccaccaacactaagcttacagggttggagacagcggtcgcccgcattgacactagccttgctgctcttgtgaggcattttgatgctctcaatgctggaggcaatggtgggggtaatgacgatgacattgacggagagtacgtcgaggataatttagaggatgaatatattgctgacactgaacaagatgatcgagatgctcaagatcgtcgacggctacacaacaatcgacgaggtatgggtggtcgccgccgacgcgaggtacgcaacaatgatgatgctttttctaaaattaaatttaagattcctccttttgatggaaaatatgatcatgatgcgtacctctcttgggagattgctgttgaccaaaaatttgcatgccatgagtttcctgagaacactagagttagagctgctacgagtgagttcaccgattttgcttcggtttggtggatagaacatggcaagaaaaatcctaataacatgccacaaacttgggatgctttgaaacgggtcatgcgggctagatttgttccttcttactatgcacgtgacttgctgaatagattgcaacaattgagacagggtgcgaaaagtgtagaggaatattatcaggagttacaaatttgcttgcttcgttgtaaattagaggaaactgaggacgctgccatggctagatttttgggtgggttaaaccgcgagatttatgacatcgtagactataaagattacactaatatgacccgattgtttcatcttgcttgtaaggctgaaagggaagtgcaaggacgacgtgctagtgccaaggctaatttttctgcaggtaaaacttcatcatggcagacacgcaccactcctccggccggccgtactgcttctccatcttccacacccacaaccagtcgagcagcacctcctacatctagtgacaagtcagcgacaaaggccgctcagccagcaccgagtgcttcttcaatggcatccacaggccgaatgagagatgttcagtgccaccgttgcaagggcttttggcatgtgcagcgtgactgccctagcaatgatttcgatgatgatacacttgctttgcttgcggctgaccttgcagataatgagccaccggaagagcacattagggctgcatttgcggatcactatgagagcctcattgtgcagcgtgtccttagcgcacaaatggagaaggcggagcaaaatcagcgacacacgttgttccaaacaaagtgtgtcgtcaaagagcgttgttgtcgcatgatcattgatggaggtagctgcaacaacttggctagcagcgagatggtggagaagcttgcacttagcaccaaaccgcacccacatccatactacatccaatggctgaacaacagtggtaaggcgaaggtaacaaaactggtgcacattaattttgcaattggaaattaccatgatgttgttgaatgtgatgttgtgcccatgcaagtatgtaatattctgctaggtagaccatggcaatttgatagggattctatgcatcatggtaggtccaaccagtactcttttctgtaccatgataagaaaattgtgttgcatcccatgtctcctgaagatattttgcgtgatgatgttgctaaggctgccaaatccaaatgtgagagtgataaaaaagcccaatctgatggcaagaaacctgagacaatcaatttgaaacccaaatgcttacttgctactaaatctgatattaatgagttgattgcatcaccttcagttgcctatgctttggagtactctgatgtgtttcccaaggaagtgccaccggggctgccaccggtgcgcggcattgagcatcaaatcgacttgatcccaggtgcttccctaccgaaccgtgcgccataccgaaccaaccctgaggaaaccaaggagattcagcgtcaagttcatgagttgcttgataaaggagctattaataacattaccattcgatatcgtcatcctattcctaggttagatgatatgcttgatgaattgagtggctctattgtgttctccaaagctgatttgcgtagtggttaccaccagattcgtatgaagttgggtgatgaatggaaaacagcatttaaaacgaagtttgggttgtatgagtggttagtgatgccttttggtttaactaatgcacccagcactttcatgaggttgatgaatgaggttttgcgtcctttcattggaaaatttgtggtggtctactttgatgatatcttgatttacagcaagtctatgggtgaacattttaatcatttacgtgctgtttttaatgctcttcgtgatgcacgtttatttggtaaccttgagaagtgcaccttttgcacagatcgagtttcttttcttggctatgttgtaactccgcaggggattgaggttgatcaagccaaggttgaggcaattcagagttggccgactcctaaaacggtctcacaagtgcggagctttctaggactcgcggggttctatcgccgctttgtgcaggatttcagcaccattgctgcaccattgaatgcgcttacaaagaagggagtgcctttcacttggggcacatcacaagagaacgccttccacatgttgaaagataagttgacccatgcacctctcctccaacttcccgattttaataagacttttgaacttgaatgtgatgctagtgggattggattgggtggtgttttgctacaagaaggaaaacctgttgcatattttagtgaaaagttgagtgggcttgttctgaattattctacttatgataaggaattgtatgctcttgtgcgaactttagaaacatggcagcattatttgtggcccaaggaatttgtcatacattctgatcatgagtctttgaagcatattcgtagtcaagggaaattgaaccgtagacatgctaaatgggttgaatttattgaatcttttccttatgttatcaaacacaagaaagggaaggagaacatcattgctgatgctttgtctaggagatacactttgttgacacaacttgactacaagatttttggcctggaaacaatcaaagaccatatgcgcatgatgctgattttaatgatgtgttgctgcattgaagcgcatggaggcggtttgatgggacattttggtgccaagaagacacatgacatccttgctagtcatttcttttggccacagatgcgaagagatgttggcagggctgttttgaagaaaaatatcaagatgtgggaagaatgcttgcctcatattgaatttgcttataatcgttccttgcattctactacaaaaatgtgcccatttcagattgtgtatggtttgttgcctcgtgctccaattgatttgatgcctttaccatcttctgaaaaactgaattttgatgctaagcaacgtgctgagttgatgttaaaactgcatgagacaactaaagaaaacatagagcgcatgaatgctaagtataagtttgctggtgacaaaggtagaagggaattgaattttgaacctggagatttggtttggttgcatttgcgaaaagaacgatttgctgatttgagaaagtctaaattgatgcctagagctgatggaccatttaaagtgttagcaaagattaatgagaatgcatataagattgatttgcctgcagatttcggggttagtcccacatttaacgttgcagatttgaagccgtatttgggagaagaagatgagcttgagtcgaggacgactcaaatgcaagaaggggaggatgatgaggacatcaacaccatcgatacatccacgtccccccatatacagcatgatggtcctattacccgcgctcgtgcacgtcaactaaattatcaggacgagtgccctcgtggccgggttgacgcgcaccacaagttcgcggcgaccattggagacgggggatcgtcatcgcagcagcaacagcagcaacaacctcgctccgcgccccgacctcaattcgtggtgcgcgtcccacagccgcagcaacagcagagtcaacaagggactcgtgcgccccgtcctcctatgccagccatgcagcctggtcaaggccgcagggacgttcaaggtccgcagtgtctgtgcttcaactgcttcgagcccgggcactttgcggataaatgcccgaagccgaggcgccagcaaggccaagcgcctccccgctccaacaacggtggtaaggatgtcattcggggtcgtgtgaaccacgtgacggccgaggacgtgctgacaactccagacgtcatcattggtacgttcctcattcattccatccctgctaccattttgttcgactctggagcttcccactcgtttatatcggtgccattcgtggggagaaatcagttgggggtagaaaggcttaggaaccctctgctcatcaccacccctggaggggttatgacagcaaagaattatagccctgctgtccctatagaaattcaggggattccttttccctcggatctgattcttctagacaccaagaacttggatgtgatccttgggatgaattggttggctcaattccaaggagtagtggattgtgcaagacgcactgtcactctgtaccgagggccggaacaaccggttgttttctttgcacccccaacctctgtcagtagttcagaacttcatcagataggacagtcagaaatccccatcgtcagagagttcggagacgtgtttccggaagaactacccggtatgccgcccaagcgagagattgagttccggatagatcttgctccaggaaccactcctctgtacaagcgaccctaccatatggcagcaaatgaactggccgaagttaagaaacagttggaagagttgaaagaaaaggggtatatacgtccgagtacttccccctggggtgctcctgtgatttttgtggagaagaaagacaagacgaagaggatgtgcgttgactacagagctctcaatgaagtcaccatcaaaaacaagtaccctcttccccggatcgatgatctgttcgatcagcttaaaggtgccacggtattctccaagattgatcttcgttccggatatcaccagttgcgcatccgtgaaaaagatattccgaagactgcattcaccacgcgatacggactgtatgaattcaccatgatgtcattcgaggaagaccatcagcaccatctccgtctggtgttggggaagttgcgggaacatcaattgtatgccaaacttagcaagtgtgagttctggttgtccgaagtcaaattcttagggcacgtgatatctgctaaaggagttgctgtggaccccgaaacagtgaccgccgtcactgattggaagcaacccaagacagtcactcaaattcgcagtttcttaggtttggcaggatactaccggaggtttatcgagaacttctccaaaatcgctcgacccatgacacagttgttgaagaaagaagagaaatttgtgtggagcccgcaatgcgagaaggcgttccaaactctcaaagaaaagctggtttcctcgccagtgttaatcttgccggatactcgcaaggacttcatggtgtattgtgacgcttcgcgccaaggattggggtgcgtgctcatgcaggacggtcatgtggtggcctatgcctcacgccagctatggcctcatgaaggcaactaccctacccatgatttggagttagccgcggtggttcatgctctaaaaatctggcggcactatctcattgggaatcgctgtgaaatatatactgatcataagagtttgaaatacatcttcacccagtcggatctgaatcttcggcagaggagatggctagaactcatcaaggattatgatgtgggaattcactatcatcctggtaaggccaacgtggtcgccgacgctctaagtcaaaaaagccattgcaacactcttaacgtccgtggcattccacccgaacttaaccaacagatggaagccctgaatctaagcatagtgggtcgtggattcttggctgcgttggaagccaagcccaccttgctcgatcaaatccgcgaggctcagaagaacgacccggacatgcatggactcctcaagaatatgaaacagggtaaagccgctggtttcacagaggatgaacacggaaccctatggaacggaaatcgggtatgcgttccagataacagagaacttaaacaactgattcttcaggaaactcacgaaagtccttattccatccaccctggcagtacgaagatgtacttagacttgaaggagaaatactggtgggttagtatgaagcgggaaattgcagagttcgtggccctttgtgatgtgtgccagcgtgtcaaggcagagcaccaacgactggccggacttctccaacctctccaagtaccagaatggaaatgggatgaaattgggatggatttcatcaccggacttccaaaaacccaaggtggatatgattctatatgggtagttgtggatcgattaaccaaggtagctcgatttattcctgtgaagaccacctatggagggaacaaactagccgagctctacttcgctaggatcgtgagtctccatggcgttcccaagaaaatcgtatctgataggggaagccaattcacctctcacttttggaagaagctccaagaagagctggatttcgggaagacctgggataagagtctcccctatgccgagttctcctacaataacagctaccaagccagtatacaaatggcaccttatgaagcgttgtatgggcgcaaatgccggacaccgctcttgtgggaccaagttggggaaagtcaagtgttcgggactgatatcctgagagaagctgaagcgaaggtcagaaccattcgggataatctaaaggtggcacagtcccggcagaaaagttatgcagataaccgtcgccgtaacctggaattcgcagtggacgattttgtgtaccttcgagtcacgccattgcgaggtgtacacaggtttcagacaaaagggaagctcgcacctcggtttgtgggtcctttcagtatcattacccgacgcggagaagtcgcttaccagttggagctgtccgcctccttgggcaacgtgcatgatgtgttccatgtgtcacaactcaagaaatgtcttcgggtgccgtccgagcagaccgactcagagcaaattgaagttcgcgaagacttgacctacgtggagaggccagtgaaaatcctggacaccatggagcgcaggaccaggaaccgggtaatccgtttttgcaaggtccaatggagcaaccacgccgaggaagaagctacctgggagcgtgaagacgagctgaaggcagcccatcccgatctcttcgccagtttttccgaatctcggggtcgagattccgtttaa

SEQ ID NO: 15586 - DNA, 744 bp, Oryza sativa
  Clone ID: TFbOSC402051j.C1.o15.fg
atgatgtcgtcgccgactccagcgccgctgctccccgtggccccgcttgacggcggcggcgggtacctccggtggaaggagtccgtgctgctccgcctccgcaccctcgacttggcctacgtgctgtccgagcaccagccagaggacgggaggagtgattctgccaagaagaagcgggcgcgcgacgacgagctctgccgcggccacatcctcgccacgctctccgaccgcctcctgccggactacgcgcaccacgccaccgccgcggccgcgtggcgcgccctggcgcgcacctacgacatggacggcaagttgcccaacttgccgctggaccgcttcttcgcatacaggttcgtggacggcgagcccgtcctggagcagctcgcgcacctggaggccatgggcgtcgccggcaagctcgatgaccgtacaatgtacggcctggtgcaccagaagctcccgccggctctggtgaaggccatcgctctcgcgtcgccgccgtacccggaccctccatccatggaccacatctgggacacggctcgacttgaagagaggatgcgtttgtgcggcgaaattcgccgtggcgagcacactcaggacaaggaagacgacgacgaccaaggaggaggagactacccagatgaagatcaccggagcccgaaacggaagaggcgatacgatcgcgggccgtgctacaactgcggcgagccggggcacatcgccagggattgcagaggatga

SEQ ID NO: 15587 - DNA, 1954 bp, Oryza sativa
  Clone ID: TFbOSC900147j.C1.o14.np
atggatgaagtcgggggtcgatggacattctccagggcaaatgaaggctacacgagctgcggcccggtagtcgagatgtcatggcagagggttggtgccctgctgctagggggctcagtcctgcctgcctgtcccgggtgtcccggccgtaggaggattgggtcggtactcttgtttatggctaggatgggttgggaactatgtcacgtcttccgtccgtataccgtggtggtattttgctcaacaactaaaatgtggaatggttggcctgggttggcttgggacgagctgggacccagggtcgggttgccagttcggtctgaatcatcgtaggccttgggttaaggcagtactagatggtcagctttgcgaagaagaagatgtcgtcagttgtttgccgaagctccggaagactgcaggatccgctagcgaagcaaaggaagcagtgaagccagctgtgaagcaggacaaaagacttagatctgttaaggtcctatccttagtttctaatctgtctctcccctttgttttccctctctccctctccaaacctttgcaacagatggctgtcaatgagaaaggcaataaggtcagaagtcaggacattggtaccttaagctcccgggtgaatgaagcaccagacaccagttgtgtgacactggtccaacacctgattaaccagaaccgattgcttatagagatactacagcagcatcagacgccaattctgaacctgagtcaaatacaacctcaagtgcagttggaggcagtccaagcactcacaccacaagtcagcatgccgccagcatcccgaaggacccagggtgacgtgccacatgttgacccaaaagaagcaagtaacatttgctttatgtgtgatgagcaagggcactatgcaagggagcgtcctcagcagaaaagaaaaacaccaatgcgaaccgaagatgaagtccgtaagatgatcattactagcacagaatggcctccaccaggaatgaccagacgtcagagaagaaataccttccgaggtgcaccacagttgacagagcatcttttagctaatggaggtagagtgtctgatagtgaagattcagatcaagtctcctcagatgatgaagatgaaatggaatgtaaggcatgctctcgttgtggagaaatcggtcatgtcgccagctcgtgtgccactatatgcgttcattgcgaggaagaccatccacccgacaggtgtccaacaagcaggatcacttgtttcttttgtgaaggaattgatcatgtaccaaaagattgtcaattcagttttctgctgacgaagaagatggctaaccaacccgccagttccaacggagagaagcatcaaggcaacaccaatcctcgccaagattacagtttcagcctaactccagtgccaggacagaggaatcaaaatgagagaagaaaatgccgagtccgggaagatatctgttgcttcaattgtcaaggaatgggtcatttcgccgacaagtgcccaaaaccgagaaacatagctgccagcacgtcagtccacgcagctccctgcaatcagaagctcgctcctcagcgaattgtcatccatgcatcccaaagcagtcctatggcccgcgttgcaacagctccaactccagcgagtgcattaccacaaggtgtcaatgctcactttcagccccagcaaagaattgtcgtcgatggaagaagttgtgtctctccccgacctactccaggccaagcaaagggcaatcgacctccggagggcgataccaagcagaagaccgttattcgcctcaaccagcaatcagaaggaaacttctcctgtgaatgatagcaatatgcagtcctatcacatcatcacagaaccaatcaaggatgcagtcactagaacagagacctagggtctcatttcagaggaattatgttccaacctcgagttaataaccaacct

SEQ ID NO: 15588 - DNA, 1272 bp, Oryza sativa
  Clone ID: TFbOSC900329j.C1.o15.fg
atggctgtcaatgagaaaggcaataaggtcagaagtcaggacattggtaccttaagctcccgggtgaatgaagcaccagacaccagttgtgtgacactggtccaacacctgattaaccagaaccgattgcttatagagatactacagcagcatcagacgccaattctgaacctgagtcaaatacaacctcaagtgcagttggaggcagtccaagcactcacaccacaagtcagcatgccgccagcatcccgaaggacccagggtgacgtgccacatgttgacccaaaagaagcaagtaacatttgctttatgtgtgatgagcaagggcactatgcaagggagcgtcctcagcagaaaagaaaaacaccaatgcgaaccgaagatgaagtccgtaagatgatcattactagcacagaatggcctccaccaggaatgaccagacgtcagagaagaaataccttccgaggtgcaccacagttgacagagcatcttttagctaatggaggtagagtgtctgatagtgaagattcagatcaagtctcctcagatgatgaagatgaaatggaatgtaaggcatgctctcgttgtggagaaatcggtcatgtcgccagctcgtgtgccactatatgcgttcattgcgaggaagaccatccacccgacaggtgtccaacaagcaggatcacttgtttcttttgtgaaggaattgatcatgtaccaaaagattgtcaattcagttttctgctgacgaagaagatggctaaccaacccgccagttccaacggagagaagcatcaaggcaacaccaatcctcgccaagattacagtttcagcctaactccagtgccaggacagaggaatcaaaatgagagaagaaaatgccgagtccgggaagatatctgttgcttcaattgtcaaggaatgggtcatttcgccgacaagtgcccaaaaccgagaaacatagctgccagcacgtcagtccacgcagctccctgcaatcagaagctcgctcctcagcgaattgtcatccatgcatcccaaagcagtcctatggcccgcgttgcaacagctccaactccagcgagtgcattaccacaaggtgtcaatgctcactttcagccccagcaaagaattgtcgtcgatggaagaagttgtgtctctccccgacctactccaggccaagcaaagggcaatcgacctccggagggcgataccaagcagaagaccgttattcgcctcaaccagcaatcagaaggaaacttctcctgtgaatga

SEQ ID NO: 15589 - DNA, 1806 bp, Oryza sativa
  Clone ID: TFbOSC1509j.C1.o2.fg
atgtcgtggcagagggttggtgccctgctgcttggggctcagtcctgcctgcctgtcccggaggttccggccgtaggcgggattgggtcggtactcttgtctatggctaggatgggttggaaactatgtcacgtcgtccgtctgtataccgtggtgaataagcctaacatacatcataacagcaaaagacttagatctgttaaggtcctatccttagttcctaatctgtctctcccctttgttttccctctctccctctccaaacctttgcaacagatggctgacaatgagaaaggcaataaggtcagaagtcaggacattggtacctcaagctcccgagtgaatgaagcaccagacaccagttgtgtgacactggtccaacacctgattaaccagaaccgattgcttatagagatactacagcagcatcagacgccaattctgaacctgagtcagatacaacctcaagtgcagttggaggcagtccaagcactcacaccacaagtcagcatgccgccagcatcccgaaggacccatggtgacgtgccacatgttgactcaaaagaagcaagtatcatttgttttatgtgtgatgagcaagggcactatgcaagggagtgtcctcagcagaaaagaaaaacaccaatgcgaaccgaagatgaagtccgtaagatgatcattaccagcacagaatggcctccaccaggaatgacaaaacgtcagagaagaaataccttccgaggtgcaccacagttgacagagcatcttttagctaatggaggtagagtgtctgatagtgaagattcagatcaagtctcctcggatgatgaagatgagaagtctccccaaggtttcaaccagaataaaatggaacgtaaggcatgctctcgttgtggagaaatcggtcatgttgccagctcgtgtgccactacatgcgttcattgtgaggaagaccatccacccgacaggtgtccaacgagcaggatcacctgtttcttctgtgaaggaactgatcatgtaccaaaagattgtcaatccagttttctgctgacgaagaagatggccaaccaacccgccagttccaacggagagaagcatcaaggcaacacaaatcctcgccaagattacagtttcagcctaactccagtgccaggacagaggaatcaaaatgagaaaagaaaatgccgagtccgggaagatatctgttgcttcaattgtcaaggaatgggtcatttcaccgacaagtgcccaaaaccgagagacatagctgccagcacgtcagtccacgcaactccctgcaatcagaagcttgctcctcagcgaattgtcatccatgcatcccgaagcagtcctatagcccgcgttgcaacagctccaactccagcgagtgcattaccacaaggtgtcaatgctcaatttcagccccagccaccggttgacaagacagaggccagtatcggcattgtacctttggatgttccagcacagccgccaagaaatcaagtacaagatgaagaacccgagccactaaccattctctgcaccgacggcctcagcaaagaattgtcgtcgatggaagaagttgtgtctctccccgacctactccaggccgagcgaagggcaatcaacctcaggagggtgataccaagcagaagaccgttattcgcctcaaccagcaatcagaaggaagcttctcctgtgaatgatagcaatatgcagtcccatcacatcatcacagaaccaatcaaggatgatgcagtcactagaacaatgccagctatacctctccagaatcagaatgagtag

SEQ ID NO: 15590 - DNA, 862 bp, Oryza sativa
  Clone ID: TFbOSC102138j.C1.o17.gp
agtaaccgacaataatcatctttttcatctcggggaaaccacaaaaaggagagagattttgtcaatctcctcgcccaacacacaaaaccaatccagacatcacgtcttcttaacctgaaccagaggaccagaccaactcatagcagcaaaagcatcatcacacgagcagcagcagcagaagttaaaactaaaccgaaatcccaatagcaaaaaaagaaaaagaggtaaaaacaaaaggcaagcggttcctttatagcaggcaacgcgctctccatgtgacccagatcggcggcaaaactaaagcaataattcgacttaggagtgatgaagatttaggcgagatctaagaggaggggggggggagatggtgttgtgaatccatcacttgtggcagtcgcgggcgatgtgtccagcctcgccgcagttgtagcaggagcggtcgcctccaccgccgaatcgcccgcctccgcctccaccgccgccgttgtagcagtccctcgcgaggtggccggtctcgccgcagttgtagcaggcgccgccgccgccgccgccaccaccaccacctccaccaccaccgctgttgaagcagtccctagccatgtggcccatctcgccgcacttgaagcagccaccaccagcgccgccgccgccgccaccgcctccaccaacgccgacaccgccgccgttgaagcagtccctggccatgtggccagactccccacacttgaagcagcccccaccgggtccaccaccgccggatctcctccccccgccccagctaccgccatagctgcggccgccaccgccagatccgcccccaccgcgcgatccgaagcctcccccgccaccgccgccgccgccg

SEQ ID NO: 15591 - DNA, 1087 bp, Oryza sativa
  Clone ID: TFbOSC19735j.C1.o3.np
ttaaggcatgctctcgttgtgaagaaatcggtcatgttgccagctcgtgtgcctctacatgcgttcattgtgaggaagaccatccacccgataggtgtccaacgagcaggatcacttgtttcttttgtgaaggaactgatcatgtaccaaaagattgtcgattcagttttctgctgacgaagaagatggccaaccaacccgtcagttccaacggagagaagcatcaaggaaacacaaatcctcgccaagattacagtttcagcctaactccagtgccaggacagaggaaacaaaatgagaaaagaaaatgccgagtccgggaagatatctgttgcttcaattgtcaaggaatgggtcatttcgccgacaagtgcccaaaaccgagaaacgtagctgccagcacgtcagtccacgcaaacccccgcaatcagaagcttgctcctcaacgaattgtcatccatgcatcccgaagcagtcctatagcccgcgttgcaacagctccaattccaatgagtgcactaccacaaggtgtcaatgctcaatttcagccccagccaccagctgacaagacagaggccagtatctgcgttgtacctttggaagttccaatacagcagctgagaaatcaagtacaagatgaagaacccgagaagaagggcattactccaaaaactgtccccaaccaaggcaaaatcgacctccacattaccgccaatttacacgaagcagacattccaatcgtattgtggtcactggagcaaacgccgtaccaaagagtgaaatcttccactcggtatcagatgctacacggagtgaaaaatgcaagcaccggttaccaggttgactccaaagatatgaactatgcgaagttctggaactgaagccccatcttcaagtgccgcaacccagtcgaagtcagctaaaggttcaaccctggttcgagtcaggtgaaaagaagattccacctgcaacaggagatcgagccaagcagtccagagtggagaagctttgttaggcaagtttgttatagaaagcggagcggaagaagtcagacaagaagagaagaccgcccaacctatcttcatgc

SEQ ID NO: 15592 - DNA, 2652 bp, Oryza sativa
  Clone ID: TFbOSC401219j.C1.o8.fg
atggacatctctaggacaaatgaaggctacacgagctgcggcccggtagtcgagatgtcatggcacagggctggtgtcctgctgctaggggctcaatcctgcctacctgtcccggaggttccggccgtaggtggggttgggtcggtactcttgtctatggctaggatgggttggaaactatgtcatgtcttccgtccatatgccgtggtgaataagcctaacatacatcataacagcaaaagacttagatctgttaaggtcctatccttagtttctaatctgtctctcccctttgttttccctctctccctctccaaacctttgcaacagatggctgacaatgagaaaggcaataaggtcagaagtcaggacattggtacctcaagctcccgagtgaatgaagcaccagacaccagttgtgtgacactggtccaacacctgattaaccagaaccgattgcttatagagatactacagcagcatcagacgccaattctgaacctgagtcaaatacaacctcaagtgcagttggaggcagtccaagcactcacaccacaagtcagcatgccgccagcatcccgaaggacccatggtgacgtgccacatgttgactcaaaagaagcaagtatcatttgttttatgtgtgatgagcaagggcactatgcaagggagtgtcctcagcagaaaagaaaaacaccaatgcgaaccgaagatgaagtccgtaagatgatcattaccagcatagaatggcctccaccaggaatgacaaaacgtcagagaagaaataccttccgaggtgcaccacagttgacagagcatcttttagctaatggaggtagggtgtctgatagtgaagattcagatcaagtctcctcagatgatgaagatgagaagtctccccaaggtttcaaccagaataaaatggaacgaaaggcatgctctcgttgtggagaaatcggtcatgttgccagctcgtgtgccactacatgcgttcattgtgaggaagaccatccacccgacaggtgcccaacgagcaggatcacttgtttcttttgtgaaggaactgatcatgtaccaaaagattgtcaattcagttttctgctgacgaagaagatggccaaccaacccgccagttccaacggagagaagcatcaaggcaacacaaatcctcgtcaagattacagttttagcctaactccagtgccaggacagaggaatcaaaatgagaaaagaaaatgccgagtccggaaagatatttgttgcttcaattgtcaaggaatgggtcatttcgccgacaagtgcccaaaaccgagaaacatagctgccagcacctcagtccacgcaactccctgcaatcagaagcttgctcctcagcgaattgtcatccatgcatcccgaagcagtcctatagcccccgttgcaacagctccaactccagcgagtgcattaccacaaggtgtcaatgctcaacttcagccccagccaccagttgacaacacagaggccagtatcggcattgtacctttggatgttccagcacagcagccaagaaatcaaaattggaacaacccagcaggggcaaccaacgttcaagtacctacagtccagcaacagtgcaagttatcagaatttctaaaaactgagactccaacctttgccattgccgtcgatcctatggaagccagtgattggttgcgcacagtcgagaagaagctggggttggttcagtgcacagaccaggagcgggttgtcttcgcaactcatcagttgatatcacatgttcccgcaggaatgatcacactgagaaaacgagagttccgctacctgaatcaagaagatttgaccgtcacagagtacctgcacgagttccatcgtttggctcactatgcaccggaagatgtggaaaatgatgaagacaaacaagagaagtttctccaggcgttaaaagatgagatcgcagtgcaactactcctagaggaatatgaagattttgagaaacttgtggacaaagccatacaactcgaaagtgagcataatcggatgaagaactgtaagaggaggattgtcagcatcccagtatcttcatgtggtaaccaaagacagcgcactgagccacttcagatcatcggatcttctgttgcacatcaagagtttccgccccaagaagatggacacaatgcagacaacaacattagcaatactaatgatgatgataccaccaacaaccatgctccatgccccattagtgaccactcaaaccaagcgtgcaatgtcaacatcattcaccaaggtgtcgacgatagtatcgatgatggcacccaaaatgacaaccctagcaattgtgactctgagaaagactccaatggtgatagcaactatggtaccactgatgccaatgttagcaaggatttccaaccaccaattccaactccaagtcagaatgatcgtccccagacggatagctcagcaaagaagacgttgatttgctacaattgcaaagaaccaaggcattactcgagggactgcctgcaaccaaggcaaagtcgacctccacattaccgccaagttacacaaagcagacatcccaatcgtattgtggtcactggagcaaacaccgtacccgtgaggcctcgtgttaatcagaacccatag

SEQ ID NO: 15593 - DNA, 1850 bp, Oryza sativa
  Clone ID: TFbOSC22429j.C1.o2.np
atgttggacttagggggaaaggacggggaaattggaaatgaagatggagcgagcagcaagggaactccatctcccaagggagccactataccttttgattacaggaaacttaccattccctctcacaactttgtctccgtaccttccgggcgtgctcctcaatttgatgggacacattacgccgcttggaagcacaagatgaagttgcatctaatctctttgcatccaagtatttggaaagttgtgtgtacaggtattgacgtacctcatgaggacatggagctcacttcggagaaagaacaactcatccaccgcaatgctcaagcttccaatgcaattctctccgccttgagtccggaggaattcgacaaggttgatggactagaggaggccaaggagatatgagatactttgcaattggctcatgagggatcacccgccgttcgtgaggcaaagattgaattattggaaggaaggctaggaagatttgtgatggatgacaacgagacaccacaagagatgtatgataggatgatgatccttgtcaacaagattaaaggacttgggagtgaggacatgacaaatcactttgttgtcaagagacttctccgtgcttttggtccaagaaatcccactcttgtttcaatgatacacgaaaggaaagacttcaagaggctcaccccaagtgacattcttggaagaattgtgtctcataagatgcaagaagaggaagctcgtgaagtgagacaaatggtgaagaatgccgccatgatcaaaaatcaagaagttgctttgaaggcaaaacaagaagaaatggcttttattgtcaagagattcaagcactttcttcgcaagagtggctatggcaaagggaggaaggttgatgacaagggaaagaggcaatcaaagagagcgtgcttcaattgtggcgaatttggccatttcattgccgattgtcccaagtcaaatgaagctaaggctaagggaggcaagaagaagctggaacgtgctcatgtggcggaggcacacatggcggaagtgtggtactccggagatgaagaagatcccgaagtcaagcccaagcccaagtcaaaagacaaggttgaaggagaaggtggtgttgctactgtcaccttcaagtcatcctcttcaagcaaggagcgtctcttcaacaacttgagtgatgacgacgacgactcctaccactactcttgcttcatggcccaaggccgcaaggtgatgactcaaaagccctctcacacttctcttgatgttgagtctagtgatgaggaaagtgataatgaattagatgatgtgcttaagagctttagcaaacccgctatgcaacacttggctaagttaatgagagctttggatagtacagaacaattactcgtaagacaagaagaattgcttattcttgagaagaaaagaaatcttgccttagaggagagcttagctaaagaaagtgctaaaaataaacaactagctaatgagcttaattttgctaatggttctttagctagccttagagatgtcaatgagactcttcaagagaaatttgcttgtttagacaaaagtcataaagttcaaattgacactctttggaatagtacctctcaaccaaatgtggtttctaattcctctaacccttctactagcaatggttgtgctaggtgttacaatattgatttgaactcttatgctactaatattgtggagatgcaagctcttaagaaagagaatgaaaggttgggcacattggtgaaatatggatgcatgaagacataccattcaaaagatgccctttacaagaccatcaccgctcatcctaacaaggatggacacgg

SEQ ID NO: 15594 - DNA, 5142 bp, Oryza sativa
  Clone ID: TFbOSC401835j.C1.o29.fg
atgtcggacttagggggaaaggacggggaaattggaaatgaagatggagcgagcaacaagggaactccatcacccaagggagccactataccttttgattacaacaaacttaccattccctctcacaacttcgtctccgtgccttccgggcgtgctcctcaatttgatgggacatattacgccgcttggaagcacaagatgaagttgcatctaatctctttgcatccaagtatttggaaaattgtgtgtacaggtattgacgtacctcatgaggacatggagctcacttcggagcaagaacaactcatccaccgcaatgctcaagcttccaatgcaattctctccgccttgagtccggaggagttcaacaaggttgatggactagaggaggccaaggagatatgggatactttgcaattggctcatgagggatcacccgccatttgtgatgccaagattgaactattggaaggaaggctaggaagatttgtgatggatgacaaggagacaccacaagagatgtatgataggatgatgatccttgtcaacaagattaaaggacttgggagtgaggacatgacaaatcactttgttgtcaaaagacttctccgtacttttggtccaagaaatcccactcttgtatcaatgatacgggaaaggaaagacttcaagaggctcaccccaagtgacattcttggaagaattgtgtctcatgagatgcaagaagaggaagctcgtgaagtgagacaaatggtgaagaatgccgccatgatcaagaatcaagaagttgctttgaaggcaaaacaagaagaagagtcaagtggtgaagaaagtcaagatgaagaaatggcttttattgtcaagagattcaagcactttcttcgcaagagtggctatggaaaaggaaggaaggatgatgacaagggaaagaggcaatcaaagagagcgtgcttcaattgtggcgaatttggtcatttcattgccgattgtcccaagtcaaatgaagctaaggctaagggaggcaagaagaagacggagcgtgctcatgtggcggaggcacacatggcggaagtgtggtactctagagatgaagaagatcccgaagtcaagctcaagcccaagtcaaaagacaaggttgaaggagaaggtggtgttgctaccatcgcctttaagtcatcctcttcaagcaaggagcgtctcttcaacaacttgagtgatgacgacgacgactcctaccactactcttgcttcatggcccaaggccgcaaggtgatgactcaaaagccctctcacacttctcttgatgttgattctagtgatgaggaaagtgataatgaattagatgatgtgcttaagagctttagcaaacctgctatgcaacatttggctaagttaatgagagctttggatagtaaagaacaacttctcgaaaggcaagaagaattgcttattcatgagaagaaaagaaaccttgccttagaggagagcttagctaaagaatgtgctaaaaatgaacaactagctaatgagcttaatttggctaatggttctttagctagccttagagatgtcaatgagactcttcaagagaaatttgcttgtttagacaaaagtcataaagatcttgaagttcaatttgacactctttggaatagtacctctcaaccaaatgtggtttctaattcctctaatccttctactagcaatggttgtgctaagtgttacaatattgatttgaactcttatgctactaatattgatgctatgcaagctcttaagaaagagaatgaaaggttgggcacattggtgaaatatggatgcatgaagacataccattcaaaagatgccctttacaagaccatcaccgctcatcctaacaaggatggacacgggcacgggttttcgggtggaagtcctgtgtctaagcgtgtgatggtaaatgggaaagaatgcttgatgtttgtgagagaaggaaaagcaccacaagcaagtgagatcactaatcttgtgagcagccagggacccggaacatccggacaaaccggccaaaacctctgggtgggagtctccatctctcaaaaattcccaccaggaagttccggccggtttgccaggaagttccgggccaatggccgtgcacaagatatgaccggaagttccaggcataatgccaggaggttccgaccagatggtctttactatgattcatatgcatactcctccggtggttcaagttgggttgtggacagtggttgcaccaatcatatgactggagagaggagtatgtttacaagtcttaatgatgagaacggaactcgtgagaatattgtgtttggagatgatggtaaaggaaagttgggttacaattgcttgtttaccgatgaggatgtgaccgtctttagaagggatgactcctccgtagcattcaaaggcaagataaagggtgatctctatcttgtcgatttcgatgtggatagagtgaatccagaagcttgtttgattgctaaatcctccatgagttggctatggcatcgtagactagcccatgttggaatgcggaatttggcaactcttctaaagggggaacaatcctcgggctcattaatgtcacatttgagaaagatcagggtgcgaagcgacaatggaggagaattcaagaacactcaagtgaaggaattccttgacgaagtgggaatcaagcatgagttctccgccccatatgatcctcctcaaaatggcattgttgagaggaagaaccaaactcttattgaagccgcaagatcaatgcttgatgagtacaagacttcggatatcttttgggtggaggccgtgagtaccacatgtcatgccatcaaccgcttgtacctccacaagatcttaaagaaaacttcatatgagctcttgagtggtaagaaacctaatgtttcatattttcgtgtctttgggagcaaatgctttattttgagtaagaggcctcgctcatctaagttctcacctaaggtggatgagggattcttacttggctatgaatcaaatgcacatgcctatcgtgtcttcaacaaaacctccggtattgttgaagtcactagggatgtgacatttgatgaatctaatggctcccaaggagagcaagttgttgtacatgttgtaggtgatgtggattcaagtcaagctataggtactaaggctattggagacatacgaccagtcaagacgcaggatgaccaagaagacagggatcaaccttcgtcatcgacatccaatagccctacattgagtcaagtgtcagtcgacccggaagttccgggaccagatggtcggaacctccgaacctctccaagccaggaagttccgggtccatctgccaggaagttccgggcagaggacagtcaaggcgtgcctacggcacaagtggatggaattgatgctgagggcactgtagagcatcctgatcaggctcaggtcccctcggtgcaccatccaagaatacatcacactgtccaaagagatcatcccgtcgacaacatacttggtgacataagaaaggaggtaactactcgttctcgtgtcgctaacttttgtcaacactatttgtttgtctcttctttggaaccaaccagggttgaagatgcacttggtgatctggattgggtgatggctatgcaagtggagttgaataacttcactcgcaaccaagtatggacattggtggagagacccgaccaaaatgtcatcggcaccaagtggatcttccgcaacaagccagatgaacatggagtggttgtaaggaacaaagcccggttagttgcgcaagggttcacccaaatcgagggtctcgattttggtgaaaccttcacacccgttgctcaccttgagtcaatccgaatccttttagcctatgccgctcaccatgatttcaggttattccaaatggatgtcaagagtgcctttctcaatggacctatctcggagttggtctatgtggagcaaccaccggggttcgaagatccaaggttgccaaaccatgtgtacaagctccacaaggcgctctacgggctcaaacaagcccctagagcttggtatgaatgtctccgagattttcttttgaaaaatggttttgaaattgggaaggcggatactactctcttcactaaaaaatctaagagtgatttattcatttgccaaatttatgtcgatgacataatatttggttctactaatgcctctttttgtgaagaatttagtagtatcatgactaaaaggttcgagatgtctatgatgggcgagttgacctttttcctcgggctacaagtgaagcaagtacaagagggcactttcatctctcaaaccaagtacgtgaaggacattctcaagaagtttgggatggaagatgccatacccatcaagactcctatgcctaccaatggccacctagacctcgacgataatggtaaatgtgtggaccaaaaggtatatcgctccatgataggatccttgctttacttatgtacatctcgtcccgatatcatgcttagtgtttgcatgtgtgctcgctttcaagcggagcctaaagagtgctatttgattgccgtcaagagaattctaagatatttagtccatactcctaatcttggcttgtggtatcctaagggttgtgactttgagcttttgggctattccgattcggattacgccgggtgtaaggttgatagaaaaagcacaaccgggacttgccaatttcttgggcggtcccttgtttcttggtcctccaagaagcaaaattctattgctttatccaccgccgaagtcgaatatgtcgccaccggttcttgttgtgtccaactcctttggatgaaacaaaccctaaaagactttggctacaacttcaccaagatcccactcctatgtgacaatgagagtgccatcaaaatagccaataatcccgttcaacattctcgaaccaaacacatagatattcgccaccactttttgagagatcatgagaccaaaggagacatttgccttacacatgtgagaaccgagagcatattggccgacattttcaccaagcctttagatgagaaaagattttgcgagcttaggagtgagctcaatatcttagattctcgcaacattaggtga

SEQ ID NO: 15595 - DNA, 6150 bp, Oryza sativa
  Clone ID: TFbOSC900009j.C1.o24.fg
atgttggacttagggggaaaggacggggaaattggaaatgaagatggagcgagcagcaagggaactccatctcccaagggagccactataccttttgattacaggaaacttaccattccctctcacaactttgtctccgtaccttccgggcgtgctcctcaatttgatgggacacattacgccgcttggaagcacaagatgaagttgcatctaatctctttgcatccaagtatttggaaagttgtgtgtacaggtattgacgtacctcatgaggacatggagctcacttcggagaaagaacaactcatccaccgcaatgctcaagcttccaatgcaattctctccgccttgagtccggaggaattcgacaagggatcacccgccgttcgtgaggcaaagattgaattattggaaggaaggctaggaagatttgtgatggatgacaacgagacaccacaagagatgtatgataggatgatgatccttgtcaacaagattaaaggacttgggagtgaggacatgacaaatcactttgttgtcaagagacttctccgtgcttttggtccaagaaatcccactcttgtttcaatgatacaggaaaggaaagacttcaagaggctcaccccaagtgacattcttggaagaattgtgtctcataagatgcaagaagaggaagctcgtgaagtgagacaaatggtgaagaatgccgccatgatcaaaaatcaagaagttgctttgaaggcaaaacaagaagaagagtcaagtggtgaagaaagtgaagatgaagaaatggcttttattgtcaagagattcaagcactttcttcgcaagagtggctatggcaaagggaggaaggttgatgacaagggaaagaggcaatcaaagagagcgtgcttcaattgtggcgaatttggccatttcattgccgattgtcccaagtcaaatgaagctaaggctaagggaggcaagaagaagctggaacgtgctcatgtggcggaggcacacatggcggaagtgtggtactccggagatgaagaagatcccgaagtcaagcccaagcccaagtcaaaagacaaggttgaaggagaaggtggtgttgctactgtcaccttcaagtcatcctcttcaagcaaggagcgtctcttcaacaacttgagtgatgacgacgacgactcctaccactactcttgcttcatggcccaaggccgcaaggtgatgactcaaaagccctctcacacttctcttgatgttgagtctagtgatgaggaaagtgataatgaattagatgatgtgcttaagagctttagcaaacccgctatgcaacacttggctaagttaatgagagctttggatagtacagaacaattactcgtaagacaagaagaattgcttattcttgagaagaaaagaaatcttgccttagaggagagcttagctaaagaaagtgctaaaaataaacaactagctaatgagcttaattttgctaatggttctttagctagccttagagatgtcaatgagactcttcaagagaaatttgcttgtttagacaaaagtcataaagttcaaattgacactctttggaatagtacctctcaaccaaatgtggtttctaattcctctaacccttctactagcaatggttgtgctaggtgttacaatattgatttgaactcttatgctactaatattgttgctatgcaagctcttaagaaagagaatgaaaggttgggcacattggtgaaatatggatgcatgaagacataccattcaaaagatgccctttacaagaccatcaccgctcatcctaacaaggatggacacgggctcgggttttcgggtggaagtcctgtgtctaagcgtgtgatggtaaatggaaaagaatgcttgatgtttgtgagagaaggaaaagcaccacaagcaagtgaggtgactaatcttgtgagcagccagggacccggaacatccggacaaaccggccaaaacctccgggtgggagtttctgtctctcaaaaattcccaccaggaagttccggccagtttgccaggaagttccgggccaatggtcgtgcacaagacataaccggaagttccgagcataatgctaggaggttctggccagatggtctttactatgattcatatgtaattttcaaaaattcagagggcaaagtggttgcttattttaatgggaattacaatgatgaatatcgcacttgtgtgtgggtgccaaaggctttggcatactcctccggtggttcaagttgggttgtggacagtggttgcaccaatcatatgactggagagaggagtatgtttacaagtcttgatgaggagaacggaactcgtgagaatattgtgtttggagatgatggtaaaggaaagttgggttacaattgcttgtttaccgatgaggatgtgaccgtctttagaagggatgactcctccgtagcattcaaaggcaagttaaagggtgatctctatcttgtcgatttcgatgtggatagagtgaatccggaagcttgtttgattgctaaatcctccatgggttggctatggcatcgtagactagcccatgttggaatgcggaatttggcaactcttctaaagggggaacacatcctcaggctcactaatgtcacatttgagaaagatcgtgtgtgtagtgcttgccaggccgggaaacaagttgggaatccacatcctatcaagaacatcatgactacaacacgtcctcttgagcttctacatatggatttattcgggcccatggtgtacataagtattggaggtaacaagtatgattttttcattgttgatgatttttcccgcttcacttgggtgtattttctccatgacaagagtgaggctcaagatgtcttcaagcgcttcgccaagcaagcccaaaacctctatgatctcaccatcaagagggtgcgaagcgacaatggaggagaattcaagaacactcaagtggaggaattccttgatgaagtgggaatcaagcatgagttctccgccccatatgatcctcctcaaaatggcattgttgagaggaagaaccgaactcttattgaagccgcaagatcaatgcttgatgagtacaagacttcggatattttttgggcggaggccgtgagtaccgcatgtcatgccatcaaccgcttgtacctccacaagatcttaaagaaaacttcatatgagctcttgagtggtaagaaacctaatgtttcatattttcgtgtctttgggagcaaatgctttattttgagtaagagacctcgctcatctaagttttcacctaaggtggatgagggattcttacttggctatgaatcaaatgcacatgcctatcgtgtcttcaacaaaacctccggtattgttgaagtcactagggatgtgacatttgatgaatctaatggcttccaaggagagcaagttgttgtacatgttgtaagtgacgtggatccaagtcaagctataggtactaaggctattggagacatacgaccagtcgagacgcaggatgaccaagaagacagggatcaaccttcgtcatcgacatccaatagccctaaattgagtcaagtgtcagtcgacccggaagttccgggaccagatggtcggaacctccggacctctccaggccaggaagttccgggtccatctgccaggaagttccgggcagaggacagtcaaggcgtgcctatggcacaagtggatgggattgatgccgagggcactgtagagcatcctgatcaggctcaggtcccctcggtgcaccatccaagaatacatcacactgtccaaagagatcatcccgtcgacaacatacttggtgacataagaaagggggtaactactcgttctcgtgtcgctagcttttgtcaacactattcgtttgtctcttctttggaatcaaccagggttgaagatgcacttggtgatccggattgggtgatggctatgttattccaaatggatgtcaagagtgcctttctcaatggacctatctcggagttggtctttgtggagcaaccaccggggttcgaggatccaaagttgccaaatcatgtgtacaagctccacaaggcgctctacgggctcaaacaagcccctagggcttggtatgaatgtctccgagattttcttttgaaaaatggttttgaaattggaaaggcggatactactctcttcactaaaaaatttaagagtgatttattcatatgccaaatttatgtcgatgacataatatttggttctactaatgcctctttttgtgaagaatttagtagtatcatgactaaaaggttcgagatgtctatgatgggtgagttgaccttcttccttgggctacaagtgaaacaagctcaagagggtactttcatctctcaaaccaagtacgtgaaggacattctcaagaagtttgggatggaagatgccaaacccatcaagacgcccatgcctactaatggccacctagacctcgacgataatggtaaatgtgtggaccaaaaggatgtgtccggtgatgagagtcctcctattcgttttcctcgtggtcgtttgggaaaagagaaagtggttgaaggtggcagtggcagcggcactcgtacctctcccaggtttagaaggcaaaccagcaatcgcccagttcaaattcgagatgttgacagtggtcagggtagtgatgctccttcttcaagaggtcgtgggagaggtggtggtcgctcttctggggctggaagggcttctcatgatttccctgttgggtctcgtgagaatctcgttcggctctacaagactattggttttgacaccactcctatgcaccacattgggagacccaagtccaactaccttcatcagcttgccaagtgccgaaggggccgattgattgatccagagacacagcctgaggagtcacaggatccacgtttcagaaccttaactcagttggattggtacaactcagtgattatggctagagacaatctagtggttgagatgaagtggattgattggacttacatgaggaagaaaaacaatgaagtgttcaatcaagcaatgcaagtttgccacaacaagaatcttggggatattcttgccttggagtatgattggaatgaggaggtcattgcacagttctatgcgacagctttctttggttctacaaggaagggaactccttatgtaaaatggatgactgagggtgttaggcacaagatttccatagcacagtttgctgagatattgggcttggaggatgaggatctcaataggcctaatattcatagtgaagcacccctccccttgatcaagaccaagttcatgtatactaagaatgctcctagaacttgtatgggacctactcatggtttgcatccaaactacaaggtgttgtactccatctttcgttggtctttgcttccaaaggttggagatgccactgctttgccttccaaacatgctcatcttctcagtcgcatgcgctacaatcagcctcctttcagtgtgaagttgatttggtatgagattgccaacaccattcttgagcctaagcgaggttgcatctatgctccattcattatgaagatgattgagtcagtcaccggggtgttctacatcaaagatgggcgccacaatccttttcgtcctcgtgttccaccatcctcttcttcagtggcacctagatccatcccctctacctcggctggtccttcttctagtgctccaccgccatcctcgagctcttctcccatcaagaaggcacttcaggcaatcttctgtatgtgtgctaagactgcaaagaaagtgaagaagatagaaaggcgtcagaaggaagatagaagagaggctgggaaagaagtgtcagatgattctgaagatgaggtctatgtggatccttttgaggcttatgaggcagcccgtaatgttgccggtgaaggtccatccacctatttcaatgaagagtcttcccaatcagatgatgatgatgatgatgatgatgatgaggatgacattgacgcagctgctgagtatgttcctactgatgttgaggaagctgttgacaccgctgcacaatccgatgagtctcatctctccggcgataccgagattgttccctcagatggagatggagatgagtga

SEQ ID NO: 15596 - DNA, 7011 bp, Oryza sativa
  Clone ID: TFbOSC900298j.C1.o14.fg
atgtcggacttagggggaaaggacggggaaattagaaatgaagatggagcgagcagcaagggaactccatctcccaagggagccactataccttttgattacagcaaacttaccattccctctcacaacttcgtctccatgccttctgggcgtgctcctcaatttgatgggacacattacgccgcttggaagcacaagatgaagttgcatctaatctctttgcatccaagtatttggaaagtcgtgtgtacaggtattgacgtacctcatgaggacatggagctcacttcggagcaagaacaactcatccactgcaatgctcaagcttccaatgcaattctctccgccttgagtccggaggaattcaacaaggttgacggactagaggaagccaaggagatatgggatactttgcaattggctcatgagggatcacccgccgttcgtgaggcaaagattgaattattggaaggaaggctaggaagatttgtgatggatgacaaggagacaccacaagagatgtatgacaggatgatgatccttgtcaacaagattaaaggacttgggagaagatttgtgatggatgacaaggagacaccacaagagatgtatgacaggatgatgatccttgtcaacaagattaaaggacttgggagtgaggacatgacaaatcactttgttgtcaagagacttctccgtgcttttggtccaagaaatcccactcttgtttcaatgatacgggaaaggaaagacttcaagagactcaccccaagtgacattcttggaagaattgtgtctcatgagatgcaagaagaggaagctcgtgaagtgagacaaatggtgaagaatgccgccatgatcaaaaatcaagaagttgctttgaaggcaaaacaagaagaagagtcaagtggtgaagaaagtgaagatgaagaaatggcttttattgtcaagagattcaagcactttcttcgcaagagtggctatggcaaagggaggaaggatgatgacaagggaaagaggcaatcaaagagagcgtgcttcaattgtggcgaatttggccatttcattgccgattgtcccaagtcaaatgaagctaaggctaagggaggcaagaagaagccggaacgtgctcatgtggcggaggcacacatggcggaagtgtggtactccggagatgaagaagatcccgaagtcaagcccaagcccaagtcaaaagacaaggttgaaggagaaggtggtgttgctaccgtcgccttcaagtcatcctcttcaagcaaggagcatctcttcaacaacttgagtgatgatgacgacgacgattcctaccactactcttgcttcatggcccaaggccgcaaggtgatgactcaaaagccctctcacacttctcttgatgttgagtctagtgatgaggaaagtgataatgaattagatgatgtgcttaagagctttagcaaacccgctatgcaacatttggctaagttaatgagagctttggatagtaaagaacaattactcgaaaggcaagaagaattgcttattcttgagaagaaaagaaaccttgccttagaggagagcttagctaaagaatgtgctaaaaatgaacaactagctaatgagcttaattttgctaatggttctttagctagccttagagatgccaatgagactcttcaagagaaatttgcttgtttagacaaaagtcataaagatcttgaagttcaatttgacactctttggaatagtacctctcaaccaaatgtggtttctaattcctctaacccttctactagcaatggttgtgctaggtgttacaatattgatttgaactcttatgctactaatattgatgctatgcaagctcttaagaaagagaatgaaaggttggacacattggtgaaatatggatgcatgaagacataccattcaaaagatgccctttacaagactatcaccgctcatcctaacaaggatggacacgggctcaggttttcgggtggaagtcctgtgtctaagcgtgtgatggtaaatggaaaagaatgcttgatgtttgtgagagaaggaaaagcaccacaagcaagtgaggtgactaatcttgtgagcagccagggactcggaacatctggacaaaccggccaaaacctctgggtgggagtttctgtctctcaaaaattcccaccaggaagttccggccagtttgccgggaagttccgggccaatggccgtgcacaagacatgaccggaagttccaggcataatgccaggaggttccggccagatggtctttactatgattcatatgtaatttccaaaaattcagagggcaaagtggttgtttattttaatgggaattacaatgatgaatatcgcacttgtgtgtgggtgccaaaggctttgacatactcctccggtggtttaagttgggttgtggacagtggttgcaccaatcatatgactggagagaggagtatgtttacaagtcttgatgaggagaacggaactcgtgagaatattgtgtttggagatgatggtaaaggaaaggtaatgggtctaggtaaaattgccatctccaataatcaatctctctccaatgttcttcttgtcaattcattaagctacaatttattatccgtttctcaattatgtaagttgggttacaattgcttgtttaccgatgaggatgtgaccgtctttagaagggatgactcctccgtagcattcaaaggcaagttaaagggtgatctctatcttgtcgatttcaatgtggatagagtgaatccggaagcttgtttgattgctaaatcctccatgggttggctatggcatcgtagactagcccatgttggaatgcggaatttggcaactcttctaaagggggaacacatcctcgggctcactaatgtcacatttgagaaagatcgtgtgtgtagtgcttgccaagccgggaaacaagttgggaatccacatcctatcaagaacatcatgactacaacacgccctcttgagcttctacatatggatttattcgggcccgtggcctacataagtattggaggtaacaagtatggttttgtcattgttgatgatttttcccgcttcacttgggtgtattttctccataacaagagtgaggctcaagatgtcttcaagcgcttcgccaagcaagcccaaaacctctatgatctcaccatcaagagggtgcgaagcgacaatggaggagaattcaggaacactcaagtggaggaattccttgatgaagtgggaatcaagcatgagttttccaccccatatgatcctcctcaaaatggcattgttgagaggaagaaccgaactcttattgaagccgcaagatcaatgcttgatgagtacaagacttcggatattttttgggcagaggccgtgagtaccgcatgtcatgccatcaaccgcttgtacctccacaagatcttaaagaaaacttcatatgagctcttgagtggtaagaaacctaatgtttcatattttcgtgtctttgggagcaaatgctttattttgagtaagaggcctcgctcatctaagttctcacctaaggtggatgagggattcttacttggctatgaatcaaatgcacatgcctatcgtgtcttcaacaaaacctccggtagtgttgaagtcactagggatgtgacatttgatgaatctaatggctcccaaggagagcaagttgttgtacatgttgtaggtgatatggatccaagtcaagctataggtactaaggctattggagacatacgaccagtcgagacgcaggatgaccaagaagacagggatcaaccttcgtcatcgacatccaatagccctacattgagtcaagtgtcagtcgacccgaaagttccgggaccagatggtcggaacctccagacctctccaggccaggaagttccgggtccatctgccaagaagttccgggcagaggacagtcaaggcgtgcctacggcacaagtggatgggattgatgccgagggcactgtagagcatcctgatcaggctcaggtcccctcggtgcaccatccaagaatacatcactgtccaaagagatcatcccgtcgacaacatacttgggttgaagatgcacttggtgatccagattgggtgatggctatgcaagaggaattgaataacttcactcgcaatcaagtatggatgttggtggagagacccaaccaaaatgtcatcggcactaagtggatctttcgcaacaagcaagatgaacatggagtggttctaaggaacaaagcccgattgcgcaagggttcacccaagttattccaaatggatgtcaagagtgcctttctcaatggacctatctcggagttggtctttgtggagcaaccaccggggattgaggatccaaagttgccaaaccatgtgtacaagctccacaaggcgctctacgggctcaaacaagcccctagggcttggtatgaatgtctccgagattttcttttgaaaaatggttttgaaattggaaaggcggatactactctcttcactaaaaaatttaagagtgatttattcatatgccaaatttatgtcgatgacataatatttggttctactaatgcctctttttgtgaagaatttagtagtatcatgactaaaaggttcgagatgtctatgatgggtgagttgaccttcttccttgggctacaagtgaaacaagctcaagagggcactttcatctctcaaaccaagtacgtgaaggatattctcaagaagtttgggatggaagatgccaaacccatcaagacgcccatgcctactaatggccacctagacctcgacgataatggtaaatgtgtggaccaaaaggtttatcgcttcatgataggatccttgctttacttatgtgcatctcgtcccgatatcatgcttagtgtatgcatgtgtgctcgctttcaagcagagcctaaagagtgtcatttgattgccgtcaagagaattctaagatatttagtccatactcctaatcttggcttgtggtatcctaagggttgtgactttgagcttttgggctattccgattcggattacgccgggtgtaaggttgatagaaaaagcacaaccgggacttgccaatttcttgggcggtcccttgtttcttggtcctccaagaagcaaaattccattgctttatccaccgccgaagccgaatatgtcgccgccggttcttgttgtgcccaactcctttggatgaaacaaaccctaaaagactttggctacaacttcaccaagatcccactcctatgtgacaatgagagtgccatcaaaatagccaataatcccgttcaacattctcgaaccaaacacatagatattcgccaccactttttgagagatcatgagaccaaaggagacatatgccttacccatgtgagaaccaaaacccaattagccgacattttcaccaagcctttagatgagaaaagattttgcgagcttaggataagcactatgactcgtgagaaaagacagaaagcttctcaggatgtgtccggtgatgagagtcctcctattcgttttcctcgtggtcgtttgggaaaagagaaagtggttgaaggtggcagtggcagtggcactcgtacctctcccaggtttaccaggcaatccagcaatcgcccagttcagattcgtgatgttgacagtggtcaaggtagtgatgctccttcttcaagaggtcgtgggagaggtggtggtcgcacttctggggctggaagggcctctcatgatttccctgttggatttcgtgagaatcccgttcggctctacaagactattggttttgacaccactcctattcatcacattggaagacccaagtccaactaccttcatcagcttgccaagtgcagaagggaccgtttgattgatccagagacacagcctgaggagtcacaagatccacgtttcagaactttaactcagttggattggtacaactcaatgattatggctagagacaatccagtggttgagatgaagtggattgattggacttacatgaggaagaagaacaatgaagtgttcaaccaagcaatgcaagtttgccacaacaagaatcttggagatattcttgccttggagtatgattggactgaggaggtcattgcacagttctatgcgacagcattctttggtactactaggaagggaactccttatgtaaagtggatgactgcgggtgttaggcacaagatttccatagcacagtttgctgagatattgggcttagaggatgaggatctcaataggcctaatattcatagtgaagcacccctccccatgatcaagactaagttcatgtatactaaggatgctcctaggacttgtatgggaactactcatggtttgcatccaaactacaaggttggagatgccactgctttgccttccaaacatgctcatcttctcagtcgcatgcgctacaatcagccacttttcagtgtgatgaagttgatttggtatgagattgccaacaccattcttgagcctaagcgaggttgcatctatgctccattcattatgaagatgattgagacagtcaccggggtgttctacatcaaagatgggcgccacaatccttttcgtccttgtgttccaccttcctcttctccagtggcacctagatccatcccttctacctcagctggtccttcttctagtgccccaccgcaatcctcgagctcttctcccatcaagaaggcacttcaggcaatcttctgtatgtgtgctaagactgcaaagaatgcttatgaggcagcccgcaatgttgccggtgaaggttcatccacctatttcaatgaagagtcttcccaattagatgatgatgatgatgatgatgaggatgacactgacgcagctgctgaggatgctcccactgatgtagacaccgctgcacagtccgatgagtctcatctctccggcgataccgagattgttccctccgatggagatggagatggagatgagtga

SEQ ID NO: 15597 - DNA, 3279 bp, Oryza sativa
  Clone ID: TFbOSC34887j.C1.o12.fg
atgatgcagcagatgcagcagcagcaccagcagatgtaccagaggatgcggcagcaagccgagcagcagcagcagcagtttggtccctctccccctcagtccaaactgccggagtttctacgcgtcagaccacccaccttttctagcaccaccaaccctatggaggcaaatgactggctccatgccatagagaagaagctaaatctcctgcagtgcaatgatcaggagaaggccgccttcaccacacaccagctccagggtcccgcatcagcttggtgggacaatcacatggccacacgtccgccaggcacggaagtcacttgggtggagttctgccgcagcttcaggaaggcgcaggtgccagatggggtcgtggcacaaaagaagagagaattccgagcactccaccagggcaacaggacggtgacggagtatctccatgagttcaatcgcctcgcgcgatatgcaccggaggatgtccgtactgacgccgagaagcaggagaaattcctagcaggtctggatgatgagctaaccaaccagttgatatctggagactacgccgacttcgagaggctggttgacaaggcaatccgtcaggaggatcagcgcaacaaaatggataggaagaggaaggcggcgcagttccgcaacttccatcagggcgctagtggcagccagaaccaccatggcggtcagcccaaccgcagtgcagctccacgcccaccaatggcaccagcacagtcagcttcgtccacgcaagccaagaaggagactgggacaaagccagggtcctgcttcaactgtggcgagcttggccacttcgctaacaaatgcccgaagcctaggcgtgctgggccaaggtttgtccaggctcgtgtcaaccacgcgtctgcggaggaggcacaagtagcaccagaggtcgtactgggtacgtttcctgttaactcaatccctgcaacagtactttttgattctggtgcaacgcattcattcatttcaaagaagtttgtcgggatgcatgggttaataagagaggaacttagtacaccaatgcgggttcataccccagggaatagctccactttggttcaattcagcccctcggtaacgatagaaattcaaagatcactctttctggccaacctcatccttctcgaatccaaagacctagatgtcattcttggtatggattggctgaccaggtttaagggtgtcattgattgtgcgaatcgcacagtcaccttgaccaatgagaagggagaaaccgtggtgtacaagtcactagtctcaccaaagcaaggggtttccttgaatcagattaaggtggaaaaccctgtgaccaccgaggagaagggaactgcccctatttacaagagaccgtacagaatggcggccaacgagctagcagaggtcaagaagcaggtcgatgagcagctgcagaaagggtacattcgaccaagtacttcaccttggggtgcaccggtcatttttgtggagaaaaaggataagacgaagaggatgtgcgtcgactatcgcgcactcaatgaggtcacaatcaagaacaaatatcctttaccgcggatcgatgatttctttgataagctgaaaggagctaaattgagaattcgggaagaggatattccaaagacggccttcaccactcggtacgggctatatgagtgcacggttatgtctttcagacttaccaacgcacccgcattcttcatgaatctgatgaacaaagtgttcatggaatttctcaacaagtttgttgtggtgttcatcgacgacatacttatctattcaaaatctgaagaagaacataagcaacatctccgtctggtactcgagaagttgaaggagcaccagttatatgccaagttcagcaagtgtgacttcttgttgtcggaagtcaaatttctgggtcacgtcatcacagctcagggcgtggcagtcgatccgtcgaatgtggagtcagttaccaaatggaccccaccgaagaccgtgtcgcaaattcggagttttcttggacttgcgggttattaccgtcgattcattgaaaacttctcgaggatcgcccgacccatgactcagttgcttaagaaagatgagaagtttaaatggacagctgagtgtgacaagagttttgaggagttcaagaagaaattagtatccgccccagttctgattctgcccgaccagatgaaagacttccaaggcagagtggtcgcatatgcctcgcggcagttgcgtccacatgaagggaattatccaactcatgacctggaattggcagcagtggttcatgctttgaagatctggaggcactatttgattggcaaccgctgcgaagtatatacggaccacaagagtctgaaatacatcttcacccaaccggacctaaatctccgacaacgaagatggttggaactaatcaaagactatgacatgagcattcactaccacccgggtaaagtcaatgtggtggcaaatgcgcgaagcaggaaaagctactgcaatgccctatgcatcgagggcatgtgtggagaattgcagcaggagcttgagcgtctcaacttgcgacttgttgaacacgggtacgtggctgccctagaggcacgacctacgctcgtggatcaagtcagagtagcccaagtgaatgatcctgagatagctgaactgaaaaagaatatgagggtcggaaaagcctgggacttccacgaagatgaacacggcacaatttggatgggagaaagattgtgtgtacctgacgacaagttggcagagctctacctctcgagaatcatgtgtctacatggagtacccaaaaagatagtatctgatcgagggagccaattcacttcaaagttctggcagaaattgcaagaggaattgggaacccggctgaatttctgcacagcctaccatccgcagacagatggtcagaccgaaagggtcaaccaaatcttggaagatatgctacgagcatgtgcactcgactttggtggagcatgggataaaagtctgccttatgccgaattcttgtacaacaacagctatcaggccagtctacaaatggcgccgttcgaagcgttgtatggccggaagtgccgcacacctctcttctgggatcaaacaggcgaacgtcaactgttcggaacggaagtgttaacagaagcagaggagaaagtcaggattgtcagagagaggctgaggattgcccagtctcgacagaaaagctacgtggacaaccgccgacgagagctcacgttttaa

SEQ ID NO: 15598 - DNA, 4419 bp, Oryza sativa
  Clone ID: TFbOSC416291j.C1.o22.fg
atggtctacaccaggaatggtagccgcgcgacaggcgagggcagcaacggcgaagagcgcactgatggggcgcatccccacagcgattctggccatggtccgccgccacttcccaagaatccgacgctagcccaagtgatggcacatcagacacagatgatggcagccatgatgcagcagatgcagcagcagcaccagcagatgcaccagcggatgctgcagcacgccgaacagcagcaccagcagtttggtccccctccccctcagtccaagttgccagagtttctacgcgtcaggccacccaccttctccagcaccaccaaccctatggaggcgaatgactggctccatgtcatagagaagaagctgaatctcctgcagtgcaatgatcaggagaaggttgctttcgccacacaccagcttcaaggtcctgcgtcggcttggtgggacaatcacatggccacccgcccaccaggtactgaagtcacttgggcagagttctgccgtagcttcaggaaggcgcagggcaacaggactgtgacagagtacctccatgagttcaatcgcctcgcgcgatatgcaccagaggatgtccgcaccgacgccgagaagcaggaaaagttcatggcgggtctggatgacgagctgaccaaccaactgatatctggggactacgctgacttcgagaggctggttgacaaggcaatccgtcaggaggatcaacgcaacaagatggacaggaagaggaaggccgcacagttcagagcacctcagggaagtcaccagaggccgcgcttcgctcccgggcagcagggtggacctaccaccatgatcgttcatcagcaccgcccgttcaaccctagcaactttccccagggcgccagtggcagtcagaaccaccatggaggtcagtccaatcacggtgcagctccacgcccaccaatggcaccggcacagacaggcccgcccgcgcaatccaagaaggagactggagcaaaaccagggtcctgcttcaactgtggcgagcttggccacttcgctaacaaatgcccgaagcctaggcgtgccgggccaaggtttatccaggctcgtgtcaaccacgcatctgcggaggaggcacaagcagcaccagaggctgtactgggtacgtttcctgttaactcaatccctgcaacaatactttttgattctggtgcaacgcattcgttcatttcaaagaagtttgtcgggatgcatgggttaataagagaggaacttagcacaccaatgcgggttcataccccagggaatagctccacttcagttcaattcagcccttctataacaatagaaatccaaagatcaccatttctagccaacctcattcttctcgaatccaaagacctagatgtcattcatgggatggattggctgaccaagtttaagggggtcatcgattgtgcgaatcgcacagtcaccttgaccaacgagaagggagaaaccgtggtgtataaatcactagtctcaccaaagcgaggggtctctttgaatcagattgagacggaaattccagtggacactgtggagaagaatttggggaaattggaagatatacccatagtctgcgagtatccagaagtgttccccaaagaccttactaccatgccacccaagagagagattgaattccggattgacttggcaccggggaccgctccaatttacaagaggccgtacagaatggcggccaacgaattagcagaggtcaagaagcaggttgatgagcagctgcagaaagggtacattcgaccaagtacttcaccttggggtgctccggtcatttttgtggagaaaaaggataagacgaagaggatgtgcgttgattatcgcgcactcaacgagatagacctgcgatcaggctaccaccagttgagaatctgggaagaggatattccaaagacggagatcaggctatatgagtgcacggttatgtccttcggacttactaacgcacctgcattcttcatgaatctgatgaacaaagtgttcatggaatttctggacaagtttgttgtggtattcatcgacgacatacttatctattcaaagtccgaagaagaacatgagcaacatctccgtctggtactcgagaagttgaaggagcaccagctatacgccaagttcagcaagtgtgacttttggttgacggaagtcaaatttctgggccatgtcattacagctcagggtgtggcagttgatccatcgaacgtggagtcagtcaccaaatggaccccaccgaagaccgtgtcgcagattcgaagttttcttggacttgcaggttattaccgccgattcatcgaaaacttctccagaatcgcccgacccatgactcagttgcttaagaaagatgagaagtttaaatggacagctgagtgcgataagagttttgaggagctcaaaaagaaattagtatccgcaccagttttgattctgcctgaccagatgaaagacttccaagtctattgcgatgcatcccgtcacggacttggatgtgttctaatgcaagagggcagagtggttgcgtatgcctcgcggcagttacgtccacacgaagggaattatccaactcatgacctggaattggcagcagtggttcatgctttgaagatctggagacactatctgattggcaaccgctgcgaagtatatacggaccataagagtctgaaatacatcttcacccaaccggacctaaatctccgacaacgaagatggttggaactaatcaaagactatgacatgagtattcactaccacccgggtaaagccaatgtggtggcagacgctttaagccggaaaagttactgtactgccctgtgcatcgagggcatgtgtgaggaattgcggcaggaatttgagcatctcaacgtgggaattgttgaacacgggtttgtggccgctctggaggcgcggcctacgctcgtggatcaagtcagagctgctcaagtaaacgattctgaaatagcagagctaaaaaagaacatgagagtcggaaaagcccgggatttccacgaagatgaacatggcacaatctggttgggagaaagattgtgtgtgcctgacgacaaggaactgaaggatctgatactcaccgaggctcatcagacccagtactcgattcatccaggcagcactaaaatgtatcaagacctcaaagaaaagttttggtgggtcagcatgaggagagaaatagctgaattcgtcgcactctgtgatgtttgccaacgagtgaaggcagagcaccaaagaccagcaggtttactccaacctcttcaaatcccggaatggaaatgggaggagattggaatggactttataacaggactgccccggacatcatcgggtcacgattcgatctgggtagtcgtggatcgactcactaaggttgctcacttcataccagtacataccacatatacgggcaaaaggttggcggagctttacctttcgagaatcatgtgcctacatggagtacccaaaaagattgtatctgaccgagggagtcagttcacctcaaaattctggcagaagctgcaggaagaattggggacccgtttaaatttcagcacgggctatcacccgcaaactgatggtcagaccgagcgagtcaatcaaatcttggaagatatgttgagagcttgcgctcttgattttggtggagcttgggacaaaagcttgccatatgcggaattctcgtacaacaacagctaccaggccagtctacagatggcaccgtttgaagctttatacggccggaagtgccgcacacctctcttctgggatcagacaggcgagcgtcaactgttcggaacagaggtattagcggaagcagaagagaaagtcagaatcatcagggaaaggttgaggattgcccagtctcgacagaagagctacgcggataaccgccgaagggaactcacttttgaggcaggagattacgtgtatctttgtgtcactccgctccggggagtacaccgttttcagacaaaaggcaagttggcaccacgcttcgtgggaccatacaaaattttggaacgaaggggagaagttgcttatcagttagaacttccatccaatatgatcggcatccatgacgtgttccacgtgtcccaattaaagaagtgcttaagggtacctgaagaacaggctgattcggaacacattgatatccaggaggatctaacatacgtggagaagccggttcgcatacttgataccagtgaaaggaaaaccagaaacaaggtcacccgattttgccgagttcagtggagtcatcattcaaaagaggaagcaacctgggaaagggaagatgagttgaaagccgcccatccgcatctcttcaccagctcctccgaatctcggggccgagattccgtttaa

SEQ ID NO: 15599 - DNA, 1521 bp, Oryza sativa
  Clone ID: TFbOSC10633j.C1.o1.fg
atgtcaggagtcacgtcaatgtcacccaccgcaggtgcgagatcagatgccagcccggaacccgaatcagagtcagagtcaggagttcccaatatcggcaccgaagacccctgtcaaaatgctgtccagattcccgaagataacgacagccaagtcaacgtcagaccaaaggaaagtcattatgtaaggaactgtccatggaaggtgttcgccaggtcacctgaaaaagacgagaagcagtgcccagggagtaaccaagctccaagtcagtctaccgacaagaaggatggtactttgcagcccaactctggagcgaacaggacagtgatatggaagatggataatggcaggaccatgatcatcaccggttcagaatttactcctgaagacgcagcaaggatacccaagcgtcagagaggaagaaataccttccgaggagcgcgtcagctaacccgtcatctcataaagtacggtccgcccagacccgaagatgatgaatcaggagaacggttttctgctgatgacgatgacgacaacgatgatgataatgatgagaatgatgatgcgacccttgacagtttcagggaaagagagttgaagttcaaagcatgtgctagatgtgggatagtcggacacactgctagtttatgcctccccacatgccgctgtggtgaatatacccattactcagatgcatgccctttaaggaaggtcacatgtttcttgtgtgaaggaacagatcatgtgcctaaggactgtcagttgaatgcggtcatagctaagaccaagaaagaacaagggacaaccgtgcaacccattcgtcaaccaatgacaatcgacaacagcggtcacaatccttctgctcttcctccaactccagctccagtggaagccaaccatggaagaagcaacgtcaccaaggatgttcataagtctctgcttgttcccgtttcagctgccaaagtgcataatcagaagcctgcaccctgggaccaagcaagtcgatcctgtcgcaactgtcgtaagccaggacattgtttcagtgattgccctcttccaagagcagcaaaggcagttcgtcgtgattcacaagttaccagcactgcccatgacaccaatcgacacctaaatgtgcaacctccgccccaacggattatcgtcaagggcaccgtcaaaggtcgcattgttccaccggcaatcgtttcaagcctacaacaccaacgccagcaaggtaagcaatgccaggagaataatagctcgctacagctacaaagaggcagtacactccttcgccagcacccgcggcaagcttcgtcagccccaggtcacccagcagttgtcagctctagcaatgcacctcgtattgctccaatccaaaggcccatcggcaaatcaccgctcggtaaccccgcgagcaagaagttcctacctgctgcagctgtcaagagagttgttactccaccatcgaagatcaacaagcagagcaacattcccggtgagacttcagccagtaggaattaa

SEQ ID NO: 15600 - DNA, 1647 bp, Oryza sativa
  Clone ID: TFbOSC404116j.C1.o1.fg
atgtcggccttagggggaaaggacgggaaaattggaaatgaagatggagcgagcagcaaaggaactccatcacccaaggttgccactataccttttgattacagcaaacttaccattccctctcacaacttcgtctccgtgccttccgggcgtgctcctcaatttgatgggacacattacgctgcttggaagcacaagatgaagttgcatataatctctttgcatccaagtatttggaaagttgtgtgtacaggtattgacgtaccttatgaggacatggagctcacttcggagcaagaacaactcatccaccacaatgctcaagcttccaatgcaattctctccgccttgagtccggaggagttcaacaaggttgatggactagaggaggccaaagagatatgggatactttgcaattggctcatgagggatcacccgccgttcgtgaggccaagattgaattattggaaggaaggctaggaagatttgtgatggatgacaaggagacgccacaagagatgtatgataggatgatgatccttgtcaacaagattaaagaacttgggagtgaggacatgacaaatcactttgttgtcaagagatttctccgtgcttttggtctaagaaatcccactcttgtatcaatgatatgggaaaggaaagacttcaagaggctcaccccaagtgacattcttggaagaattgtgtctcatgagatgcaagaagaggaagctcgtgaagcaaaacaagaagaagagtcaagtggagaagaaagtgaagatgaagaaatggcttttattgtcaagagattcaagcactttcttcgcaagagtggctatggcaaagggaggaaggatgatgacaagggaaagaggcaatcaaagatagcgtgcttcaattgtggcgaatttggccatttcattgccgattgtcccaagtcaaatgaagctaaggctaagggaggcaagaagaagccggagcgtgctcatgtggcggaggcacacatggcagaagtgtggtcctccggagatgaagaagatcccgaagtcaagcccaagcccaagtcaaaagacaaggttgaaggagaaggtggtgttgctaccgtcgccttcaagtcatcctcttcaagcaaggagcgtcttttcaacaacttgagtgatgacgacaacgactcctaccactactcttgcttcatggcccaaggccgcaaggtgatgactcaaaagccctctcacacttctcttgatgtttattctagtaatgaggaaagtgataatgaattagatgatgtgcttaagagttttagcaaacccgctatgcaacatttggctaagttaatgagagctttagatagtaaagaacaattactcgaaaggcaagaagaattgcttattctggagaagaaaagaaaccttgccttagaggagagcttagctaaagaatgtgctaaaaatgaacaactagctaatgagcttaatttggctaatggttctttagctagccttagagatgtcaatgagactcttcaagagaaatttgcttgtttggacaaaagtcataaagatcttgaagttcaatttgacactctttggaatagtacctctcaaccaaatgtggttatgttaggtgttacaatattgatttga

SEQ ID NO: 15601 - DNA, 3777 bp, Oryza sativa
  Clone ID: TFbOSC10942j.C1.o1.fg
atgatgccaccccattcaccgagaaatttgatcaaggtgttagggttcgtcagggagctgaggttgatggcttttgaggtaggctatgaagttgctcccgagtatcgccaaatttcccatgaccccgacgaggagaagtgtcgtgttcgtgtgacgttggctagtgatagtgatgaccttccgtcttttaagttcgaagctggaggaagatcgtacagccatgcttgtcaagaggcagctttggtggccattggagagttgcgtcaacgctttgaagaagagttggattcatcagctttccagtatcatcctcacaagcctcatggtcaagactatggaacctatacctgtcctgacggtgaagagagtgccactctgatgcatgcggtgcatatgcttagtgctatggatgcagtaagtgtggagcgagacaaagcagctcatgacagggaaaactggaatcgaggcaagatttgcaagttggagagcaaggtgtaccgtctacaaaaggaattagctgaacttaaaggagaaacgccgccgccaacacccaagcatcgcctcactcaaagaaaaagaacctgtccgccacctcgtctccagttagcttcgaagattcgcgtgatgggtgaagctgtgcccgatcgtgctgaacctgtcatcgacatcataagtgatgaggaagaggaggaagaccctgaagaaagagagccagctactccagaggaagaagatccatcgcttcgttccgacacaaggcggatggtgaacacgcgcaccggaagtggaagtggaagtggaagtggagctactaacaatggaggagatcccacgctagctcagattctggcccaacaaacacaactgatcaatctgttagtgcagcaggcacagaatcagcaggcaaacaatcagaaccagaatccacccccacctccccaaaacaagctggcagatttcttacgcgtgagaccccctaccttttccagcaccaccaatccagtagaagcaggagattggctgcatgcggtggagaagaagttggatttgatccagtgtactgagcaggagaaagtttcttttgcttcgcatcaactgcatggtcctgctgctgaatggtgggatcattttcgccaaggcagggctgaaggagagcctattacgtggcaggaattcacggccgctttcaggaagacacacataccgtcgggtgttgtagctctaaagaagagagaatttagggcactcaaccagggatctcgatcggtcaccgagtacctccatgatttcaaccgtttagctcgttatgctccggaagatgttcgcaccgatgaagagcgtcaggagaaattcttggagggactgaatgatgagttgtcttatgctttgatgtctacggatttccgggatttccagcagttggtggacaaggcgattcgtcaggaagacaagtataaccggatggagcagaagaagcgcagggctgcccaattcaaggcacaacagggcagtaaccagaggccgcgtctcgttactggacctcaagttccatcgtaccctcaaggaggatcttcatcagttgtccgtccccaacgccagttctacaacaacaatactagtaatcgtggcaatgacaaccgcaacgtggttgctcgtcctgcagcaacttcagctcagaaccagcctgtcaggaaggaacagggaagcaagccagtgatatgcttcaattgcggtgatccaggacattatgctgataagtgtcctaagcctcggcgcgtgaagaacgctccagccccgaacaactccaatgttccagcaccaaaggcacgtgttaatcatgttgcagcagcagaagctcagaatgcaccagatgtggttttgggtacgttccctgttaactctatacccgcaactgtgctttttgattccggtgctacacattcctttttgtctaaaagttttacgagcaatcatgggatggaagttattagtctcgagagacctttactagttaataccccaggcaatcaagtattttcgacacagtattgtccttccgctactatagaaatagaagaagttcctttcccatcctcgcttatcttgctagaatccaaagatctagatgttatcttagggatggattggttatcttgtcacagaggagttatagattgtgccaaccgtaaggtgactttaaccagtagcaatggggaaacagtttctttctttatgtcctctcctaaatctcatggtgtgatcttaaaccaagttgctctacaagagatccccatagtacaagactacccagacgtgtttcccgaggatttgccaggcatgccacctaagagagagatagagtttcggatagacttggtacctggaaccaaccctatccataagagaccatacagaatggcagctaatgagttagttgaggtgaagagacaggtggaagatttgcttcagaaaggatacatcagacccagtacttcgccatggggagcaccagtcatctttgtggagaagaaagatcatactcagagaatgtgcgtggattatcgagcgttgaatgaggttactatcaagaataagtatcctctacccagaattgatgacctatttgatcaattggaaggtgctacagttttctccaagatagatctccgttctggatatcatcaacttcgaatccgtgaggaagatataccaaagaccgccttcacaactcggtatggtttgttcgaatgtaccgttatgtcatttggactcactaatgccccagcctttttcatgaatctgatgaacaaggtgtttatggaatatctggataagttagtcgtggtgtttattgatgacattcttatttactccaagacgaaggaagaacatgaagagcatcttcgtctagctttagagaaactacgtgaacatcagctttatgccaagttcagtaaatgtgaattttggttgtccgaagtgaagtttcttggtcatgtcatctcgtctggaggagtggcagtagatccaagcaatgtggagtcagtgttaagttggaagcaacccaagacggtttcagaaattcgtagtttccttggacttgcggggtattaccgcaggtttattgagaacttttcaaagatcgccagaccaatgactcgtctgcttcagaaggaagtgaagtacaagtggacagaggattgtgaacaaagtttccaagaactgaagaaaaggctagcgactgcgctggtgttaattttgcctgattcgaggaaaggtttccaagtgtattgtgatgcatctcgactcggtttgggttgtgtgttgatgcaagaaggaaaggtggttgcctatgcatctaggcaattacgtcctcatgagaataactacccaacgcatgacctagagttggcagctgtggtgcatgcattgaagatttggcgtcattatcttttcggtaaccgtacagaggtgtatacggatcataaaagtttgaagtacattttcactcaacctgatttgaacatgcgtcagcgaagatggttagagttgattaaagattatgatatggaaatctactatcacccggggaaagcaaatgttgtagccgatgctcttagcaggaaaagctactgtaatatgtcagaaggtcgacgtttaccttgggagttatgccaagaatttgaaaagttgaacttgggaatagtcagcaatggttttgtggccgctttggaagctaaacctactctgtttgatcaagttaagaggctcaagtga

SEQ ID NO: 15602 - DNA, 4907 bp, Oryza sativa
  Clone ID: TFbOSC11373j.C1.o1.np
gtgacaagttggtatcagagccaccttgaccttaggataagccaaatgatgccgccccattcaccgagaaatttgatcgaggtgttaggattcgtcagggagctgaggttgatggcttttgaggtaggttatgaagttgctcctgagtatcgccagatttcccatgaccccgacgaggagaagtgtcgtgttcgtgtgacgttggctagtgatagagaagaccttccgtctattaagttcgaagctggaggaagatcgtactgccatgcttgtcaagaagcagctttggtggccattggagagttgcgtcaacgttttgaagaagagttggattcatcagctttccagtatcatcctcacaagcctcatggtcaagactatggaacctatatctgtcctgatggtgaagagagtgccactctgatgcatgtggtgcatatgcttagtgctatggatgcagtaagtgtggagcgagacaaagcagctcatgacagggaaaactggaatcgaggcaagatttgcaagttggagagcaaggtgtaccgtctacagaaggaattagctgaactcaaaggagaaacgccgccgccaacacccaagcttcgcctcgtcgcaagaaagagaacctgtccgccacctcgtctccagttagcttcgaagattcgcgtgatgggtgaagctgtgcccgatcgtgctgaacctgtcatcgacatcataagtgatgaggaagaagaggaagaccctgaagaaagagagccagctactccagaggaagaagatccatcgcttcgttccgacgcaaggcgcaccaccaatccagtagaagcaggagattggttgcatgcggtggagaagaagttggatttgatccagtgtactgagcaggagaaagtttcttttgcttcgcatcagttgcatggacctgctgctgaatggtgggatcattttcgccaaggcagggctgaaggagaacttatcacttggcaggagttcacgactgcttttaagaagacgcatataccgtcaggtgttgtagctctaaagaagagagaatttagagcactcaatcagggatctcgttcggtcaccgagtacctccatgatgtcaaccgtttagctcgttatgctccggaagatgttcgcaccgatgaagagcgtcaggagaagttcttggagggactgaatgatgagttgtcttatgccttgatgtctacggatttccgggatttccagcagttggtggacaaggcgattcgtcaggaagacaagtataaccggatggagcagaagaagcgcagggctgcccaattcaaggcacaacagggcagtaaccagaggccgcgtctcgttactggacctcaagctccatcgtaccctcaaggaggatcttcatcagttgtccgtccccaacgccagttctacaataacaatactggtaatcgtggcaatgacaaccgcaacatggttgctcgtcctgcagcaactccagctcagaatcagcccgttaggaaggaacagggaagcaagccagtgatatgcttcaattgtggtgatccaggacattatgctgataagtgtcctaagcctcggcatgtgaagaacgctccagccccgaacaactccaatgttctagcaccgaaggcacgtgttaatcatgttgcagcagcagaagctcagaatgcaccagatgttgttttgggtacgtttcctgttaactctataccgcaactgtgctttttgattccggtgctacacattcctttttgtctaaaagttttgcgagcaaacatgggatggaagttgttagtcttgggagacctttactagttaataccccaggcaatcaagtattttcgacatagtattgtccttctgttactatagaaatagaagaagttcttttcccatcctcgcttatcttgctagaatccaaagatctagatgttatcttagggatggactggttatctcgtcacagaggagttatagattgtgccaaccgtaaggtgactttaaccagtagcaattgggaaaccgtttctttctttgtgtcctcccctaaatatcatggtgtgaacttaaaccaagttgctctacaagagattcctatagtacaagactacccagacgtgtttcccgaggatttgccaggtatgccacctaagagagacatagagtttcggatagacttggtacctggaaccaacccaatccataagagaccatacagaatggcagctaatgagttagctgaggtgaagaaacaggtggatgatttgcttcagaaaggatacatcagacccagtacttcgccatggggagcaccagttatctttgtggagaagaaagatcatactcagagaatgtgcgtggattatcgagcgttgaatgaggttactatcaagaataaatatcctctacccagaattgatgacctgtttgatcaactggaaggtgctacagttttctccaagatagatctccgttctggatatcatcaacttcgaatccgtgaggaagatataccgaagaccgccttcacaactcggtatggtttgttcgaatgtaccgttatgtcatttggactcactaatgccccagcctttttcatgaatctgatgaacaaggtgtttatggaatatctggataagtttgtcgtggtgtttattgatgacattcttatttactccaagacgaaggaagaacatgaagagcatcttcgtctagctttagagaaactacgtgagcatcagctttatgccaagttcagtaaatgtgaattttggttgtccgaagtgaagtttcttggtcatgtcatctcgtctggaggagtggcagtagatccaagcaatgtggagtcagtattaagttggaagcaacccaagacggttacagaaattcgtagtttccttggacttgcatggtattaccgcaggtttattgagaacttttcaaagatcgctagaccaatgactcgtctacttcagaaggaagtgaagtacaagtggacggaggattgtgaacgaagtttccaggaactgaagaaaaggctagtgactgcgcctgtgttaattttgcctgattcgaggaaaggtttccaagtgtattgtgatgcatcccgacacggtttgggttgtgtgttgatgcaagaaggaaaggtggttgcctatgcatctaggcaattacgtcctcatgagaataactacccaacgcatgacctagaattggcagctgtggtgcatgcattgaagatttggcgtcattatcttttcggtaaccgtactgaggtatatacggatcataaaagtttgaagtacatttttactcaacctgatttgaacatgcgtcagcgaagatggttagagttaattaaagattatgatatggaaatccattatcacccggggaaagcaaatgttgtagccgatgcccttagcaggaaaagttactgtaatatgtcagaaggtcgacgtttaccttgggagttatgccaagaatttgaaaagttgaacttgggaataatcagtaaaggttttgtggctgctttagaagctaaacctactctgtttgatcaagtgagagaagctcaagtgaatgatcctgatatacaagaaattaaaaagaacatgagaagaggtaaagccatcggttttgtagaagatgagcagggaactgtgtggttaggagaaacaatttgcgtcccagaaaataaggagttgaagaatactatcatgaaggaagctcatgaaactttgtattccgttcaccctggaagcactaagatgtaccaagacttaaagcaacaattctggtgggccagtatgcgacgtgagatagcagaatatgtggctctatgtgatgtatgtcagcgggtcaaggcagaacatcagaaaccagccggtctgttacaaccgttgaagattccagagtggaagtgggaagaaataggaatggattttataaccggtctacccagaacgtcggcaggacatgattctatttgggtagtggttgatagattgactaaagtcgctcactttataccggttaaaacaacctatacgggacataagcttgcagagttatacatggccagagtggtatgtttgcatggtgttcctaagaagatagtgtcagatagaggtagccagtttacttcgaagttttggcagaaattacaattagaattgggtactcgtttgaatttcagtactgcttatcaccctcaaacagatggtcagacggaaagagtaaaccaaattttagaagatatgttgagagcctgtgttctagattttggtggaagttgggataagaatttgccgtacgcggaattctcatataacaacagttatcaagctagtttgcaaatggctccgtatgatgcattaaatggtcgaaagtgccgtacgccgctcctttgggatcaaaccggtgaacgtcaagtttttgggacagacatattgcgacaggcagaagaaaaagtaaagattatccaagagaggttgcgcgttgctcagtcgcgtcagaagagttatgccgacaatcgtcgcagagatttggctttcgaagaaggagattatgtatacctgcgggttacgccgttacgaggtgttcatcgtttccaaaccaaagggaaattggcaccgcgttttgtgggaccttttaagattgtgagtcgaagaggtgaagtagcttatcagttagagttgcctccgtcaatggcgggaatacacgacgtgttccatgtgtctcagctgaagaaatgtttacgtgtacctacagaggaagcagatcctgatcgtatagagcttcaagaagatttaacttatgttgagaagccagtcagaattttggaatttccgacgttccggaggagagtgtttccgttgaggaagtttctgacg

SEQ ID NO: 15603 - DNA, 1796 bp, Oryza sativa
  unsure (1)..(1796): unsure at all n locations
  Clone ID: TFbOSC14733j.C1.o1.fg
ctcgctatgctccagaggatgtccgcaccgatgaggagcgtcaggagaagtttttggagggactgaatgatgagttgtcctatactttgatgtctacggaattccgagatttccagcagttgatggacaaagcgattcgtcaggaagacaagtacaaccgtatggagcagaagaagcgcagggctgcccaatttaaggcacagcagggtagtaaccagaggccgcgtctcgttactggacctcaagttccatcgtaccctcaaggaggatcttcatcagttgtccgtccccaacgccagttctacaacaacaatactggtaatcgtagcaatgacaaccgcaatgtggttgctcgtcctgcagcaacttcagttcagaaccagcctgtcaggaaggagcagggaagtaagccggtgatatgcttcaactgtggtgatccaggacattatgctgataagtgtccgaagcctcggcgtgtgaagaacgttccagccccgaacaactccaatgttccagcaccgaaggcacgtgttaatcatgttgcagcagctgaagctcagaatgcaccagacgttgttttgggtacgtttcctgttaactctatacccgcaactgtgctttttgattccggtgctacacattcctttttgtctaaaagttttgcaagcaaacatgggatggaagttgttagtcttgggagacctttactagttaataccccaggcaatcaagtattttcgacacggtattgtccttctgttaccatagaaatagaagaagtttctttcccatcctctcttatcttgctagaatccaaagatctagatgttatcttagggatggactggttatctcgtcacagaggaattatagattgtgccaaccgtaaggtgattttaaccaatagcaatgggaaaaccgtttctttctttgcgtcctcccctaaatttcatggtgtgatcttaaaccaagttgctctacaagagatccttatagtccaagantcctcacgtgtgttcccggaagatttgtcaggtatgccacttaagagagacatagagtttcggatagatttggtacttgcaaccaacccaatccataagagaccgtgcacgggaaattttcgcgcaagcgtaatccatgttagcgtgagagtgaagaaacaggtggatgattgggctcagaaaggatatattagacccagtacttcgccatggggagcaccagtcatctttgtggagaagaaagatcatactcagagaatgtgcgtggattatcgagcgttgaatgaggttactatcaaaaataagtatcctctacccagaatcgatgacctgtttgatcaattgaaaggtgctacagttttctccaagatagatgtccgttctggatatcatcaacttcgaattcgtgaggaagacataccaaagaccgccttcacaactcggtatggtttgttcgaatgtaccgttatgtcgtttggtctcactaatgccccagcctttttcatgaacctgatgaacaaagtgtttatggaatatctggataagtttgtcgtggtgtttattgatgacattcttatttactccaagacgaaggaagaacatgaagagcatcttcgtctagctttagataaactacgtgagcatcagctttatgccaagttcagtaaatgtgaattttggttgtctgaagtgaagtttcttggtcatgtcatctcgtctggaggagtggcagtagatccaagcaatgtggagtcagtgttaagttggaagcaacccaagacggtttcataa

SEQ ID NO: 15604 - DNA, 4586 bp, Oryza sativa
  Clone ID: TFbOSC1737j.C1.o1.np
tattaccgcaggtttattgagaacttttcaaagatcgccagaccaatgactcgtctacttcagaaggaagtgaagtacaagtggacggaggattgtgaacgaagtttccaagtactgaagaaaaggctagtgactgcgcctgtgttaattttgcctgattcgaggaaaggtttccaagtgtattgtgatgcatcccgactcggtttgggttgtgtgttgatgcaagaaggaaaggtggttgcttatgcatctaggcaattgcgtcctcatgagaataactacccaacgcatgacctagagttggcagctgtggtgcatgcattgaagatttggcgtcattatcttttcggtaaccgtacagaaatatatacggatcataaaagtttgaagtacattttcactcaacctgatttgaatatgcgtcagcgaagatggttagagttgattaaagactatgatatggaaatccattatcacccggggaaggcaaatgttgtagccgatgctcttagcaggaaaagctactgtaatatgtcagaaggtcaacgtttaccttgggagttgtgccaagaatttgaaaagttgaacttgggaatagtcagtaaaggttttgtggccgcattagaagctaaacctactctgtttgatcaagttagagaagctcaagtgaatgatcctgatatccaggaaataaagaagaacatgagaaggggtaaagccatcggttttgtagaagatgagcaaggaactgtgtggttaggagaaagaatttgtgtcccagagaataaggagttgaaggatactatcatgaaagaagcacatgaaactttgtattccattcaccctggaagcactaagatgtatcaagacttaaagctacaattctggtgggccagtatgcgacgtgagatagcagaatatgtggctctatgtgatgtatgtcagcgggtcaaagcagaacatcagaagccagccggtctgttacaaccattgaagattccagagtggaagtgggaagaaataggaatggattttataaccggtctacccagaacgtcggcagaaacaacttacacggggaataagcttgcagagttatacatggccagagtggtatgtttgcatggtgttcctaagaagatagtgtcagatagaggaagccagtttacttcgaagttttggcagaagttacaatcagaattgggtacccgtttgaatttcagtactgcttatcaccctcaaacagatggtcagacggaaagagtaaaccaaattttagaagatatgttgagagcttgtgttctagattttggtggaagttgggataagaatttgccgtatgcggaattctcatataaccatagttatcaagctagtttgcaaatgtctccgaatgaagcattatatggtcgaaagtgccgtacgccgctcctttgggatcaaaccggtgaacgtcaagtttttgggactgacatattgcgagaggcggaagaaaaagtgaagattatccaagaaaggttgcgcgttgcccagtcgcgtcagaagagctatgccgacaatcgtcgcagagatttggttttcgaagaaggagattatgtataccttcgggtcacgccgttacgaggtgttcatcgtttccaaaccaaagggaaattagcaccgcgttttgtaggaccttttaagatcgtgagtcgaagaggtgaagtagcttatcagttagagttgcctccgtcaatggcgggaatacatgacgtgttccatgtgtctcagttgaagaaatgtttacgagtacctacggaggaagcagatcctgatcgtatagagcttcaagaagatttaacttatgttgagaagccagttagaattttggaacgccgccgcgacgctctccaagtccgccgccgtcgccggccgtcttcagcaacgccgccgcgcatgcctcgccattcaccaagaaatttgatcgaggtgttaggattcgtcagggagctgaggttgatggcttttgaagtaggttatgaagttgctcccgagtatcgccagatttcccatgaccccgacgaggagaaatgtcgtgttcgtgtgacgttggctagtgatagtgaagaccttccgtcttttaagttcgaagctggaggaagatcgtactgccatgcttgtcaagaagcagctttggtggccattggagagttgcgtcaacactttgaagaagaattggattcatcagctttccagtatcatccccacaagcctcatggtcaagactatggaacctatacctgtcctgatggtgaagagagtgccactctgatgcatgcggtgcatatgcttagtgctatggatgcagtaagtgtggagcgagacaaagcagctcatgacagggaaaactggaatcgaggcaagatttgcaagttgaagagcaaggtgtaccgcctacagaaggaattagctgaacttaaaggagaaacgccgccgccaacatcctagcttcgcctcactgcaagaaagagaacctgtccgccccctcgtctccagttagcttcgaagattcgcgtgatgggtgaagctgtgcccgatcgtgttgagcctgtcatcgacatcatggtgaacacgcgcactggcactggaagtggaagtggaagtggagccaataacaatgaagagaacccaacgctagctcagattttggctcaacaaacacaactgatcaatctgttagtgcagcaggcacagaatcagcaggcaaataatcaaaaccagaatccacccccacctccccaaaacaagttggcagatttcttgcgtgtgagtccccctactttttcgagcaccaccaatccagtagaagcaggagattggttgcatgcggtggagaagaagttggacttgatccagtgtactgagcaggagaaagtttcttttgcttcgcatcagttgcatggacccgctgctgaatggtgggatcattttcgccaaggcagagcgggaggagaacctattacttggcaggaattcacaactgcttttaagaagacgcatataccaacgggtgttgtagctctaaagaagagagaatttagagcactcaaccagggatctcgttcggtcaccgagtacctccatgatttcaaccgtttagctcgctatgctccagaggatgttcgcactgatgaagaacgtcaggagaagtttttggagggactaaatgatgagttgtcttatgctttgatgtctacggatttccgggatttccaacaattggtggacaaggcgattcgtcaggaagacaatcgtggcaatgacaaccgcagtgtggttgctcgtcctgcagcaactccagttcagaaccagcccgttaggaaggagcaggggagcaaaccagtgatatgcttcaattgtggtgatccgggacattatgctgataagtgtccgaagcctcggcgtgtgaagaacgctccagccccgaacaactccagtgctccagcaccgaaggcccgtgtcaatcatgttgcagcagcagaagctcagaatgcaccagatgtggttttgggtacgtttcctgttaactctatacccgcaactgtgctttttgattccggtgctacacattcctttttgtctaaaagttttgcaagcaatcatgggatagaagttattagtcttgggagacctttactagttaataccccaggcaatcaagtattttcgacacagtattgtccttctgttactatagaaatagaagaagttcttttcccatcctctcttatcttgctagaatccaaagacctagatgttatcttagggatggattggttatctcgtcatagaggagttatagattgtgccaaccgtaaggtgactttaaccaatagcaatggggaaactgtttctttctttgcgtcctctcctaaatctcatggtgtggttttaaaccaagttgctctacaagagattcctatagtacaagactacccagatgtgtttcccgaggatttgccgggtatgccacctaagagagacatagagtttcggatagacttggtacctggaactaaccctatccataagagaccatatagaatggcagctaacgagttagcagaggtgaagaaacaggtggatgatttgcttcagaaaggatacattagacccagtacttcgccatggggagcaccagtcatctttgtggagaagaaagatcatactcaaagaatgtgcgtggattatcgagcgttgaatgaggttactatcaagaataaataccctttacctagaattgatgacctgtttgatcaattggaagagtttgtcgtggtgtttatcgatgacattctcatttactccaagacgaaagaagaacatgaagagcatcttcgtctagctttagagaaactacgtgagcatcagctttatgccaagttcagtaaatgtgaattttggttgtccgaagtgaagtttcttggtcatgtcatctcgtctggaggagtggcagtagatccaagcaatgtggagtcagtattaagttggaagcaacccaagacggtttcagaaattcgtagtttccttggacttgctgggtattt

SEQ ID NO: 15605 - DNA, 3453 bp, Oryza sativa
  Clone ID: TFbOSC25598j.C1.o1.fg
atgatgccgccccgttcaccaagaaatttgatcgaggtgttaggactcgtcagggagctgaggttgatggcttttgaagtaggctatgaagttgctcccgagtatcgccagattccccatgaccccgacgaggagaaatgtcgtgttcgtgtgacattggctagtgatagtgaagatcttccatcttttaagtttgaagctggaggaagatcgtactgccatgcttgtcaagaagtagctttggtggccattggagagttgcgtcaacactttgaagaagaattggattcatcagctttccagtatcatcctcacaagcctcatggtcaagactatggatcttatacctgtcctgatggcgaagagagtgctactctgatgcatgtggtgcatatgcttagtgctatggatacagtaagtgtggagcgagacaaagcagctcatgacagggaaaattggaatcgaggcaagatttgcaagttgaagagcaaggtgcaccgtctacagaaggaattagctgaacttaagggagagatgccgccgccaacatccaagcttcgcctcactgcaagaaagagaacctgtccgccccctcgtctccagttagcttcgaagattcgcgtgatgggtgaagctgtgcccgatcgtgctgaacctgtcatcgacatcataagtgatgaggaagaggaggaagatcctgaagaaagagagccagctactccagaggaagaagattcatcgcttcgttccgacgcaagagtgatggtgaacacgcgcactggaagtggaagtggaagtggagctaataacaatgagggagaacctacgctagcccagattttggcccaacaaacacaactgatcaatctgttagtgcagcaggcacagaatcagcagggaaataatcagaaccagaatccaccccctcctccccaaaataagttggcagatttcttacgtgtcagaccccctaccttttccagcacaaccaatccagtagaagcaggagattggctgcatgcggtggagaagaagttggatttgatccagtgtactgagcaggagaaagtttcatttgcttcgcatcaattgcatggacctgctgctgaatggtgggatcattttcgccaaggcagggctggaggagaacctatcacttggcaggagttcacagctgcttttaagaagacgcatataccgtcaggtgttgtagctctaaagaagagagaatttagagcactcaatcagggatctcgttcggtcacagaatacctccatgatttcaaccgtttagcacgctatgctccagaagatgttcgcactgatgaagagcgtcaggagaagtttttggagggactgaatgatgagttgtcttatactttgatgtctacggaatttcgggatttccagcagttggtggacaaggcgattcgtcaggaagacaagtataaccggatggagcagaagaagcgcagggctgctcaatttaaggcacaacagggcagtaatcagaggccgcgactcgttactggacctcaagttccatcgtaccctcaaggaggatcttcatcagttgtccgtccccagcgccagttctacaacaacaatactggtaatcgtggcaatgacaaccgcaatgtggttgctcgtcctgcagcaacttcagttcagaaccagcccgtcaggaaggaacagggaagcaagcccgtgatatgcttcaattgtggtgatcctggacattatgctgataagtgtccgaagcctcggcaatccaaagatctagatgttatcctagggatggattggttatctcgtcacagaggagttatagattgtgccaaccgtaaggtgactgtaaccaatagcaatggggaaattgtttctttctttgcatcctctcctaaatctcatggtgtggtcttaaaccaagttactttacaagagattcctatagtgcaagactacccagatgtgtttccggaggatttgccaggtatgccacctaagagagatatagagtttcggatagacttggtacctggaactaacccaatccataagagaccgtacagaatggcagctaatgagttagctgaggtgaagaagcaggtggatgatttgcttcagaaaggatacataagacccagtacttcgccatggggagcgccagtcatctttgtggagaagaaagatcatactcagagaatgtgcgtggattatcgagcgctgaatgaggttactattaagaataagtatccgctacccagaatcgatgatctgtttgatcaattgaaaggtgctacagttttctccaagatagatctccgttctggatatcatcaacttcgaatccgtgaggaagatataccaaagactgccttcacaactcggtatggtttgttcgagtgtactgttatgtcatttggactcactaatgccccagcctttttcatgaatctaatgaataaggtgtttatggaatatctggataagtttgtcgtggtgtttattgatgacattcttatttactccaagacgaaggaagaacatgaagagcatcttcgtctagctttagagaaattacgtgagcatcacttttatgccaagttcagtaaatgtgaattttggttgtccgaagtgaagtttcttggtcatgtcatctcatctggaggagtggcagtagatccaagcaatgtggagtcagtgttaagttggaagcaacccaagacggtttcagaagttcgtagtttccttggacttgcagggtattaccgcaggtttattgagaacttttcaaagatcgccagaccaatgactcgtctgcttcagaaggaagtgaagtataagtggacagaagattgcgagcgaagtttccaagaactgaagaaaaggctagtgtctgcgcccgtattaattttgcctgattcgaggaaaggtttccaagtgtattgtgatgcatctcgactcggtttgggttgtgtgttgatgcaagaaggaaaggtggttgcttatgcatctaggcaattacgtcctcatgagaataactacccaacgcatgacctagaattggccgctgtggtgcatgcattgaagatttggcgtcattatctttatggtaaccgtacggagatatatacggatcataaaagtttgaagtacattttcactcaacctgatttgaacatgcgtcagcgaagatggttagagttgattaaggactatgatatggaaatccattatcatccggggaaagcaaatgttgtagccgatgcccttagcaggaaaagctactgtaatatgtcagaaggtagatgtttaccttgggagttatgccaagaatttgaaaagttaaacttgggaatagtcagcaaaggttttgtggccgctttggaagctaaacctactctgtttgatcaaattagagaagctcaagtgaatgatcctgatatctag

SEQ ID NO: 15606 - DNA, 2334 bp, Oryza sativa
  Clone ID: TFbOSC27003j.C1.o1.np
ttgagcttaccccaatcggaggggtatgtcattgtgctgcaccagatgttgaggcgtctgcgataccctggttttccgtcataccgagtgaggcagtgtggcccagtttgggaggctcgggtcgagattcacccccgagtcccttccgagttggactacagctttcagacacgtcaccaccgagacctgccagagaccgcgatgcaggatgccgcccgggaggccttcctccgactcagctctatccaccgagccgagttagtgagtaccgagtttgctcaccacccgttccgggaggagggcaactcagtttgcacagttcagaacacgccctgctgctacaacccgatagtgactcggttgtcacgatgggctgaggcagtagatgactactacgaggaggctctgttggagattgacgaccaccagagacgtatgggagagttagagactgaggtgaccgacctcacagcgcagcagcttcagttggaggaggagcaccaggcttggggcagtgagatagactcactgaaggcacagctccagctgggttccggtttggagactccgatccagatcgactcggagacagaggagaccgacaccgagccggagatcgagccagacatcactgatccttcagaggatgaggctcctgttccccgcatcaccttccttggaggccctcgcaccctcagcactgctcgcaagagcacacgacctccgggcaagaggcccaagccagatccagaggccactacttctgagccgtggggactcagggtcattgagaaaaagctaactcttgttcgagtacgtgaggccgataaagtgatctttgcggcaaaccaattggaaggaccagccggagactggtgggatacctacaaggaagcccgagaagacggtgctggagaacccacctgggaggagttcactgcagcatttcgcgagaacttcgtacctgctgcagtgatgcgcatgaagaagaacgagtttagaagactgcggcaagggaatacaacagtgcaggagtatctgaacaagttcactcagttggcccgctacgcaattggagacctggcagatgaagaagaaaagatcgacaagttcatagaagggctgaatgatgaattgcgtggacctatgatcgggcaggatcacgagagtttccagagcctgatcaacaaggtcgtcaggctagagaacgatcaaaggacggtggaacacaaccgcaagaggaggcttgctatgagtcgcccacctcagacagtgcctcagcgactcaagggagccactccgtccggatggaagccccctgtcgtggtgaccaaccgtcccgctgcacctagcaacttcaacaggccagttgcacttcagaaccgcacccctacaccaactttggctgcccctggagccaagaagaatgtggactgcttcaactgtggggaatacgggcactacgctaacaactgccctcatccacgcaaaacccctgtccgaactggcgcgaatgcaatgactgttcgcggcactactacccctactgtcgggcgaggcctattcaagactccgcaatcgaacaggaccaccactggatttgggcgcggacaagtgaaccatgtccgagctgaagaggcccaggaagatcagggcgtactaatgggtatgttctctatcaattccaccccggttaaagttctcttcgattctggtgcatcgcattcatttatatctctgaaggctagtcaaaagcacaacttgaccctcgtgggacttagaaagcctatgatagtacactcacctgggggcgagataactgtgagtcatgcttgcatagacgtaccaattctccttagggatgtggtatttccctccaatcttatggtgctaataccccaaactcttgatgtcattttgggtatggattggttagcaaagcatacaggagtaattgactgtagacgtagagaagttaccctgaccacaccctggggatcggatatgcgagcaaccatggatcaagatcctaggctaaccgaacgtgccggaggtatatttaccatgctacccctaaagggaatgcccgtagtgcagcgatttcctgatgtgttcccagaagatttacctgggatgccaccagatcgtgacatagagttcattatcgacctgatacccggaactacccccatatccaagagaccatatcggatgccggtcaatgagttagaagaacttaaaaagcaaatcagggagttgcaagagaagggatttgtacgccccagttcgtcaccttggggagccccagtgttgtttgttaaaaagaaagacggt

SEQ ID NO: 15607 - DNA, 896 bp, Oryza sativa
  Clone ID: TFbOSC29560j.C1.o2.np
cagcagcaggtccatgcaactgatgcgaagcaaaagaaactttcattgatcaagttagagaagcccaaattaatgatcctgatattcaagagatcaagaagaatatgagaagaggaaaagctatcggtttcttggaggatgagcatggaactgtatggttgggtgagagaatctgtgtccccgacaacaaagatttaaaagatgcaattctaaaagaagctcatgatactttatactccatacaccctggtagtactaagatgtaccaggatctcaaggaaaggttttggtgggcaagtatgaagcgtgaaatcgcagaatacgtagcagtatgtgatgtttgtcagcgagtcaaggcagaacatcagaaacccgccggtttgctgcagcctttgaaaattcctgaatggaaatgggaagaaatcggtatggattttatcactggtctacccagaacgtcatcaggccatgactctatttgggtgatagtcgacagacttaccaaagtggctcatttcatcccggtaaagacaacctattctggaagtcggttagcggaattgtatatggcaaggattgtgtgtttgcatggcgtccctaagaaaatagtgtctgatcgaggcagtcagtttacttcaaatttttggaagaaacttcaggaagagatgggttctaagctgaactttagtactgcttaccatccgcaaactgatagacaaactgaaagggtgaatcagattttggaagacatgttgagagcttgtgctttagatttcggtggaagttgggataagaatctaccttatgcagaattttcgtataataacagttatcaagctagtcttcagatggctccttacgaagcactgtatggtcggaagtgtcgcactccgctt

SEQ ID NO: 15608 - DNA, 1699 bp, Oryza sativa
  Clone ID: TFbOSC2960j.C1.o1.fg
atggcttttgaggtaggctatgaagttgctcccgagtatcgccagatttcccatgaccccgacgaggagaagtgtcgtgttcgtgtgacgttggctagtgatagtgaagaccttccgtcttataagttcgaagctggaggaagatcgtactgccatgcttgtcaagaagtagctttggtggctattggagagttgcgtcaacactttgaagaagagttggattcatcagctttccagtatcatcctcataagcctcatggtcaagattatggaacctatacctgtccagatggtgaagagagtgccactctgatgcatgtggtgcatatgcttagtgctatggatgcagtaagtgtggagcgagacaaagcagctcatgatagggaaaactggaatcgaggcaagatttgcaagttgaagagcaaggtgcaccgtctacagaaggaattagctgaacttaaaggagagacgccaccgccaacatccaagcttcgcctcactgcaaggaagagaacctgtccgccccctcgtctccagttagcttcgaagattcgcgtgatgggtgaagctgtgcccgattgtgctcaacctgtcatcgacatcataagtgatgaggaagaagaggaagatcctaaagaaagagagccagctactccagaggaagaagattcatcgcttcgttccgacgcaaggcggaatgcagcaggaacagaatcagcagggaaacaatcagaaccagaatccaccccacctccccaaaataagttggcagatttcttacgtgtgagaccccctaccttttcaagcaccaccaatccagtagaagcaggagattggttgcatgcggtggagaagaagttggatttgatccagtgtactgagcaggagaaagtttcttttgcttcgcatcaactgcatggacctgctgctgaatggtgggatcattttcgccaaggcagggcgggaggagaacctattacttggcaggagttcacagctgcttttaagaagacgcatataccgtcaggtgttgtagctctaaagaagagagagtttagagcactcaaccagggatctcgttcggttactgagtaccttcatgatttcaaccgtttagctcgctatgctccagaagatgttcgcactgatgaagagcgtcaggagaagtttttagagggactgaatgatgagttgtcttatgctttgatgtctacggatttccgggatttccagcagttggtggacaaggcgattcgccaggaagacaagtataaccgtatggagcagaagaagcgcagggctgcccaatttaaggcacaacagggcagtaatcagaggccgcgtctcgttactggacctcaagctccatcgtaccctcaaggaggatcttcgtcagttgtccgtccccaacgccagttctacaacaacaatactggtaatcgtggcaatgacaaccgcaacgtgatagctcgtcctgcagcaactccagttcagaatcagtctgtcaggaaggaacagggaagcaagcccgtgatatgcttcaattgtggtgatccaggacattatgctgataagtgtccgaagcctcggcgtgtgaagaacgttccagccccgaacaactccaatgttccagcaccgaaggctcgtgttaatcatgttgtagcagcagaagctcagaatgcaccagatgttgttttgg

SEQ ID NO: 15609 - DNA, 5334 bp, Oryza sativa
  Clone ID: TFbOSC31236j.C1.o2.fg
atggttcctggtttggaatggttagttcctggtctggaggttatatttgttcaactggggttggttgttcaaatgtggctgggcctatgcaacatggaaattccgggcgtgacaagttggtatcagagccaccttgaccttaggataagccaaatgatgcctcgccattcaccgagaaatttgatcgaggtgttaggattcgtcagggagctgaggttgatggcttttgaagtaggctatgaggttgctcctgagtatcgtcagattccccatgaccccgacgaggagaagtgtcgtgttcgtgtgacgttggctagtgatagtgaagaccttccatcttttaagtttgaagctggaggaagatcgtactgccatgcttgtcaagaagtagctttggtggccattggagagttgcgacaacactttgaagaagagttggattcatcagctttccagtatcatcctcataagcctcatggtcaagactatggaacctatatctgtcctgatggtgaagagagtgctactctgatgcatgcggtgcatatgcttagtgctatggatgcagtaagtgtggagcgagacaaagcagctcatgaccgggaaaattggaatcgaggcaagatttgcaagttggagagcaaggtgtaccgtctacagaaggaattagctgaacttaaaggagaaatgccgccgccaacacccaagcttcgtctcgtcgcaagaaagagaacctgtccgccacctcgtctccagttagcttcgaagattcgcgtgatgggtgaagctgtgcccgatcgtgctgaacctgtcatcgacatcataagtgatgaggaagaggaggaagatcctgaagaaagagagccagctactccagaggaagaagattcatcgcttcgttccgacgcaagttgctgcttacatcatgggtgggatatggtgaacacgcgcaccggcactggaagtggaagtggaagtggagccaataacaatgagggagaaccaacgctagcccagattctggcccaacaaacacaactgatcaatctgttagtgcagcaggcacagaatcagcagggaaataatcagaaccagaatccacccccacctccccaaaacaaattggcagatttcttacgtgtgagaccccctaccttctcaagcaccaccaatccagttgaagcaggagattggctgcatgcagtggagaagaagttggatttgattcagtgtactgagcaagagaaagtttcttttgcttcgcatcagttgcatggacccgctgctgaatggtgggatcattttcgccaaggcagggctggaggagaacctatcacttggcaggagttcacagctgcttttaagaagacgcatataccgtcaggtgttgtagctctaaagaagagggagtttagagcactcaatcagggatctcgttcagtcaccgagtacctccatgatttcaatcgtttagcgcgttatgctccagaggatgttcgcactgatgaggaacgtcaggagaagtttttggagggactgaatgataagttgtcttatgctttgatgtctacggatttccaggattttcagcagttggtggacaaagcgattcgccaggaagacaagtataaccgtatggagcagaagaagcgcagggctgcccaatttaaggcacaacagggcagtaaccagaggccgcgtctcgttactggacctcaagttccatcgtaccctcaaggaggatcttcatcagttgtccgtccccaacgccagttctacaacaacaatactggtaatcgtggcaatgacaaccgtaatgtggttgctcgtcctgcagcaactccagttcagaaccagcccgttaggagggaacagggaagcaagccagtgatatgcttcaattgtggtgatccgggacattatgctgataagtgtccgaagcctcggcgtgtgaagaacgctccagccccgaacaacttcaatgttccagcaccgaaggctcgtgtcaatcatgttgcagccgcagaagctcagaatgcaccagatgttgttttgggtacgtttcctgttaactctatacccgcaactgtgctttttgattccggtgctacacattcctttttgtgtaaaagttttgcaatcaaacatgggatggaagttgttagtcttgggagacctttactagttaataccccaggcaatcaagcattttcgacacggtattgtccttctgttactatagaaatagaagaagttcctttcccatcctctcttatcttgttagaatccaaagatctagatgttatcctagggatggactggttatctcgtcacagaggagttatagattgtgccaatcgtaaggtgactttaaccagtagcaatggggaaactgtttctttctttgcgtcctctcctaaatctcatggtgaggtcttaaaccaagttgctctacaagagattcctatagtgcaagactacccagatgtatttccggaggatttgccaggtatgccacctaagagagatatagaatttcggatagacttggtacctggaaccaacccaatccataagagaccatacagaatggcagctaatgagttggctgaggtgaagaaacaggtggatgatttgcttcagaaaggatacatcagacccagtacttcgccatggggagcaccagttatctttgtggagaagaaagatcatactcagagaatgtgcgtggattatcgagcgttgaatgaggtcactatcaaaaataagtatcctctacccagaattgatgatctgtttgatcaattgaaaggtgctacagttttctccaagatagatctccgttctggatatcatcaacttcgaattcgtgaggaggatataccaaagaccgcctttacgactcggtatggtttgtttgagtgtaccgtcatgtcatttggactcactaatgccccagcctttttcatgaatctgatgaacaaggtgtttatggaatatctggataagtttgttgtggtgtttattgatgacattcttatttattccaagacgaaggaagaacataaagagcatcttcgtctagctttagagaaactacgtgagcatcagctttatgccaagttcagtaaatgtgaattttggttgtccgaagtgaagtttcttggtcatgtcatctcatctggaggagtggcagtagatccaagcaatgtggagtcagtgttaagttggaagcaacccaagacggtttcagaagttcgtagtttccttggacttgctgggtattaccgcaggtttattgagaacttttcaaagatcgccagaccaatgactcgtctgcttcagaaggaagtgaagtataagtggacagaagattgtgagcaaagtttccaagaactgaagaaaaggctagtgactgcgcctgtgttaattttgcctgattcgaggaaaggtttccaagtgtattgtgatgcatcccgactcggtttgggttgtgtgttgatgcaagaaggaaaggtggttgcttatgcatctaggcaattacgtcctcatgagaataactacccaacgcatgacctagagttggcagcagtggtgcatgcattgaagatttggcgtcattatctttacggtaaccgtacagaggtgtatacggatcataaaagtctgaagtacattttcactcaacctgatttgaacatgcgtcagcgaagatggttagagttgattaaagactatgatatggaaatccattatcatccggggaaagcaaatgttgtagccgatgctcttagcaggaaaagctactgcaatatgtcagaaggtagatgtttaccttgggagttatgccaagaatttgaaaagttgaacttgggaatagtcagcaaaggttttgtagctgctttggaagctaaacctactctatttgatcaaattagagaggctcaagtgaatgatccttatatccaggaaataaagaagaacatgagaagaggtaaagccatcggttttgtagaagatgagcaaggtactgtatggttaggagaaagaatttgcgtcccagaaaataaggagttgaaggatactatcatgaaagaagctcatgaaactttgtattctattcaccctggaagcactaagatgtatcaggatttaaagcaacaattctggtgggccagtatgcgacgtgagatagcagaatatgtggctctatgtgatgtttgtcagcgggtcaaggcagaacatcagaagccagccggtctattacagccgttgaagattccagagtggaagtgggaagaaatagggatggattttataaccggtctacccagaacgtcggcaggacatgattctatttgggtagtggttgatcggttgaccaaagtcgctcacttcataccagtcaaaacaacttatacgggacataagcttgcagagttatacatggccagagtggtatgtttgcatggtgtacctaagaagatagtgtcagatagaggaagtcagtttacttcgaagttttggcagaagttacaatcagaattgggtactcgtttgaatttcagtacggcttatcaccctcaaacagatggtcagacggaaagagtaaaccaaattttagaggatatgttgagagcctgtgttctagattttggtggaagttgggataagaatttgccgtatgcggaattctcatataacaatagttatcaagctagtttgcaaatgtctccgaatgaagcattatatggtcgaaagtgccgtacgccgcttctttgggatcaaaccggtgagcgtcaagttttcgggacagacatattgcgagaagcggaagaaaaagtgaagattatccaagaaaggttgcgcgttgctcagtcgtgtcagaagagctatgccgacaatcgtcgcagagatttagtttttgaagaaggagattatgtgtatcttcgggttacgccgttacgaggagttcatcgtttccaaaccaaagggaaattggcaccgcgttttgtgggaccttttaagatcgtgagtcgaagaggtgaagtagcttatcagttagagttgcctccgtcaatggcgggaatacatgatgtgttccatgtgtctcagttgaagaaatgcttacgtgtacctacggaggaagcagatcctgattgtatagagcttcaggaagatttaacttatgttgagaagccagtcagaatcttggaatttccgacgttccggaggagagcgtttccgttgaggaaggttccgaagcgtttgtggaagctcaaggcaagtcacacagatcccaaacaaccctttgagcatgttgatcccgtttaa

SEQ ID NO: 15610 - DNA, 4599 bp, Oryza sativa
  Clone ID: TFbOSC31236j.C1.o4.fg
atgccgcaccgttcaccgagaaatttgatcaaggtattaggatttgtcagggagctgaggttgatggcttttgaagtaggctatgaagttgctcctgagtatcgccagattccccatgaccccgacgaggagaagtgtcgggttcgtgcgacgttggctagtgatagtgaagaccttccgtcttttaagttcgaagctggaggaagatcgtacagccatgcttgtcaagaagtagctttggtggccattggagagttgcgtcaacactttgaagaagagttggattcgtcagctttccagtatcatccccacaagcctcatggtcaagactatggatcttatacctgtcctgatggcgaagagagtgctactctgatgcatgtggtgcatatgcttaatgctatggatacagtaggtgtggagcgagagaaggcagctcatgaccgggaaaactggaatcgagataagatttgtaagttgaagagcaaggtgaaccgtctacagaaggaattagctgaacttaagggagagacgccgccgccaacatccaagcttcgcctcactgcaagaaagagaacctgtctgccccctcgtctccagttagcttcgaagattcgcgtgatgggagaagctgtgcctgatcgagctgaacctgttatcgacatcataagtgatgaggaagaagaggaagatcctgaagaaagagagccagctactccagaggaagaagattcatcgcttcatttcttacgtgtcagaccccctaccttttcaagcacaaccaatccagtagaagcaggagattggttgcatgcagtggagaagaagttggacttaatccagtgtactgagcaggagaaagtttcttttgcttcgcatcaattgcatggacctgctgctgaatggtgggatcattttcgccaaggcagggctggaggagaacctatcacttggcaggaattcacagccgcttttaagaagacacatataccaacgggtgttgtagctctgaagaagagggagtttagagcactcaaccagggatctcgttcggttactgagtatctccatgattttaaccgtttagcacgctatgctccagaagatgttcacactgatgaggaacgtcaggagaagtttttggagggactaaatgatgagttgtcctatactttgatgtctacggaattccgggatttccagcagttggtggacaaagcgattcgccaggaagacaagtataatcgcatggaacagaagaagcgcagggctgctcaatttaaggcacaacagggcagtaaccagaggccgcgtcttattcctggacctcaagtcccatcgtacccgcaaggaggatcttcatcagttgtccgtccccaacgccagttctacaacaacaatactggtaatcgtggcaatgaaaaccgcaacgtagtcgctcgtcccgcagcaactccagttcagaaccagcctgtcaggaaggaacagggaagcaagccggtgatatgcttcaattgtggtgatccaggacattatgctgataagtgtccgaagcctcggcatgtgaagaacgttccggtcccgaataactccaatgtcccagcaccaaaggcacgtgttaatcatgttgcagccgcagaagctcagaatgcaccagacgtggttttgggtacgtttcctgttaactctatacccgcaactgtgctttttgattccggtgctacacattcctttttgtctaaaagttttgcgaccaaacatgggatggaagttgttagtcttgggagacctttactagttaataccccaggcaaccaagtgttttcgacacggtattgtccttccgttaccatagaaatagaaggagttcctttcccatcctctcttatcctgctagaatccaaagatctagatgttatcttagggatggattggttatctcgtcacagaggagttatagattgtgccaatcgcaaggtgactttaaccaatagcaatggggaaactgtttctttctttgcgtcctctcctaaatctcatggtgtggtcttaaaccaagttgctctacaagagattcctatagtgcaagactacccagatgtatttccggaggatttgccaggtatgccacctaagagagatatagaatttcggatagacttggtacctggaactaaccctatccataagagaccgtacagaatggcagctaatgagttagctgaggtgaagaaacaggtggatgatttgattcagaaaggatacatcagacccagtacttcgccatggggagcaccagtcatctttgtggagaagaaagatcatactcagagaatgtgtgtggattatcgagcgttgaatgaggttactatcaagaataagtaccctttacccagaattgatgacttgttcgatcaactcgaaggtgctacagttttctctaagatagatctccgttctggatatcatcaacttcgaatccgtgaggaagatataccaaagaccgccttcacaactcggtatggtttgtttgagtgtaccgttatgtcatttggactcactaatgccccagcctttttcatgaatctgatgaacaaggtgtttatggaatatctggataagtttgtcgttgtgtttattgatgacattcttatttactccaagacgaaggaagaacatgaagagcatcttcgtctagctttagagaaactacgtgagcatcagctttatgccaagttcagtaaatgtgaattttggttgtccgaagtgaagtttcttggtcatgtcatctcgtctggaggagtggcagtagatccaagcaatgtggagtcagtgttaagttggaagcaacccaagacggtttcagaaattcgtagtttccttggacttgcagggtattaccgcaggtttgttgagaacttttcaaagatcgctagaccaatgactcgtctacttcagaaggatgtaaagtacaagtggacggaggattgtgaacaaagtttccaagaactgaagaaaatgctagtgactgcgcctgtgttaattttacctgattcgaggaagggtttccaagtgtattgtgatgcatcccgacacggtttgggttgtgtgttgatgcaagaaggaaaggtggttgcttatgcatctaggcaattacgtcctcatgagaataattacccaacgcatgacctagagttggcagctgtggtgcatgcattgaagatttggcgtcattatcttttcggtaatcgtacagagatatatacggatcataaaagtttgaagtacattttcactcaacctgatttgaacatgcgacagcgaagatggttagagttgattaaggattatgatatggaaatccactatcacccgggaaaagcaaatgtggtagccgatgcccttagcaggaaaagttactgtaatatgtcagaagctcgatgtttaccttgggagttgtgccaagaatttgaaaggttgaacttgggaatagtcagcaaaggttttgtggctactttggaagctaaacctactttgtttgatcaaattagagaagctcaaatgaatgatcctgatatccaggaaataaagaagaacatgagaaggggtaaggccatcggttttgtagaagatgagcaaggaactgtgtggttaggagaaagaatttgtgtcccagaaaataaggagttgaagaatactatcatgaaagaagctcatgaaactttgtattccattcaccctggaagcactaagatgtaccaagacttaaagctacaattctggtgggctagtatgcgacgtgagatagcagaatatgtggctctatgtgatgtatgtcagcgggtcaaagcagaacatcagaaaccagctggtctgttacaaccgttgaagattccagagtggaagtgggaagaaataggaatggattttataaccggtctacccagaacgtcggcaggacatgattctatttgggtagtggttgatcggttgacaaaagtcgctcatttcataccgatcaaaacaacctatacgggacataagcttgcagaattatatatggccagagtggtatgtttgcaaggtgttcctaaaaagatagtgtcagatagaggtagccagtttacttcgatgttttggcagaaattacaatcagaattgggtacccgtttgaatttcagtactgcctatcatcctcaaacagatggtcagacggaaagagtaaaccaaattttagaagatatgttgagagcctgtgttctagattttggtggaagttgggataagaatttaccgtatgcggaattctcatataacaatagttatcaagctagtttgcaaatgtctccgaatgaagcattatatggtcgcaagtgctgtacgccgcttctttgggatcaaaccggtgaacgtcaagtttttgggacagacatattacgagaggcggaagaaaaagtgaagattatccaagaaaggttgcgcgttgctcagtcacgtcagaagagctatgccgacaatcgtcgtagagatttggctttcgaagaaggagattatgtatatcttcgggttacgccgttacgaggtgttcatcgtttttag

SEQ ID NO: 15611 - DNA, 3512 bp, Oryza sativa
  Clone ID: TFbOSC32906j.C1.o1.np
atgacaagttggtatcagagccaccttgaccttaggataagccaaatgatgccgccccattcactgagaaatttgatcaaggtgttaggattcgtcagggagctgaggttgatggcttttgaggtaggctatgaagttgctcccgagtatcgccaaatttcccatgaccccgacgaggagaagtgtcgtgttcgtgtgacgttggctagtgatagtgaagaccttccgtcttttaagttcgaagctggaggaagatcatactgccatgcttgtcaagaagcagcgttggtggccattggagagttgcgtgaacactttgaagaagagttggattcatcagctttccagtatcatcctcacaagcctcatggtcaagactatggaatctatacctgtcctgatggtgaagagagtgccactctgatgcatgcggtgcatatgcttagtgctatggatgcagtaagtgtggaacgagacaaagcagctcatgacagggaaaactggaatcgaggcaagatttgcaagttggagagcaaggtgtaccgtctacagaaggaattagctgaacttaaaggagaaacgccgccgccaacacccaagcttcgcctcactccaagaaagagaatctgtccgccacctcgtctccagttagcttcgaagattcatgtgatgggtgaagctgtgcccgatcgtgctgaacctgtcatcgacatcataagtgatgaggaagaggaggaagatcctgaagaaagagagccagctactccagaggaagaagattcatcgcttcgttccgacgcaaggcgcaccaccaatccagtagaagcaggagattggctgcatgcggtggagaagaatttggatttgatccagtgtactgagcaggagaaagtttcttttgcttcgcatcaactgcatagacctgctgctgaatggtgggatcattttcgccaaggcagggctgaaggagagcctattacgtggcaggaattcatggccgctttcaagaagacacacataccaacgggtgttgtagctctaaagaagagagaatttagagcactcaaccagggatctcgttcggtcaccgagtacctccatgatttcaaccgtttagctcgctatgctccagaggatgttcgtaccgatgaggaacgtcaggagaagttcttggagggactgaatgatgagttgtcgtatgccttgatgtctacggatttccgggatttccagcagttggtggacaaggcgattcgtcaggaagacaagtataaccggatggagcagaagaagcacagggctgcccaattcaaggcacaacagggcagtaaccagaggccgcgtctcgttactggacctcaagctccaccgtaccctcaaggaggatcttcatcagttgtctgcccccaacgccagttctacaacaacaatactggtaatcgtggcaatgacaaccgtaacacggttgctcgtcctgcagcaactccagctcagaaccagcccgttaggaaggaacagggaagcaagccagtgatatgcttcaattgtggtgatccaggacattatgctgataagtgtcctaagcctcggcgtgtgaagaatgccccaaccccgaacaactctaatgttccagcaccgaaggcacgtgttaatcatgttgcagcagcagaagctcagaatgcaccagatgtggttttgggtacgtttcctgttaactctatacccgcaactgtgctttttgattccggtgctacacattcatttttgtctaaaagttttgcgagcaatcatgggatggaagttattagtcttgggagacctttactagttaataccccaggcaaccaagtattttcgacccagtattgtccttccgctaccatagaaatagaagaagttcctttcccatcctcgcttatcttgctagaatccaaagatctagatgttatcttagggatggactggttatctcgtcacagaggagttatagattgtgccaaccgtaaggtgaccttaaccagtagcaatggggaaaccgtttctttctttgtgtcctctcctaaatatcatggtgtgatcttaaaccaagttgctctacaagagattcccatagtacaagactaccccgacgtgtttcccgaggatttgccaggtatgccacctaagagggacatagagtttcggatagacttggtacctggaaccaaccctatccataagagaccatacagaatggcagctaatgagttagctgaggtgaagagacaggtggatgatttgcttcagaaaggatacatcagacccagtacttcgccatggggagcaccagtcatctttgtggagaagaaagatcatactcagagaatgtgcgtggattatcgagcgttgaatgaggtcactatcaagaataagtatcctctacccagaattgatgacctgttcgatcaactggaaggtgctacagttttctccaagatagatctccgttccggatatcatcaacttcgaatccgtgaggaagatataccaaagaccgccttcacaactcggtatggtttgttcgaatgtaccgttatgtcgtttggactcactaatgccccagcctttttcatgaatctgatgaacaaggtgttcatggaatatctggataagtttgtcgtggtgtttattgatgacattcttatttactctaagacgaaggaagaacatgaagagcatcttcgtctagctttagagaaactacgtgagcattagctttatgccaagttcagtaaatgtgaattttggttgtccgaagtgaagtttcttggtcatgtcatctcgtgtggaggagtggcagtagatccaagcaatgtggagtcagtattaagttggaagcaacccaagacggtttcagaaattcgtagtttccttggacttgctgggtattactgcaggtttattgagaacttttcaaagatcgccagaccaatgactcgtctgcttcagaaggaagtgaagtacaagtggacagaggattgtgaacgaagtttccaagaactgaagaaaaggctagtgactgcgcctgtgttaattttgcctgattcgaggaaaggtttccaagtgtattgtgatgcatcccgactcggtttgggttgtgtgttgatgcaagaaggaaaggtggttgcctatgcatctaggcaattacgtcctcatgagaataactacccaacgcatgacctagaattggcagctgtggtgcatgcattgaagatttggcgtcattatcttttcggtaaccgtacagagatgtatacggatcataaaagtttgaagtacattttcactcaacctgatttgaacatgcgtcagcgaagatggttagagttgattaaagattatgatatggaaatccactatcacccggggaaagcaaatgttgtagccgatgcccttagcaggaaaagctactgtaatatgtcagaaggtcgacatttaccttgggagttatgccaagaatttgaagggttgat

SEQ ID NO: 15612 - DNA, 2577 bp, Oryza sativa
  Clone ID: TFbOSC33037j.C1.o1.fg
atgatgccaccccattcaccgagaaatttgatcaaggtgttagggttcgtcagggagctgaggttgatggcttttgaggtaggctatgaagttgctcccgagtatcgccaaatttcccatgaccccgacgaggagaagtgtcgtgttcgtgtgacgttggctagtgatagtgatgaccttccgtcttttaagttcgaagctggaggaagatcgtacagccatgcttgtcaagaggcagctttggtggccattggagagttgcgtcaacgctttgaagaagagttggattcatcagctttccagtatcatcctcacaagcctcatggtcaagactatggaacctatacctgtcctgacggtgaagagagtgccactctgatgcatgcggtgcatatgcttagtgctatggatgcagtaagtgtggagcgagacaaagcagctcatgacagggaaaactggaatcgaggcaagatttgcaagttggagagcaaggtgtaccgtctacaaaaggaattagctgaacttaaaggagaaacgccgccgccaacacccaagcatcgcctcactcaaagaaaaagaacctgtccgccacctcgtctccagttagcttcgaagattcgcgtgatgggtgaagctgtgcccgatcgtgctgaacctgtcatagacatcataagtgatgaggaagaggaggaagaccctgaagaaagagagccagctactccagaggaagaagatccatcgcttcgttccgacacaaggcggatggtgaacacgcgcaccggaagtggaagtggaagtggaagtggagctactaacaatggaggagatcccacgctagctcagattctggcccaacaaacacaactgatcaatctgttagtgcagcaggcacagaatcagcaggcaaacaatcagaaccagaatccacccccacctccccaaaacaagctggcagatttcttacgcgtgagaccccctaccttttccagcaccaccaatccagtagaagcaggagattggctgcatgcggtggagaagaagttggatttgatccagtgtactgagcaggagaaagtttcttttgcttcgcatcaactgcatggtcctgctgctgaatggtgggatcattttcgccaaggcagggctgaaggagagcctattacgtggcaggaattcacggccgctttcaggaagacacacataccgtcgggtgttgtagctctaaagaagagagaatttagggcactcaaccagggatctcgatcggtcaccgagtacctccatgatttcaaccgtttagctcgttatgctccggaagatgttcgcaccgatgaagagcgtcaggagaaattcttggagggactgaatgatgagttgtcttatgctttgatgtctacggatttccgggatttccagcagttggtggacaaggcgattcgtcaggaagacaagtataaccggatggagcagaagaagcgcagggctgcccaattcaaggcacaacagggcagtaaccagaggccgcgtctcgttactggacctcaagttccatcgtaccctcaaggaggatcttcatcagttgtccgtccccaacgccagttctacaacaacaatactagtaatcgtggcaatgacaaccgcaacgtggttgctcgtcctgcagcaacttcagctcagaaccagcctgtcaggaaggaacagggaagcaagccagtgatatgcttcaattgcggtgatccaggacattatgctgataagtgtcctaagcctcggcgcgtgaagaacgctccagccccgaacaactccaatgttccagcaccaaaggcacgtgttaatcatgttgcagcagcagaagctcagaatgcaccagatgtggttttgggtacgttccctgttaactctatacccgcaactgtgctttttgattccggtgctacacattcctttttgtctaaaagttttacgagcaatcatgggatggaagttattagtctcgagagacctttactagttaataccccaggcaatcaagtattttcgacacagtattgtccttccgctactatagaaatagaagaagttcctttcccatcctcgcttatcttgctagaatccaaagatctagatgttatcttagggatggattggttatcttgtcacagaggagttatagattgtgccaaccgtaaggtgactttaaccagtagcaatggggaaacagtttctttctttatgtcctctcctaaatctcatggtgtgatcttaaaccaagttgctctacaagagatccccatagtacaagactacccagacgtgtttcccgaggatttgccaggcatgccacctaagagagagatagagtttcggatagacttggtacctggaaccaaccctatccataagagaccatacagaatggcagctaatgagttagttgaggtgaagagacaggtggaagatttgcttcagaaaggatacatcagacccagtacttcgccatggggagcaccagtcatctttgtggagaagaaagatcatactcagagaatgtgcgtggattatcgagcgttgaatgag

SEQ ID NO: 15613 - DNA, 4809 bp, Oryza sativa
  Clone ID: TFbOSC34537j.C1.o1.fg
atggcagattcggattcacccgctacctgggagttgagcttaccccaatcggaggggtatgtcattgtgctgcaccagatgttgaggcgtctgcgataccctggttttccgtcataccgagtgaggcagtgtggcccagtttgggaggctcgggtcgagattcacccccgagtcccttccgagttggactacagctttcagacacgtcaccaccgagacctgccagagaccgcgatgcaggatgccgcccgggaggccttcctccgactcagctctatccaccgagccgagttagtgagtaccgagtttgctcaccacccgttccgggaggagggcaactcagtttgcacagttcagaacacgccctgctgctacaacccgatagtgactcggttgtcacgatgggctgaggcagtagatgactactacgaggaggctctgttggagattgacgaccaccagagacgtatgggagagttagagactgaggtgaccgacctcacagcgcagcagcttcagttggaggaggagcaccaggcttggggcagtgagatagactcactgaaggcacagctccaggtccacggcgaccagtaccagcagttgtctgaccagtacaacgatcgccgcgggatgatggatactcttgaggagcagctgagagagagtcaggagcacgtcagccagttggaggagcagcttcgagcagccaagatcagcactacaggggcttctacttccacagcagcaggccgtgaccgctacttcttcctcaccccgccgtacccaccagcgttccacgctctcctgggagaggctagtatgctagctaccgagtcagcaccctacctagtggaccctacagcagcacagccacctgttccggagttggtgcacactccactggtccctacaccttccccgcagctgggttccggtttggagactccgatccagatcgactcggagacagaggagaccgacaccgagccggagatcgagccagacatcactgatccttcagaggatgaggctcctgttccccgcatcaccttccttggaggccctcgcaccctcagcactgctcgcaagagcacacgacctccgggcaagaggcccaagccagatccagaggccactacttctgagccgtggggactcagggtcattgagaaaaagctaactcttgttcgagtacgtgaggccgataaagtgatctttgcggcaaaccaattggaaggaccagccggagactggtgggatacctacaaggaagcccgagaagacggatcacgagagtttccagagcctgatcaacaaggtcgtcaggctagagaacgatcaaaggacggggaacacaaccgcaagaggaggcttgctatgagtcgcccacctcagacagtgcctcagcgactcaagggagccactccgtccggatggaagccccctgtcgtggtgaccaaccgtcccgctgcacctagcaacttcaacaggccagttgcacttcagaaccgcacccctacaccaactttggctgcccctggagccaagaagaatgtggactgcttcaactgtggggaatacgggcactacgctaacaactgccctcatccacgcaaaacccctgtccgaactggcgcgaatgcaatgactgttcgcggcactactacccctactgtcgggcgaggcctattcaagactccgcaatcgaacaggaccaccactggatttgggcgcggacaagtgaaccatgtccgagctgaagaggcccaggaagatcagggcgtactaatgggtatgttctctatcaattccaccccggttaaagttctcttcgattctggtgcatcgcattcatttatatctctgaaggctagtcaaaagcacaacttgaccctcgtgggacttagaaagcctatgatagtacactcacctgggggcgagataactgtgagtcatgcttgcatagacgtaccaattctccttagggatgtggtatttccctccaatcttatggtgctaataccccaaactcttgatgtcattttgggtatggattggttagcaaagcatacaggagtaattgactgtagacgtagagaagttaccctgaccacaccctggggatcggatatgcgagcaaccatggatcaagatcctaggctaaccgaacgtgccggaggtatatttaccatgctacccctaaagggaatgcccgtagtgcagcgatttcctgatgtgttcccagaagatttacctgggatgccaccagatcgtgacatagagttcattatcgacctgatacccggaactacccccatatccaagagaccatatcggatgccggtcaatgagttagaagaacttaaaaagcaaatcagggagttgcaagagaagggatttgtacgccccagttcgtcaccttggggagccccagtgttgtttgttaaaaagaaagacggtagcatgagaatatgtgtagactaccgatcactgaacgaagtaactatcaaaaacaagtatccactaccacggattgatgacctcttcgaccaacttaagggagctaaggtgttttcaacgatagaccttcgatcaggataccaccaactgaagattaggaccgaggatatccccaaaaccgcgttttcaacacgctatgggttgtatgaattcacagtaatgtcgtttggtctaaccaatgccccggcatacttcatgaatcttatgaacaaagtattcatggattacttggataagtttgtggtggtattcatcgatgacattctgatctactccaaagatgaagaagaacatgcggaacacttaagattggttctccagaaactccgaaagcacaagttatacaaaaaattcagcaagtgcgaattttggttgaaggaagtcgcttttctgggtcacgtaatctcagccggtggagtagcagtggaccctgctaaagtggaggctgtcacggaatggaaagcacccaaatctgtgactgaaattcggagttttctaggcttggctggatactaccgaaggttcattgaagggttctctaagatagcccgaccgatgacacaactactcaagaaggaaaagaagtttgtatggtcagaacaatgtcaggaaagctttgaacagcttaaagaaaagctgacctcggcacctattttagttcttcccgacatcaggaaagactttgttatatattgtgatgcgtcaaggcaaggactaggaggagtactgatgcaggacggaaaagttgtggcctatgcgtcgcgacaattacgaccacatgaggaaaactaccctacccatgacctagaactcgcagctgtggttcatgcgctaaagatttggagacattacctaattggaaaccattgcgatatctacactgaccacaagagtctaaagtatatcttcacccagtcagatctcaacttgaggcaaagacgatggttagaattaatcaaggactatgatttagaggttcactatcacccaggcaaagcaaacgttgtggccgacgctctgagtcgtaagagccattacaatcatctgagaatggaagggatggtccctgagcttagggaggaaatagctcagctgaacctacatatagtgcctcatggacggataaacaccctggacattcaacctcttttgagaacccaaatagaagaagcccagaaggacaacgaggaggtccgagaggtgaaggaacgcttagctgcaggacgtgcaaaagaattttcaaccgacggaaaagacgttctatggtataaaaagagaatttacgtacccgaacagggtggactgaggggattaattttaaaggaagctcacgagtcggcatactcattacaccccggaagtaccaaaatgtaccaggatttgaaggagggctactggtggcccaacatgaagagagatgtggccgaatacgtagcactttgcgacgtatgccaaaaggtgaaggctgaacaccagaggccggcaggtttgttgcaacctctcaggattcccgaatggaaatgggatgagataggcatggattttattgttggattgcccaaaaccgcaacaggatatgattccatttgggtgatcgtggatcgactcaacaagacggcaagattcatccccgtcaagacaaactatagcagtgcaaaactcgccgagttgtacatgaccaggatagtgtgtcttcatggtatacctaagaagattatatctgatcgaggcacacaatttacctcacatttctgggagaaagtccatgaagccctgggaagttacctcgcatttagcaccgcttatcatccacagacagatggccagacggagagaaccaaccagactggagaacgggcggtatttgggcctgacattattcaagaagcagaagaaaaggttcgcttgatccgtgatcgtctaaaagtagcacaatcacgacaaaagagttacgccgacactcgaagaagaaacctggaatttaaggaaggagattacgtttatctaaaggtttctccgatgagaggaacaaaaaggtttaaggttaaaggaaaactggcaccaagatatgtggggccattccagatcattgccaggcgaggagaagtcgcatatcagttacagctaccagaatatatcgccgatgtgcacccagtcttccatgtgtcccaattaaagaaatgcttacgagtgccggaagaacaagctccgctggaagagattcacattagcaatgatctcacatatccagaacacccgatccggatattggatgaagcagattag

SEQ ID NO: 15614 - DNA, 4703 bp, Oryza sativa
  Clone ID: TFbOSC400236j.C1.o2.np
atgcaggatgcagcccgggaggccttcctccgacttagctctatccaccgagctgagttggctagtactgagtttgctcaccacccgtttcgagaggagagcaactccgtctgcacagttcaggacacaccttgctgctacaacccgatagtgacccgactgtcacgatgggctgaggcagtagacgacttttacgaggaggctctgttagagatcaacgaccagcagaggcgtgttggagagttagagaccgaggtgactgacctcacagtgcagcagcttcagctggaggaggagcaccaggcttggggcactgggttgcagtatggagactccgatccaggtcgactccgagacagaggagaccaacaccgagccagagatcgagccagacatcactgatccttcagaggatgagacccctgttccccgcatcaccttcatcggaggcccttgcaccctcagcactgctcacaagaacacacgacctccgggcaagaagcccaagccagatccagaggccactacttccgagccgtggggactcagttcccatcaaaacaactcccttaatgggataaaaccataagagctagttagaaaattatgatacttacttaatcggcctacacagatggcaagccgacgtcgggcgtcaaccagcaatgaagaaacttagacacctgacttaaccaccctggccggagttatggccactcaaacccaacttctgcaagccattgcaaataatcaaggcaaccgcggcggatcgagctttggagagtttgtgaggaccaagccacctacgttcgctacggcagacgagcccatggaggcagaagattggctacgcatcatagagaagaaactgactcttgtgcgggtacgcgaagccgacaaagtgatcttcgcagtaaaccaactggagggacccgctggtgattagtgggatacttacaaggaagctcgggaagaggatgctggagaacccacttgggaagagttcactgcagcattctgcgagaactttgtgcctgctgcggtaatgcgtatgaagaacgagtttagaaggctacgacaagggaacacaacggtgcaagaatatctgaaccggttcactcagttggcccgctatgcaattggagacctcgcagatgaagaggaaaagattgacaagttcatagaagggctgaatgatgaattgcatggacctatgattgggcaagaccatgagagcttccagagcctgatcaacaaagtcgttaggctggagaacgatcaaaggactgtagagcacaaccgaaagaggaggcttgctatgaatcgcccacctcagggagtgcctcagcgactcaagggagccccttcgtctgggtggaaaccccctattgtggcgaccaaccgccccgccgcacctagcaatttcaacaggccgattgcgattcagaaccacacccctacaccaactttggctgcccttggagccaagaagaatgtggactgtttcaactgcggggagtatgggcactacgccaacaactgccctcatccacgcaaaactcctgtccgtactggcgctaatgcaatgactgttcgtggaactactacccctgctgctagacgaggtctattcaagactccgcaaacaaacaggaccgctaccggatttggacgcggacaagctagtcaaaagcacaacttaaccctagtgggacttagaaagcctatgatagtacactcacctgggggcgagataactggatgtggtgtttccctccaaccttatggttttgataccccagaccctggatgtcatattgggtatggattggttaacaaagaacagagggaagatttacctgggatgccaccagatcgtgacatagagttcattattgatctgataccaggaactgcccccatatccaagagaccttatcggatgccggtcaatgagttggaggaacttaaaaagcaaatcagagagttgcaagaaaagggatttgtacgccccagttcgtcaccttggggagccccagtgctattcgtcaagaagaaagatggtagcatgaggatgtgtgtagactaccgttcactgaacgaggtaactatcaaaaacaagtatccactaccatggattgatgatcttttttatcaactcaagggagctaaggtgttctctaagtttgaccttcgatcaggataccaccaattgaaaattaagaccggggatatatccaagactgcgttttcaacatgctatagattgtatgagttcacagttatgtcgtttgggttaaccaacgccccggcatgctttatgaatctcatgaacaaagtgttcatggattacttggacaaatttgtagtagtattcatcgatgatattttaatttactccaaagatgaggaagaacatgcggaacacttgcgattggtactcgagaaacttcggaagcataaattatatgcaaagtttagcaaatgtgagttctggttaaaagaagtcgcttttctaggccacgtaatctcagccggtggagtagcagtggatcctgccaaagtggaggctgttacggaatagaaagcacccaaatctgtgactgaaattcggacttttctaggcttggccggatactaccgaaggtttattgaggggttctctaagatagcccgaccaatgacacaactactcaagaaggaaaagaaatttgtgtggtcaggacagtgtcaggaaagctttgagcagctcaaagaaaagctgaccttggcgcctattctagttcttcccgacatcaggaaaaactttgttatatattatgatgcatcaaggcaaggactaggaggagtactgatgcaggacggaaaggttgtggcctatgcgtcgcgacaattgcgaccacatgaggaaaactaccctacccatgacctagaactcgcagttgtggttcatgcactaaagatttggagacattatctgattggaaatcattgcgatatctacactgaccacaagagtctgaagtatatttttacccagtcagatctcaacttaaggcaaaggcgatggctggaattaatcaaggattatgacttagaggttcactatcaccccggcaaggcaaacgttgtggccgatgctttgagtcggaagagccattgcaatcatctgagaacggaagggatggcccctgagcttaaggaggaaatggcccagctaaacctacatatagtaccccacggacagataaacacactggacgttcaacctcttttgagaacccaaatagaagaagcccagaaggacaacgaggaaatccgagaagtgaaggaacgcttagctgcaggacgtgcaaaggaattttcaaccgatgaaaaaggtgttctatggtataaaaagaggatctatgtacccgaacaggggggactgagaggattaatcctaaaggaagctcacgaatcggcatattcattgcaccccggaagtaccaagatgtaccaggatctgaaggaaggatactggtggcccaatatgaagagatgtggccgaatacgtagcactctgtgacgtgtgccaaaaggtgaaggctgagcatcagcgaccggcaggtttgctgcaaccccttagaattcccgagtggaaatgggatgagataggtatggattttattgttggattgcccaagaccgcaacaggatatgattccatttgggtgatcgtggatcgactcaccaagacggcgagattcattcccgttaagacaaattatagcagtgccaagctcgccgagttatacatgaccaggatagtatgtcttcatggtgtacctaagagaattatatccgatcgaggcacacagtttacctcgcatttctgggagaaagtacatgaagccctaggaagttaccttgcgtttagcaccgcttatcacccacaaatagatggccagacagagagaacaaaccagctcttggaggacatgctgagagcttgtgctctggattttagcaaggattgggagatatgtttgccctacgccgaattctcctataacaacagctttcaagcaagcctaaaaatgccacccaatgaggcattgtttggtcgacgatgtcgaaccccgctaatgtggtccgagacaggtgaacgggcggtatttggacctgacattatcaacgaggccgaagaaaaggttcgtctgattcgagaccgtttaaaagtggcacaatcacggcagaagagttacgccgacacccgaagaagaaacctggaatttaaggaaggagattatgtttagctgaaggtttctccgatgagaggcacgaaaaggtttaaggtcaaaggaaaactagcgccaaggtatgtgggacctttccaaatcacggctagacggggagaagtcgcatatcagttacagctaccagagaatatcgctgatgtgcacccagtcttccatgtgtctcaattaaagaaatgcttactagtgccggaagaacaagctccgctggaagagattcacattagcaatgatctcacgtatccagaacacccgatccggatattggatgaagccgaaaagaggactaggagcaaagtgtggcgtgtgtacaaggtacaatggagtaatcacactgaggacgaagccacctgggaaagcgaagaattcctgaggacggaatacccgcatctattcgaaaactgg

SEQ ID NO: 15615 - DNA, 4248 bp, Oryza sativa
  Clone ID: TFbOSC400304j.C1.o3.fg
atggcaagccgacgtcgggcgtcaatcagcaatgaagaaactcaaacacctgacctaaccaccctggccggagttatggccactcaaacccaacttctgcaagccattgcaaacaaccaaggcaaccgcggacgatcaagctttggagagtttatgaggaccaagccacccacgttcactacggcagacgagcccatggaggcagaagattggctacgcatcatagagaagaaactgactcttgtccgggtacgcgaagccgacaaagtgatcttcgcagtaaaccaactggagggacccgctggtgataggtgggatacttacaaggaagctcgggaagaggatgctggagaacccacttgggaagagttcactgcagcatttcaagagaacttcgtgcctgctgcggtaatgcgtatgaagaagaacgagtttagaaggatgcgacaagggaacacaacggtgcaggaatatctgaaccggttcactcagttggcccgctatgcaattggagacctcgcagatgaagaggaaaagatcgacaagttcatagaagggctgaatgatgaattgcgcggacctatgattgggcaagaccatgagagcttccagagcctgatcaacaaagtcgttaggctggagaacgatcaaaggactgtagagcacaaccacaagaggaggcttgctatgaatcgcccacctcagggagtgcctcagcgactcaagggagccacttcgtctgggtggaagccccctattgtggcacccaaccgtcccgccgcgcctagtaatttcaacaggccggttgtgattcagaaccgcacccctacaccaactctggctgcccctggagccaagaagaatgtggactgcttcaactgcggggagtatgggcactacgccaacaactgccctcatccacgcaaaactcctgtccgtactggcgctaatgcaatgactgttcgtggaactactacccctgctgccggacgaggtctattcaagactccgcaaactaacaggaccgctaccggatttggacgcggacaagtgaaccatgttcgagctgaagaggcccaggaagaccagggcgtactaatgggtatgttctctatcaattccaccccggttaaagttctcttcgattctggtgcatcgcattcattcatatctcggaaggctagtcaaaagcacaacttaaccctagtgggacttagaaagcctatgatagtacactcacctgggggcgagataactgtgagtcatgcttgcatagacgtacctattcgtcttagggatgtggtgtttccctccaaccttttggttttgatacctcagaccctggatgtcatattgggtatggattggttgacgaagaacagaggagtaatcgactgtagacgtagaaaagttaccctgaccacaccctggagatcggatatgagagcaaccatggatcaagatcctagactaatcgaacgtgccggaggcatatttaccatgctacccctgaaaggaatgcccatagtgcagcgatttcccgatgtgtttccagaagatttacctggaatgccaccagatcgtgacatagagttcattattgacctgatacccggaactgctcccatatccaagagaccttatcggatgccagtcaatgagttggaggaacttaaaaagcaaatcagagagttgcaagagaagggatttaacaagtatccacttccacggattgatgatcttttcgatcaacttaaaggagctaaggtgttctctaagattgaccttcgatcaggataccaccaattgaaaattaggaccggggatgtacccaagactgcgttctcaacacgctatggattatatgagttcacagtaatgtcgtttggattaaccaacaccccggcatactttatgaatcttatgaacaaagtgttcatggattacttggacaaatttgtggtagtattcatcgatgatattttaatctactccaaagacgaggaagagcatgtggagcacttgcggttggtactcgagaaacttcggaagcataaattatatgcaaagtttagtaaatgtgagttctggttaaaagaagtcgcctttctaggccacgtaatctcagccggtggagttgtagtggatcctgctaaagtggaggctgttacggaatggaaagcacccaaatctgtgactgaaattcggagttttctaggcttggccggatactaccgaaggttcattgaggggttctctaagataacccgaccaatgacacaactactcaagaaggaaaagaagtttgtgtggtcagaacagtgtcaggaaagctttgagcagctcaaagaaaagctgacctcggcgcctattctagactggggaggagtactgatgcaagaaggaaaggacgtggcttatgcatcgcgacaactgcgaccacacgaggaaaattaccctacccatgacctagaactagcagtcgtggttcatgagctaaagatttggagacactatttgattggaaaccattgcgatatctacactgactacaagagtctgaagtatattttcacccagtcagatctcaacttgaggcaaaggcgatggttggaactaatcaaggattatgatctagaggttcactatcacccaggcaaagcaaacattgtggccgacgctttaagtcgaaagagccattgcaatcatctgaggatggaagggataacccctgaacttaaggaggaaatagcccaactgaatttacatttagttccttatggtcaaataaacaccttggacatccagccccttttgaggacccagatagaggaagcccagaaggacaacggagagatccaagaggtgaaggagcgcatagccgctggttgtgcgaaagaattctcaattgatgagaaggaaacactatggtataagaagaggatttacgtacccgaacagggtggactgaggggattaattctaagggaagctcacgaatcagcatattcattacaccccggaagtacgaagatgtaccaggacctgaaggaaggatactggtggcccaacatgaaaagggatgtagcagaatacgtagcactctgcgacgtatgccagagggtgaaggccgagcaccagcgaccggcaggtttgctgcaaccccttaggattccagaatgcaaatgggacgagataggtatggactttatcgttggattgcataagaccgcaactggttacgattccatttgggtaatcgtggaccgactcactaagactgcaaggttcatccccgtcaagacaaattatagcggagccaagctagctgagttatacatgacaaggatagtatgtcttcatggtgtgcctaagagaattatatccgatcgaggcacacagtttacctcgcatttctgggaaaaagtacatgaagccctaggaagttaccttgcttttagcacagcttatcacccacaaacagatggccagacagagagaacaaaccaggtcttggaggacatgttgagagcttgtgctttggattttagcaaggattgggagaaatgtttgccctacgccgaattctcctacaacaacagtttccaagcgagcctaaagatgtcgccaaatgaggcattatttggtcgacgatgtcgtaccccactaatgtggtccgagactggagaacggacggtatttggacctgacattatccaagaagccgaagaaaaggttcgcctaatccgtgaccgtctaaaagtggcacaatcacgacaaaagagttacgctgacacccggagaagagatctagaatttaaggaaggggattatgtatatctgaaggtttctccgatgagaggtacaaaaatgtttaaggttaaagggaaactagcaccaagatatgtgggacctttccaaatcatcgctagacgaggagaagttgcatatcagttacagctaccagaaaatatcgctgatgtgcacccagttttccatgtgtctcaattaaagaagtgcttacgagtgccggaggaacaagctccgttggaagaaattcatattagcaatgatctcacgtatccagaacacccagtccggatattggatgaagcagaaaagaggactaggaccaaagtgtggcgtatgtacaaggtacaatggagtaatcatactgaggatgaagccacttgggaaagcgaagaattcttggagacagaatacccgcatctattcgaaatccgataa

SEQ ID NO: 15616 - DNA, 2023 bp, Oryza sativa
  Clone ID: TFbOSC400340j.C1.o1.np
atgggcgtaccccgctcagagggatacgtcatagagctacatcgggtgatgaggcgccttcggtaccccagatttccgatctaccgagtgagacaatgtggacccttttgggagggccggattgaggttcatccgcgagtcccttcagagtcagactacagcttctcgacacgccaccgtcgtgacttaccggagaccgcgatgcaggacgcagcccgggaggccttcctctgacttagttctattcactgggcagagttagcgagtaccgagtttgctcaccatccgtttcgggaggagagcaactctgtctgcacagttcaggacataccttgctgctataacccgatggtgactcgactgtcccgatgggctgaggctgtggacgacttctacgaggaggccctgttggagatcgacgaccagcagaggcgtatgggagagttggagaccaaggtaactgacctcacagcacaacagcttcagctagaggaggagcatcaggcttggggcagcgagatagactcgctgaaggcacagctccagccagggtccagtttagagactccgattcaggtcgactccgagacagaggggaccgacaccgagccagagatagagccggacatcactgatccttcagaggacgcgactcctgtcccccgcattaccttcatcggaggccctcgtaccctcagcaatgcccgcaagagcacacgacctccgggcaagaagcccaagccagatttagaggccactacttccgagccgtggggactccgcatcatagagaagaaactgactcttgtccgggtacgcgaagccgacaaagtgatcttcgcagtaaaccaactggagggacccgttggtgataggtgggatacttacaaggaagctcgggaaaaggatgctggagaacccacttgggaagagttcactgcagcatttcaagagaacttcgtgcctgctgcggtaatgcgtatgaagaagaacgagtttagaaggatgcgacaagggaacacaacggtgcaggaatatctgaaccggttcactcagttggcccgctatgcaattggagacctcgcagatgaagaggaaaagatcgacaagttcatagaagggctgaatgatgaattgcgcggacctatgattgggcaagaccatgagagcttccagagcctgatcaacaaagtcgttaggctggagaacgatcaaaggactgtagagcacaaccacaagaggaggcttgctatgaatcgcccacctcagggagtgcctcagcgactcaagggagccacttcgtctgggtggaagccccctattgtggcacccaaccgtcccgccgcgcctagtaatttcaacaggccggttgtgattcagaaccgcacccctacaccaactctggctgcccctggagccaagaagaatgtggactgcttcaactgcggggagtatgggcactacgccaacaactgccctcatccacgcaaaactcctgtccgtactggcgctaatgcaatgactgttcgtggaactactacccctgctgccggacgaggtctattcaagactccgcaaactaacaggaccgctaccggatttggacgcggacaagtgaaccatgttcgagctgaagaggcccaggaagaccagggcgtactaatgggtatgttctctatcaattccaccccggttaaagttctcttcgattctggtgcatcgcattcattcatatctcggaaggctagtcaaaagcacaacttaaccctagtgggacttgaaagcctatgatagtacactcacctgggggcgagataactgtgagtcatgcttgcatagacgtacctattcgtcttagggatgtggtgtttccctccaaccttttggttttgatacctcagaccctggatgtcatattgggtatggattggttgacgaagaacagaggagtaatcgactgtagacgtagaaaagttaccctgaccacaccctggagatcggatatgagagcaaccatggatca

SEQ ID NO: 15617 - DNA, 4710 bp, Oryza sativa
  Clone ID: TFbOSC400724j.C1.o13.fg
atgcaggatgcagcccgggaggccttcctccgacttagctctatccaccgagctgagttggcgagtactgagtttgctcaccacccgtttcgagaggagagcaactccgtctgcacggctcaggacacaccttgctgctacaacccgatagtgactcgactgtcacgatgggctgaggcagtagacgacttttacgaggaggctctgttagagatcaacgaccagcagaggcgtgtgggagagttagagaccgaggtgactgacctcacagtgcagcagcttcagctagaggaggagcaccaggcttggggtactaggttcgagtttggagactccgatccaggtcgactccgagacagaggggaccgacaccgagcagagatcgagccagacatcactgatccttcagaggatgagacccctgttccccgcatcaccttcctcggacgccctcacaccctcagcactgcccgcaagagcacacgacccccgggcaagaagcccaagccagatccagaggccactacttctgagccgtggggactcagttcacaccaaaacaactcccttaatgggataaaaccacaagagctagttagaaaattaggatacttacttaatcggcctacacagatggcaagccgacgtcgggcgtcaaccaacaatgaagaaactcagacacctgacctaaccaccctggccggagttatggccactcaaacccaacttctgcaagccattgcaaatgaccaaggcaaccgcggcggatcgagctttggagagtttatgaggaccaaaccacccacattcgctatggcagacaagcctatggaggcagaagattggctacgtatcatagagaagaaactgacccttgtccgggtacgcgaagccgacaaagtgatcttcgtagtaaaccaactggagggacccgctggtgattggtgggatacttacaaggaagctcgggaagaggatgctggagaacccacttgggaagagttcactgcagcatttcatgagaacttcgtgcctgctgcggtaatgcgtatgaagaagaacgagtttagaaggctgcaacaagggaacacaacggtgcaggaatatctaaaccgattcactcagttggcccgctatgcaattggagacctcgcaaatgaagaagaaaagatcgacaagttcatagaagggctgaatgatgagttgcgtggacctatgattgggcaagatcatgagagtttccggagcctaatcaacaaggtcgttaggctggagaacgatcaaaggactgtagggcacaaccgcaagaggaggcttgctatgaattgcccacctcagggagtgcctcagcgacacaagggagccacttcgtctgggtggaagccccctattgtggcaaccaaccgccccgccgcacctagaaatttcaacaggccggttgcgattcagaatcgcacccctacaccaactctggctgcccctggagccaagaagaatgtggactgcttcaattgcggggagtatgggcactacgccaacaactgccctcatccacgcaaaactcctgtccatactggcgctaatgcaatgactgttagtggaactactgcccctgctgccggacgaggactattcaagactccgcaaactaacaggaccgctaccagatttggacgcggacaagctagtcaaaaacacaacttaaccctagtgggacttagaaagcctatgatagtacactcacctgggggcgagataactggatgtggtgtttccctccaaccttatggttttgataccccagaccgtgggtgtcatattgggtatggattggttaacaaagaacagagggaagatttacctgggatgccaccagatcgtgacatagagttcattattgatctgatacccggaactgctcccatatccaagagaccttatcggatgccagtcaatgagttggaggaacttaaaaagcaaatcagagaattgcaagaaaagggatttgtacgccccagttcgtcaccttggggagccccagtgctattcgtcaagaagaaagatggtagcatgaggatgtgtgtagactaccgttcactaaacgaagtaactatcaagaacaagtatccactaccatggattgatgatctttttgatcaactcaaaggagctaaggtgttctctaagattgaccttcgatcaggataccaccaattgaaaattaggaccggggatatacccaagaccgcgttttcaacacgctatggattgtatgagttcacagtaatgtcgtttgggttaaccaacgccccggcatactttatgaatcttatgaacaaagtgttcatggattacttggacaaatttgtggtagtattcattgatgatattctaatctactccaaagatgaggacgaacatgcggaacacttgcgattggtactcgagaaacttcggaagcataaattatatgcaaagtttagtaaatgtgagttctggttaaaagaagtcgcttttctaggccacgtaatctcagccggtggagtagcaatggatcctgctaaagttgaggccgttacggaatggaaagcacccaaatttgtgactgaaattcggagttttataggcttagccggatactaccgaaggtttattgaaggattctctaagatagcccgaccaatgacacaactactcaagaaggaaaagaagtttgtgtggttagaacagtgtcaggaaagctttgagcagctcaaagaaaagctgacctcgtcgcctattttagttcttccggacatctggaaagactttgttatatattgtgatgcatcaaggcagggactaggaggagtactgatgcaggacggaaaggttgtggcctatgcatcacgacaattgcgaccacatgaggaaaactaccctacccatgacctagaactcgcagctgtggttcatgcgctaaatatttggagacactatttgattggaaaccattgcgatatctacactgaccacaagagtctgaagtatattttcacccagtcagatctcaacttgaggcaaaggcgatggctggaattaatcaaggactatgatctagaggttcactatcaccccggcaaggccaacgttgtggccgacgctttgagtcggaagagccattgcaatcatctgaggacggaagggatggctcctgagcttaaggaggaaatagcccaactaaacctacatatggtacctcatggacagataaacaacctggacattcaacctcttttgagaacccaaatagaagaggcccagaaggacaacgaggaaatccgagaggtgaaggaacgtctagttgcaggatttgcaaaggaattttcaaccgacgagaaggatgtcctatggtataaaaagaggatttatgtacctgaacagggtggactgagaggattaattctaaaggaagctcacaaatcagcatattcattacaccccggaagtacgaagatgtaccaggatctgaaggaaggatactggtggcccaacatgaagagagatgtggcagaatacgtagcactctgtgacgtgtgccaaaaggtgaaggctgagcatcagcgaccggcaggtttgctgcaaccccttaggattcccgagtggaaatgggatgagataggtatggattttattgttggattgcccaagaccgcaacagggtacgattccatctgggtgattgtggatcgactcaccaagacggcaagattcatccccgtcaagacaaactataacagtgctaaactcaccgagttgtacatgaccaggatagtgtgtcttcatggtgtacctaagaggattatatctgatcgaggcacacagtttacctcgtatttctgggagaaagtacatgaagccctaggaagttaccttgcgtttagcacagcttatcatccacagacagatggccagacggagagaaccaaccaggttttggaggacatgctgagagtttgtgcaatggattttagcaaagactgggagagatgtttgccctacgccgaattctcctacaacaacagtttccaagcgagcctaaagatgtcgccaaatgaggcattatttggtcgacgatgtcgtaccccactaatgtggaccgagacaggtgaacgggcgatatttggacttgacattatcaaagaagccgaagaaaaggttcgcctgattcgagaccatctaaaagtggcacaatcacgacagaagagttacgccgacacccgaagaagaaacctggaattgaaggaaggagactacgtttatctaaaggtttctccgatgaggggaacgaaaaggtttaaggtcaaaggaaaactagcgccaagatatgtgagaccttttcaaatcacggctagacgaggagaagttgcataccagttacagctaccagaaaatatcgccgatgtgcacccagtctttcatgtgtctcagttaaagaagtgcttgcgagtgccggaagaacaagctacgttggaagaaattcatatcagcaatgatctcacgtatccagaacacctagtccggatattggatgaagctaaaaagaagactagaaccaaagtgtggcgtatgtacaaagtacaatggagtaatcacactgaggatgaagccacttgggaaagcgaagaattcttgaagacagaatacccccacctattcgaaaacctgtaa

SEQ ID NO: 15618 - DNA, 4628 bp, Oryza sativa
  Clone ID: TFbOSC401044j.C1.o17.np
ccgtcgcgacttaccggagaggcctttctccgaattagctctattcaccgagctgagttagcgagtaccgagtttgctcaccacccatttcgagaggagagcaactccgtctgcacagtccaggacacaccttgctgctacaacccgacagtgactcgactgtcccgatgggctgaggcagtagacgacttctacgaggaggctctgttagagatcgacgaccagtagaggcgtgtgggagagttagagagactgaggtgactgacctcacagtgcagcagcttcagctagaggaggagcacctggcttggggcactgggttccagtttggagactccaatccaggtcgactccgagacagaggggaccgacactaagccagagatagagccggacatcactgatctttcagaggatgagactcctgcccaccgcatcacctttgtcggaggccctcgtaccctcagcactgctcgcaagagcacacgacctccgggcaagaagcccaagccagatccagaggccactacttccgagccgtggggactcagttcacaatcaaaacaactcccttaacgggataaaaccaaaagggctagttaggaaaataggatacatacctcatcggcctacacagatggcaagccgacgtagggcgtcaaccagcaatgaagaaactcaagtacccgacctaaccaccctggccagagttatggccactcaaacccaacttctgcaagccattgcaaacaatcaagacaactgcggaggatcgagctttggagagtttatgaggactaagccacccactttcgctacggcagatgagcctatggaggcagaagattggctacgcatcatagagaagaaactgacccttgtccgggtgcgcgaagctgacaaagtgatcttcgcagtaaaccaactggagggaccaactggcgattggtgggatacttacaaggaagctcgggaagaagatgctggagaacccacttggggagaattcactacagcttttcgtgagaacttcgtgcctgctgcggtgatgcgcatgaagaagaataagttcagaaggctgcgacaaggaaacacaatggtgcaagaatatctgaaccggttcactcagttggcctgctacgcaatcggagatctcgcagatgaagaggaaaagatcgacaagttcatagaagggctgaatgatgaattgcgtggacctatgattgggcaagaccatgagagcttccagagcctgatcaacaaagtcattaggctggagaacgatcaaaggactgtagagcacaaccgcaagaggaggcttgctatgaatcgcccacctcagggacctcagcgactcaagggagccacttcgtctgggtggaagccccctattgtggcaaccaaccgtcccgccgcgcctagcaatttcaacaggctggttgcgattcagaaccacacccctacaccaactctggctacccctggagccaagaagaatgtggactgcttcaactgcggggagtatgggcactacgccaacaactgccctcatccacgcaaaactcctgtccgtactggtgctaatgcaatgactattcgtggaactactacccctgctgccggacgaggtctattcaagactccgcaaactaacaggaccgctaccggatttggacgcggacaagtgaaccatcgtggcaactcgacgacgacgacctcctcatctgccggcgccgccgcctcgccgtcgtcggtcaccgacgtcgctgctgtgtcggcggcttgcgacctcgcctctcctcttctcggcgttctcgccgccactggcgccaccagcggcaactcgaggatgaagctccccggtttaccaccggccagagtatttgaccattcaattcctttactgccaggagcaaaacctgttaacttgcgaccttattgatataatccagctcaaaaagatgagattgaacggcaagttgcggatatgctccaacagggaatcatacaacccagctctagtcctttttcatcacctgttctgctggtgcttaagaaggaccttacttggcgattctgtattgactaccgccatctcaatgcaattacagtcaagaatcgatatcctttgccaattatcgatgagttgcttgatgaattagcgggatcctgtttattcacgagtttcgatttaagagctggctatcatcagatccggatgcgcccagaagatgagcacaaaacagcgtttaagacgcacaatggacactacgaattcagggttatgtcctacggccttaccagtgccccggctaccttccaagtactgatgaatcagatcttagctccattgcttcgcaaaggagtgctggtgttcacagatgacatcttaatctatagtcaaaatttggatgaccatgtagctttgttgcgacgggtgtttcaattgctaactgatcatcaacttaaggtcaagagaagcaaatgctcgttcgcccgtgcaagtttaccatatcttgggcatgttattagtgcagaaggtgtggccactgactcgaagaatattcaagcggtgcacaactgggcagtaccctgtaatgtgaaggaagtgcgaggatttttgggtcttgcagggtactaccggaagtttgtacactcttttggtattatcagcaggccccttactgatctgctaaagaagaatgtggtgtttgtttggacgtcggagcatcaagcgtcttttgatgccttgaaggaagctctagtttctgctcctgtcctagcactaccggatttctccaaagtttttgaaattgagaccgatgcgtctgataagggtgttggcgctgtgttgatgcaagctggccatccgttagcctttctcagtaaatctttggggcctcgaaatcaagggctgtccacttacgagaaggagtgcttggcgattctcctcgctgtggaacaatagcgctcttacttgcagtttggagagtttataatccgtactgaccagcgcagtttgattcatttggatgatcagagattagtaacaccttggcaacagcgtgctctgaccaaactgcttggtttacaatacagaattgtctataagaagggactggaaaataaagctgccgatgctttgtcacgcaatcagtcaaccgatgtgtttcagctcagtgcggtgtcttcctgcattccagtttggttggcagatgtgcagctgggatatgctcaggatcaagtatcctctcaactgttgactaaactctcgtttaagtcctgaggcgctccctgagtacagattacagaatggcattatctaccataagggaaggatttggttgggtaacaatgtggagttacagactaaagttctgactgcactgcacaacgcagcaattgggggtcattctggtactcaggcaactttcagtcgagtgaataagttatttgcttggcctggactcagaaaagctgtgcgccagtttgtgtcggcttgttccatctgtaaacaggccaaagcagaacgggttcggtacccaggtttcttacagcctcttccagtgcccgagcatgcttggcaaacagtctcgttggatttcattgaaggcttacccagctcatcgggttttgattgtatacttgtggtggtcgacaaattcagtaagtatgctcactttgttgctcttgctcatcccttcacagccttcgacgtggctctggcctacctcaacaatgtctacaagatgcacggattgcctcagcatctgatctctgatcgagatcgtatctttaccagtgcattgtggaaggaactctttcagttggccgacactcaattgcaaatgagctctgcttatcatcctcaaacggacggacagaccgaacgggttaatcagtgcttggaaacctttttgagatgttttgtgcacgcttgcccaaagaggtggtatcgttggcttgctttggcggaattctggtacaatactgcctttcattcggctctggacaaatcaccatttgaggtattatatggtcattctcctcggcattttggtgtgttcgatcgctttgagtgtgctgttccagatttgcaagactggttgaaggaacgggaagtgattaccagtttgccgcgacaacatctgttacgagctcagcaaagtatgaagttacaggctgacaagaaacgttctgatcgtgagtttgcagttggtgactgggtgttcctgaaggcacagccgcatgctcagttctctatgacaggacgttctaatcacaaattggctttccgttattttggcccctttcagatcttggcgcgcattggaagtgtggcttatcgccttcaactaccgacaacttgtgctattcacccagtagtacatgtctcacagctccgtcaggcttcttcaccagctcctgactcgtcgattcaagacctgccagcgttaactgaagatgaagcgctaccagtccaaattcttgctcgtcgtgcagtcaagaaaggcgctggagctgtggaacaactcaagattcgctggtctggtcagacgtccgctgaagcaacctgggaggatggtgctgcactgcgtgcgcgtttccctgaagcaccggcttgggga

SEQ ID NO: 15619 - DNA, 4382 bp, Oryza sativa
  Clone ID: TFbOSC401051j.C1.o12.np
atggtgaacacgcgcaccggaagtggaagtggaagtggaagtggagctactaacaatggaggagaacccacgctagctcagattctggctcaacagacacaactgatcaacctgttagtgcagcaggcacagaatcagcaagcaaataatcagaaccagaatccacccccacctccccaaaataagctggcagatttcttacgtgtgagaccccctaccttttcaagcaccaccaatccagtagaagcaggagattggttgcatgcggtggagaagaagttggatttgatccagtgtactgagcaggagaaagtttcttttgcttcgcatcagttgcatggacccgctgctgaatggtgggatcattttcgccaaggcagggcgggaggagaacctattacttggcaggaattcacagctgcttttaagaagacgcatataccgtcaggtgttgtagctctaaagaagagagaatttagagcactcaaccagggatctcgttcggtcactgagtacctccatgattttaaccgtttagctcgctatgctccagaggatgttcgcaccgatgaagagcgtcaggagaagtttttagagggactaaatgatgagttgtcttatgctttgatggctacggatttccgggatttccaacaattggtggacaaggcgattcgtcaggaagacaataaccaaaggccgcgtctcattactggacctcaagctccatcgtaccctcaaggaggatcttcatctgttgcccgtccccaacgccagttctacaacaacaatactagtaatcgtggcaatgacaaccgcaatatggttgcttgtcctgcagcaactccagttcagaaccagcctgtcaggaaggaacagggaagcaagccagtgatatgctttaattgtggtgatccaggacattatgctgataagtgtcctaagcctcggcgtgtgaagaacgctccagtcccgaacaaccccaatgttccagcaccgaaggcacgtgttaatcatgttgcagcagcagaagctcagaatgcaccagatgttgttttgggtacgtttcctgttaactctatacccgcaactgtgctttttgattccggtgctacacattcctttttgtctaaaagttttgcaagcaaacatgggatggaagttgttagtcttgggagacctttactagttaataccccgggcaatcaggtattttcgacacagtattgtccttccgttactatagaaatagaagaagttcctttcccatcctctcttatcttgctagaatccaaagacctagatgttatcttagggatggattggttatctcgtcacagaggagttatagattgcgccaatcgtaaggtgactttaaccaatagcaatggggaaacagtttctttctttgcatcctctcctaaatctcatggtgtggtcttaaaccaagttgctctacaagagattcctatagtgcaagactacccagacgtgtttcccgaggatttgccaggtatgccacctaagagagacatagagtttcggatagacttggtacctggaaccaaccccatccataagagaccatacagaatggcagctaacgagttagctgaggtgaagaaacaggtggatgatttgcttcagaaaggatacatcagacccagtacttcgccgtggggagcaccagtcatctttgtggagaagaaagatcatactcaaagaatgtgtgtggattatcgagcgttgaatgaggttactatcaagaataaatatcctctacccagaattgatgacctgtttgatcaactcgaaggtgctacagttttctccaagatagatctccattctggatatcatcaacttcgaatccgtgaggaagatataccaaagaccgccttcacaactcggtatggtttgttcgaatgtaccgttatgtcgtttggactcactaatgccccagcctttttcatgaatctgatgaacaaggtgtttatggaatatttggataagtttgtcgtagtgtttattgatgacattcttatttactccaagacgaaggaagaacatgaagagcatcttcgtctagctttagagaaactacgtgagcatcagctttatgccaagttcagtaaatgtgaattttggttgtccgaagtaaagtttcttggtcatgtcatctcgtctggaggagtggcagtagatccaagcaatgtggagtcagtattaagttggaagcaacccaagacggtttcagaaattcgtagtttccttggacttgcagggtattaccgcaggtttattgagaacttttcaaagatcgccagaccaatgactcgtctgcttcagaaggaagtgaagtataagtggacggaggattgtgaacgaagtttccaagaactgaagaaaaggctagtgactgcgcctgtattaattttgcctgatacgaggaaaggtttccaagtgtattgtgatgcatcccgactcggtttgggttgtgtgttgatgcaagaaggaaaggtggttgcctatgcatctaggcaattacgtcctcatgagaataactacccaacgcatgacctggaattggcagctgtggtgcatgcattgaagatttggcgtcattatcttttcggtaaccgtacagagatatatacggatcataaaagtttgaagtacattttcactcaacctgatttgaacatgcgtcagcgaagatggttagagttgattaaagattatgatatggaaatccattatcacccggggaaagcaaatgttgtagccgatgcccttagcaggaaaagttactgtaatatgtcagaaggtagacgtttaccttgggagttatgccaagaatttgaaagttgaacttgggaatagtcagccaaggtttagtggctactttggaagctaaacctactctgtttgatcaaattagagaagctcaagtgaatgatcctgatatccaggaaataaagaagaacatgagaagaggtaaagccatcggttttgtagaagatgagcaaggaaccgtatggttaggagaaagaatttgcgtcccagataataaggagttgaaggataccatcatgaaagaagctcatgaaactttgtattcgattcaccctggaaacactaagatgtatcaggacttaaagcaacaattctggtgggccagtatgcgacgtgagatagcagaatatgtggctctgtgtgatgtatgtcagcgggtcaaggcagaacatcggaagccagctggtctgttacaaccgttgaagattccagagtggaagtgggaagaaataggaatggattttataaccggtctacacagaacgtcggcaggacatgattctatttgggtagtggttgataggttgacaaaagtcgctcatttcatacctgtcaagacaacctatacgggacataagcttgcagagttatatatggccagagtggtatgtttgcatggtgttcctaaaaagatagtgtcagatagaggtagccagtttacttcgaagttttggcagaaattacaattagaattgggtacccgtttgaatttcagtactgcttatcaccctcaaacagatggtcagacggaaagagtaaaccaaattttagaagatatgttgagagcctgtgttctagattttggtggaagttgggataagaatttgccgtacgcagaattctcatataacaatagttatcaagctagtttgcaaatggctccgtatgaagcattatatggtcgaaaatgtcgtacgccgctcctttgggatcaaaccggtgaacgtcaagtcttcgggacagacatattgcgacaggcagaagaaaaagtgaagattatccaagaaaggttgcgcgttgctcagtcacgtcagaagagctatgctgacaatcgtcgcagagatttggctttcgaagaaggagattatgtataccttcgggttacgccgttacgaggtgttcatcgttttcaaaccaaagggaaattggcaccgcgttttgtgggaccttttaagattgtgagtcgaagaggtgaagtagcttatcagttagagttgcctccgtcaatggcgggaatacatgacgtgttccacgtgtctcagctgaagaaatgtttacgtgtacctacggaggaagccgatcctgatcgtatagagcttcaagaagatttaacttatgttgagaagccagtaagaattttggaagaaagcgagaggaaaaccaggaatcgcgttatacggttctgtaaggttcagtggagtaatcattcagaagaagaagccacctgggagcgagaagatgaattgaagtcagctcatcctcatctattcgctagttcttctgaatctcgaggacgagattccgtt

SEQ ID NO: 15620 - DNA, 4899 bp, Oryza sativa
  Clone ID: TFbOSC401235j.C1.o43.np
atgacaagttggtatcagagccaccttgaccttaggataagccaaatgatgccgccccattcactgagaaatttgatcaaggtgttaggattcgtcagggagctgaggttgatggcttttgaggtaggctatgaagttgctcccgagtatcgccaaatttcccatgaccccgacgaggagaagtgtcgtgttcgtgtgacgttggctagtgatagtgaagaccttccgtcttttaagttcgaagctggaggaagatcatactgccatgcttgtcaagaagcagcgttggtggccattggagagttgcgtgaacactttgaagaagagttggattcatcagctttccagtatcatcctcacaagcctcatggtcaagactatggaatctatacctgtcctgatggtgaagagagtgccactctgatgcatgcggtgcatatgcttagtgctatggatgcagtaagtgtggaacgagacaaagcagctcatgacagggaaaactggaatcgaggcaagatttgcaagttggagagcaaggtgtaccgtctacagaaggaattagctgaacttaaaggagaaacgccgccgccaacacccaagcttcgcctcactccaagaaagagaatctgtccgccacctcgtctccagttagcttcgaagattcatgtgatgggtgaagctgtgcccgatcgtgctgaacctgtcatcgacatcataagtgatgaggaagaggaggaagatcctgaagaaagagagccagctactccagaggaagaagattcatcgcttcgttccgacgcaaggcgcaccaccaatccagtagaagcaggagattggctgcatgcggtggagaagaatttggatttgatccagtgtactgagcaggagaaagtttcttttgcttcgcatcaactgcatagacctgctgctgaatggtgggatcattttcgccaaggcagggctgaaggagagcctattacgtggcaggaattcatggccgctttcaagaagacacacataccaacgggtgttgtagctctaaagaagagagaatttagagcactcaaccagggatctcgttcggtcaccgagtacctccatgatttcaaccgtttagctcgctatgctccagaggatgttcgtaccgatgaggaacgtcaggagaagttcttggagggactgaatgatgagttgtcgtatgccttgatgtctacggatttccgggatttccagcagttggtggacaaggcgattcgtcaggaagacaagtataaccggatggagcagaagaagcacagggctgcccaattcaaggcacaacagggcagtaaccagaggccgcgtctcgttactggacctcaagctccaccgtaccctcaaggaggatcttcatcagttgtctgcccccaacgccagttctacaacaacaatactggtaatcgtggcaatgacaaccgtaacacggttgctcgtcctgcagcaactccagctcagaaccagcccgttaggaaggaacagggaagcaagccagtgatatgcttcaattgtggtgatccaggacattatgctgataagtgtcctaagcctcggcgtgtgaagaatgccccaaccccgaacaactctaatgttccagcaccgaaggcacgtgttaatcatgttgcagcagcagaagctcagaatgcaccagatgtggttttgggtacgtttcctgttaactctatacccgcaactgtgctttttgattccggtgctacacattcatttttgtctaaaagttttgcgagcaatcatgggatggaagttattagtcttgggagacctttactagttaataccccaggcaaccaagtattttcgacccagtattgtccttccgctaccatagaaatagaagaagttcctttcccatcctcgcttatcttgctagaatccaaagatctagatgttatcttagggatggactggttatctcgtcacagaggagttatagattgtgccaaccgtaaggtgaccttaaccagtagcaatggggaaaccgtttctttctttgtgtcctctcctaaatatcatggtgtgatcttaaaccaagttgctctacaagagattcccatagtacaagactaccccgacgtgtttcccgaggatttgccaggtatgccacctaagagggacatagagtttcggatagacttggtacctggaaccaaccctatccataagagaccatacagaatggcagctaatgagttagctgaggtgaagagacaggtggatgatttgcttcagaaaggatacatcagacccagtacttcgccatggggagcaccagtcatctttgtggagaagaaagatcatactcagagaatgtgcgtggattatcgagcgttgaatgaggtcactatcaagaataagtatcctctacccagaattgatgacctgttcgatcaactggaaggtgctacagttttctccaagatagatctccgttccggatatcatcaacttcgaatccgtgaggaagatataccaaagaccgccttcacaactcggtatggtttgttcgaatgtaccgttatgtcgtttggactcactaatgccccagcctttttcatgaatctgatgaacaaggtgttcatggaatatctggataagtttgtcgtggtgtttattgatgacattcttatttactctaagacgaaggaagaacatgaagagcatcttcgtctagctttagagaaactacgtgagcattagctttatgccaagttcagtaaatgtgaattttggttgtccgaagtgaagtttcttggtcatgtcatctcgtgtggaggagtggcagtagatccaagcaatgtggagtcagtattaagttggaagcaacccaagacggtttcagaaattcgtagtttccttggacttgctgggtattactgcaggtttattgagaacttttcaaagatcgccagaccaatgactcgtctgcttcagaaggaagtgaagtacaagtggacagaggattgtgaacgaagtttccaagaactgaagaaaaggctagtgactgcgcctgtgttaattttgcctgattcgaggaaaggtttccaagtgtattgtgatgcatcccgactcggtttgggttgtgtgttgatgcaagaaggaaaggtggttgcctatgcatctaggcaattacgtcctcatgagaataactacccaacgcatgacctagaattggcagctgtggtgcatgcattgaagatttggcgtcattatcttttcggtaaccgtacagagatgtatacggatcataaaagtttgaagtacattttcactcaacctgatttgaacatgcgtcagcgaagatggttagagttgattaaagattatgatatggaaatccactatcacccggggaaagcaaatgttgtagccgatgcccttagcaggaaaagctactgtaatatgtcagaaggtcgacatttaccttgggagttatgccaagaatttgaaaggttgaatttgggaatagtcagcaaaggttttgtggccgctttggaagctcaacctactctgtttgatcaagtgagagaagctcaagtgaatgatcctgatatacaagaaattaaaaagaacatgagaagaggaaaagccatcggttttgtagaagatgagcaaggaactgtgtggttaggagaaagaatttgcgtcccagaaaataaggagttgaaggatactatcatgaaagaagctcatgaaactttgtattccattcaccctagaagcactaagatgtaccaagacttaaagcaacaattctggtgggccagtatgcgacgtgagatagcagaatatgtggcactatgtgatgtatgtcagcgggtcaaggcagaacatcagaaaccagctggtctgttacaaccgttgaagattccagagtggaagtgggaagaaataggaatggattttataaccggtctacctagaacgtcggcaggacatgattctatttgggtagtggttgatcggttgacaaaagtcgctcacttcataccggtcaaaacaacctatacggggaataagcttgcagagttatacatggccagagtggtatgtttgcatggtgttcctaagaagatagtgtcagatagaggtagccagtttacttcgaagttctggcagaaattacaattagaattgggtacccgtttgaatttcagtactgcttatcaccctcaaacagatggtcagacggaaagagtaaaccaaattttagaagatatgttgagagcctgtgttctagattttggtggaagttgggataagaatttgccgtacgcggaattctcatataacaatagttatcaagctagtttgcaaatggctccgtatgaagcattatatggtcgaaagtgccgtacgccgctcctttgggatcaaaccggtgaacgtcaagtcttcgggacagacatattgcgacaggcagaagaaaaagtgaagattatccaataaaggttgcacgttgctcagtcacgacagaagagctatgccgacaatcgtcgtagagatttggcttttgaagaaggagattatgtataccttcgggttacgccgttacgaggtgttcatcgtttccaaaccaaagggaaattggcaccgcgttttgtgggaccttttaagattgtgagtcgaagaggtgaagtagcttatcagttagagttgtctccgtcaatggcgggaatacacgacgtgttccacgtgtcacagttgaagaaatgtttatgtgtacctacggaggaagcagatccagatcgtatagagcttcaagaagatttaacttatgttgagaagccagtcagaattttggaatttccgacgttccggaggagagcgtttccgttgaggaag

SEQ ID NO: 15621 - DNA, 4890 bp, Oryza sativa
  Clone ID: TFbOSC401235j.C1.o75.np
aaggtgggttgtgagcatatggttttgatggttgtgctcatgacaattaaggaccggttcgcgagctactgttgtgaaacatttatcgtgccaaccacaagccagcgtgggcaacggctttatcttttgtatagcatgattcattatagtgcgccagactgagaagtggcgagaagtccatgggggtcgttggggagtccatgccttgttttaaagggggtgattatgatccaggtacggtgcactgtagtgaattgtgttatgcgaggggtattgtcactactcctttccgagatgcctcgccattcaccgagaaatttgatcgaggtgttaggattcgtcagggagctgaggttgatggcttttgaagtaggctatgaggttgctcctgagtatcgtcagattccccatgaccccgacgaggagaagtgtcgtgttcgtgtgacgttggctagtgatagtgaagaccttccatcttttaagtttgaagctggaggaagatcgtactgccatgcttgtcaagaagtagctttggtggccattggagagttgcgacaacactttgaagaagagttggattcatcagctttccagtatcatcctcataagcctcatggtcaagactatggaacctatatctgtcctgatggtgaagagagtgctactctgatgcatgcggtgcatatgcttagtgctatggatgcagtaagtgtggagcgagacaaagcagctcatgaccgggaaaattggaatcgaggcaagatttgcaagttggagagcaaggtgtaccgtctacagaaggaattagctgaacttaaaggagaaatgccgccgccaacacccaagcttcgtctcgtcgcaagaaagagaacctgtccgccacctcgtctccagttagcttcgaagattcgcgtgatgggtgaagctgtgcccgatcgtgctgaacctgtcatcgacatcataagtgatgaggaagaggaggaagatcctgaagaaagagagccagctactccagaggaagaagattcatcgcttcgttccgacgcaaggtggaaggctggaggagaacctatcacttggcaggagttcacagctgcttttaagaagacgcatataccgtcaggtgttgtagctctaaagaagagggagtttagagcactcaatcagggatctcgttcagtcaccgagtacctccatgatttcaatcgtttagcgcgttatgctccagaggatgttcgcactgatgaggaacgtcaggagaagtttttggagggactgaatgataagttgtcttatgctttgatgtctacggatttccaggattttcagcagttggtggacaaagcgattcgccaggaagacaagtataaccgtatggagcagaagaagcgcagggctgcccaatttaaggcacaacagggcagtaaccagaggccgcgtctcgttactggacctcaagttccatcgtaccctcaaggaggatcttcatcagttgtccgtccccaacgccagttctacaacaacaatactggtaatcgtggcaatgacaaccgtaatgtggttgctcgtcctgcagcaactccagttcagaaccagcccgttaggagggaacagggaagcaagccagtgatatgcttcaattgtggtgatccgggacattatgctgataagtgtccgaagcctcggcgtgtgaagaacgctccagccccgaacaacttcaatgttccagcaccgaaggctcgtgtcaatcatgttgcagccgcagaagctcagaatgcaccagatgttgttttgggtacgtttcctgttaactctatacccgcaactgtgctttttgattccggtgctacacattcctttttgtgtaaaagttttgcaatcaaacatgggatggaagttgttagtcttgggagacctttactagttaataccccaggcaatcaagcattttcgacacggtattgtccttctgttactatagaaatagaagaagttcctttcccatcctctcttatcttgttagaatccaaagatctagatgttatcctagggatggactggttatctcgtcacagaggagttatagattgtgccaaccgtaaggtgactttaaccagtagcaatggggaaacagtttctttctttgcatcctctcctaaatctcatggtgaggtcttaaaccaagttgctctacaagagatacctatagtacaagactacccagatgtgtttccggaggatttgccaggtatgccacctaagagagatatagagtttcggatagacttggtacctggaactaaccctatccataagagaccgtacagaatggcagctaatgagttagctgaggtgaagaaacaggtggatgatttgattcagaaaggatacatcagacccagtacttcgccatggggagcaccagtcatctttgtggagaagaaagatcatactcagagaatgtgtgtggattatcgagcgttgaatgaggttactatcaagaataagtaccctttacccagaattgatgacttgttcgatcaactcgaaggtgctacagttttctctaagatagatctccgttctggatatcatcaacttcgaatccgtgaggaagatataccaaagaccgccttcacaactcggtatggtttgtttgagtgtaccgttatgtcatttggactcactaatgccccagcctttttcatgaatctgatgaacaaggtgtttatggaatatctggataagtttgtcgttgtgtttattgatgacattcttatttactccaagacgaaggaagaacatgaagagcatcttcgtctagctttagagaaactacgtgagcatcagctttatgccaagttcagtaaatgtgaattttggttgtccgaagtgaagtttcttggtcatgtcatctcgtctggaggagtggcagtagatccaagcaatgtggagtcagtgttaagttggaagcaacccaagacggtttcagaaattcgtagtttccttggacttgcagggtattaccgcaggtttgttgagaacttttcaaagatcgctagaccaatgactcgtctacttcagaaggatgtaaagcaattacgtcctcatgagaataattacccaacgcatgacctagagttggcagctgtggtgcatgcattgaagatttggcgtcattatcttttcggtaatcgtacagagatatatacggatcataaaagtttgaagtacattttcactcaacctgatttgaacatgcgacagcgaagatggttagagttgattaaggattatgatatggaaatccactatcacccgggaaaagcaaatgtggtagccgatgcccttagcaggaaaagttactgtaatatgtcagaagctcgatgtttaccttgggagttgtgccaagaatttgaaaggttgaacttgggaatagtcagcaaaggttttgtggctactttggaagctaaacctactttgtttgatcaaattagagaagctcaaatgaatgatcctgatatccaggaaataaagaagaacatgagaaggggtaaggccatcggttttgtagaagatgagcaaggaactgtgtggttaggagaaagaatttgtgtcccagaaaataaggagttgaagaatactatcatgaaagaagctcatgaaactttgtattccattcaccctggaagcactaagatgtaccaagacttaaagctacaattctggtgggctagtatgcgacgtgagatagcagaatatgtggctctatgtgatgtatgtcagcgggtcaaagcagaacatcagaaaccagctggtctgttacaaccgttgaagattccagagtggaagtgggaagaaataggaatggattttataaccggtctacccagaacgtcggcaggacatgattctatttgggtagtggttgatcggttgacaaaagtcgctcatttcataccgatcaaaacaacctatacgggacataagcttgcagaattatatatggccagagtggtatgtttgcaaggtgttcctaaaaagatagtgtcagatagaggtagccagtttacttcgatgttttggcagaaattacaatcagaattgggtacccgtttgaatttcagtactgcctatcatcctcaaacagatggtcagacggaaagagtaaaccaaattttagaagatatgttgagagcctgtgttctagattttggtggaagttgggataagaatttaccgtatgcggaattctcatataacaatagttatcaagctagtttgcaaatgtctccgaatgaagcattatatggtcgcaagtgctgtacgccgcttctttgggatcaaaccggtgaacgtcaagtttttgggacagacatattacgagaggcggaagaaaaagtgaagattatccaagaaaggttgcgcgttgctcagtcacgtcagaagagctatgccgacaatcgtcgtagagatttggctttcgaagaaggagattatgtatatcttcgggttacgccgttacgaggtgttcatcgtttttagaccaaagggaaattggcaccgcgttttgtgggaccttttaagattgtgagtcgaagaggtgaagtagcttaccagttagagttgcctccgtcaatggcgggaatacatgatgtgtttcatgtgtctcagttgaagaaatgtttacgtgtacctacggaggaagcagatcctggtcgtatagagcttcaggaagatttaacttatgtcgagaagccagtcagaatcttggaatttccgacgtttcggaggagagcgtttccgttgaggaaggttccgaagcatttgtggaagcccaaggcaagtcacacagatcccaaacaaccctttgagcatgttgatcccgtt

SEQ ID NO: 15622 - DNA, 5337 bp, Oryza sativa
  Clone ID: TFbOSC401235j.C1.o76.fg
atgggggtcgctggggagtccatgccttgttttaaagggggtgattatgatccaggtacggtgcactgtagtgaattgtgttatgcgaggggtattgtcactactcctttccgaggtatcgtggtggtactgaggcacatgatgcctcgccattcaccgagaaatttgatcgaggtgttaggattcgtcagggagctgaggttgatggcttttgaggtgggctatgaagttgctcctgagtatcgccaaattcctcatgaccccgacgaggagaaatgtcgtgttcgtgtgacattggctagtgatagtgaagaccttccgtcctttaagtttgaagctggaggaagatcgtactgccatgcttgtcaagaagtagctttggtggccattggagagttgcgtcaacactttgaagaagagttggattcatcagctttccagtatcatcctcacaagcctcatggccaagattatggaacctatacctgtccggatggtgaagagagtgccactttggtgcatgtggtgcatatgcttagtgctatggatgcagtaagtgtggagcgagacaaagcagctcatgaccgggaaaactggaatcgaggcaagatttgcaagttgaagagcaaggtgcaccgtctacagaaggaattagctgaacttaaaggagaaatgccgccgccaacatccaagcttcgcctcactgcaagaaagagaacctgtccgccacctcgtctccagttagcttcgaagattcgcgcgatgggtgacgctgtgcccgttcgtgctgaacctgtcatcgacatcataagtgatgaggaagaagaggaagatcctgaagaaagagagccagctactccagaggaagaagattcatcgcttcgttccgacgcaagttgttgcttacatcatgggtgggatatggtgaacacgcgcaccggcactggaagtggaagtggaagtggagccaataacaatgagggagaaccaacgctagcccagattctggcccaacaaacacaactgatcaatctgttagtgcagcaggcacagaatcagcagggaaataatcagaaccagaatccacccccacctccccaaaacaaattggcagatttcttacgtgtgagaccccctaccttctcaagcaccaccaatccagttgaagcaggagattggctgcatgcagtggagaagaagttggatttgattcagtgtactgagcaagagaaagtttcttttgcttcgcatcagttgcatggacccgctgctgaatggtgggatcattttcgccaaggcagggctggaggagaacctatcacttggcaggagttcacagctgcttttaagaagacgcatataccgtcaggtgttgtagctctaaagaagagggagtttagagcactcaatcagggatctcgttcagtcaccaagtacctccatgatttcaatcgtttagcgtgttatgctccagaggatgtttgcactgatgaggaacgtcaggagaagtttttggaaggactaaatgatgagttgtcttatgctttgatgtctacggatttccgggatttccaacaattggtggacaaggcgattcgtcaggaagacaaggctgcccaatttaaggcacaacagggcagtaaccagaggccgcgtctcgttactggacctcaagttccatcgtaccctcaaggaggatcttcatcagttgtccgtccccaacgccagttctacaacaacaatactggtaatcgtggcaatgacaaccgtaatgtggttgctcgtcctgcagcaactccagttcagaaccagcccgttaggagggaacagggaagcaagccagtgatatgcttcaattgtggtgatccgggacattatgctgataagtgtccgaagcctcggcgtgtgaagaacgctccagccccgaacaacttcaatgttccagcaccgaaggctcgtgtcaatcatgttgcagccgcagaagctcagaatgcaccagatgttgttttgggtacgtttcctgttaactctatacccgcaactgtgctatttgattccggtgctacacattcctttttgtctaaaagttttgcaatcaaacatgggatggaagttgttagtcttgggagacctttactagttaataccccaggcaatcaagcattttcgacacggtattgtccttctgttactatagaaatagaagaagttcctttcccatcctctcttatcttgctagaatccaaagatctagatgttatcctagggatggactggttatctcgtcacagaggagttatagattgtgccaaccgtaaggtgactttaaccagtagcaatggggaaacagtttctttctttgcatcctctcctaaatctcatggtgaggtcttaaaccaagttgctctacaagagatacctatagtacaagactacccagatgtgtttccggaggatttgccaggtatgccacctaagagagatatagagtttcggatagacttggtacctggaactaaccctatccataagagaccgtacagaatggcagctaatgagttagctgaggtgaagaaacaggtggatgatttgcttcagaaaggatacatcagacccagtacttcgccatggggagcaccagtcatctttgtggagaagaaagatcatactcagagaatgtgcgtggattatcgagcgttgaatgaggttactatcaagaataagtaccctttacccagaattgatgacctgttcgatcaactcgaaggtgctacagttttctctaagatagatctccgttctggatatcatcaacttcgaatccgtgaggaagatataccaaagaccgccttcacaactcggtatggtttgtttgagtgtaccgttatgtcatttggactcactaatgccccagcctttttcatgaatctgatgaacaaggtgtttatggaatatctggataagtttgtcgttgtgtttattgatgacattcttatttactccaagacgaaggaagaacatgaagagcatcttcgtctagctttagagaaactacgtgagcatcagctttatgccaagttcagtaaatgtgaattttggttgtccgaagtgaagtttcttggtcatgtcatctcgtctggaggagtggcagtagatccaagcaatgtggagtcagtgttaagttggaagcaacccaagacggtttcagaaattcgtagtttccttggacttgcagggtattaccgcaggtttattgagaacttttcaaagatcgctagaccaatgactcgtctgcttcagaaggatgtaaagtacaagtggacggaggattgtgaacaaagtttccaagaactgaagaaaaggctagtgactgcgcctgtgttaattttacctgattcgaggaagggtttccaagtgtattgtgatgcatcccgacacggtttgggttgtgtgttgatgcaagaaggaaaggtggttgcttatgcatctaggcaattatgtcctcatgagaataattacccaacgcatgacctagagttggcagctgtggtgcatgcattgaagatttggcgtcattatcttttcggtaatcgtacagagatatatacggatcataaaagtttgaagtacattttcactcaacctgatttgaacatgcgacagcgaagatggttagagttgattaaggattatgatatggaaatccactatcacccgggaaaagcaaatgtggtagccgatgcccttagcaggaaaagttactgtaatatgtcagaaggtcgatgtttaccttgggagttgtgccaagaatttgaaaggttgaacttgggaatagtcagcaaaggttttgtggctacattggaagctaaacctactttgtttgatcaaattagagaagctcaaatgaatgatcctgatatccaggaaataaagaagaacatgagaaggggtaaggccatcggttttgtagaagatgagcaaggaactgtgtggttaggagaaagaatttgtgtcccagaaaataaggagttgaagaatactatcatgaaagaagctcatgaaactttgtattccattcaccctggaagcactaagatgtaccaagacttaaagctacaattctggtgggctagtatgcgacgtgagatagcagaatatgtggctctatgtgatgtatgtcagcgggtcaaagcagaacatcagaaaccagctggtctgttacaaccgttgaagattccagagtggaagtgggaagaaataggaatggattttataaccggtctacccagaacgtcggcaggacatgattctatttgggtagtggttgatcggttgacaaaagtcgctcaattcataccgatcaaaacaacctatacgggacataagcttgcagagttatatatggccagagtggtatgtttgcatggtgttcctaaaaagatagtgtcagatagaggtagccagtttacttcgaagttttggcagaaattacaatcagaattgggtacccgtttgaatttcagtactgcctatcatcctcaaacagatggtcagacggaaagagtaaaccaaattttagaagatatgttgagagcctgtgttctagattttggtggaagttgggataagaatttaccgtatgcggaattctcatataacaatagttatcaagctagtttgcaaatgtctccgaatgaagcattatatggtcgcaagtgccgtacgccgcttctttgggatcaaaccggtgaacgtcaagtttttgggacagacatattacgagaggcggaagaaaaaatgaagattatccaagaaaggttgcgcgttgctcagtcacgtcagaagagctatgccgacaatcgtcgcagagatttggctttcgaagaaggagattatgtatatcttcgggttacgccgttacgaggtgttcatcgttttcaaaccaaagggaaattggcaccgcgttttgtgggaccttttaagattgtgagtcgaagaggtgaagtagcttaccagttagagttgcctccgtcaatggcgggaatacatgatgtgtttcatgtgtctcagttgaagaaatgtttacgtgtacctacggaggaagcagatcctggtcgtatagagcttcaggaagatttaacttatgttgagaagccagtcagaatcttggaagtaagcgagaggaataccaggaatcgcgttatacgattctgcaaggttcagtggagtaatcattcagaagaagaatcaacttgggagcgagaagatgaattaaagtcagctcatcctcatctgttctctagttcttctgaatctcgaggacgagattctgtttaa

SEQ ID NO: 15623 - DNA, 5076 bp, Oryza sativa
  Clone ID: TFbOSC401235j.C1.o80.fg
atgggggtcgctggggagtccatgccttgttttaaagggggtgattatgatccaggaaaggtgcactgtggtgagttgtgttatgcgagggatattgtcacaattcctttccgagataccgtggtggtactgaggcacatgatgccgcaccgttcaccgagaaatttgatcaaggtattaggatttgtcagggagctgaggttgatggcttttgaagtaggctatgaagttgctcctgagtatcgccagattccccatgaccccgacgaggagaagtgtcgggttcgtgcgacgttggctagtgatagtgaagaccttccgtcttttaagttcgaagctggaggaagatcgtacagccatgcttgtcaagaagtagctttggtggccattggagagttgcgtcaacactttgaagaagagttggattcgtcagctttccagtatcatccccacaagcctcatggtcaagactatggatcttatacctgtcctgatggcgaagagagtgctactctgatgcatgtggtgcatatgcttaatgctatggatacagtaggtgtggagcgagagaaggcagctcatgaccgggaaaactggaatcgagataagatttgtaagttgaagagcaaggtgaaccgtctacagaaggaattagctgaacttaagggagagacgccgccgccaacatccaagcttcgcctcactgcaagaaagagaacctgtctgccccctcgtctccagttagcttcgaagattcgcgtgatgggagaagctgtgcctgatcgagctgaacctgttatcgacatcataagtgatgaggaagaagaggaagatcctgaagaaagagagccagctactccagaggaagaagattcatcgcttcgttccgacgcaaggcggaattacacaaccaatccagtagaagcaggagattggttgcatgcagtggagaagaagttggacttaatccagtgtactgagcaggagaaagtttcttttgcttcgcatcaattgcatggacctgctgctgaatggtgggatcattttcgccaaggcagggctggaggagaacctatcacttggcaggaattcacagccgcttttaagaagacacatataccaacgggtgttgtagctctgaagaagagggagtttagagcactcaaccagggatctcgttcggttactgagtatctccatgattttaaccgtttagcacgctatgctccagaagatgttcacactgatgaggaacgtcaggagaagtttttggagggactaaatgatgagttgtcctatactttgatgtctacggaattccgggatttccagcagttggtggacaaagcgattcgccaggaagacaagtataatcgcatggaacagaagaagcgcagggctgctcaatttaaggcacaacagggcagtaaccagaggccgcgtcttattcctggacctcaagtcccatcgtacccgcaaggaggatcttcatcagttgtccgtccccaacgccagttctacaacaacaatactggtaatcgtggcaatgaaaaccgcaacgtagtcgctcgtcccgcagcaactccagttcagaaccagcctgtcaggaaggaacagggaagcaagccggtgatatgcttcaattgtggtgatccaggacattatgctgataagtgtccgaagcctcggcatgtgaagaacgttccggtcccgaataactccaatgtcccagcaccaaaggcacgtgttaatcatgttgcagccgcagaagctcagaatgcaccagacgtggttttgggtacgtttcctgttaactctatacccgcaactgtgctttttgattccggtgctacacattcctttttgtctaaaagttttgcgaccaaacatgggatggaagttgttagtcttgggagacctttactagttaataccccaggcaaccaagtgttttcgacacggtattgtccttccgttaccatagaaatagaaggagttcctttcccatcctctcttatcctgctagaatccaaagatctagatgttatcttagggatggattggttatctcgtcacagaggagttatagattgtgccaatcgcaaggtgactttaaccaatagcaatggggaaactgtttctttctttgcgtcctctcctaaatctcatggtgtggtcttaaaccaagttgctctacaagagattcctatagtgcaagactacccagatgtatttccggaggatttgccaggtatgccacctaagagagatatagaatttcggatagacttggtacctggaaccaacccaatccataagagaccatacagaatggcagctaatgagttggctgaggtgaagaaacaggtggatgatttgcttcagaaaggatacatcagacccagtacttcgccatggggagcaccagttatctttgtggagaagaaagatcatactcagagaatgtgcgtggattatcgagcgttgaatgaggtcactatcaaaaataagtatcctctacccagaattgatgatctgtttgatcaattgaaaggtgctacagttttctccaagatagatctccgttctggatatcatcaacttcgaattcgtgaggaggatataccaaagaccgcctttacgactcggtatggtttgtttgagtgtaccgtcatgtcatttggactcactaatgccccagcctttttcatgaatctgatgaacaaggtgtttatggaatatctggataagtttgttgtggtgtttattgatgacattcttatttattccaagacgaaggaagaacataaagagcatcttcgtctagctttagagaaactacgtgagcatcagctttatgccaagttcagtaaatgtgaattttggttgtccgaagtgaagtttcttggtcatgtcatctcatctggaggagtggcagtagatccaagcaatgtggagtcagtgttaagttggaagcaacccaagacggtttcagaagttcgtagtttccttggacttgctgggtattaccgcaggtttattgagaacttttcaaagatcgccagaccaatgactcgtctgcttcagaaggaagtgaagtataagtggacagaagattgtgagcaaagtttccaagaactgaagaaaaggctagtgactgcgcctgtgttaattttgcctgattcgaggaaaggtttccaagtgtattgtgatgcatcccgactcggtttgggttgtgtgttgatgcaagaaggaaaggtggttgcttatgcatctaggcaattacgtcctcatgagaataactacccaacgcatgacctagagttggcagcagtggtgcatgcattgaagatttggcgtcattatctttacggtaaccgtacagaggtgtatacggatcataaaagtctgaagtacattttcactcaacctgatttgaacatgcgtcagcgaagatggttagagttgattaaagactatgatatggaaatccattatcatccggggaaagcaaatgttgtagccgatgctcttagcaggaaaagctactgcaatatgtcagaaggtagatgtttaccttgggagttatgccaagaatttgaaaagttgaacttgggaatagtcagcaaaggttttgtagctgctttggaagctaaacctactctatttgatcaaattagagaggctcaagtgaatgatccttatatccaggaaataaagaagaacatgagaagaggtaaagccatcggttttgtagaagatgagcaaggtactgtatggttaggagaaagaatttgcgtcccagaaaataaggagttgaaggatactatcatgaaagaagctcatgaaactttgtattctattcaccctggaagcactaagatgtatcaggatttaaagcaacaattctggtgggccagtatgcgacgtgagatagcagaatatgtggctctatgtgatgtttgtcagcgggtcaaggcagaacatcagaagccagccggtctattacagccgttgaagattccagagtggaagtgggaagaaatagggatggattttataaccggtctacccagaacgtcggcaggacatgattctatttgggtagtggttgatcggttgaccaaagtcgctcacttcataccagtcaaaacaacttatacgggacataagcttgcagagttatacatggccagagtggtatgtttgcatggtgtacctaagaagatagtgtcagatagaggaagtcagtttacttcgaagttttggcagaagttacaatcagaattgggtactcgtttgaatttcagtacggcttatcaccctcaaacagatggtcagacggaaagagtaaaccaaattttagaggatatgttgagagcctgtgttctagattttggtggaagttgggataagaatttgccgtatgcggaattctcatataacaatagttatcaagctagtttgcaaatgtctccgaatgaagcattatatggtcgaaagtgccgtacgccgcttctttgggatcaaaccggtgagcgtcaagttttcgggacagacatattgcgagaagcggaagaaaaagtgaagattatccaagaaaggttgcgcgttgctcagtcgtgtcagaagagctatgccgacaatcgtcgcagagatttagtttttgaagaaggagattatgtgtatcttcgggttacgccgttacgaggagttcatcgtttccaaaccaaagggaaattggcaccgcgttttgtgggaccttttaagatcgtgagtcgaagaggtgaagtagcttatcagttagagttgcctccgtcaatggcgggaatacatgatgtgttccatgtgtctcagttgaagaaatgcttacgtgtacctacggaggaagcagatcctgattgtatagagcttcaggaagatttaacttatgttgagaagccagtcagaatcttggaatttccgacgttccggaggagagcgtttccgttgaggaaggttccgaagcgtttgtggaagctcaaggcaagtcacacagatcccaaacaaccctttgagcatgttgatcccgtttaa

SEQ ID NO: 15624 - DNA, 3735 bp, Oryza sativa
  Clone ID: TFbOSC401468j.C1.o1.fg
atggaaattccgggcgtgacaagttggtatcagagccaccttgaccttaggataagccaaatgatgccgccccattcaccgagaaatttgatcgaggtgttaggattcgtcagggagttgaggttgatggcttttgaggtaggctatgaagttgctcccgagtatcgccaaatttcccatgaccccgacgaggagaagtgtcgtgttcgtgtgacattggctagtgatagtgaagaccttccgtcctttaagttcgaagttggaggaagatcgtactgccatgcttgtcaagaagtagctttggtggccattggagagttgcgacaacactttgaagaagagttggattcatcagctttccagtatcatcctcacaaggctcatggtcaagactatggaacctatacctgtcctgatggtgaagagagtgccactctgatgcatgtggtgcatatgcttagtgctatggatgcagtaagtgtggagcgagacaaagcagctcatgacagggaaaactggaatcaaggcaagatttgcaagttgaagagcaaggtgcaccgtctacagaaggaattagctgaacttaaaggagaaacgccgccgccaatatccaagcttcgcctcactgcaagaaagagaacctgtccgccacctcgtctccagttagcttcgaagattcgcgtgatgggtgaagctatgcccaatcgtgctgaacctgtcatcgacatcataagtgatgaggaagaagaggaagatcataaagaaagggagccagctactccagaggaagaagattcatcgtttcgttccgacgcaaggcggaattgttgcttacatcattggtgggatatggtgaacacgcgcaccggaagtggaagtggaagtggaagtggagctactaacaatggaggagaacccacgctagctcagattctggctcaacagacacaactgatcaacctgttagtgcagcaggcacagaatcagcaagcaaataatcagaaccagaatccacccccacctccccaaaataagctggcagatttcttacgtgtgagaccccctaccttttcaagcaccaccaatccagtagaagcaggagattggttgcatgcggtggagaagaagttggatttgatccagtgtactgagcaggagaaagtttcttttgcttcgcatcagttgcatggacccgctgctgaatggtgggatcattttcgccaaggcagggcgggaggagaacctattacttggcaggaattcacagctgcttttaagaagacgcatataccgtcaggtgttgtagctctaaagaagagagaatttagagcactcaaccagggatctcgttcggtcactgagtacctccatgattttaaccgtttagctcgctatgctccagaggatgttcgcaccgatgaagagcgtcaggagaagtttttagagggactaaatgatgagttgtcttatgctttgatggctacggatttccgggatttccaacaattggtggacaaggcgattcgtcaggaagacaagtataaccgtatagagcagaagaagcgcagggctgcccaatttaaggcacaacagggcagtaaccaaaggccgcgtctcattactggacctcaagctccatcgtaccctcaaggaggatcttcatctgttgcccgtccccaacgccagttctacaacaacaatactagtaatcgtggcaatgacaaccgcaatatggttgcttgtcctgcagcaactccagttcagaaccagcctgtcaggaaggaacagggaagcaagccagtgatatgctttaattgtggtgatccaggacattatgctgataagtgtcctaagcctcggcgtgtgaagaacgctccagtcccgaacaaccccaatgttccagcaccgaaggcacgtgttaatcatgttgcagcagcagaagctcagaatgcaccagatgttgttttgggtacgtttcctgttaactctatacccgcaactgtgctttttgattccggtgctacacattcctttttgtctaaaagttttgcaagcaaacatgggatggaagttgttagtcttgggagacctttactagttaataccccgggcaatcaggtattttcgacacagtattgtccttccgttactatagaaatagaagaagttcctttcccatcctctcttatcttgctagaatccaaagacctagatgttatcttagggatggattggttatctcgtcacagaggagttatagattgcgccaatcgtaaggtgactttaaccaatagcaatggggaaacagtttctttctttgcatcctctcctaaatctcatggtgtggtcttaaaccaagttgctctacaagagattcctatagtgcaagactacccagacgtgtttcccgaggatttgccaggtatgccacctaagagagacatagagtttcggatagacttggtacctggaaccaaccccatccataagagaccatacagaatggcagctaacgagttagctgaggtgaagaaacaggtggatgatttgcttcagaaaggatacatcagacccagtacttcgccgtggggagcaccagtcatctttgtggagaagaaagatcatactcaaagaatgtgtgtggattatcgagcgttgaatgaggttactatcaagaataaatatcctctacccagaattgatgacctgtttgatcaactcgaaggtgctacagttttctccaagatagatctccattctggatatcatcaacttcgaatccgtgaggaagatataccaaagaccgccttcacaactcggtatggtttgttcgaatgtaccgttatgtcgtttggactcactaatgccccagcctttttcatgaatctgatgaacaaggtgtttatggaatatttggataagtttgtcgtagtgtttattgatgacattcttatttactccaagacgaaggaagaacatgaagagcatcttcgtctagctttagagaaactacgtgagcatcagctttatgccaagttcagtaaatgtgaattttggttgtccgaagtaaagtttcttggtcatgtcatctcgtctggaggagtggcagtagatccaagcaatgtggagtcagtattaagttggaagcaacccaagacggtttcagaaattcgtagtttccttggacttgcagggtattaccgcaggtttattgagaacttttcaaagatcgccagaccaatgactcgtctgcttcagaaggaagtgaagtataagtggacggaggattgtgaacgaagtttccaagaactgaagaaaaggctagtgactgcgcctgtattaattttgcctgatacgaggaaaggtttccaagtgtattgtgatgcatcccgactcggtttgggttgtgtgttgatgcaagaaggaaaggtggttgcctatgcatctaggcaattacgtcctcatgagaataactacccaacgcatgacctggaattggcagctgtggtgcatgcattgaagatttggcgtcattatcttttcggtaaccgtacagagatatatacggatcataaaagtttgaagtacattttcactcaacctgatttgaacatgcgtcagcgaagatggttagagttgattaaagattatgatatggaaatccattatcacccggggaaagcaaatgttgtagccgatgcccttagcaggatgtcacgcccagcaattcactag

SEQ ID NO: 15625 - DNA, 5133 bp, Oryza sativa
  Clone ID: TFbOSC401768j.C1.o3.fg
atggcagattcggattcacccgctacctgggagttgagcttacctcaatcagaggggtatgtcattgagctgcatcggatgttgaggcgtctgcgataccctggattcccgtcataccgagtgagacagtgtggctcagtttgggaggctcgggttgagattcacccccgagtcccttccgagttggactacagcttccagacacgtcaccaccgagacctgccagagactgcgatgcaggatgccgcccgggaggccttcctccgactcagctctatccaccgagctgagttagtgagtaccgagtttgctcatcacctgttccgggaggagggcaactcagtttgcacagttcaggacacgccctgctgctacaacccgatggtgactcggttgtcacgatgggctgaggcagtagatgactactacgaggaggctctgttggagattgacgaccaccagagacgtgtgggggagttagagactgaggtgaccgacctcacagcacagcagcttcagttggaggaggagcaccaggcttggggcagtgagatagactcactgaaggcacagctccaggtccacggcgaccagttccagcagttatctgaccagtacaacgatcaccgcgggatgatggatactcttgaggagcagctgagagagagtcaggagcacgtcagccagctggaggagcagcttcgagcagccaagatcagcactacaggggcttctacttccacagcagtaggccgtgaccgctactttttcctcaccccgccatacccaccggcgttccacgctcttctgggagaggctagtatgctagctaccgagtcagcgccctacctagtggaccctacagcgacacagccacctgttccggagttggtgcacactccactgatccctacaccttctccgcagctgggttccagtttggagactccgatccaggtcgactccgagacagaggggaccgacaccgagccagagatcgagccagacatcactgatccttcagaggatgaggctcctgttccccgcatcaccttccttggaggccctcgcaccctcagcactgctcgcaagagcacacgacctccgggcaagaggcccaagccagatccagaggccactacttctgggccgtggggactcagcaatgacgaaactcagacacccgacttaaacactctggccggagttatggccacccaaactcaacttctgcaagccatcgcaaacaaccaaggcaaccgcggagggtcaagctttggagagttcatgagaaccaagccgcccacgttcgctactgccgacgagcccatggaagcaaaagactggctacgcatcatagaaaagaaactgactctagtcagggtacgcgaagccgacaaggtgatcttcgcagtgaaccagctggaaagacccgctggtgattggtgggatacctacaaggaagcccgagaagacggtgctggagaacccacctgggaggagttcactgcggcgtttcgcgagaatttcgtacctgctgcagtgatgcgcatgaagaagaacgagtttagaagactgcggcaagggaatacaacagtgcaggagtatctaaacaagttcactcagttggctcgctacgcaattggagacctggcagatgaagaagaaaagatcgacaagttcatagaaggactgaatgatgaattgcgtggacctatgatcgggcaggatcacgagagtttccagagcctgatcaacaaggtcgtcaggctagagaacgatcaaaggacggtggaacacaaccgcaagaggaggcttgctatgagtcacccacctcagacagtgcctcagcgacttaagggagcccctccgtccggatggaagccccctgtcatggtgaccaaccgtcccgctgcacttagcaacttcaacaggccagttgcacttcagaaccgcacccctacaccaactttggctgcccctggagccaagaagaatgtggactgcttcaactgtggggaatacgggcactacgctaacaactgccctcatccacgcaaaacccctgtccgaactggcgcgaatgcaatgactgttcgcggcactactacccctgctatcgggcgaggtctattcaagactccgcaatctaacaggaccgccactggatttgggcgcggacaagtgaaccatgtccgagctgaagaggcccaggaagatcagggcgtactaatgggtatgttctctatcaattccaccccggttaaagttctcttcgattccggtgcatcgcattcatttatatctctgaaggctagtcaaaagcacaacttgaccctcgtgggacttagaaagcctatgatagtacactcacctgggggcgagataactatgagtcatgcttgcatagatgtaccaattcgccttagggatgtggtatttccctctaatcttatggtgctaataccccaaactcttgatgtcattttgggtatggattggttagcaaagcatagaggagtaattgactgtagacgtagagaggttaccctgaccacaccctggggatcggatatgagagcaaccatggatcaagaacctaggctaaccgaacgtgctgggggtatattcaccatgctacccctaaagggaatgcctgtagtacagcgatttcctgatgtgtttccagaagatttacctggaatgccaccagatcgtgacgtagagttcattattgacctgatacccggaactgcccccatatccaagagaccatatcggatgccggtcaatgagttagaagaacttaaaaggcaaatcagagagttgcaagagaagggatttgtacgccccagttcgtcaccttggggagccccagtgttgtttgttaaaaagaaagacggtagcatgagaatgtgtgtagactaccgatcactgaacgaagtaactatcaaaaacaagtatccactaccacggattgatgacctcttcgaccaacttaagggagctaagattaggaccgaggatatccccaaaaccgcgttttcaacacgctatgggttgtatgaattcacagtaatgtcgtttggtctaaccaatgccccggcatacttcatgaatcttatgaacaaagtattcatggattacttggataagtttgtggtggtattcatcgatgacattctgatctactccaaagatgaagaagaacatgcggaacacttaagattggttctccagaaactccgaaagcacaagttatacgcaaaattcagcaagtgcgaattttggttgaaggaagtcgcttttctgggtcacgtaatctcagccggtggagtagcagtggaccctgctaaagtggaggctgtcacggaatggaaagcacccaaatctgtgactgaaattcggagttttctaggcttggctggatactaccgaaggttcattgaagggttctctaagatagcccgaccaatgacacaactactcaagaagaaaaagaagtttgtgtggtcagaacagtgtcaggaaagctttgagcagctcaaggaaaagctgacctcagcgcctattttagttcttcccgacatcaggaaagactttgttatatattgtgatgcgtcaaggcaaggactaggaggagtactgatgcaggacagaaaagtggtggcctatgcgtcgcgacaattgcgaccacatgaggaaaactaccctacccatgacctagaactcgcagctgtggttcatgcgctaaagatttggagacattatctaattggaaaccattgcgatatctacactgaccacaagagtctaaagtatatcttcacccagtcagatctcaacttgaggcaaaggcgatggttagaattaatcaaggactatgatttagaggttcactatcacccaggcaaagcaaacgttgtggccgacgctctgagtcgtaagagccattgcaatcatctgagaatggaagggatggtccctgagcttagggaggaaatagctcagctgaacctacatatagtaccccgtggacagataaacaccctggacattcaacctcttttgagaacccaaatagaagaagcccagaaggacaacgaggaagtccgagagttgaaggaacgcttggctgcaggacgtgcaaaggaattttcaaccgacgaaaaagatgttctatggtataaaaagagaatttacgtacctgaacagggtggactgaggggattaattttaaaggaagctcacgaatcggcatattcattgcaccccggaagtacgaagatgtaccaagatctgaaggaaggatactggtggcccaacatgaagagagatgtggccgaatacgtagcactctgcgacgtatgccagaaggtgaaggctgaacaccagaggccagcaggtttgttgcaacctctcaggattcccgaatggaaatgggatgagataggtatggattttattgttggattgcccaaaaccgcaacaggatatgattccatttgggtgatcgtggatcgactcaccaagacagcgagattcattcccgttaagacaaattatagcagtgctaagctagccgagttatacatgaccaggatagtatgtcttcatggtgtaccaaagaaaattatatctgatcggggcacacaatttacctcacatttctgggagaaagtccatgaagccctaggaagttatctcgcatttagcacagcttatcatccacagacagatggccagacggagagaaccaaccaggtcctagaagacatgctgagggcttgtgctctggattttagcaaggactgggagagatgtttgccctacgccgaattctcctacaacaacagctttcaagcaagcctaaagatgtcacccaacgaggcattgtttggtcgacgatgtcgtaccccgctaatgtggtccgagactggagaacgggcggtatttggacctgatattattcaagaagccgaagaaaaggttcgcttgatccgtgaccgtctaaaagtagcacaatcacgacaaaagagttacgccgacactcgaagaagaaacctggaatttaaggagggagattacgtttatctaaaggtttctccgatgaggggaaacaaaaaggtttaa

SEQ ID NO: 15626 - DNA, 990 bp, Oryza sativa
  Clone ID: TFbOSC401836j.C1.o3.gm
atggacctgctgctgaatggtgggatcattttcgccaaggcagggctgaaggagagcctattacgtggcaggagttcacggccgctttcaagaagacgcacataccagcgggagaagttcttggagggactaaatgatgagttgtcttatgctttgatgtctacggatttccgggatttccagcagttggtggacaaggcgattcgtcaggaagacaagtataaccggatggagcagaagaagcgcagggctgcccaattcaaggcacaacagggcagtaaccagagaccgcgactcgttactggacctcaagctccatcgtaccctcaagtaggatcttcatcagttgtccgtccccaacgccagttctacaacaacaatactggtaatcgtggcaatgacaaccgcaacatggttgctcgtcctgcagcaacttcagctcagaatcagcccgtcaggaaggaacagggaagcaagccagtgatatgcttcaattgtggtgacccaggacattatgctgataagtgtcctaagcctcggcgcgtgaagaacgctccagccccgaacaactccaatgttccagtaccgaaggcacgtgttaatcatgttgcagcagtagaagctcagaatgcaccagatgttgttttggcctttttcatgaatctgatgaacaaggtgtttatggaatatctggataagtttgtcgtggtgtttattgatgacattcttatttactccaagacgaaggaagaacatgaagagcatcttcgtctagctttagagaaactacgtgagcatcagctttatgccaagttcagtaaatcggcggctcggcttgacggcgacggcggagctccggtggtcggcggcgaaggggaacgggcggccgagattcctctcaccacggcgcacctaacggcggcgacggcaaacggcggcgacggcggaggcgacggcgcggcgcaactggagatcgccggcgacggctag

SEQ ID NO: 15627 - DNA, 2290 bp, Oryza sativa
  Clone ID: TFbOSC420873j.C1.o1.np
aaggtgggttgtgagcatatggttttgatggttgtgctcatgacaattaaggaccggttcgcgagctactgttgtgaaacatttatcgtgccaaccacaagccagcgtgggcaacggctttatcttttgtatagcgtgattcattatagtgcgcccgactgagaagtggcgagaagtccatgggggtcgctggggagtccatgccttgttttaaagggggtgattatgatccaggaaaggagcactgtaatgggttatgttgtgcgaggggtattgtcacgactcctttccgagatgccgccccattcaccgagaaatttgatcgaggtgttaggattcgtcagggagctgaggttgatggcttttgaggtaggttatgaagttgctcctgagtatcgccagatttcccatgaccccgacgaggagaagtgtcgtgttcgtgtgacgttggctagtgatagagaagaccttccgtctattaagttcgaagctggaggaagatcgtactgccatgcttgtcaagaagcagctttggtggccattggagagttgcgtcaacgttttgaagaagagttggattcatcagctttccagtatcatcctcacaagcctcatggtcaagactatggaacctatatctgtcctgatggtgaagagagtgccactctgatgcatgtggtgcatatgcttagtgctatggatgcagtaagtgtggagcgagacaaagcagctcatgacagggaaaactggaatcgaggcaagatttgcaagttggagagcaaggtgtaccgtctacagaaggaattagctgaactcaaaggagaaacgccgccgccaacacccaagcttcgcctcgtcgcaagaaagagaacctgtccgccacctcgtctccagttagcttcgaagattcgcgtgatgggtgaagctgtgcccgatcgtgctgaacctgtcatcgacatcataagtgatgaggaagaagaggaagaccctgaagaaagagagccagctactccagaggaagaagatccatcgcttcgttccgacgcaaggcgcagggctgaaggagaacttatcacttggcaggagttcacgactgcttttaagaagacgcatataccgtcaggtgttgtagctctaaagaagagagaatttagagcactcaatcagggatctcgttcggtcaccgagtacctccatgatgtcaaccgtttagctcgttatgctccggaagatgttcgcaccgatgaagagcgtcaggagaagttcttggagggactgaatgatgagttgtcttatgccttgatgtctacggatttccgggatttccagcagttggtggacaaggcgattcgtcaggaagacaagtataaccggatggagcagaagaagcgcagggctgcccaattcaaggcacaacagggcagtaaccagaggccgcgtctcgttactggacctcaagctccatcgtaccctcaaggaggatcttcatcagttgtccgtccccaacgccagttctacaataacaatactggtaatcgtggcaatgacaaccgcaacatggttgctcgtcctgcagcaactccagctcagaatcagcccgttaggaaggaacagggaagcaagccagtgatatgcttcaattgtggtgatccaggacattatgctgataagtgtcctaagcctcggcatgtgaagaacgctccagccccgaacaactccaatgttctagcaccgaaggcacgtgttaatcatgttgcagcagcagaagctcagaatgcaccagatgttgttttgggtacgtttcctgttaactctataccgcaactgtgctttttgattccggtgctacacattcctttttgtctaaaagttttgcgagcaaacatgggatggaagttgttagtcttgggagacctttactagttaataccccaggcaatcaagtattttcgacatagtattgtccttctgttactatagaaatagaagaagttcttttcccatcctcgcttatcttgctagaatccaaagatctagatgttatcttagggatggactggttatctcgtcacagaggagttatagattgtgccaaccgtaaggtgactttaaccagtagcaattgggaaaccgtttctttctttgtgtcctcccctaaatatcatggtgtgaacttaaaccaagttgctctacaagagattcctatagtacaagactacccagacgtgtttcccgaggatttgccaggtatgccacctaagagagacatagagtttcggatagacttggt

SEQ ID NO: 15628 - DNA, 5331 bp, Oryza sativa
  Clone ID: TFbOSC900401j.C1.o12.fg
atggcagattcggattcacccgctacctgggagttgagcttacctcaatcagaggggtatgtcattgagctgcatcggatgttgaggcgtctgcgataccctgggttcccgtcttaccgagtgaggcagtgtggctcagtttgggaggctcgggtcgagattcacccccgagtcccttccgagttggactacagctttcagacacgtcaccaccgagacctgccagagaccgcgatgcaggatgctgcccgggaggccttcctccgactcagctctatccaccgagctgagttagcgagtaccgagtttgctcatcacccgttccgggaggagggcaactcagtttgcacagttcaggacacgccctgctgctacaacccgatggtgactcggttgtcacgatgggctgaggcagtagatgactactacgaggaggctctgttggagattgacgaccaccagagacgtgtgggggagttagagactgaggtgaccgacctcacggcacagcagcttcagttggaggaggagcaccaggcttggggcagtgagatagactcactgaaggcacagctccaggtccacggcgatcagttccagcagttatccgaccagtacaacgatcgccgcgggatgatggatactcttgaggagcagctgagagagagtcaggagcacgtcagccagctggaggagcagcttcgagcagccaagatcagcactacaggggcttctacttccacagcggtaggccgtgaccgctacttcttcctcaccccgccgtacccaccggcgttccacgctcttctgggagaggctagtatgctagctactgagtcagcgccctacctagtggaccctacagcgacacagccacctgttccggagttggttcacactccactgatccctacaccttctccgcagctgggttccaatttggagactccgatccaggtcgactccgagacagaggggaccgacaccgagccagagatcgagccagacatcactgatccttcagaggatgaggctcctgttccctgtatcaccttcctcggaggccctcgcaccctcagcactgctcgcaagagcacacgacccccgggcaagaggcccaagccagatccagaggccactacctctgagccgtggggactccggttatttatgatggcaagccgacgtcgtgcaacaaccagcaatgacgaaactcagacacccgacttaaacgctctggccggaattatggccacccaaactcaacttctgcaagctatcgcgagcaaccaaggcaaccgcggagggtcaagctttggagagttcatgaggaccaagccgcccacgttcgctacggccgatgagcccatggaagcagaagactggctacgcatcatagaaaagaaactgactctagtcagggtacgcgaagccgacaaggtgatcttcgcagtgaaccagctggaaggacccgctggtgattggtgggatacctacaagggggcccgagaagacggtgctggagaacccacctgggaggagttcactgcagcgtttcgcgagaatttcgtacctgctgcagtgatgcgcatgaagaagaacgagtttagaagactgcggcaagggaatacaacagtgcaggagtatctaaacaagttcactcagttggctcgctacgcaattggagacctggcagatgaagaagaaaagatcgacaagttcatagaagggctgaatgatgaattgcgtggacctatgatcgggcaggatcacgagagtttccagagcctgatcaacaaggtcgtcaggctagagaacgatcaaaggacggtggaacacaaccgcaagaggaggcttgctatgagtcgcccacctcagacagtgcctcagcgacttaaggaagccactccgtccggatggaagccccctgtcatggtgaccaaccgtcccgctgcacttagcaacttcaacaggccagttgcacttcagaaccgcacccctacgccaactttggctgcccctggagccaagaagaatgtggactgcttcaactgtggggaatacgggcactacgctaacaactgccctcatccacgcaaaacccctgtccgaactggcgcgaatgcaatgactgttcgcagcactactacccctgctgtcgggcgaggcctattcaagactccgcaatcgaacaggaccaccactggatttgggcgcggacaagtgaaccatgtccgagctgaagaggcccaggaagatcagggcgtactaatgggtatgttctctatcaattccaccccggttaaagttctcttcgattctggtgcatcgcattcatttatatctctgaaggctagtcaaaagcacaacttgaccctcgtgggacttagaaagcctatgatagtacactcacctgggggcgagataactgtgagtcatgcttgcatagacgtaccaattcgccttagggatgtggtatttccctccaatcttatggtgctaataccccaaactcttgatgtcattctgggtatggattggttagcaaagcatagaggagtaattgactgtagacgtagagaggttaccctgaccacaccctggggatcggatatgagagcaaccatggatcaagatcctaggctaaccgaacgtgctgggggtatatttaccatgctacccctaaagggaatgcccgtagtacagcgatttcctgatgtgttcccagaagatttacctggaatgccaccagatcgtgacatagagttcattattgacctgatacccggaactgcccccatatccaagagaccatatcggatgccggtcaatgagttagaagaacttaaaaagcaaatcaaagagttgcaagagaagggatttgtacgccccagttcgtcaccttggggagccccagtgttgtttgttaaaaagaaagatggtagcatgagaatgtgtgtagactaccgatcactgaacgaagtaactatcaaaaacaagtatccactaccacggattgatgacctcttcgaccaacttaagggagctaaggtgttctcaaagatcgaccttcgatcaggataccaccaactgaagattaggaccgaggatattcccaaaaccgcgttttcaacacgctatgggttgtatgaattcacagtaatgtcgtttggtctaaccaatgccccggcatacttcatgaatcttatgaacaaagtattcatggattacttggataagtttgtggtggtattcatcgatgacattctgatctactccaaagatgaggaagaacatgcggaacacttacgattggttttccagaaacttcggaagcataagttatatgcaaaattcagcaagtgcgagttctggttaaaagaagtcgcttttctaggccacgtaatctcggccggtggagtagcagtggatcctgctaaagtggaggctgtcacggaatggaaagcacccaaatctgtgactgaaattcggagttttctaggcttggctggatactaccgaaggttcattgaagggttctctaagatagcccgaccaatgacacaactactcaagaaggaaaagaagtttgtgtggtcagaacagtgtcaggaaagctttgagcaactcaaggaaaagctgacctcagcgcctattttagttcttcccgacatcaggaaagactttgttatatattgtgatgcgtcgaggcaaggactaggaggagtactgatgcaggacggaaaagttgtggcctatgcgtcgcgacaattacgaccacatgaggaaaactaccctacccatgacctagaactcgcagctgtggttcatgcgctaaagatttggagacattatctgattggaaaccattgtgatatctacactgaccacaagagtctaaagtatatcttcacccagtcagatctcaacttgaggcaaaggcgatggttagaattaatcaaggactatgatttagaggttcactatcacccaggcaaagcaaacgttgtagccgatgctctgagtcgtaagagccattgcaatcatctgagaatggaagggatggtccctaagcttagggaggaaatagctcagctgaacctacatatagtaccccgtggacagataaacaccctggacattcaacctcttctgagaacccaaatagaagaagtccagaaggacaacaaggaagtccgagagaaggtgaaggctgaacaccagaggccggcaggtttgttgcaacctctcaggattcccgaatggaaatgggatgagataggtatggattttattgttggattgcccaaaaccgcaacaggatatgattccatttgggtgatcgtggatcgactcaccaagacggcgagattcattcccgttaagacaaactatagcagtgctaagctagccgagttgtacatgaccaggatagtgtgtcttcatggtatacctaagaggattatatctgatcgaggcacccagtttacctcacatttctgggagaaagtccatgaagccctagggagttacctcgcatttagcacggcctatcatccacagacagatggccagacagagagaaccaaccagatcctggaagacatgctgagggcttgtgctctggattttagcaaggattgggagagatgtttgccctacgccgaattctcctacaacaacagctttcaagcaagcctaaagatgtcacccaatgaggcattgtttggtcgacgatgtcgtaccccgctaatgtggtccgagactggggaacgggcggtatttggacctgacattattcaagaagccgaagaaaaggttcgtttgatccgtgaccgtctgaaagtagcacagtcacgacaaaagaattacgccgacactcgaagaagagacctggaatttaaggaaggagattacgtttatctaaaggtttctccgatgaggggaacaaaaaggtttaaggtcaaaggaaaactggcaccaagatatgtgggaccattccagatcattgccaggcgaggagaagttgcctatcagttacagttgccagagaatatcgcggatgtacacccagtcttccatgtatctcagctaaagaaatgtttacgagtgccagaagagcaagctccgctggaagaaattcacatcagcaatgatctcacatatccagaacacccgatccggatattggatgaagccgaaaagaggactaggagcaaagtgtggcgtatgtacaaggtacaatggagcaatcacactgaggatgaagccacatgggaaagcgaagaattcttgaggacagagtacccacatctattcgaaaaccggtaa

SEQ ID NO: 15629 - DNA, 1572 bp, Oryza sativa
  Clone ID: TFbOSC19735j.C1.o1.fg
atggctgacaatgagaaaggcaataaggtcagaagtcaggacattggtacctcaagctctcgagtgaatgaagcaccagacaccagttgtgtggcagtggtccaacacctgattaaccagaacaaattgcttatagagatactacagcagcatcggatgccaattttgaacccgagtcagatacaacctcaagtgcagttggaggcagtccaagcactcacaccacaagtcagcgcaccgccaacatcccagaaggcccctcatgccatgccacatgttgacccaaaagaagcaagtatcatctgttttatgtgtgatgagcaagggcactatgcaaggaactgtcctcagcagaaaagaaaagcaccaatgcgaaccgaagatgaagtccgtaagatgatcattaccagcacagaatggcctccaccaggaatgacaaaatgtcagagaagaaattcctcccgaggtgcacaacagttgacagagcatcttttagctaatggaggtagagtgtctggtagtgaagattcagatcaagtctcctcagatgatgaagatgagaagtctccccaaggttttaaccagaataaaatagaacttaaggcatgctctcgttgtggagaaatcggtcatgttgccagctcgtgtgccactacatgcgttcattgtgaggaagaccatccacccgacagatcccatgttcccgcaggaatgatcacactgagaaaacgagagttccgctacctgaagcaagaagatttgaccgtcacagagtacctgcacgagttccatcgtttggctcactatgcaccagaagatgtggaaaatgatgaagacaaacaagagaagtatctccaggggttaaaagatgagatcacagtgcaactactcctagaggaatatgaagattttgagaaacttgtggacaaagccatacaactcgaaagtgagcataatcggatgaagaactgtaagagaaggattgtcagcatcccagtattcccatgtggtaaccaaagacagcgcacggagccacttcagatcaccggatcttctgttgcgcatcaagagtttccgccccaagaagatggacacaatgcagacaacaacattagcaatactaatgatgatgataccaccaacaaccatgcttcttgccccattagtgaccactcaaatcaagcgtgcaatgtcaacatcattcaccaaggtgtcgacgatagtatcaatgatggcacccaaaatgacaaccctagcaattgtgactctgagaaagactccaatggtgatagcaactatggtaccactgatgccaatgttagcaaggatttccaaccaccaattccaactccaagtcagaatgatcgtccccagacggatagctcagcaaagaagacgttgatttgctacaattgcaaaggaccagggcattactcgagggactgcctgcaaccaaggcaaagtcgatctccacattaccgccaatttacacgaagcagacatcccaatcgtattgtggtcactggagcaaacgccgtacccgtgaggcctcgtgttaatcagaacccatag

SEQ ID NO: 15630 - DNA, 266 bp, Oryza sativa
  Clone ID: TFbOSC25205j.C1.o1.np
actgagccacaaactaagccttacccactagacatgtggaagtacggtagtgctttgcaacagaggcccgaagaccggtccttatatggccgaggtgctaccatcaaaaccatgcaccccgagcccagcctaaaaccattttggggaattttgaatagaaggagcgatgatgtgtcttgccttgctcgctttcccaagcgtcggcttcaacttccacgaagagcggatcttccgaagctgcagcgtctacacgaccaacggaaaag

SEQ ID NO: 15631 - DNA, 640 bp, Oryza sativa
  Clone ID: TFbOSC11782j.C1.o1.fg
atttcctaatgatttgtgcaacaattgtaagcgtccaggacattttgctagagattgtccaaatgtggctctttgccatgcatgtgggcttccagggcacattgcagcagagtgttcttccaaagatctctgctggaactgcaaagaacctggccacatggctaacagctgcccaaatgaagggatatgccgcaactgtggcaagtcgggtcacattgcaagagaatgcagtgctccaccaatgctgccaggtgaaatgaggctttgcagcaactgctacaaaccagggcaccttgctgcggaatgcaccaatgagaaggcctgcaacaactgtaggaagagtggccatcttgctcgtaactgccctaacgagcccgtctgcaacctatgcaacgtgtcaggacatttggcccgagagtgccccaaatctgatgctatcaatgagaggggtgggcctcctcccttccgtggtggatacagtgatgtggtctgccgtgcttgcaatcaggttggtcatatgagccgtgattgcatggccggtgcgttcatgatctgccacaactgcggtggtcgtggtcacatggcttatgagtgcccatctgggaggcttatggatcggtttccccctcgccgtttttga

SEQ ID NO: 15632 - DNA, 744 bp, Oryza sativa
  Clone ID: TFbOSC400622j.C1.o112.fg
atgagcagccgcagcccgccaccaaaggaccgcaggattcgtactgagcgtacctcataccgtgatgcgccatacaggagagacagccgccgtggtcctagcagatttcctaatgatttgtgcaacaattgtaagcgtccaggacattttgctagagattgtccaaatgtggctctttgccatgcatgtgggcttccagggcacattgcagcagagtgttcttccaaagatctctgctggaactgcaaagaacctggccacatggctaacagctgcccaaatgaagggatatgccgcaactgtggcaagtcgggtcacattgcaagagaatgcagtgctccaccaatgctgccaggtgaaatgaggctttgcagcaactgctacaaaccagggcaccttgctgcggaatgcaccaatgagaaggcctgcaacaactgtaggaagagtggccatcttgctcgtaactgccctaacgagcccgtctgcaacctatgcaacgtgtcaggacatttggcccgagagtgccccaaatctgatgctatcaatgagaggggtgggcctcctcccttccgtggtggatacagtgatgtggtctgccgtgcttgcaatcaggttggtcatatgagccgtgattgcatggccggtgcgttcatgatctgccacaactgcggtggtcgtggtcacatggcttatgagtgcccatctgggaggcttatggatcggtttccccctcgccgtttttga

SEQ ID NO: 15633 - DNA, 962 bp, Oryza sativa
  Clone ID: TFbOSC5579j.C1.o1.gm
atgaagagaatgaaagtgagactcagaagcttcctgaatattctacaagtgattcagaagatttctgggaggaggaattgtttcctgaacttattaagcccttgccagatgatgggggtatgcgcttgaaaaatacttttgaagaggaatttgctgaagatacatggtgcaaactgagtaaaaaggttgctttaaatacatcccaaagtgttgtctcacttgcttcgttcaaagactactccatcccgctcgccggcgtgcaccagcgatcgggagagcaggtctccggaacctctgcctttgacgtcctgcaccgggagaaggcggcaataaggcactgtgattttactatggctggttttgccgatgcactgaggccggataaattcaccggtgtgcattttaagagatggcagatcagggtcactctgtggctgacagctatgaaatgcttctgggaatactctgttgaggggttgatagcgtctcttgatgttgaggagaaagctcggaaaaaagatgatgcgtctaagggcgatggtgggcagtctagtgccaatgttgtgcacaaggcccagaacaagagcaaggggaaatacaaagctcagcagaccaccaacttcaagaagcagaagaagaacaacaacaatcctaatcaggatgagatgacttgctttgtgtgtggccaagttggtcatctggctaggaagtgtccacaacgcaaggggatgaaggcacctgcagggcagacttctaagtctgctaatgtgaccattggcaacactggagatggaagcgggtatggtaatttacctactgtcgcacggggttccaccgtcctaatggggaatgggtcacatgcttctgttcatggtgttggcacggtagatctgaagtttacttcgggaaagatcgtgcagctgaagaacgtgcagcatgtcccttctatcgacaggaatctt

SEQ ID NO: 15634 - DNA, 2523 bp, Oryza sativa
  Clone ID: TFbOSC407628j.C1.o7.fg
atggacatctctaggacaaatgaaggctacacgagctgcggcccggtagtcgagatgtcatggcacagggctggtgtcctgctgctaggggctcaatcctgcctacctgtcccggaggttccggccgtaggtgggattgggtcggtactcttgtctatggctaggatgggttgggaactatgtcacgtcttccgtccgtataccgtggtgaataagcctaacatacatcataacagcaaaagacttagatctgttaaggtcctatccttagtttctaatctgtctcttccctttgttttccctctctccctctccaaacctttgcaacagatggctgacaatgagaaaggcaataaggtcagaagtcaggacatcggtacctcaagctcccgagtgaatgaagcaccagacaccagttgtgtgacactggtccaacacctgattaaccaaaaccgattgcttatagagatactacagcagcatcagacgccaattctgaacctgagtcagatacagcctcaagtgcagttggaggcagtccaagcactcacaccacaagtcagcatgccgccagcatcccaaaagaccgatggtggcgtgccacatgttgactcaaaagaagcaagtatcatttgttttatgtgtgatgagcaagggcactatgcaaggaactgtcctcagcagaaaggaaaaacaccaatgcgaaccgaagatgaagtccgtaagatgatcattaccagcacagaatggcctccaccaggaatgacaaaacgtcagagaagaaataccttccgaggtgcaccacagttgacagagcatcttttagctaatggaggtagagtgtctgatagtgaagattcagatcaagtctcctcagatgatgaagatgagaagtctccccaagattgtcaattcagttttttgctgacgaagaagatggccaaccaacccgccagttccaatggagagaagcatcaaggcaacacaaatcctcgccaagattacagtttcagcctaactccagtgccaggacagaggaatcaaaatgagaaaagaaaatgccgagtccgggaagatatctgttgcttcaattgtcaaggaatgggtcatttcgccgacaagtgcccaaaaccgagaaacatagctgccagcacgtcagtccacgcaactccctgcaatcagaagcttgctcctcagcgaattgtcatccatgcatcccgaagcagtcctatagcccgcgttacaacagctccaactccagcgagtgcattaccacaaggtgtcaatgctcaatttcagccccagccaccagttgacaagacagaggccagtatcggcattgtacctttggatgttccagcacagcagccaagaaatcaaaattggaacaacccagcaggggcaaccaacgttcaagtacctacagtccagcaacagtgcaagttatcagaatttctcaaaattgagactccaacctttgccattgccgtcgaacctatggaagccagtgattggttgcgcacagtcgagaagaagctggggttgattcagtgcacagaccaggagcgggttgtcttcgcaactcatcagttggttggactggcttcagaatggtgggatagctacgaagcatcacggccagaaggacataccatcacctgggacgagttttcatctgtattcaagagatcccatgttcccgcaggaatgatcacactgagaaaacgagagttccgctacctgaagcaagaagatttgaccgtcacagagtacctgcacgagttccatcgtttggctcactatgcaccagaagatgtggaaaatgatgaagacaaacaagagaagtatctccaggggttaaaagatgagatcgcagtgcaactactcctagaggaatatgaagattttgagaaacttaattgtaagagaaggattgtcagcatcccagtattcccatgtggtaaccaaagacagcgcacggagccacttcagatcaccggatcttctgttgcgcatcaagagtttccgccccaagaagatggacacaatgcagacaacaacattagcaatactaatgatgatgataccaccaacaaccatgcttcttgccccattagtgaccactcaaatcaagcgtgcaatgtcaacatcattcaccaaggtgtcgatgatagtatcaatgatggcacccaaaatgacaaccctagcaattgtgactctgagaaagactccaatggtgatagcaactatggtaccactgatgccaatgttagcaaggatttccaaccaccaattccaactccaagtcagaatgatcgtccccagacggatagctcagcaaagaagacgttgatttgctacaattgcaaaggaccagggcattactcgagggactgcctgcaaccaaggcaaagtcgacctccacattaccgccaatttacacgaagcagacatcccaatcgtattgtggtcactggagcaaacgccgtacccgtgaggcctcgtgttaatcagaacccatag

SEQ ID NO: 15635 - DNA, 2592 bp, Oryza sativa
  Clone ID: TFbOSC900017j.C1.o25.fg
atggctgacaatgagaaaggcaataaggtcagaagtcaggacattggtacttcaagctcccgagtgaatgaagcaccagacaccagttgtgtgacactggtccaacacctgattaaccagaaccgattgcttatagagatactacagcagcatcagacgccaattctgaacctgagtcagatacaagctcaagtgcagttggaggcagtccaatcactcacaccacaagtcagcatgccgccagcatcccaaaagacccatggtggcgtgccacatgttgactcaaaagaagcaagtatcatttgttttatgtgtgatgagcaagggcactatgcaagggagtgtcctcagcagaaaagaaaaacaccaatgcgaaccgaagataaagtccgtaagatgatcattaccagcacagaatggcctccaccaggaatgacaaaacgtcagggaagaaataccttccgaggtgcaccacagttgacagagcatcttttagctaatggaggtagagtgtctgatagtgaagattcagatcaagtctcctcagatgatgaagatgaaatggaacgtaaggcatgctctcgttgtggagaaatcggtcatgttgccagctcgtgtgccactacatgcgttcattgtgaggaagaccatccacccgacaggtgtccaacgagcaggatcacttgtttcttttgtgaaggaactgatcatgtaccaaaagattgtcaattcagttttctgctgacgaagaagatggccaaccaacccgccagttccaacggagagaagcatcaaggcaacacaaatcctagccaagattacagtttcagcctaactccagtgccaggacagaggaatcaaaatgagaaaagaaaatgccgagttcgggaagatatctgttgcttcaattgtcaaggaaggggtcatttcgccgacaagtgcccaaaaccaagaaacatagctgccagcacgtcagttcacgcaactccctgcaatcagaagcttgctcctcagcgaattgtcatccatgcatcccgaagcagtcctatagtccccgttgcaacagcttcaactccagcgagtgcattaccacaaggtgtcaatgctcaatttcagccccagccaccagttgacaagatagaggccagtatcggcattgtacctttggatgttccagcacagcagccaagaaatcaaaattggaacaacccagcaggggcaaccaacgttcaagtacctacagtccagcaacagtgcaagttatcagaatttctcaaaactgagcctccaacctttgccattgccgtcgatcctatggaagccagtgattggttgcgcacagtcgagaagaagctgggattgattcagtgcacagaccaggagcgggttgtcttcgcaactcatcagttggttggactggcttcagaatggtgggatagctacgaagcatcacggccagaaggacataccatcacctgggacgagttttcatctgtattcaagagatcacatgttcccgcaggaatgatcacactgagaaaacgagagttccgctacctgaagcaagaagatttgaccgtcacagagtacctgcacgagttccatcgtttggctcactatgcaccagaagatgtggaaaatgatgaagataaacaagagaagtttctccaggggttaaaagatgagatcgcagtgcaactactcctagaggaatatgaagatttcgagaaacttgtggacaaagccatacaactcgaaagtgagcataatcggatgaagaactgtaagagaaggattgtcagcatcccagtatttccatgtggtaaccaaagacagcgcactgagccacttcagatcaccggatcttctgttgcgcatcaagagtttccgccccaagaagatggacacaatgcagacaacaacattagcaatactaatgatgatgataccaccaacaaccatgctttttgccccattagtgaccactcaaatcaagcgtgcaatgtcaacatcattcaccaaggtgtcgacgatagtatcaatgatggcacccaaaatgacaaccctagcaattgtgactctgagaaagactccaatggtgatagcaactatggtaccactgatgccaatgttagcaaggatttccaaccaccaattccaactccaagtcagaatgatcatccccagacggatagctcagcaaagaagacgttgatttgctacaattgcaaagaaccagggcattactcgagggactgcctgcaaccaaggcaaagtcgacctccacattaccgccaatttacacgaagcagacatcccaatcgtattgtggtcactggagcaaacgccgtacccgcaacaaccgtcagtctagcttttgatgaaccacttgaaggttctctgaaaggcagcaggctcaagtaccactttgtcaccagaagcatccacaactctcggagtgaagagtacttggttgacaaagttcaaaaggtgattgatagaagataccagcaaaggtgtttatcaccgggcaaagaagtaggtcgaaaggtgattgataagagaaatctgaaaagaacacatcagggttga

SEQ ID NO: 15636 - DNA, 3057 bp, Oryza sativa
  Clone ID: TFbOSC400718j.C1.o77.fg
atggctgaagctgtgaaacatcatgtctcatatgaaaagaagctcttgagtctaatatccaatttgctatcagagcctcgttggctcgctggtgccatgtcggagcataccccaccgcggccatcctgctcgccgccgccaacaccgccgcgctcacgctctcccctcgttcgcccgtcacaaacaccgccatgccacaatcctgctgagtccccgccgtgccgtgggcgcgggcgtggcgagcgacagcccttcgctgcccagccacgcgtcgtcagggagtcgagcgccgccgtccactacccggtcctaacgaggaccaactacgaggaatgtgcgctcttcatgaccgtcaaccagcaagcacagggactttggcacgccgtggagccgtatgaagacgaggagatcgagtaccgcgacgatcggctggtgctggccgcgatcttgcgtgtggtgccaccggagatgcttcgctccctctccaccaagcgcacggtgaaatccgcatgggaagcgatcaagaccgtatgcgtcggcactcggcgcgtgcgagaggcgaatgagcagctacttcgccgggagtttgccgatgcgcggttcaaggatggcgagaacatcgacgacttctccatgcgcatcttcggcatcgcaaacagcattcgcactcttggaggcgatctccccgagatagatgttatagcaatctcgatcgaaacgctcctcgacatccgcgacctgtcaattaaggaggtcaccgtccggctccgctccgtcgagaaatgcaaggccaagccgaaggaggtcgttgacagtggcggccgtctcatgctcactgaggagcagtggctggcacggctcaagaaccgcgagcagggcggtgagagcagtggcaccacgcccggcgcggccgcgaacaacagcggcaagaaacgcgggaatcggcgcagacgtgggcgtggccaggagcaccctggcgacaagtgccataactgcagcaagatgggccactgggccaaggactgccgctccaaggccaagaaggccgaggctcacatcgccacgaaggacgacgacgagcccacgctgctgatggcgcgtgcgtgcttggtccagcggcgatgcccgccagccgaacccacgtcgaagatcacgccggtgctcgcgcatcttgatggcgaccccgatcccgcggatttgtggtacctcgacaccggcgtgacgaaccacatgaccggtgcccgctccgtcttctccgagctcaacacggcggtgactggatccgtcgtcacgatcgagggctacggcacgatcctcttcgcctgcaagaatggcgagcaccgcgggctgaccggcgtctactacattccccgcctcaccgtcaacctcataagcctcgggcagctcgacgagaatggctgcgagtccctgggtgacatggtgcgaggtctgccgctaatcgaccacgtcgaccaagtgtgcgatagctacctggccgggaaacaacgttgtgctccgttcccggcacatgcgaagcatttcgctgaacacctgctcgacctcgtgcacggctacctctgtgggccgatcttgccggcgatgctgggtgggaaccactacttcttgctactagtcgatgatgtgagccgctacatatggcttactctgctagcaagcaaggatcaagcaccggcggcgatcaagcgcttccaagcggcggccgagctggagtccgggtgcaagctcaaggtgctcaggactgatcgtggtgaggagacggcctcattcaaggaggccgagcaacacaagagctggcggcacgcgatgatggaggaaatggagtccatcacccacaacaaaacatgggttctcgtcgacccgccgccgtcgcaccgcccgatcagactgaagtgggtgtacaaagtcaagcaggacgagcgcggtgtcatcgtcaagtacaaggcgcgcctcatcgctaagggctacatccagcaagccggcattgacttcgaagaggtgtttgcgccggtggcacgcatggagtccgtgcggctcctgctcgccgtcgcggcgcacgccggctggggcgtccatcacatggacgtcaaaagtgctttcctaaacggagagcttgccgaggaggtccagggcgatgcgaagctgatcgtcggcgtctatgtggatgacctgatcatcaccggcgcgaatcaagcaaacatcggtgaattcaagaaggagatgtgcaacatcttcaagatgagtgacctcaggctcttgtcctactatcttgggctcgagtcggcgtatgccgacaagctgctctacaagagtggcatgggagactgcaactcatgcgccacgccgatggagatacacctgaagctgagtaaggcaagctcaagtccaccggtgagcgcgacaagctatcgcagcatcatcggtgggctgcgttatctggtgaacacgcgccccgacattgctcacgccgtcggctacctgagtcggttcatggaggaaccacatgaggatcatcaagcggcggtgaagcatgtgctgaggtacatcggcagaacgcgacaccatggtgttcattacgccagggggaaaggaggatggctggagctgcatggcttcagcgacagcgacatggccggcgatctggacacgcgccggagcacgagcggcgttctccttccacgactccagtcctgtctcttggcaatcagcgaaacagaaggtggtcacactatcatcttagctcggctcctgagcgacctgcttgactcggagcctggagcaccggagatcatggtggacaataagtctgccatagcaatcaccaagaatcccgttttccatgaccggagcaagcatatcgacacgagataccatttcatccgggagtgcgtggagaacgggaagatcgtcatcaactacattcgtatagaggagcagctggcggccgtactgatgaagccgctcggccgtgttccattccaggagttatgcaatgggatcggcatcgttgagctcaagggcgatggcgacaagaattag

SEQ ID NO: 15637 - DNA, 2007 bp, Oryza sativa
  Clone ID: TFbOSC401348j.C1.o24.np
atgggtcctcaaatagaacgagttgtagatgtgagcatttctcctcctaatgataaagagctatcatttaaagaggaagagaaatgtatacatctcaatgctcaagttactaatgttttatttagtgttttgagtgaagatgtatttaaaaccatcatgccgcttgaagatgctcatctcatttggaccacactcaaggagagatacgacaagtccaaatgtgatgatgtactctttatggaagaaccacttgaggagcgttcaacttcatcaccaaattgcgaagaacctcaagtgactaccttcgatgatcaagataatcatcccacatccaccttatcatcaacacatgactacattgaaggtaacgaattggtgagtaaggttgacgatcgtccaattctcccattggattccaacaacaccgacaatgaaattgtcatattgcattgtgttgttgactcatgcatctcacctagcaccaagtatgtgtgtgaggatgatatggataaatgctctacttcctatagtacttgtggaactaaccttttaaaggaagaagtaaatgaacgccattggacaagtgaagaatccacctcatcaagatgctcatcttctatttccgaagattatgcttgctttatgggtgaagatggtgactccgagtttgatcacttgagcaagaaggatataacaatggtgatcaagctcatggaagccattgagaagcaacaagcatgcactatcaagaagaatggagaaatcgtgagtctaaccgaagaactcaagaaacttaagaattttcattcttcttagactatgaggtatgaaaaattggaaaatgaatttgcttgtgccactaattctattgcttgtgtagcatctttggagaagcaaaatcaagagctcaaatctcaacttgatgagatcactaacaagtatgtggatttacaagaaagacatgatgaacttttgtgttctcatgagaatcttgtggattctcatgctatgctagaggtatctcatgaggtgataattgcaatggtaaaatcgtatgagcctcatgttcaagttgatctcacttgtactaacccttgttgctcacaagcaaatatttccccgagcactatatgtgatttggattgtgtaggcaaaagggagaagcaaatagatcatggacttgtgtgcattgctcaaccttctcaagataaccgtgagggcatggtgaagaatcttgaggagggatcaaccgtggcttgcaccaagatccatcaaagggatagcaagtccatcaatgcttataccaagggacgaaatcaaaagatgatcaagaattccattacttgcttcaagtgcaagaaagtgcgacatcatgttagaaattgcccttggaagaaaggaaataagttgatcaagaagaaggacattcctcacatcaagtgcttcaagtgcaccgaagtgggacactttgcctccaaggtctccttgcacattggatgaacgatgtaaaacatcaagtgagaggcaaacaagcaaaccgagaaaaatatataagcaaaagtcgactttgctataattgctgggcaaagggacatattggtaaaaatagtcccatgggtaacattcctaagccaagtctctcatttgattataatttgcttaggaatgccaaaaatgatatttgtgctactaggatgatttgttcgccacacactagcacaaaggccatttgggtgtctaagtctcttgtgactaacctttatggacccaatgttgttggggaccaaaatgtgctaaaattttattgtggaaccaaaggcttcggtaagaccgctcgatttgcaatcaagctcatctatcaccatgccatcgaccccggagaccccaagaagagcacaagcactatcaggatgtagactgtgatcaaggagttaaacatgttcgtgatggaaaagcttaagttctttctcgggattggaatcaaggaagagatttcatcaagcccat

SEQ ID NO: 15638 - DNA, 1743 bp, Oryza sativa
  Clone ID: TFbOSC400390j.C1.o65.fg
atggctgacaatgagaaaggcaataaggtcagaagtcaggacattggtacctcaagctcccgagtgaatgaagcaccagacaccagttgtgtggcagtggtccaacacctgattaaccagaacaaattgcttatagagatactacagcagcatcggatgccaattttgaacccgagtcagatgcaacctcaagtacagttggaggcagtccaagcactcacaccacaagtcagcgcaccgccaacatcccagaaggcccctcatgccatgccacatgttgacccaaaagaagcaagtatcatctgttttatgtgtgatgagcaagggcactacgcaaggaactgtcctcagcagaaaagaaaagcaccaatgcgaaccgaagatgaagtccgtaagatgatcattaccagcacggaatggcctccaccaggaatgacaaaacatcagagaagaaattccttccgaggtgcacaacagttgacagagcatcttttagctaatggaggtagagtgtctgatagtgaagattcagatcaagtctcctcagatgatgaagatgaagtagaacttaaggcatgccctcgttgtggagaaatcggtcatgttgccagctcgtgtgcctctacatgcgttcattgtgaggaagaccatctacccgacaggtgtccaacgagcaggatcacttgtttcttttgtgaaggaactgatcatgtaccaaaagattgtcaattcagttttctgctgacaaagaagatggccaaccaacccgccagttccaacggagagaagcatcaaggcaacacaaatccccgccaagatcaccgtttcagcctaactccagtgccaggacagaggaatcgaaatgagaaaagaaaatgccgagtccgggaagacatctgttgcttcaattgtcaaggaatgggtcatttcgccgacaagtgcccaaaaccgagaaacatagctgccggcacgtcagtccacgcaactccctgcaatcagaagcttgctcctcaacgaattgtcatccatgcatcccgaagcagtcctatagcccgcgttgcaacagctccaattccaatgaatgcactaccacaaggtgtcaatgctcaatttcagccccagccaccagctgacaagacaggggccagtatctgcgttgtacctttggaagttccaatacagcagctgagaaatcaagtacaagatgaagaacccgagttgaagaagggcattattccaaaaactgtccccaaccaaggcaaaatcgacctccacattaccgccaatttacacgaagcagacattccaatcgtattgtggtcactggagcaaacgccgtacccgtttcaccgaaaggcagcaagccaaaggacctcatcgtccccagaagcgtccgcaatccacattaaagaataccacctgttagacataagccgaaagaagattgataaaaagagattggcaaagatgttctctagcatgaaagaagtgggccgaaaggttgactccgaagatatgaatcatgagaagttctggaacggaagcatcactgcactaccgcaacctagtctgagtcagccaaaaggtgcaccctggtccaagtcaggtgaagagaagattccatccgcaacaggaggtcaagccaagcagttccgagtggtaaagttttgctggaagttcgtcaagacgcaacggaagaagtcagacaagaagagaagaccgcccaacctatcttcttgctag

SEQ ID NO: 15639 - DNA, 2170 bp, Oryza sativa
  Clone ID: TFbOSC13329j.C1.o2.np
ctgtggttgtactcattattccctagcgccgccgccgccgcggattccgccgcatcccgccgtccccgcgcgcattaaagagaggggaattactccccgcgtttccctctcccgattccccctcttttccctctctctctccctcggattcgtccggattcatcccgcgaagttcgccggcgtcttcaatggcgcccgagatctccgcgcgcggtttcctctctccccggccgcgctctccccctcccgttgctataaaatcgtccctcgtgcttcgctcttccgtttccgccgctcgccgctcgctctcgccgtcggtttcgtgcccgcgccgtgctcctctctctccgccgtcgccgccgagctccgtttcgccgccgtcgtcgctccggtcctcctcccgactcggcgccacctccatcggcttcgccgagtggttgccgaccccgtccgccgctccgcttcgcccgccgaccgccggagcaccgtcgacatcggcatcccgaaccgcgccgccgcttttctccactccggccgtcgtttccgccgtcctcgttgtcccggggtgagccgtggaccgtccctctcgcttccctctcctctccgctctctcgggcgccgctccgccgcgccggtggtcgccggcggtgaccatcggggcgcgggcgcgccgctcccgtcggccgtgccggcgaggccgccttcgggcgcgccccgcggctgccaggtgggcccggccgtcagccgcccgcgcccgcgggtgcggctgacgcgtgggacccacggcgccgaccgccgccagccgcgtgctcccggtccaccgtggaccgagaggctgacgcgtgggccccacttcccgtggacccgggcaaatgaaggctacacgagctgcggcccgatggctgacaatgagaaaggcaataaggtcagaagtcaggacattggtacctcaagctcccgagtgaatgaagcaccagacaccagttgtgtggcagtggtccaacacctgattaaccagaacaaattgcttatagagatactacagcagcatcggatgccaattttgaacccgagtcagatgcaacctcaagtgcagttggaggcagtccaagcactcacaccacaagtcagcgcaccgccaacatcccagaaggcccctcatgccatgccacatgttgacccaaaagaagcaagtatcatctgttttatgtgtgatgagcaagggcactacgcaaggaactgtcctcagcagaaaagaaaagcaccaatgcgaaccgaagatgaagtccgtaagatgatcattaccagcacagaatggcctccaccaggaatgacaaaacatcagagaagaaattccttccgaggtgcacaacagttgacagagcatcttttagctaatggaggtagagtgtctgatagtgaagattcagatcaagtctcctcagatgatgaagataaaatagaacttaaggcatgctctcgttgtggagaaatcggtcatgttgccagctcgtgtgcctctacatgcgttcattgtgaggaagaccatccacccgacaggtgtccaacgagtaggatcacttgtttcctttgtgaaggaactgatcatgtaccaaaagattgtcaattcagttttctgctgacgaagaagatggccaaccaacccgccagttccaacggagagaagcatcaaggaaacacaaatcctcgccaagattccagtttcagcctaactccagtgccaggacagaggaatcgaaatgagaaaagaaaatgccgagtccgggaagacatctgttgcttcaattgtcaaggaatgggtcatttcgccgacaagtgcccaaaaccgagaaacgtagctgccggcacgtcagtccacgcaactccctgcaatcagaagcttgctcctcaacgaattgtcatccatgcatcccgaagcagtcctatagcccgcgttgcaacaactccaattccaatgagtgcactaccacaaggtgtcaatgctcaatttcagccccagcaaagaattgttgtagatggaagaagttgtgtctctccccgacctactccaggcctagccaagggcaatcaacctccggagggcgataccaagcagaagaccgtcatccgcttcaaccagcaatcagaaggaagcttgcatgcctgcagg

SEQ ID NO: 15640 - DNA, 3708 bp, Oryza sativa
  Clone ID: TFbOSC414006j.C1.o3.fg
atggctggttttgccgatgcactgaggccggataaattcaccggtgtgcattttaagagatggcagatcagggtcactctgtggctgacagctatgaaatgcttctgggtgagtactggcaaacctgaaggagttcttactgctgaacagcagaagcaattcgaggaagccactactctctttgtgggatgcattcttagcgttcttggcgatcgtctggtcgaggtgtatatgcatatgaccgacgctaaggagttatgggatgcactgaatactaaattcggtgctactgatgctagcaatgatctgtatatcatggagcagtttcatgactacaaaatggctgacaaccattctgtagtcgaacaggctcatgagatacaaaccatggctaaggaactcgaactccttaagtgtgtcttacccgacaaatttgtggccgggtgcattattgcaaaactacctccatcttggaggagtttcggtactgcactcaaacacaagagacaggaatactccgttgaggggttgattgcgtctcttgatgttgaggagaaagctcgggaaaaagatgccgcgtctaagggcgatggtgggcagtccagtgccaatgttgtgcacaaggcccagaacaagagcaaggagaaatacaaagctcagcagaccaccaacttcaagaagcagaagaagaacaacaacaatcctaatcaggatgagaggacttgctttgtgtgtggccaagttggtcatctggctaggaagtgtccacaccgcaaggggatgaaggcacctgcagggcagacttctaagtctgctaatgtgaccattggcaacactggagatggaagcgggtatggtcgcacggggttccaccgtcctaatggggaatgggtcacatgcttctgttcatggtgttggcacggtagatctgaagtttacttcgggaaagatcgtgcagctgaagaacatgcagcatgtcccttctatcgacaggaatcttgttatgagtgcggaggcctgttccgcttttccctttctgatttctgcaataagtatgtgaaccatatttgtggcagtgtggatgatgaggctaatgtttggcattcacgtttatgtcatattaattttggcttgatgtctcggctttccagcatgtgtttaattcctaagtttttcattgtcaaaggttctaagtgccatagttgtgtgcaatcgaagcaacctcgcaagcctcacaaggctgccgaggagagaaacttggcaccactagaactcctacattcagatctttgtgaaatgaatggggtgttgacgaagggtggaaaacgatatttcatgacattgattgatgatgctactagattttgctatgtgtacttgttgaaaacgaaagacgaggctctagactattttaaaatttataaggcagaagttgaaaatcaacttgacagaaagataaaaaggcttaggtctgatcgtggtggagagtttttctcgaacgagtttgacttattctgtgaggaacatggcatcatacatgagaggacgcctccctattctcccgagtctaatgggattgctgaaaggaagaaccgcacactgactgacttggtgaatgccatgttggacaccgcgggactgcctaaggcatggtggggggaggcattgttgacctcaaatcatgtgttaaacagagttcctaacagaaataaggacaaaacaccatatgagatatggattggtagaaaaccatcactttcttatttgcgcacatgggggtgcttggcgaaagtcaatgtaccaataacgaagaagcgcaaacttggacctaagactgtggactgtgtttttctgggatatgctcatcatagcattgcctatagatttttaatagttaaatccgaggtaccggacatgcatgttggtacaattatggagtctcgtgatgctaccttccttgagagctttttcccaatgaaggatacacatagtggttcgaaccaaccctctgaaataattcccagttcaatcacaccaccagaacaaactgaacatacacatgaacttgtgtctgaggaggatgtcagtgaagctcctcgaaggagtaagagacaaaggacggctaagtcttttggtgatgacttcactgtgtacctcgtggatgacactcctaagtcaatttcaaaagcatatgcatctcctgatgcagactactggaaggaggctgtccgtagtgaaatggattccattatcgctaacgggacttgggaggtgacagagcgaccctatgggtgtaaacctgtggggtgcaagtgggtgttcaagaagaagcttaggcctgacggtactattgaaaagtacaaggctcggcttgttgctaagggctatactcagaaagaaggcgaagatttctttgacacttactcacctgttgctagattgaccacaattcgtgtgctactttccctagcagcctcacatggtcttctcgttcatcaaatggacgttaagacagcttttcttaatggagagctggatgaggagatctatatggatcaacctgatgggtttgtagttgaaggtcaagaaggcaaagtgtgcaaattgttgaagtctttgtatggtctgaaacaagctcctaagcaatggcatgagaaatttgacaaaacattgacatctgcaggctttgcagtcaatgaggcagataaatgtgtgtactatcgccatggtgggggtgaaggagttattttgtgcttgtatgttgacgacatactgatatttgggacaaaccttcaggtgataaatgaggttaaatcattcttgtctcaaaattttgatatgaaagatttgggagtagctgatgttatcttaaacattaagctaattagaggtgagaatgggattaatctcttgcagtcccattatgtggagaagatcttgaatcgctttggctacattgatagtaagccttctccaacaccttatgatcctagcttgttgcttcgcaagaacaagagaattgctaggaatcaactggaatactctcaaatcattggctcgttgatgtacctggctagtgcaactaggcctgatatctcctttgctgtgagcaagttgagccgatttacttctaatccgggagatgatcactggcgtgcgcttgagcgagtaatacgctatctgaaaggtactgtggaattggggcttcactatactgggtatcctgcggtactggagggtcatagtgattctaactggatctctgatgtggatgagatcaaagccactagtggatatgttttcacactgggtggtggtgctgtttcatggaggtcttgcaaacagacaattttgacgaggtcaaccatggaagcagagctaacggcactggatactgctactgttgaggcagaatggctgcgtgatctattaatggatcagcctgttgttgaaaaaccggtgccggctatccttatgaactgtgacaatcaaacggtaattgtcaaagtgaatagttctaaggataatatgaaatcgtctagacatgtgaaaagacgattgaagtctgtcaggaaattaagaaactccggagttataacgttggattacatccaaacagcgagaaacctggcagatcccttcacgaagggactatcacgaaatgtgatagacaatgcatcgaaggagatgggtttgagacccatgtga

SEQ ID NO: 15641 - DNA, 1868 bp, Oryza sativa
  Clone ID: TFbOSC13321j.C1.o1.fg
ctcctggtttggaatggtgtattcctggtttggagatagaactgtgcagccgggatggttgttcagaacgattgggcctatgcaacaggatgccgcgctacaagcctgagtacttgttcggtactgaaggatttgtccaggagttgcgtacgatgtccttcctcatagggtttggaattgcccctttgtatgcccagatcccgcatgatcgtgatgaagaaaaatgcggagtcaaagtcaccttgaatagcaaccgtgaagatattccatcagtgatgttcgaggctggaggaggaagctacattcatgcttgtcaggaggtggcaaggatcgccataggagaactccgggaaagctataatgatcggttggccgacaccgagtaccgctaccatcctcgtcaaccccagggaagtgattgtggcagctactttgaaccggctgggatcgagaacgacgctaccacaaggcatttggttgagatgctatgggctatggatgaaacccgcgctgagattgtaatagccgctcaagatcgtgaagaccggaatagggggaagatctgcaagctagaagacaaggtggatcatttggagaaggagctagccgcgttgaagggagaagcaccaccgcagaaggccagagtccgtctaccgcaaggaagagagctctattcgtccctcgctatcagttggcaccaaaggttcgtctggtggaaaaagaagctaccccagcggatcctccggttgtcaatcactactaatcccgtcgaagctggtgattggttgcacgccatagagaagaagttggatctgctccagtgcacagaccaggagaaggtctccttcgcatcacaccagctgcatggccctgcttcggaatggtgggatcacttccgcctcaacaggactacccctgaacctatctcttggcttgaattcaacgctgctttccggaagacgcatataccctcgggagtggtgtctctcaagaagaaggaattcaggtcactcacacaaggttcccgcactgtcaccgagtatctgcacgagttcaatcgtctggctcgttatgctccggaagaggtgcgcactgatgaagagcgtcaggagaggttcttaaaaggacttaatgatgaactttcctacccacttatgactggagattatcatgatttccagaagttagtggataaagctattcgccaggaggacaaatacaaccgcatggagcagaagaaacgccggattgctcatttcaaggcacagcaggggaatagtcaaaggccacgccttactttgggaccccagtccatgccacagggagctccacgccctgttgcatctccaacacagcaacagcctgccaagagggagcaaggcagtaagcccggggtgtgcttcaactgtggagacccaggacattacgctgacaagtgtccgaagccccgccgcgtgaaggtcgtccctgcccagaacaacccctccgcacccgcagccaaggctcgtgtcaaccatgttgctgctgcagaagctcaaggtgctccagatgtgattttgggtacattccctgttaactcagttcctgcaaccgtgctttttgattctggtgctatgcattcatttttatccatgagttttgcgggaaatcaagggatggaggtaaaggaacttagacgtcctttgatggttagtactccgagtaaccaagcactctcctcacaacgtagcccctctgtcagaatagagatccaaggtgtacctttcctggccaaccttattctgttagaatccaaagaccttgatgtcatcctagggatggactggttagccagatataaaggtgtgatagattgtgctaatagaaaa

SEQ ID NO: 15642 - DNA, 917 bp, Oryza sativa
  Clone ID: TFbOSC15264j.C1.o1.np
gcgccattcgccattcaggctgcatgcaagcttgcagcctagtgtgcaaagcagagagcccaatgaagagaatccattgaatcccgggaattgctttcctcctagcctttcgtaccacgtggggtcacgtactaagcacgccaaaggcaagaagagtaagaatcagaagagaaaagcgccgatgcgaactgaagaagaagtacgtaagatgactattaccagcaccgaatggcctccagcagggataactattcctagacgtcaaagaggaaataccttccgaggtgcacggcagttgacccagcacctcctaagccatggtggcagagtatctgatagtgaagggtcagatcaagtctcctcggattatgaatatgagtccccccgacgtctcggcgaggaagagatggaattaaaagcatgcacccgttgcggagaaattggacacattgctagcatgtgtctcacactctgccctcattgtgaagaagaccatccaccaggggagtgtcccacccgcaaggtcacatgttttctatgcgaaggtacaaaccatgtgcccaaggattgccaactcagtgtgttgttgaccaagaccgcagaaatccaacgaacaaccctacgattgtctcatcagctagtcagctccaacagcaacctcgacgatatcatccacagcaccaatgctcctcctgctgcacctgactctgcaataaatcatagcaataataccttcagcaccaaccattctctgcactgacagcctcagcaatgaattgtcgtcgatggaagaagttgtttctctccccgacctactccaggccgagcgaagggaaatcaacctcaggagggtgataccaagcagaagaccattatccacttcaaccagcaatcagaaggaatttttctcctgtgaa

SEQ ID NO: 15643 - DNA, 672 bp, Oryza sativa
  Clone ID: TFbOSC15276j.C1.o1.hg
atggctatggattactgggatttccagcagttgatggacaaggcgattcgccaagaagacaagtataataggatggaacagaaaaagcgtagggctgctcatttcaaggcacaacagggtagtagccagaggccgcacattgctttgggacctcaagctgcaccatacccacagggaggatcctcttcagttgctcgccctcaacgccagttctacaacaacaacactggtaatcgcagcaacgataatcgtaatatggtcactcgtcctgtagcagctccaactcagaatcatcctgtcaggaaggaacagggaagcaagccaggggtgtgcttcaattgtggtgatccaggacattatgctgataagtgtcccaagcctcggcgtgtgaagaatgctcctgttcagaacaactccaatgctccagcaccgaaggctcgtgttaatcatgttgcagccgcagaagcccagaatacacctgatgtggttttggaggaggagtgcttcaatgaagtggctaaacagccgggcccacatgtcagtgactcggcggcaagagaagcagaggcagcaggagagcaacggcgaccaacagcgttcgtggcggcgtattggcttcatcatatgtgggcgtcgttctgctgggacctaggcgatgtcagtggcgcaatg

SEQ ID NO: 15644 - DNA, 2040 bp, Oryza sativa
  Clone ID: TFbOSC15283j.C1.o3.fg
atgggggtcgctggggagtccattgcctctggttttgagggggagattatgatccaggaacggtgcactgtgatgccgccccattcaccgagaaatttgatcaaggtgttaggattcgtcagggagctgaggttgatggcttttgagtatcatcctcacaagcctcatggtcaagattatggaacttacacctatcctgatggtgaggagagtgccactctgatgcaggcggtgcatatgcttagttctatgtatgcagtaagtgtggagcgagacaaagccgctcatgacagggaaaactggaatcgaggcaagatttgcaagttggagagtaaggtgtaccgtctacagaaggaattagctgagcttaaaggagagacgccgccgccaacacccaagcttcacctcaccgcaaggaagagaacctgtccaccacctcgtctccagttagcttcgaagcttcgcgtgatgggagatgctgtgccagatcgtgctgaacctgtcatccacgtcttaagtgatgaggaagaagaggaatacccagaagaaagaatggtgaacacgcgcactggaagtggaagtggagctgctaacaatggaggagattccacgctagctcagattttggcccaacaaacacaactgatcaatctgttagtgcagcaggcacagaatcagcaggcaaacaaccagaaccagaatcaacccccacctccccaaaacaagttggcagatttcttacgtctgcatggtcccgctgctgaatggtgggatcactttcgccaagccagggctgaaggagaacctatcacttggcaggaattcacggccgctttcaagaacacgcacataatgacaggtgttgtagctctgaagaagagagaatttagagcgctcaaccagggatctcgttcggtcactgagtacctccatgatttcaatcgtttagctcgctatgctccaaaatatgttcgcaccgatgaagaacgtcaggagaagtttttggagggactgaatgatgagttgtcttatgctttgatgtctacggatttccgggatttccagcagttagtggacaaggctattcgtcaggaagacaagtacaatcgaatagagcagaagaagcgcagggctgcccaatttaaggctcaacagggcagtaaccagaggtcgcgtctcgttacgggacctcaagctacatcataccctcaaggaggatcttcgtcagttgctcgccctcaacgccagttctacaacaacaatactggtaatcgtggcaatgacaaccgcaacgtggtcgctcgtcctgcagcaactccagctaagaaccagcctgtcaggaaggaacagggaagcaagccaggggtgtgcttcaattgtggtgatccagggcactatgctgataagtgtcctaagcctcggcgtgtgaagaacgctccagccccgaacaactctaatactccagcaccgaaggcacgtgttaatcatgttgtagcggcagaagctcagaatgcaccagatgtggttttggatctagatgttatcttagggatggattggttatctcgtcacagaggagttatagattgtgccaaccgtaaggtgactttaaccagtagcaatggggaaaccgtttctttctttgtgtcctctcctaaatatcatggtgtgatcttaaaccaagttgctctacaagagatccccatagtacaagactacccagacgtgtttcccgaggatttgccaggtatgccacctaagagagacatagagtttcggatatacttggtacctggaaccaaccctatccataagagaccatacagaatggcagctaatgagttagctgaggtgaagagacaggtgggtgattttcttcagaaaggatacatcagacccagtacttcgccatggggagcaccagtcatctttgtggagaagaaagatcatactcagagaatgtgcgtggattattcagaagaattcagtggagcaatcattcagaagaagaagccacttgggagcgagaagatgaattga

SEQ ID NO: 15645 - DNA, 3533 bp, Oryza sativa
  Clone ID: TFbOSC15295j.C1.o2.fg
atggctcctggtttggaatggtatattcctggtttggagatagaactgtgcacccgggatggttgttctgaatggttgggcctatacaacaggatgccgccccattcaccgagaaatttgatcaaggtgttaggattcgtcagggagctgaggttgatggcttttgaggtaggctatgaagttgctcctgagtatcgccggatttcccatgaccccaacgaggagaagtgtcgtgttcgtgtgacgttggctagtgatcgtgaagaccttccgtccattaagttcgaaactagaggaagatcgtacaaccatgcttgtcaagaagcagctttggtggccattggagagttgcgtcaacgctttgaagaagagttggattcatcagctttccagtatcatcctcacaagcctcgtggtcaagactatggaacctatacctgtcctgatggtgaagagagtgccactctgatgcatgcggtgcatatgcttagtgctatggatgcagtaagtgtggagcgagacaaagcagctcatgacagggaaaattggaatcgaggcaagatttgcaagttggagagcaaggtgtaccatctacagaaggaattagctgaacttaaaggagaaacgccgctgccaacacccaagcttctcctcaccgcaagaaagagaacctgtccgccacctcgtctccagttagcttcaaagattcgcgtgatgggtgaagttgtgcccgatcgtgctgaacttgtcatcgacatcatggtgaacacgcgaactggaagtggaagtggaagtggaagtggagctgctaacaatggaggagatcccacgctagctcagattctggcccaacaaacacaactgatcaatctgttagtgcagcaggcacagaatcagcaggcaaacaatcagaaccagaatccacccccacctccccaaaacaagctggcagatttcttacgtcagttggtggacaaggcgattcgtcaggaagacaagtataaccggatggagcagaagaagcgcagggctgcccaattcaaggcacaacagggcagtaaccagaggccgcgtctcgttacggaacctcaagctccatcgtaccctcaaggaggatcttcatcagttgtccgcccccaacgccagttctacaacaacaatactggtaatcgtggcaatgacaaccgcaacatggttgctcgtcctgcagcaactccagctcagaaccagcccgtcaggaaggaacagggaagcaagccaggggtgtgcttcaattgtggtgatccaggacattatgctgataagtgtcctaagcctcggcgcgtgaagaacgctccagccccgaacaactccaatgctccagcaccgaaggcacgtgttaatcatgttgcagcagcagaagctcagaatgcaccagatgtggttttgggtacgtttcctgttaactctatacccgcatctgtgctttttgattccggtgctacacattcctttttgtctaaaagttttgcgagcaatcatgagatggaagttattagtcttgggagacctttactagttaataccccaggcaatcaagtatcttcgacacagtattgtccttccgctactatagaaatagaagaagttcctttcccatcctcacttatcttgctagaatccaaagatctagatgttatcttagggatggattggttatctcgtcacagaggagttatagattgtgccaaccgaaaggtgaccttaacctgtagcgatggggaaaccgtttctttctttgtgtcctctcctaaatctcatggtgtgaccttaaaccaagtcgctctacaagaaatcccagtagtacaagactactcagatgtgtttcccgaggatttgccaggtatgccacctaagagagacatagagttccggatagacttggtccctggaaccaaccctatccataagagaccttacagaatggcagctaatgagttagctgagataaagaggcaggtggatgatttgcttcagaaaggatatatcaggcccagtacttcgccgtggggagcaccagtcatctttgtggagaagaaagatcatactcagagagtgtttatggaatatctggataagtttgtcgtggtgtttattgatgacattcttatttactccaagacaaaagaagaacatgaagagcatcttcgtctagctttagagaaactacgtgagcatcagctctatgccaagttcagtaaatgtgaattttggttgtctgaagtgaagtttcttggtcatgtcatctcatccggaggagtggcagtagatccaagcaatgtggagtcagtgttaaattggaagcaacccaagacggtttcagaaattcgtagtttccttggacttgcggggtactaccgcaggtttattgagaacttctcaaagatcgccagaccaatgactcgtctgcttcagaaggatgtgaagtataagtggacagaagattgcgagcaaagtttccaagaactgaagaaaaggctagtgactgcgcctgtgttaattctgcctgattcaaggaaaggttttcatgtgtattgtgatgcatcccgactcggtttgggttgtgttttgatgcaagaaggaatggtggttgcctatgcatctaagcaattacgtcctcatgagaataactacccgacgcatgacctagagttggcagctgtagtgcatgcattgaagatttggcgtcattatcttttcggtaaccgtacagagatgtatacggatcataaaagtttgaaatggttagagttgattaaagattatgatatggaaatccattatcacccgggtaaagcaaatgttgtagccgatgccctcagcaggaaaagctattgtaatatgtcagaaggtcgacatctaccttgggagttatgccaagaatttgaaaagctgaatttggggatagtcagcaaaggttttgtggctgctttagaagctcaacctaccttgtttgatcaagttagagaagctcaagggaatgatcctgacatccaagaaatcaaaaagaacatgagaagaggaaaagccatcggttatgtagaagatgagcaaggaactgtgtggttaggagaaagaatttgcgtacctgataacaaggagttgaaggataccatcgtgaaagaagctcatgaaactttgtattccattcaccctagaagcactaagatgtaccaagacctaaagcaacaattctggtgggctagtatgcgacgtgagatagcagaatatgtggctctatgtgatgtatgtcagcgagtcaaggctgaacatcagaagccagccggtctgttgcaaccattgaagattccagagtggaagtgggaagaaataggtatggattttataaccggtctacccagaacgtcggcaggacatgattctatttgggtagtggttgacagattgactaaagtcgctcatttcatacctgtcaaactgtcaaaacaacctacacggggaataaacttgcagagctatacatggccagagtg

SEQ ID NO: 15646 - DNA, 5129 bp, Oryza sativa
  Clone ID: TFbOSC15641j.C1.o2.np
agattccgacgtttccggagagtctgttttcgcaggagaagattttgaagagttccaaggccagcaaggcaactcctggtttggaatggtatattcctggtttggagatagatctgtacagccgggtatggttgttcagaaaggttgggcctatacaacaggatgccgcgctacaagcctgagtacttgtttggtgttgagggatttgtccaggagttgcgtacgatgtcctttgccataggatttgggactgcccttttttatgcccagattcctcatgatcgtcacgaagagaagtgccgagtcaaagtcaccttgaacagtaatagtgaagatatcccctcagtgatgttcgaagctggaggaagaaactacatccatgcatgtcaggaggtggcaaggatcgccataggagagctccgcaatcgctacagtgatcggttggccgacactgagtatcactaccatcctcgtcaaccacagggaagtgaccgtggcagctaccttgagactgaaggaattgagaatgatgctaccacaaggcatttggttgagatgctgtgggctatgatgaaacccgtgcagagactgtgttagcagctcaagatcgtgaagaccggaatcgtggtaagatttgcaagctagaggacaaggtggatcgtttggagaaggaactagccatgttgaagggagaagcaccaccgcagaaggccagggttcgttttaccgcaaggaagagagctctatttgtccctcgctaccaattggcgccaaagatggtgctcactcgcagcaacgggaatggccccaacaacaacaacaacaacaacaatggagagaatcccacacttgcccaagtcctggctcaacaggcacagcttatgaacatgatgatgcagcaactccagaaccagcagaaccagggaaataaccatgcacctccccagaacaagttagcagaatttcttcgtgtgaggccgcccactttctctagtaccactaatcctgttgaagctggtgattggctgcatgccatagaaaagaagttggatttgcttcagtgcaccgatcaggagaaggtctcatttgcatcacatcagttgcatggccctgcctctgaatggtgggatcacttccgccttaacaggacaactgctgaacctatcacttggcttgaattcaccgctgctttccggaagacgcatataccatcgggagtggtgtctctcaaaaagaaggaattcaggtcgctcactcaggggtctcgctctgttaccgagtatctgcacgagttcaatcgtctggctcgttatgctccggaagatgtgcgcactgatgaagagcgtcaggagaagttcttggaaggacttaatgatgagctttcttacccactcatgactggggaacagaagaaatgccggattgctcacttcaaggcacaacaggggaatagtcagaggccgcgtcttaccttaggaccctagaccatgccacagggaggttcttcgtctgttgttcgtccgcagcgtcagttcttcaacaacaatgctggcaacaacatccgcaatcaagctccacgccctattgcagcttcgacaccgcaacaacctgccaagagggagcaaggcagcaagcccggggtgtgcttcaattgtggagacccaggacattacgctgacaagtgtccgaagccccgacgtgtgaaggttgtccctgaccagagcaactctaccgtaccagcatcaaaggcccgtgtcaatcatgttgttgctgcagaagctcaagatgctccagatgtgattttgggtacgtttcttgttaacttagttcctgcaacagtgcttttcgattctggtgctacacattcattcttatctatgagttttgcgagaaatcatgggatggaagtagaagatcttagacgtcctttgatggttagtaccccaagtaatcaggcactctctttgcaacgtagcccctctgtcagaatagaaattcaaggagtaccatttctggccaatcttatcctgttagaatccaaagaccttgatgtcatcctagggatggactggttagccagacataaaggtgtgatagactgtgctaacagaaaagtaactctcaccagcaatgatggtcgagttgtaactgttcatgcattgtcttctgagtctttgagatcaaaactgaaccaaataactttggaagagattcctatagtccgggagtatcccgttgtgttcccagacgatttacctggtatgccgcctaaaagggatatagagttcagaatagatttggtaccaggaacaactccgatccataagagaccttatagaatggcagccaatgaattagcaaaagtcaagagacaagtagacgatttgcttcagaaaggatacatcagaccgagttcatctccgtggggagctccggttatttttgtagaaaagaaagatcatacccagaggatgtgtgtggactatcgtgcactaaatgatgtgactatcaagaataagtatccgctgcccagaattgatgatttgtttgatcagcttaaaggtgccaccgttttctccaagatagatcttcgatcagggtatcatcagttgagaatcaaagaggaagatatacctaagacagcttttaccactaggtatggattgttcgaatgtactgttatgtcttttggacttaccaatgcccccgctttcttcatgaacttgatgaataaggtgtttatggaatacctagacaacttcgtggtagtctttattgatgacattcttatctactcccgaaccaaagaagagcatgaagaacatcttcgccttgcactagagaagctacgagaacatcaattgtatgctaagtttagcaagtgtgaattttggttgtctgaagtgaagttccttggtcacgtcatctcagcaggaggagttgccgtcgatcctagtaatgtggaatccgtaaccaactggaaacaaccaaagacagtttcagagattcgccgtttcctaggcctcgcaggatattatcggaggtttatagagaatttttccaagattgctaagcccatgacacgactgcttcagaaagatgtgaagtacaagtggtcagaagaatgtgagcagagttttcaagagttgaagaatcgcttaatatcagctcctattttgattttacctgatccaaagaagggtttccaagtgtattgcgatgcatccaaacttgggttaggttgtgttctgatgcaagatgggaaggtggttgcctatgcatctcgtcagttacgtccgcatgagaagaactaccctactcatgatcttgagttagctgcagtggttcatgcgttgaaaatttgacgtcattatcttttcggtactcgtacagaggtgtacaccgatcacaagagtttaaagtatatctttactcagccggacctgaacatgagacaacggagatggttggaattaattaaggattatgacatgggaattcattatcacccgggaaaggctaatgctgtagcagacgctcttagcaggaaaggctattgcaatgctacgaaaggacgacagttgccattggaattatgtaaggactttgaaagattaaatttgggaattgtcagtagaggtttcgttgcagccttagaagcgaagcccactctaattgatcaagttagagaagcccaaattaatgatcctgatattcaagaaaccaagaagaatatgagaagaggaaaagctatcggtttcttggaagatgagcagggaactgtatggttgggcgaaagaatctgcatccccaacaacaaagatttaaaagatgtaattctgaaagaagcccatgatactttatactccattcaccctggtagtaccaagatgtaccaggatctcaaggaaagattttggtgggcaagtatgaagcgtgaaatcacagaatacgtagcagtatgtgatgtttgtcagcgagttaaggcagaacatcagaaacccgccggtttgttgcagcctttgaagattcctgaatggaagtgggaagaaatcggtacggatttcatcactggtctacccagaaggtcatcaggccatgactctatttgggtgatagtcgacagacttaccaaagtggctcatttcatcccagtaaagacaacctattccggaagtcggttggcggaattgtatatggcaaggattgtgtgtttgcatggcgtccctaagaaaatagtgtctgatcgaggcagtcagtttacttcaaatttttggaagaagcttcaggaagagatgggttctaagctgaactttagtactgcttatcatccgcagacagacggacaaaccgaaagggtgaatcagattttggaagatatgttgagagcttgtgctttagacttcggtggaagttgggataagaatctaccttatgcagaattttcatacaacaacagttatcaagctagtcttcagatggctccttacgaagcactgtatggtcggaagtgccgcactccgcttttgcgggatcaaacgggagaacgtcaggttttcgggacggatatcctaagggaagcaaaagagaaggtaaagatcattcaagaaaggttgcgtgtggctcagtctcgccataagagttatgccgacaatcgtcgcagagatttgagttttgacgaaggagattatgtgtaccttcgtgtcacgcctcttcgagaagttcatcgttttcacaccaaaggaaaattggcaccgcgttttgtgggaccttataagattgtcagtagaagaggagaggttgcttatcagttggaattacctcaatttttggcaggagtccataatgtgttccatgtgtcgcaattgaaaaagtgtttaagcgtacctaccgaagaagctaatcttgaacagatagaagtccaagaggatcttacctatgttgagaaaccaatccgtatcttggaaatagatgagagaagaaccagaaatcgagttatccgtttttgcaaagtccaatggagtaatcactcggaagaagaatcaacttgggaacgagaagatgaattgaagtcagctcatccgcatctgttcgccagttcttccgaatctcgaggacgagattctgtt

SEQ ID NO: 15647 - DNA, 4776 bp, Oryza sativa
  Clone ID: TFbOSC15717j.C1.o3.fg
atggcttttgaggtaggctatgaagttgctcctgagtatcgccggatttcccatgaccccaacgaggagaagtgtcatgttcgtgtgacgttggctagtgatcgtgaagaccttccgtccattaagttcgaagctggaggaagatcgtacagccatgcttgtcaagaagcagctttggtggccattggagagttgcgtcaacgctttgaagaagagttggattcatcagctttccagtatcatcctcacaagcctcatggtcaagactatggaacctatacctgtcctgatggtgaagagagtgccgctctgatgcatgcggtgcatatgcttagtgctatggatgcagtaagtgtggagcgagacaaagcagctcatgacagggaaaactggaatcgaggcaagatttgcaagttggagagcaaggtgtaccgtctacagaaggaattagctgaacttaaaggagaaacgccgccgccaacacccaagcttcgcctcatcgcaagaaagagaacctgtccgccacctcgtctccagttagcttcgaagattcgtgtgatgggtgaagctgtgcccaatcgtgctgaacctgtcatcgacatcataagtgatgaggaagaagaggaagaccctgaagaaagagagccagctactccagaggaagaagatccgtcgcttcgttccgacgcaaggcgggattacaccaccaatccagtagaagcaggagattggctgcatccggtggagaagaagttggatttgatccagtgtactgagcaggagaaagtttcttttgcttcgcatcaattgcatggtcctgctgctgaatggtgggatcattttcgccaaggcagggctgaaggagagcctattacgtggcaggaattcacggccgcttttaagaagacacacataccaacgggtgttgtagctctaaagaagagagaatttagagcactcaaccagggatctcgttcggtcaccgagtacctccatgatttcaaccgtttagctcgttatgctccggaagatgttcttaccgatgaagagcgtcaggagaagttcttggagggactgaatgatgagttgtcttatgccttgatgtctacggatttccgggatttccagcagttggtggacaaggcgattcgtcaggaagacaagtataaccggatggagcagaagaagcgcagggctgcgcaattcaaggcacaacagggcagtaaccagaggccgcgtctcgttacgggacctcaagctccatcgtaccctcaaggaggatcttcatcagttgtccgcccccaacgccagttctacaacaacaatactggtaatcgtggcaatgacaaccgcaacatggttgctcgtcctgcagcaactccagctcagaaccagtccgtcaggaaggaacagggaagcaagccaggggtgtgcttcaattgtggtgatccaggacattatgctgataagtgtcctaagcctcggtgcgtgaagaacgttccagccccgaacaactccaatgctccagcaccgaaggcacgtgttaatcatgttgcagcagcagaagctcagaatgcaccagatgtggttttgggtacgtttcctgttaactctatacccgcatctgtgctttttgattccggtgctacacattcctttttgtctaaaagttttgcgagcaataatgggatggaagttattagtcttgggagacctttactagttaataccccaggcaatcaagtattttcgacacagtattgtccttccgttactatagaaatagaagaagttcctttcccatcctcgcttatcttgctagaatccaaagatctagatgttatcttagggatggactggttatctcgtcacagaggagttatagattgtgccaaccgtaaggtgactttaagcagtagcaatggggaaaccgtttctttctttgtgtcctctcctaaatatcatggtgtgatcttaaaccaagttgctttacaagagatccccatagtacaagactacccagacgtgtttcccgaggatttgccaggtatgccacctaagagagacatagagtttcggatagacttggtacctggaaccaaccctatccataagagaccatacagaatggcagctaatgagttagctgaggtgaagagacaggtggatgatttgcttcagaaaggatacatcagacccagtacttcgccgtggggagcaccagtcatctttgtggagaagaaagatcatactcagagaatgtgcgtggattatcgagcgttgaatgaggttactatcaagaataagtatcctctacccagaattgatgacctgtttgatcaactagaaggtgctacagttttctccaagatagatctccgttctggatatcatcaacttcgaatccgtgaggaagatataccaaagaccgccttcacaactcggtatggtttgttcgaatgtaccgttatgtcatttggactcactaatgccccagcctttttcatgaatctgatgaacaaggtgtttatggaatatctggataagtttgtcgtggtgtttattgatgacattcttatttactccaagacgaaggaagaacatgaagagcatcttcgtctagctttagagaaactacgtgagcatcagctttatgccaagttcagtaaatgtgaattttggttgtccgaagtgaagtttcttggtcatgtcatctcgtctagaggagtggcagtagatccaagcaatgtggagtcagtgttaagttggaagcaacccaagacggtttcagaaattcgtagtttccttggacttgcggggtattaccgcaggtttattgagaacttttcaaagatcgccagaccaatgactcgtctgcttcagaaggaagtgaagtacaagtggacagaggattgtgaacaaagtttccaagaactgaagaaaaggctagtgactgcgcctgtgttaattttgcctgattcgaggaaaggtttccaagtgtattgtgatgcatcccgactcggtttgggttgtgtgttgatgcaagaaggaaaggtggttgcctatgcatctaggcaattacgtcctcatgagaataactacccaacgcatgacctagaattggcagctgtggtgcatgcattgaagatttggcgtcattatcttttcggtaaccgtagagagatgtatacggatcataaaagtttgaagtacattttcactcaacctgatttgaacatgcgtcagcgaagatggttagagttgattaaagattatgatatggaaatccactatcacccggggaaagcaaatgttgtagccgatgctcttagcaggaagagctactgtaatatgtcagaaggtcgacatttaccttgggagttatgccaagaatttgaaaagttaaacttggatatagtcagcaaaggttttgtggctactttacaggctcaacctactctgtttgatcaagttagagaagctcaagtgaatgatcttgatatccaagaaataaaaaagaacatgagaagaggaaaagccatcggttatgtagaagatgagcaaggaactgtgtggttaggagaaagaatttgcgtcccagaaaataaggagttgaaggatactatcatgaaagaagctcatgaaactttgtattccattcaccctggaagcactaagatgtaccaagacctaaagcaacaattctggtgggccagtatgcgacgtgaaatagcagaatatgtggctctatgtgatgtatgtcagcgggtcaaggcagaacatcagaagccagccagtctgttacaaccgttgaagattccagagtggaagtgggaagaaataggaatggattttataaccggtctacccagaacgtcggcgggacatgattctatttgggtagtggttgataggttgacaaaagtcgctcacttcataccggtcaaaacaacctatacggggaataagcttgcagagttatacatggccagagtggtatgtttgcatggtgttcctaagaagatagtgtcagatagaggtagccagtttacttcgaagttttggcagaaattacaagtagagatgggtacccgtttgaatttcagtaccgcttatcaccctcaaacagatggtcagacggaaagagtaaaccaaattttagaagatatgttgagagcctgtgttctagattttggtggaagttgggataagaatttgccgtacgcggaattctcatataacaacagttatcaagctagtttgcaaatggctccgtatgaagcattatatggccgaaagtgccgtacgccgctcctttgggatcaaaccggtgaacgtcaagtttttgggacagacatattgcgcgaggcagaagaaaaagtgaagattatccaagaaaggttgcgcgttgctcagtcacgtcagaagagctatgccgacaatcgtcgcagagatttggctttcgaagaaggagattatgtataccttcgggttacgccattacgaggtgttcatcgtttccagaccaaagggaaattggcgccgcgtttcgtgggaccttttaagattgtgagtcgaagaggtgaagtagcttatcagctagagttgcctccgtcaatggcgggaatacatgacgtgttccatgtgtcgcagttgaagaaatgtttacgtgtacctacggaggaagcagatcctgatcgtatagagcttcaggaagatttaacttatgtggagaagccagtcagaatcttggaaaattttctgggaattatttga

SEQ ID NO: 15648 - DNA, 1107 bp, Oryza sativa
  Clone ID: TFbOSC19350j.C1.o5.gm
atgtctacggatttccgggatttccagcagttggtggacaaggcgattcgtcaggaagacaagtataaccggatggagcagaagaagcgcagggctgcccaattcaaggcacaacagggcagtaaccagaggccgcgtctcgttacgggacctcaagctccatcgtaccctcaaggaggatcttcatcagttgtccgcccccaacgccagttctacaacaacaatactggtaatcgtggtaatgacaaccgcaacatggttgctcgtcctgcagcaactccagctcagaaccagcccgtcaggaaggaacagggaagcaagccaggggtgtgcttcaattgtggtgatccaggacattatgctgataagtgtcctaagcctcggcgcgtgaagaacgctccagccccgaataactccaatgctccagcaccaaaggcacgtgttaatcatgttgcagcagcagaagctcagaatgcaccagatgtggttttggggtattaccgcaggtttattgagaacttttcaaagatcgccagaccaatgactcgtctgcttcagaaggaagtgaagtacaagcaattacgtcctcatgagaataactacccaacgcatgacctagaattggcagctgtggtgcatgcattgaagatttggctttcgaagaaggagattatgtataccttcgggttacgccgttacgaggcgggtgatcaggtttttgaggagtgcttccgcatgactgctcctcgtcttctgttcgtcgtcgtcgtctgctacaccatgtctggtgcctccgcagctgccgcgcctagagatggaggcgcactaggagccggagccgctgcgaacgaaaacatcaacggaggcagttctgcctcacaatccagcggagggacattcacagggttaataaaaggtgcaccctgctgtgacgagcccagggtggcctcagccctgaagtccggtggaggcagcggtggcggcggccacgacctcccctccaccaaatctggccacaggggaggcggcgagatgggaggcagcgatggcgcctgcgtcctcccctccgccagatccggtggtgttttcccaatcggggctcattag

SEQ ID NO: 15649 - DNA, 4116 bp, Oryza sativa
  Clone ID: TFbOSC20906j.C1.o1.fg
ctccttgtttggaatattcctggtttggagatagaattgtgcagccgggatggttgttcagaatggttgggcctaggcaacaggatgccgcgcttcaagcctgagtacttgtttggtgttgagggatttgtccaggagttgcgtacgatgtcctttgccataggatttgggactgcccctttgtatgcccagattcctcatgatcatgatgaagagaagtgccgagtcaaagtcaccttgaacagtaatagtgaagatatcccatcagtgatgttcgaagctggaggaggaaactacatccatgcatgtcaggaggtggcaaggatcgccataggagagctccgcgatcgctacagtgatcagttggccgacactgagtatcgctaccatcctcgccaaccccagggaagtgaccgtggcagctaccttgagactgaggggattgagaatgatgctaccacaaggcatttggttgagatgctgtgggctatggatgaaacccgcgcggaggttgtgctagcagctcaagatcgtgaagaccagaatcgtggtaagatttgcaggctagaggacaaggtggatcgtttagagaaggaactagccgcgttgaagggagaagcaccaccgcagaaggccaggattcgtcttaccgcaaggaagagagctctattcgtccctcgctaccaattggcgccaaaggtccgtgtggtggagaaagaagttaccccagccctagcggatcctccggtcgtcaatatggtgctcactcgcagcaatgggaatggccccaataataacaacaacaacaatggagagaatcccacgcttgcccaagtcctggctcaacaggcccagcttatgaacatcatgatgcagcaactccaaaaccagcagaaccagggaaataaccatgcacctccccagaacaagttagcagaatttcttcgttgcactgatcaggagaaggtctcatttgcatcacaccaactgcatggccctgcctctgagtggtgggatcacttccgccttaacagaactactgctgaacctatcacttggcttgaattcaccgctgctttccggaagacgcatataccatcgggagtggtgtctctcaagaagaaggaattcaggtcgctcacccagggatctcgcacggtcaccgagtatctgcacgagttcaatcgtctggctcgttatgctccggaagatgtgcgcactgatgaagagcgccatgagaggttcttggaaggacttaatgatgagctttcttacccactcatgactagggattatcatgatttccagaagttagtggataaggctattcgccaggaggacaagtacaaccgcatggagcagaagaaacgtcggattgctcacttcaaggcacaacaggggaatagtcagaggccgcgtcttactttaggaccccagtccatgccacagggaggttcttggtctgttgttcgtccgcagcgacagttcttcaacaacaatgctggcaacaacatccgcaatcaagctccacgccctgttgcagctccaacacagcaacagcctgccaagagggagcaaggcagcaagcccggggtgtgcttcaactgtggagacccaggacattacgctgacaagtgtccgaagccccgacgcgtgaaggttgtccctgcccagagcaactctaccgcaccagcgccaaaggctcgtgtcaatcatgttgctgctgcagaagctcaagttcctgcaacagtgcttttcgattctggtgctacacattcatttttatctatgagttttgtgggaaatcatgggatggaagtagaagatcttagacgtcctttgatggttagtaccccgagtaatcaagcactctctttgcaacgtagcccctctatcagaatagaaattcaagaagtaccatttctggccaatcttatcctgttagaatccaaagaccttgatatcatcctagggatggactggttagccagatataaaggtatgatagactgcgccaacagaaaagtaattctcaccagcaatgatggtcgagttgtaactgttcatgcattatcttctgagtctttaaggtcaagtctgaaccaaatgactttggaagagattcctatagtccgggagtaccccgatgtgttcccgaacgatttacttggtatgccgcctaaaagggatatagagttcagaatagatctggtaccaggaacaactccgatccataagagaccttatagaatggcagccaatgaattagcagaagtcaagagacaagtagatgatttgcttcagaaaggatacatcagaccgagttcatctccatggggagctccagttatttttgtggaaaagaaagatcatacccagaggatgtgtgtggactatcgtgcactaaatgatgtgactatcaagaataagtacccgctgcccagaattgatgatttgtttgatcagtttaaaggtgccaccgttttctccaagatagatctccgatcagggtatcaccagttgagaatcaaagaggaagatatacctaagacaacttttaccactaggtatgggttgtttgaatgtactgttatgtcttttggacttaccaatgcccccgctttcttcatgaacttgatgaataaggtgtttatggaatacctagacaagttcgtggtggtctttattgatgacattcttatctactcccgaaccaaagaagagcatgaagaacatcttcgtcttgcactagagaagctgcgagaacatcagttgtatgccaagtttagcaaatgtgaattctggttgtctgaagtgaagttccttggtcacgtcatctcagccggaggagatgccgttgatcctagtaatgtggaatccgtaaccaactggaaacaaccaaagacagtttcagagattcacagtttcctaggcctcgtaggatattatcggaggtttatagagaatttttccaagattgctaagcccatgacacgattacttcaaaaggatgtaaaatacaagtggtcagaagaatgtgagcagagttttcaagagttgaagaatcgcttaatatcagctcctattttgattttgcctgatccaaaaaagggttttcaagtgtattgtgatgcatccaagcttgggttaggttgtgttctgatgcaagatgggaaggtggttgcctatgcatcttgtcagttacgtccgcatgagaagaactaccctactcatgatcttgagttagttgcagtggttcatgcgttgaagatttggcgtcattatcttttcggtactcgtacaaaggattatgacatgggaattcattatcacccgggaaaggctaatgttgtagcagatgctcttagcaggaaaggctattgcaatgctacggaaggacgacagttgccattggagttatgcaaggaatttgaaagattaaatttgggaattgtcagtagaggtttcgttgcagccttagaagcaaagcccactctaattgatcaagttagagaagcccaaattattgatcctgatattcaagaaatcaagaagaatatgagaagaggaaaagctatcggtttcttggaagatgagcaaggaactgtatggttgggcgagagaatctgcgtccccgacaacaaagatttaaaagatgcaattctgaaagaagctcatgatactttatactccattcaccctggtagtaccaagatgtaccaggatctcaaggaaagattttggtgggcaagtatgaagcgtgaaatcgccgaatacgtagcagtatgtgatgtttgtcagcgagtcaaggcagaacatcagaaacccacaggtttgctgcagcctttgaagataccagaatggaagtgggaggaaatcggtatggatttcatcactggtctacccagaacatcatcaggccatgactctatatgggtgatagtcgacagacttaccaaagtggctcatttcatcccagtaaagacaacatattccggaagtcagttggcggaattgtatatggcacggattgagaagaatttgaagagttccaaggccagcaaggcaagtcacacagatcccaaacaaccctttgagcatgttgattccgtttaa

SEQ ID NO: 15650 - DNA, 1026 bp, Oryza sativa
  Clone ID: TFbOSC23055j.C1.o1.fg
ataccctcgggagtggtgtctctcaagaagaaggaattcaggtcactcacacaaggttcccgcactgtcaccgagtatctgcacgagttcaatcgtctggctcgttatgctccggaagaggtgcgcactgatgaagagcgtcaggagaggttcttaaaaggacttaatgatgaactttcctacccacttatgactggagattatcatgatttccagaagttagtggataaagctattcgccaggaggacaaatacaaccgcatggagcagaagaaacgccggattgctcatttcaaggcacagcaggggaatagtcaaaggccacgccttactttgggaccccagtccatgccacagggagctccacgccctgttgcatctccaacacagcaacagcctgccaagagggagcaaggcagtaagcccggggtgtgcttcaactgtggagacccaggacattacgctgacaagtgtccgaagccccgccgcgtgaaggtcgtccctgcccagaacaacccctccgcacccgcagccaaggctcgtgtcaaccatgttgctgctgcagaagctcaaggtgctccagatgtgattttgggtacattccctgttaactcagttcctgcaaccgtgctttttgattctggtgctatgcattcatttttatccatgagttttgcgggaaatcaagggatggaggtaaaggaacttagacgtcctttgatggttagtactccgagtaaccaagcactctcctcacaacgtagcccctctgtcagaatagagatccaaggtgtacctttcctggccaaccttattctgttagaatccaaagaccttgatgtcatcctagggatggactggttagccagatataaaggtgtgatagattgtgctaatagaaaagtaactctcaccagtaatgatggtcgagttgtaactgttcatgcattatcttctgagtctataaggtcacgtctgaaccaattgactttggaagagattcctatagtccgggagtatcccgat

SEQ ID NO: 15651 - DNA, 4422 bp, Oryza sativa
  Clone ID: TFbOSC25185j.C1.o21.fg
atggtgcgctgtggtggattgtgttgtgcgaggggtactgtcacagctcctttccgagctcctggtttggaatggtatattcctggtttggagatagaactgtgcagccgggatggttgttcagaatggttgggtctatgcaacaggatgccgcgctacaagcctgagtacttgtttggtgttgagggatttgtccaggagttgcgtacgatgtcctttgtcataggatttaggactacccctttttatgcccagattcctcatgatcgtcacgaagagaagtgccgagtcaaagtcaccttgaacagtaatagtgaagatatcccctcagtgatgttcgaagctggaggaggaaactacatccatgcgtgtcaggaagtggcaaggatcgccataggagagctccgcgatcgctacagtgatcagttggccgacactaagtatcgctaccatcctcgtcaaccacagggaagtgaccgtggcagctaccttgagactgagggaattgagaatgatgctaccacaaggcatttggttgagatgctgtgggctatggatgaaacccgtgcggagactgtgttagcagctcaagatcgtgaagaccagaatcgtggtaagatttgcaagctagaggacaaagtggatcgtttggagaaggaactagccgcattgaagggagaagcaccaccgcagaaggccaggattcgtcttaccgcaaggaagagagctctatttgtccctcgctaccaattggcgccaaagatggtgctcactcgcagcaacgggaatggccccaacaacaacaataacaacaacaatggagagaatcccacacttgcccaagtcctggctcaacaggcacagcttatgaacatgatgatgcagcaactccagaaccagcagaaccagggaaataaccatgcacctccccagaacaagttagtagaatttcttcgtgtgaggccgcccactttctctagcaccactaatcctgttgaagctggtgattggttgcatgccatagagaagaagttggatttgcttcagtgcaccgatcaggagaaggtctcatttgcatcacaccagctgcatggccctgcctctgaatggtgggatcacttccgtcttaacaggactactgctgaacctatcacttggcttgaattcaccgctgctttccggaagacgcatataccatcgggagtggtgtctctcaagaagaaggaattcaggtcgctcacccagggatctcgctctgtcaccgagtatctgcacgagttcaatcgtttggctcgttatgctccggaagatgtgcgcactgatgaacagcgccaggagaggttcttggaaggacttaatgatgagctttcttatccactcatgactggggattatcatgatttccagaagttagtggataaggctattcgtcaggaggacaagtacaaccgcatggagcagaagaaacgccggattgctcacttcaaggcacaacaggggaatagtcagaggccgcgtcttactttaggaccccagtccatgccacagggaggttcttcgtctgttgttcgtccgcagcgtcagttcttcaacaacaacgcgggcaacaacatccgcaatcaagctccacgccctgttgcagcttcgacacagcaacagcctgccaagaaggagcaaggcatcaagcccggggtgtgcttcaactgtggagacccaggacattacgctgacaagtgtccgaagccccgacgcgtgaaggttgtccctgcccagagcaactctaccgcaccagcatcaaaggcccgtgtcaatcatgttgctgctgcagaagctcaaggtgctccagatgtgattttggactgtgccaacagaaaagtaactctcaccagcaatgatggtcgagttgtaactgttcatgcattgtcttctgagtctttaaggtcaagtctgaaccaaataactttggaagagattcctgtagttcgggagtatcccgatgtgttcccagacgatttacctggtatgccgcctaaaagggatatagagttcagaatagatttggttccaggaacaactccgatccataagagaccttatagaatggcagccaatgagttggcagaagtcaagaggcaagtagacgatttgcttcagaaaggatacatcagaccgagttcatctccatggggagctccggttatttttgtggaaaagaaagatcatacccagaggatgtgtgtggactatcgtgcactaaatgatgtgactatcaagaataagtatccgttgcccagaattgatgatttgtttgatcaacttaaaggtgctaccgttttctccaagatagatcttcgatcagggtatcaccagttgagaatcaaagaggaagatatacctaagacagcttttaccactaggtatggattgttcgaatgtactgttatgtcttttggacttaccaatgcccccgctttcttcatgaacttgatgaataaggtgtttatggaatacctagacaagttcgtggtggtctttattgatgacattcttatctactcccacaccaaagaagagcatgaagaacaccttcgccttgcattggagaagctacgagaacatcaacttaatgtggaatccgtaaccaactggaaacaatcaaagacagtttcagagattcgcagtttcctaggcctcgcaggatattatcggaggtttatagagaatttttccaagattgctaagtccatgacacgattacttcaaaaagatgtgaagtataagtggtcagaagaatgtgagcagagttttcaagagttgaagaatcgcttaatatcagctcctattttgattttacctgatccaaagaagggtttccaagtgtattgcgatgcatccaaacttgggttaggatgtgttctgatgcaagatgggaaggtggttgcctatgcatctcgtcagttacgtccgcatgagaagaactaccctactcatgatcttgagttagctgcagtagttcatgcgttgaaaatttggcgtcattatcttttcggtactcgtacagaggtgtacaccgatcacaagagtttaaagtatatctttactcagccggatctgaacatgagacaacggagatggttggaattaattaaggattatgacatgggaattcattatcacccgggaaaggctaatgttgtagcagatgctcttagcaggaaaggctattgcaatgctacggaaggacgacagttgccattggaattatgcaaggaatttgaaagattaaatttgggaattgtcagtagaggttttgttgcagccttagaagcgaagcccactctaattgatcaagttagagaagcccaaattaatgatcctgatattcaagaaatcaagaagaatatgagaagaggaaaagctatcggtttcttggaggatgagcaaggaactgtatggttggatgagagaatctgcgtccccgacaacaaagatttaaaagatgtaattctgaaagaagctcatgatactttatactccattcaccctggtagtaccaaaatgcaccaggatctcaaggaaagattttggtgggcaagtatgaagcatgaaatcgcagagtacgtagcaacagacggacaaaccgaaagggtaaatcagattttggaagacatgttgagagcttgtgctttagacttcggtggaagttgggataagaatctaccttatgcagaattctcgtacaacaacagttatcaagctagtcttcagatggctccttacgaagcactgtatggtcggaagtgccgcactccgcttttgtgggatcaaacgggagaacgtcaggttttcgggatggatatcctaagggaagcagaagaaaaggtgaaaatcattcaagaaagattgcgtgtggcccagtctcgtcataagagttatgccgacaatcgtcgtagagatctaagttttgacgaaggagattatgtgtacctttgtgtcacgcctcttcgaggagttcatcgttttcacaccaaaggaaaattggcaccgtgttttgtgggaccttataagattgtcagtagaagaggagaggttgcttatcagttggagttacctcaatctttggcaggagtccataatgtgttccatgtgtcgcaattgaaaaagtgtttaagggtacctaccgaagaaactaatcttgaacagatagaagtccaagaggatctgacctatgttgagaaaccaatccgtatcttggaaatagatgagagaagagccagaaatcgagttatccgtttttgcaaagtccaatggagtaatcactcggaagaagaatcaacttgggaacaagaagatgaattgaagtcagctcatccgcatctgttcgccagttcttccgaatctcgaggacgagattctgtttaa

SEQ ID NO: 15652 - DNA, 4824 bp, Oryza sativa
  Clone ID: TFbOSC29665j.C1.o2.fg
atgatgcctccccattcaccgagaaatttgatcgaggtgttaggattcatcagggagctgaggttgatggcttttgaggtaggctatgaagttgctcctgagtatcgccagatttcccatgaccccgacgaggagaaatgtcgtgttcgtgtgatgttggctagtgatcgtgaagaccttccgtcttttaagtttgaagctggaggaagatcgtactgccatgcttgtcaagaagtagctttggtggccattggagagttgcgtcaacgctttgaagaagagttggattcatcagctttccagtatcatcctcacaagcctcatggtcaagactatggaacctatacctgtcctgatggtgaagagagtgccactcttatgcatgtggtgcatatgcttagtgctatggatgcagtaagtgtggagcgagacaaagcagctcatgacagggaaaactggaatcgaggcaagatttgcaagttggagagcaaggtgtaccgtctacagaaggaattgtctgaacttaaaggagaaacgccgccaccaacacccaagctacgcctcgtcgcaagaaagagaacctgtccgccacctcgtctccagttagcttcgaagattcgtgtgatgggtgaagctgtgcccgatcgtgctgaacctgtcatcgacatcataagtgatgaggaagaggaggaagaccctgaagaaagagagccagctactccagaggaagaagatccatcgcttcgttccgacgcaaggcgggattatgcagcaggcacagaatcagcaggcaaacaatcagaatcagaatccacccctcctccccaaaacaagttggcagatttcttacgtgtgagaccccctaccttttcaagcacaaccaatccagtagaagcaggagattggctgcatgcggtggagaagaagttggatttgatccagtgtactgagcaggagaaagtttcatttgcttcgcatcagttgcatggacccgctgctgaatggtgggatcattttcgccaaggcagggcgggaggagaacctattacttggcaggagttcacagctgctttcaagaagacgcatataccaacgggtgttgtagctctaaagaagagagaatttagagcactcaaccagggatctcgttcggtcactgagtacctccatgatttcaaccgtttagctcgctatgctccggaagatgtccgcaccgatgaggaacgtcaggagaagtttttagagggactgaatgatgagttgtcttatgctttgatgtctacggatttccgggatttccagcagttggtggacaaagcgattcgtcaggaagacaagtataaccgtatggaacagaagaagcgcagggctgcccaattcaaggcacaacagggcagtaaccagaggccgcgtctcgttactggacctcaagctccatcgtaccctcaaggaggatcttcatcagttgtccgtccccaacgccagttctacaacaacaatactggtaatcgtggcaatgacaaccgcaacatggttgctcgtcctgcagcaacttcagttcagaaccagcctgtcaggaaggaacagggaagcaagccaggggtgtgcttcaactgtggtgatccaggacattatgctgataagtgtcctaagcctcggcgtgtgaagaacgctccaaccccgaacaactccaatgttccagcaccgaaggcccgtgtcaatcatgttgcagcagcagaagctcagaatgcaccagatgtggttttgggtacgtttcctgttaactctatacccgcaactgtgctttttgattccggtgctacacattcctttttgtctaaaagttttgcaagcaatcatgggatggaagttgttagtcttgggagacctttactagttaataccccaggcaatcaagtattttcgacacagtattgtccttctgttactatagaaatagaagaagttcctttcccatcctcgcttatcttattagaatgcaaagatctagatgttatcttagggatggactggttatctcgtcacagaggagttatagattgtgccaaccgtaaggtgactttaaccagtagcaatggggaaactgtttctttctttgtgtcctctcctaaatatcatggtgtgatcttaaaccaagttgctctacaagagatacctatagtacaagactacccagacgtgtttcccgaggatttgccaggtatgccacctaagagagagatagagtttcggatagacttggtccctggaaccaaccctttccataagagatcatacagaatggcagctaatgagttagctgaggtgaagaaacaggtggatgatttgcttcagaaaggatacatcagacccagtacttcgccatggggagcaccagtcatctttgtggagaagaaagatcatactcagagaatgtgcgtggattatcgagcgttgaatgaggtcactatcaagaataagtatcctctacccagaattgatgacctgtttgatcaactggaaggtgctacagttttctccgagatagatctccgttctggatatcatcaacttcgaatccgtgaggaagatataccaaagaccgccttcacaactcggtatggtttgttcgaatgtaccgttatgtcatttggactcactaatgccctagcctttttcatgaatctgatgaacaaggtgtttatggaatatttggataagtttgtcgtggtgtttattgatgacattctcatttactccaagacgaaggaagaacatgaagagcatcttcgtctagctttagagaaactacgtgagcatcagctttatgccaagttcagtaaatgtgaattttggttgtccgaagtgaagtttcttggtcaggtcatctcgtctggaggagtggcagtagatccgagcaatgtggagtcagtgttaagttggaagcaacccaagacggtttcagaaattcgtagtttccttggacttgcagggtattaccgcaggtttattgagaacttttcaaagatcgccagaccaatgactcgtctgcttcagaaggaagtgaagtacaagtggacagaggattgtgaacaaagtttccaagaactgaagaaaaggctagtgactgcgccggtattaattttgcctgattcgaggaaaggtttccaagtgtattgtgatgcatcccgactcggtttgggttgtgtgttgatgcaagaaggaaaggtggttgcttatgcatctaggcaattacgtcctcatgagaataactacccaacgcatgacctagaattggcagctgtggtgcatgcattgaagatttggcgtcattatctttttggtaatcgtacagagatatatacggatcataaaagtttgaagtacatcttcactcaacctgatttgaacatgcgtcagcgaagatggttagagttgattaaagattatgatatggagatccactatcacccgggaaaagcaaatgttgtagccgatgcccttagcaggaaaagctactgtaatatgtcagaaggtcgacgtttaccttgggagttatgccaagaatttgaaaggttgaacttgggaatagtcagcaaaggttttgtggctgttttagaagctaaacctactctgtttgatcaagttagagaagctcaagtgaatgatcctgatatccaagaaataaagaagaacatgagaagaggtaaagccatcggttttgtagaagatgagcaaggtactgtgtggttaggagaaagaatttgcgtcccagaaaataaggagttgaaggatactatcatgaaagaagctcatgaaactttgtattccattcaccctggaagcactaagatgtaccaagacctaaagcaacaattctggtgggccagtatgcgacgtgagatagcagaatatgtggctctatgtgatgtatgtcagcgggtcaaggcagaacatcagaagccagccggtctattacaaccgttgaagattccagagtggaagtgggaagaaataggaatggattttataaccggtctacccagaacgtcggcaggacatgattctatttgggtagtggttgataggttgacaaaagtcgctcacttcataccggtcaaaacaacctatacggggaataagcttgcagagttatatatggccagagtggtatgtttgcatggtgttcctaagaagatagtgtcagatagaggtagccagtttacttcgaagttttggcagaaattacaatcagaattggatacccgtttgaatttcagtaccgcttatcaccctcaaacagatgacatattgcgagaggcagaagaaaaagtgaagattatccaagaaaggttgcgcgttgctcagtcgcgtcagaagagttatgccgacaatcgtcgcagagatttggctttcgaagaaggagattatgtataccttcgggttacgccgttacgaggagttcatcgtttccagaccaaagggaaattggcaccgcggtttgtgggaccttttaagatcgtgagtcgaagaggtgaagtagcttatcagttagagttgcctccgtcaatggcgggaatacatgatgtgtttcatgtgtctcagttgaagaaatgtttacgagtacctacggaagaagcagatcctgatcgtatagagcttcaagaagatttaacttatattgagaagccggtcagaatcttggaatttccgacgttccggaggagagcgtttccgttgaggaaggttccgaagcgtttgcggaagcccaaggcaagtcacacagatcccaaacaaccctttgagcatgttgaacccatttaa

SEQ ID NO: 15653 - DNA, 3363 bp, Oryza sativa
  Clone ID: TFbOSC34887j.C1.o15.fg
atgtctttcctcataggatttgggactgcccctttgtatgcccagattcctcatgattgtgatgaagagaagtgccgtgtcaaagtcactttgaacagtaatcgtgaagatatcccttcggtgatgttcgaggctggagggggaagctacattcatgcttgtcaggaggtggcaaggatcgccataggagagctccacgaaagctacaacgatcggttggctgacaccgagtatcgctaccatcctcgtcaaccccagggaagtgaccgtggcagctaccttgaacctgcagagattgagaatgatgctaccacaaggcatttggttgagatgctgtgggccatggatgaaacccgtgctgagattgtgatagcagctcaagattgtgaagaccggaatcgcgggaagatttgcaagctggaggacaaggtggatcgtttggagaaggagctagcagcattgaagggagaagcaccaccgcagaaggccagggttcgtcttacagcaaggaagagagctctattcgtccctcgctaccagttggcgccaaaggttcgtgtggtggaaaaagaagctaccccagccccagtggatcctccggtcgtcaacgtgagtgatgatgatgaagaagaatccaagcgcacccattccaaggtcgagtggggagctactcaagatgatggggatatggtgcttactcgcagcaacgggaatggccccaaccccaacaaaaacaacaacaatgcagagaatcccacgcttgctcaagtcctggcccaacaggcacagcttaagaatctgatgatgcagcaactccagaaccagcagaaccagggaaacaaccatgcacctcccccgaataagctggtagaatttcttcgcgtgaggccgcctactttatctagcaccaccaatcctattgaagctggtgattggctgcacgccatagagaagaagttggacctacttcagtgcactgatcaagagaaagtctcttttgcttcacatcggcttcatggccctgcctctgaatggtgggatcacttccgtctcaacaggactacagctgaaccaatcacttggcttgagttcactgctgcttttcgtaagacgcatataccctcgggagtagtgtctctcaagaagaaggagttcagggcgctcactcagggatctcgctctgtcactaaatatctgcatgaatttaatcgtctggctcgttatgctccggaagatgtgcgcattgatgaagagcgccaagagaagttcttagaagggctgaatgatgagctttctaacccactcatgactggggattatcatgatttccagaagttggtggataaggctattcgccaggaggacaagtacaaccgcatggagcagaagaaacgccggattgctcacttcaaggctcagcaggggaatactccgacacagcatcagcctgccaagagggagcaaggcagtaagcccggggtgtgcttcaactgtggagacccaggacattatgctgacaagtgtccgaagccccaccgcgcgaaggttgtccctgctcagaacaacccctccgcaccagcgacaaaggctcgtgtcaaccatgttgctgccgcagaagcccaaggtgctccagatgtgattttgggtacgttccctgttaactcagttcctgcaacagtgcttttcgattctggtgctacgcattcctttttatctttgagttttgcgggaaatcatgagatggaagtagaagatcttagacgtcctttgatggttagtacaccgagtaaccaagcactctcatcacaacgtagcccctctgtcagaatagagattcaaggagtaccatttttggccaaccttattctgttagaatccaaagaccttgatgtcatcctagggatggactggttagccaaatataaaggtgtgatagactgtgccaatagaaaagtaactctcaccagcaatgatggtcaagttgtaactgttcatgcattgccttctgagcctttaaggtcaagtctgaaccaaataactttggaagagattcctatagtacaggagtacccggatgtgttcccggatgatttacctggtatgccgcccaagagagatatagaattcagaatagatctggtaccaggaacaactccgatccataagagaccttatagaatggcagccaatgaattagcagaagtcaagaggaaagtagatgatttgcttcagaaaggatatatcagaccgagttcgtctccgtggggagctccagtgatctttgtggaaaagaaagatcatacccagaggatgtgtgtggactatcgtgaactaaatgatgtgactatcaagaataagtacccgctgcccagaattgatgatttgtttgatcagcttaaaggtgccaccgttttctccaagatagatcttcgatcagggtatcatcagttgaggattaaagaggaagacatacctaagatagcttttaccactacgtatgggttgtttgaatgtactgttatgtcttttggacttaccaatgcccccgctttcttcatgaacttgatgaacaaggtgtttatggaatacctagacaagttcgtggtagtctttattgatgacattctcatttactcccgaaccaaagaagagcatgaagaacatcttcgtcttgcactagagaagctgcgagaacatcagttgtatgccaagtttagcaaatgtgaattctggttgtctgaagtgaagttccttgatcacgtcatctcagccgggggagttgccgttgatcctagttattactggaggttcatagagaatttttccaagattgccaagcccatgacacgactgcttcagaaagatgtgaagtacaagtggtcagaagagtgcgagcagtgttttcaagagttgaaaagtcgcctaatatcagcacccattttgattttgcctgatccaaagaagggtttccaagtgtattgcgatgcatccaagcttgggttaggttgtgttctgatgcaagatgggaaggtggttgcctatgcatctcgtcagttacgcccgcatgagaagaactaccctactcatgatcttgagttagccgcagtggttcatgcgttgaagatttggcgtcactatctttttggtactcgtacggaggtgtatacggatcacaaaagtttgaagtatattttcacccagccggatctgaacatgagacagcggagatggttggaattgattaaggattatgatatgggaattcattattgtaacatcctgaaaatgtgtcattttctaatcttgcatcatgctgattcttatgttcttaataaccttttaaacctaggaaaatatacttag

SEQ ID NO: 15654 - DNA, 2979 bp, Oryza sativa
  Clone ID: TFbOSC400055j.C1.o4.gm
atggagaggagtagatgcgtacctagctatctacgtcttgcgtgcggggaggagccgcggggcgcgcccgaaggcggcctcgccggcacagccgacgggaggcggcgcacccgcgccccgatggtcgctgccggcgaccaccggcgcggcggggcggcgcccgagagaggggagggaagggggaaacgaatcggcggtccacggctcaccccggatcgacggcgacgacgggaacggcgaccggagcggagagaggcggcggcgcggctcgggtcgacggggacggcggcgttccggcgatcggcgaccgaaacggagaggtggacgaggtcggcgaggacgcggcgaagccgaaggtggcaacgccgaggcgggaggtggtccggggcgacgacggcggcggaccggagctcggcggcgatggcggagagagagagcgacggcgcctcgtgggtgattgctcctgcccaagcctctagtcatgatactcccggtcccatgtcaccgacaaggtcgctcacacaaggttcccgcactgtcacggagtacctgcacgagtttaatcgtctggctcgttatgctccgaaggatttgcgcactgatgaggagcgccaggagaaattcttggaaggacttaatgatgagctctcctacccacttatgactggagattatcatgatttccagaagttagtggataaagctattcgtcaggaggacaaatacaatcgcatggagcaaaagaagcgccggattgctcatttcaaggcacagcaggggaatagtcagaggccacgccttactttgggaccccagtccatgccacagggaggttcttcatctgttgttcgtccgcagcgtcagttcttcaacaacaacgcgggcaacaacaaccgcaaccaagctccacgtccggtggcaactccgtcgcagcaacagcctgccaagagggagcaaggcagcaagcccggtgtgtgcttcaactgtggagacccaggacattatgctgacaagtgtccgaagccccgccgcgcaaaggtcgtccctgcccagaacaactcctccgcaccagcagccaaggctcgtgtcaaccatgttgctgctacagaagctcaaggtgctccagatgtgattttgggtacgttccctgttaactcagttcctgcaaccgtgctttttgactctggtgctacgcattcatttttatccatgagttttgcgggaaatcatgggatggaggtagaggaacttagacgtcctttgatggttagtactccgagtaaccaagcactctcctcacaacgtagcccctctgtcagaatagagatccaaggtgtatccttcctggccaaccttattctgttagaatctaaagatcttgatgtcatcctagggatggactggttagccagatataaaggtgtgatagattgtgctaatagaaaagtgactcttaccagcaatgatggtcaagttgtaactgttcatgcattgccttctgaacctctaaggtcaagcctgaaccaaataacgttggaaaagattcctatagtacgagagtacccagatgtgttccccgatgatttacctgttatgtcttttggacttaccaatgcccctgctttcttcatgaacttgatgaacaaggtgttcatggaatacctggataagttcgtggttgtctttattgatgacattctcatatattcccgaactaaagaagagcatgaagaacatcttcgccttgcactagagaagctgcgagaacatcagttgtatgccaagtttagcaaatgtgaattctggttgtctgaagtaaagttccttggtcacgtcatctcagcaggaggagttgccgttgatcctagtaacgtggaatccgtaaccaactggaaacaacccaagacagtttcagagatccgcagtttcctaggcctcgcaggatattaccggaggttcatagagaatttctccaagattgccaagcccatgacacgactgcttcaaaaagatgatgggaaggtggtcgcctatgcatctcgtcagttacgtccgcatgagaagaactaccctactcatgatcttgagttagctgcagtggattatgacctgggaattcattatcacccgggaaaggctaatgtcgtagcagatgcccttagcagaaaaggctattgtaatgttatgggaggacgacagttgcctttggaattgtgcaaggagtttgaaaggttgaatctgggaattgtcagcagaggctttgttgcagctttagaagcgaagcctactctcattgatcaagtcagagaagcccaaattaatgatcctgatattctggagatcaagaagaatatgagaagaggtaaagctatcggtttcttggaagatgagcaaggaactgtatggttgggtgagagaatctgtgtcccagacaacaaagacttgaaggatgcaattctaaaggaagctcatgatactttatactccattcaccccgcctttgaagataccagaatggaagtgggaggaaatcggtatggatttcatcactggactacccagaacgtcgtcggtctagcgccgccgtcgccgccgccgctccagccgtgcgtcgccgtcgctccagtcatcaccgtcgctcgtggaggtcgccgtctcgtcgccgttctcgtccgccccttcgccgtcgctgtcgaccgccggagcaccgtcgccgtcgtcaagccgaaagttgccgccgcttctttctcgtcgccgacgtcgtccggtcatcgtccgccgtcgctttggtcgccggtgagttcgtcgtgccgcctgcaacccgtaggtgctttccgttcacgctgtcgtgccgtggttcgccgacgagctcgtgtggttcggtcgccgccggtggtgacgtcgtcgctgacgtcatcgtcgtcgtccatccgtgagccgcggtggatccaatcgatctcggccgtccgttgtagatag

SEQ ID NO: 15655 - DNA, 4899 bp, Oryza sativa
  Clone ID: TFbOSC400677j.C1.o41.np
gtgacaagttggtatcagagccaccttgaccttaggataagccaaatgatgccgccccattcaccgagaaatttgttcaaggtgttaggattcgtcagggagctgaggttgatggcttttgaggtaggatatgaagttgctcccgagtatcgccaaatttcccatgaccccgacgaggagaagtgtcgtgttcgtgtgacgttggctagtgatcgtgaagaccttccgtccattaagttcgaagctggaggaagatcgtacagccatgcttgtcaagaagcagctttggtggccattggagagttgcgtcaacgctttgaagaagagttggattcatcagctttccagtatcatcctcacaagcctcatggacaagactatggaacctatacctgtcctgatggtgaagagagtgccactctgatgcatgcggtgcatatgcttagtgctatggatgcagtaagtgtggagcgagacaaagcagctcatgacagggaaaactggaatcgaggcaagatttgcaagttggagagcaaggtgtaccgtctacagaaggaattagctgaacttaaaggagaaacgccgccgccaacacccaagcttcgcctcaccgcaagaaagagaacctgtccgccacctcgtctccagttagcttcgaagattcgcgtaaggggtgaagttgtgcccgatcgtgctgaacctgtcatcgacatcataagtgatgaggaagaagaggaagatcctgaagaaagagagccagctactccagaggaagaagatccatcgcttcgttccgacgcaaggcgcactaccaatccagtagaagcaggagattggctacatgcggtggagaagaagttggatttgatccagtgtactgagcaggaaaaagtttcttttgcttcgcatcaactgcatggacctgctgctgaatggtgggatcattttcgccaaggcagggctgaaggagagcctattacgtggcaggaattcacggccgttttcaaaaagacgcatataccagcaggtgttgtggctctaaagaagagagaatttagagcactcaaccagggatctcgttcggttaccgagtacctccatgatttcaaccgtttagctcgttatgctccggaagatgttcgcaccgatgaagagcgtcaggagaagtttttggagggactgaatgatgagttgtcttatgctttgatgtctacggatttccgggatttccagcagctggtggacaaggcgattcgtcaggaagacaagtataaccggatggagcagaagaagcgcagggctacccaattcaaggcacaacagggcagtaaccagaggccgcgtctcgttactggacctcaagctccatcgtaccctcaaggaggatcttcatcagttgtccgtccccaacgccagttctacaacaacaatactggtaatcgtggtaatgacaaccgcaacgtggttgctcgtcctgcagcaactccagttcagaaccagcccgtcaggaaggaacagggaagcaagccaggggtgtgtttcaattgtggtgatccaggacattatgctgataagtgtcctaagcctcggcgcgtgaagaacgctccagccccgaacaactccaatgctccagcaccaaaggcacgtgttaatcatgttgcagcagcagaagctcagaatgcaccagatgtggttttgggtacgtttcctgttaactctatacccgcaactgtgctttttgattccggtgctacacattcctttttgtctaaaagttttgcgagcaatcatgggatggaagttattagtcttgggagacctttactagttaataccccaggcaatcaagtattttcgactcagtattgtccttccgttactatagaaatagaagaagttcatttcccatcctcgcttatcttgctagaatccaaagatctagatgttatcttagggatggactggctatctcgtcacagaggagttatagattgtgccaaccgtaaggtgactttaaccaatagcaatggggagaccgtttctttctttgtgtcctctcctaaatctcatggtgcggtcttaaaccaagttgctctacaagagatccccatagtacaagactacccagacgtgtttcccgaggatttgccaggtatgccacctaagagagacatagagtttcggatagacttggtacctggaaccaaccctatccataagagaccatacagaatggcagctaacgagttagctgaggtgaagagacaggtggatgatttgcttcagaaaggatacatcagacccagtacttcgccatggggagcaccagtcatctttgtggagaagaaagatcatactcagagaatgtgcgtagattatcgagcgttgaatgaggttactatcaagaataagtatcctctacccagaattgatgacctgtttgatcaattggaaggtgctacagttttctctaagatagatctccgttctggatatcatcaacttcgaattcgtgaggaagatataccaaataccgccttcacaactcggtatggtttgttcgaatgtaccgttatgtcatttggactcactaatgccccagcctttttcatgaatctgatgaacaaggtgtttatggaatatctggataagtttgtcgtggtgtttattgatgacattcttatatactctaagacgaaggaagaacatgaagagcatcttcgtctagctttagagaaactacgtgagcatcagctttatgctaagttcagtaaatgtgaattttggttgtccgaagtgaagtttcttggtcatgtcatctcgtctggaggagtggcagtagatccaagcaatgtggagtcagtgttaagttggaagcaacccaagacggtttcagaaattcgtagtttccttggacttgcagggtattaccgcaggtttattgagaacttttcaaagatcgccagaccaatgactcgtctgcttcagaaggaagtgaagtacaagtggacagaggattgtgaacgaagtttccaagaactgaagaaaaggctagtgactgcgcctgtattaattttgcctgattcgaggaaaggtttccaagtgtattgtgatgcatcccgactcggtttgggttgtgtgctgatgcaagaaggaaaggtggttgcttatgcatctaggcaattacgtcctcatgagaataactacccaacgcatgacctagagttggcagctgtggtgcatgcattgaagatttggcgtcattatcttttcggtaaccgtacagagatatatacggatcataaaagtttgaagtacattttcactcaacctgatttgaacatgcgacagcgaagatggttagagttgattaaagattatgatatggaaatccactatcacccggggaaagcaaatgttgtagccgatgctcttagcaggaaaagctactgtaatatgtcagaaggtcgacgtttaccttgggagttatgccaggaatttgaaaagttgaacttgggaatagtcagcaaaggttttgtggccgctttagaagctaaacctactctgtttgatcaagtcagagaagctcaagtgaatgatcctgatatccaagaaataaagaagaacatgagaagaggaaaagccatcggttatgtagaagatgagcacggaactgtgtggttaggagaaagaatttgcgtcccagaaaataagaagttgaaggatactatcatgagagaagcacatgaaactttgtattccattcaccctggaagcactaagatgtatcaagacttaaagcaacaattctggtgggccagtatgcgacgtgagatagcagaatatgtggctctatgtgatgtatgtcagcgagtcaaggcagaacatcagaagccagccggtttgttacaaccgttgaagattccacagtggaagtgggaagaaataggaatggattttataaccggtctacccagaccgtcggcaggacatgattctatatgggtagtggttgataggttgacaaaagtcgctcacttcataccggtcaaaacaacctatacggggaataagcttgcagagttatacatggccagagtggtatgtttgcatggtgttcctaagaagatagtgtcagatagaggtagccagtttacttcgaagttttggcagaagttacagttagagatgggtacccgtttgaatttcagtaccgcttatcaccctcaaacagatggacagacggaaagagtaaaccaaattttagaagatatgttgagagcctgtgttctagattttggtggaagttgggataagaatttgccgtacgcggaattctcatataacaatagttatcaagctagtttgcaaatggctccgtatgaagcattatatggtcgaaagtgccgtacgccgctcctttgggatcaaaccggtgaacgtcaagtttttgggacagacatattgcgagaggcggaagaaaaagtgaagattatccaagaaaggttgcgcgttgctcagtcacgacagaagagctatgccgacaatcgtcgcagggatttggcttttgaagaaggagattatgtataccttcgggttacgtcgttacgaggtgttcatcgtttccaaaccaaagggaaattggcaccgcgttttgtgggaccttttaagattctgagtcgaagaggtgaagtagcttatcagttagagttgcctccgtcaatggcaggaatacatgacgtgttccacgtatctcagttgaagaagtgtttacgtgtacctacggaggaagcagatcctgatcgtatagagcttcaggaagatttaacttatgttgagaagccagtcagtattttggaatttccgacgttccggaggagagcgtttcctttgaggaag

SEQ ID NO: 15656 - DNA, 1383 bp, Oryza sativa
  Clone ID: TFbOSC401071j.C1.o1.fg
atggcatttgaagtaggttacgaggttgcccccgagtattgccagattccctatgaccccaatgaggagaagtgtcgtgttcgcgtgacgttgactagtgatcgtgaagaccttccgtcgataaagtttgaagctgggggaagaaagtacagccatgcttgtcaggaagcagccttggtggccattggagagctacgtcatcgctttgatgaggagttagagtcatcagctttccagtatcacccacacaagcctcatggtcaagactatggaacttacaactgtcccgaaggtgaaggtagtgccactgtgatgcacgccgtgtatatgcttagcgccatggatgcagtaggcgtggagcgggagaaagcagctcatgatagggaaaactggaaccgtggcaggatttgtaagttggagagcaaggtgtaccgtctgcagaaggaactagctgagcttaagggagaagcaccaccgccagcacccaagctacgcctcaccgcaaggaagagaacccgtccaccacctcgtctccagttagcttcgaagactggtgtggtgggagacgctgtgcctgatcatgctaaacctgtcatccatgtcttaagtgatgaggaagaagaggaagacctagaagaaagagagccagctactccagaggaggaagatccatctcttcattctgacgcaaggcgagacatgttgcttacatcaatggtgggatgtaactacatgagtttagttcttttgcttgtcagagactcgttatgccccagaagatgtcgcactgatgaagaacatcaggagaagtttttagagggattgaatgatgagttgtcttatgcattgatggctatggattactgggatttccagcagttgatggacaaggcgattcgccaagaagacaagtataataggatggaacagaaaaagcgtagggctgctcatttcaaggcacaacagggtagtagccagaggccgcacattgctttgggacctcaagctgcaccatacccacagggaggatcctcttcagttgctcgccctcaacgccagttctacaacaacaacactggtaatcgcagcaacgataatcgtaatatggtcactcgtcctgtagcagctccaactcagaatcatcctgtcaggaaggaacagggaagcaagccaggggtgtgcttcaattgtggtgatccaggacattatgctgataagtgtcccaagcctcggcgtgtgaagaatgctcctgttcagaacaactccaatgctccagcaccgaaggctcgtgttaatcatgttgcagccgcagaagcccagaatacacctgatgtggttttggaggaggagtgcttcaatgaaggtgatgatcaggaggattag

SEQ ID NO: 15657 - DNA, 4924 bp, Oryza sativa
  Clone ID: TFbOSC401235j.C1.o70.np
gtgacaagttggtaccagagccaccttgaccttaggacaagccaaatgacgccgccccatccgccggaaagcttgatcaatgcggtaggattcgtcagggagctgagaatgatggcatttgaagtaggctacgacgttgcccctgagtatcgccagattccctatgaccccaacgaggagaagtgtcgtgttcgcgtgacgttgactagtgatcgagaagaccttctgtcgataaagtttgaagctgggggaagaaagtatagtcatgcttgtcaggaggtagccttggtggccattggagagctacgtcatcgctttgatgaggagttagagtcatcagctttccagtatcatccacacaagcctcatggtcaagactatggagtttaccactgccctgaagatgaagatagcaccactctgaagcatgctgtgtatatgcttagcgccatggatgcagtaggcgtggagcgggagaaaacagctgatgacagggaaaactggaaccgtggcaggatttgcaagttggagagcaaggtgtaccgtctgcagaaggaactggccgagcttaagggagaagcaccaccgccagcacccaaacttcgcctcaccgcaaggaagagaacccgtccaccacctcgtatccagttggcttcgaagactcgtgtggtgggagatgttgtgcctgatcatgctgaacctatcatccatgtcttaagtaatgatgaagaggaggaagacccagaagaaagagagccagctactccagaggaagaagatccatctcttcgttccgatgcaaggcgcaccactaacccagtagaggcaggtgattggctgcatgctgttgaaaagaagttagatttgattctgcgcaccgagtaggagaaggtttcctttgctttgcatcagttgcatggtcctgctgctgagtggtgggatcacttttgtcaaacacagagctgcgggagagcctatcacttggcgggagtttactgctactttcaagaagacacatataccatcaggtgttgtggcacttaagaagagagatttcagagcactcaatcagggatcctgttctgtcacagagtacctccatgactttaatcgcctagctcattatgtcccagatgatgttcgcactgatgaagaacgtcaggagaagtttttagagggactgaatgatgagttgtcttatgcattgatggctatagaataccggaatttccagcagttggtggacaaggcgattcgccaagaagacaagtacaataggatggaacagaagaagcgtagggctgcttatttcaaggctcaatagggtaatagccagaggccgcgcattgctttgggacctcaagctgcaccatacccatagggaggatcctcttcagttgctcgccctcaacgccagttctacaacaacaacactggtaatcacagcaacgacaatcgtaatgtggtcactcgtcctgtagcagctccaactcaaaatcagcctgtcaggaaggaacagggaatcaagccaggggtgtgcttcaattgtggtgatccaggacattatgctgataagtgtccaaagcctcggcgtgtgaagaatgctcctgtccagaacaactccaatgctccagcaccgaaggctcgtgttaatcacgttgcagctgcagaagcctagaatgcacctgatgtggttttgggtacgtttcctgttaactctatacccgcaactgtgctttttgatttcggtgctacacattcctttttgtctaaaagttttgcgagcaatcatggaatggaagttattagtcttgggaggcctttactagttaataccccaggcaatcaagtatcctcaacgcagtactgtccttccattactacagaaatacaagaaattcctttcccatccacacttatcttgctagaatccaaagatcttgatgttatcttaggggtggattggctaacccatcacagaggagttatagattgtgctaaccgtaaggtgactttaacaagtagcaatgggtaaacagtgtctttctttgtgtcctcccctagatctcatggtttgacattaaatcaagttgctttgcaagagatcccaatagtacaagactatccagatgtgttcccagaggatttgccaggtatgccacctaagagagacatagagttccggataaacttagtacctggaaccaaccctatccataagagaccttacagaatggcagctattgagttagcagaggtaaagagacaggtggatgatttgcttcagaaaggatatatcagacccagtacttcgccgtggggagcaccagtcatctttgtggagaagaaagatcatacccaaagaatgtgtgtggattatcgagcgttgaatgaggtcactatcaagaataagtatcctctacctaggattgatgacttgtttgatcaattggaaggtgctacagtcttctccaagaaagatctttgttccggatatcaccaactttgaatccgtgaggaggatataccaaagatcgcctttacaacacggtatggtttgtttgaaagtaccgttatgtcgtttggactcactaatgccccggcctatttcatgaacttgatgaacaacgtgtttatggaatatctagataagtttgtcgtggtgtttattgatgacatccttatttactccaagacaaaagaagagcatgaagagcatcttcgtcttgctttagagaaactacgtgagcatcagctctatgccaagtttagtaaatgtgaatttggttgcccgaagtgaagttccttagtcatgtcatctcagctggaggagttgtcgtggatccaagcaatgtggagtgagtgctaaattggaagcaacctaagatggtctcagagattcgtagtttccttggtctgcggggtactaccgcaggtttattgagaacttctcaaagatcgctagaccaatgtctcgactgcttcagaaggatgtgaagtataagtggacggaagagtgtgagcagagttttcaagaattgaagaaaaggctagtgactgcgccaatgttagtcttgcctgatccaaggaaaggttttcaggtgtattgtgatgcatctagacatggtttgggttgtgttttgatgcaagatgggaaggtggttgcctatacatctaggcagttacgccctcatgagaataactatccaacacatgatgtagagttggcagctgtggttcatgaattgaagatttggcgtcattacctttttgataaccgtacggagatgtatacggatcataaatgtttaaagtacattttcactcaacctaatctgaacatgcgtcaacgaagatggttagagttgatcaaggattatgacatggaaattcattatcatccaggtaaagcaaatgttgtagcagatgctctcagcaggaaaagctactgtaatatgtcagaaggacgacacctaccttgggagttatgccaggaattggaaaagttgaacttgggaatagtcaataaaggttttgttgccgctttagaagctcaacctactctttttgatcaagttagagaggctcaagtgaatgatcttgatatctaagaaattgaaaagaacatgagaagaggaaaaaccatcggttatatagaagatgagcaaggaactgtgtggctaggagaaagaatttgcgtgcccgataataaggagttgaaggatactattatgaaagaagctcatgaaactttgtattccattcatcctgggagcactaagatgtatcaagacctgaagcaacaattctggtgggctagcatgcgatgagagatagcggaatatgtggctctatgtgatgtgtgtcagcgagtcaaggcggagcatcagaagccagcctgtcagctgcaaccgttgaagattctagagtggaaatgggaggaaataggaatggattatatcaccggtctacccagaacgtcggcaggacaagattctatttgggtagtggttgataggcttactaaagttgctcattttatacctgtcaaaacaacctactcgggaaataagcttgcagagttatatatggcaagagttgtatgtttacatggtgttcccaagaaaatagtgtcagacagaggtagtcagtttacttcgatgttttggcggaaactacaagaagagatgcgtactcgtttgaatttcagtactacttatcaccctcaaactgatggccagacaaaaagagtgaatcaaattttagaagacatgttgagagcctgtgttctagatttcggtggaagttgggataagaatatgccgtacgccgaattcggttatatcaacagttatcaagctagtcttcaaatggctccatatgaagcattgtatggtcgaaagtgtcgtacaccgctccatttgggatcaaaccggtgagcgtcaagtttttgggacagatatattgcgagaggcagaagaaaaagtgaagattatccaagaaaggttgcgtattgcccagtcacgttagaagagctatgcagacaatcgtcgtagggatttgactttcgaagaaggagattatgtatacctacgggttacgctgctgcggggagttcatcgttttcagaccaaagggaaattggcaccgcgatttgtgggaccttttaagattgtgagtcggagaggtgaagtagcttatcaactagagttgcctccgtcaatggcgggaatacatgacgtgttccatgtgtcgcagttgaagaaatgtttgcgtgtacctacggaggaagcagatcctgagcatatagagcttcaaaaagatttaacttatgttgagaagccagtccgaattcttgtgtttccgacgttccggaggagagcgtttacgttgaggaaggcgattgatcaatactaaaatgctt

SEQ ID NO: 15658 - DNA, 4720 bp, Oryza sativa
  Clone ID: TFbOSC401314j.C1.o26.np
gtgacaagttggtatcagagccaccttgaccttaggataagccaaatgatgccgccccattcaccgagaaatttgatcaaggtgttaggattcgtcagggagctgaggttgatggcttttgaggtaggctatgaagttgctcctgagtatcgccggatttcccatgaccccgacgaggagaagtgtcgtgttcgtgtaacgttggctagtgatcgtgaagaccttccgtccattaagttcgaagctggaggaagatcgtacagccaggcttgtcaagaagcagctctggtggccattggagagttgcgtcaacgctttgaagaagagttggattcatcagctttccagtatcatcctcacaagcctcatggtcaagactatggaacctatacctgtcctgatggtgaagagagtgccactctgatgcatgcggtgcatatgcttagtgctatggatgcagtaagtgtggagcgagacaaagcagctcatgacagggaaaattggaatcgaggcaagatttgcaagttggagagcaaggtgtatcgtctacagaaggaattagctgaacttaaaggagaaacgccgcctccaacacccaagcttcacctcatcgcaagaaagagaacctgtccgccacctcgtctccagttagcttcgaagattcgcgtgatgggtgaagctgtgcccgatcgtgctgaacctgtcatcgacatcataagtgatgaggaagaagaggaagaccctgaagaaagagagccagctactccagaggaagaagatccatcgcttcgttccgacgcaaggcgcaccaccaatcccgtagaagcaggagattggctgcatgcggtggagaagaagttggacttgatccagtgtactgagcaggagaaagtttcttttgcttcgcatcaactgcatggacctgctgctgaatggtgggatcattttcgccaaggcagggctgaaggagagcctattacgtggcaggaattcacggccgctttcaagaagacgcacataccagcgggtgttgtagctctaaagaagagagaatttagagcactcaaccagggatctcgttcggtcaccgagtacctccatgatttcaaccgtttagctcgctatgctccagaagatgttcgttcagatgaagaacgtcaggagaagtttttagagggactgaatgatgagttgtcttatgctttgatgtctacggattttcgggatttccagcagttggtggacaaggcgattcgtcaggaagacaagtataaccggatggagcagaagaaacgcagggctgcccaattcaaggcacaacagggcagtaaccagaggccgcgtctcgttactggacctcaagctccatcgtaccctcaaggaggatcttcatcagttgtccgctcccaacgccagttctacaacaacaatactggtaatcgtggcaatgacaaccgcaacatggttgttcgtcctgcagcaactccagttcagaaccagcccgttaggaaggaacagggaagcaagccaggggtgtgcttcaattgtggtgatccaggacattatgctgataagtgtcctaagcctcggcgcgtgaagaacgttccagccccgaacaactccaatgctccagcaccaaaggcacgtgttaatcatgttgcagcagtagaagctcagaatgcaccagatgtggttttgggtacgtttcctgttaactctatacccgcaactgtgctttttgattccggtgctacacattcctttttgtctaaaagttttgcgagcaatcatgggatggaagttattagtcttgggagacctttactagttaataccccaggcaatcaagtgttttcgacacagtattgtccttccgttattataggaatagaagaagttcttttcccgtcctcccttatcttgctagaatccaaagatctagatgttatcttagggatggattggttatctcgtcacagaggagttatagattgtgccaaccgtaaggtgactttaaccagtagcaatggggaaacagtttctttctttgtgtcctctcctaaatctcatggggtgatcttaaaccaagttgctctacaagagatccccatagtacaagactacccagacgtgtttcccgaggatttgccaggtatgccacctaagagagacatagagtttcggatagacttggtacctggaaccaaccctatccataagagaccatacagaatggcagcaaatgagttagctgaggtgaagagacaggtggatgatttgcttcagaaaggatatatcagacccagtacttcgccatggggagcaccagtcatctttgtggagaagaaagatcatactcagagaatgtgtgtggattatcgagcgttgaatgaggttaccatcaagaataagtatcctctacccagaattgatgacctgtttgatcaactggaaggtgctacagttttctccaagatagatctccgttctggatatcatcaacttcgaatccatgaggaagatataccaaagaccgccttcacaactcggtatgatttattcgaatgtaccgttatgtcatttggactcactaatgccccagcctttttcatgaatctgatgaacaaggtgtttatggaatatctggataagtttgtcgtggtgtttattgatgacattcttatttactccaagacgaaggaagaacatgaagagcatcttcgtctagctttagagaaactacgtgagcatcaggtttatgccaagttcagtaaatgtgaattttggttgtccgaagtgaagtttcttggtcatgtcatctcgtctggaggagtggcagtagatccaagcaatgtggagtcagtgttaagttggaagcaacccaagacggtttcagaaattcgtagtttccttggacttgcggggtattaccgcaggtttattgagaacttttcaaagatcgccagaccaatgactcgtctgcttcagaaggaagtgaagtacaagtggacggagggttgtgaacaaagtttccaagaactgaagaaaaggctagtgactgcgcctgtgttagttttgcctgattcgaggaaaggtttccaagtgtattgtgatgcgtcccgacacggtttgggttgtgtgttgatgcaagaaggaaaggtggttgcctatgcatctaggcaattacgtcctcatgagaataactacccaacgcatgacctagagttggcagctgtggtgcatgcattgaagatttggcgtcattatcttttcggtaaccgtacagagatatatacggatcataaaagtttgaagtacattttcactcaacctgatttgaacatgcgtcagcgaagatggttagagttgattaaagactatgatatggaaatccactatcacccggggaaagcaaatgttgtagccgatgctcttagcaggaaaagctactgtaatatgtcagaaggtcgacgtttaccttgggagttatgccaagaatttgaaaagatgaacttgggaatagtcagcaaaggttttgtggctactttggaagctcaacctactctgtttgatcaagttagagaagctcaagtgaatgatcctgatatccaagaaataaagaacatcagaagccagccggtctgttacaaccattgaagattccagagtggaagtgggaagaaataggaatggattttataaccggtctacccagaacgtcggcaggacatgattctatttgggtagtggttgataggttgacaaaagtcgctcacttcataccggtcaaaacaacctatacagggaataagcttgcagagttatacatggccagagtggtatgtttgcatggcgttcctaagaagatagtgtcagatagaggtagccagtttacttcgaagttttggcagaaattacaagtagagatgggtaaccgtttgaatttcagtaccgcttatcaccctcaaacagatggacagacggaaagagtaaaccaaattttagaagatatgttgagagcttgtgttctagattttggtggaagttgggataagaatttgccgtacgcggaattctcatataacaacagttatcaagctagtttgcaaatggctccgtatgaagcattatatggccgaaagtgccgtacgccgctcctttgggatcaaaccggtgaacgtcaagtttttgggacagacatattgcgagaggcagaagaaaaagtaaagattatccaagaaaggttgcgcgttgctcagtcgcgtcagaagagctatgccgacaatcgtcgcagagatttggctttcgaagaaggagattatgtataccttcgggttacgccgttacgaggtgttcatcgtttccaaaccaaagggaaattggcaccgcgttttgtgggaccttttaagatcgtgagtcgaagaggtgaagtagcttatcagttagagttgcctccgtcaatggcgggaatacatgacgtgttccatgtgtctcagttgaagaaatgtttacgtgtacctacggaggaagcagatcctgatcgtatagagcttcaagaagatttaacttatgttgagaagccagtcagaattttggaatttccgacgttccggaggagagcgtttccgttgaggaagatcgtgcgagtaccttgtcaagccagaggcctcttgggcgaagggtgcaaggcgaagagtatataccggaggaagatgacttc

SEQ ID NO: 15659 - DNA, 5200 bp, Oryza sativa
  Clone ID: TFbOSC401388j.C1.o10.np
taattttaaataataaattccaatataaaattccgacgttcccggagagtccgattttgcaggagaagaatttgaagagttccaaggccagcaaggtaactgctggtttggaatggtatattcctggtttggagatagaactatgcagccgggattggttgttcagaatggttgggcctatgcaacaggatgccgcgctacaagcctaagtacttgtttggtactgagggatttgtccaggagttgcgtacgatgtccttcctcataggatttgggactgcccctttgtatgcccagattcctcatgatcgtgatgaagagaagtgccgtgtcaaagtcaccttgaacagtaatcatgaagatatcccatcggtgatgtttgaggctggagggggaagctacattcatgcttgccaggaggtggcaaggatcgctataggaaagctacgcgaaagctacaatgatcggttggccgacaccgagtatcgctaccatcctcgtcaaccccaaggaagcgaccgtggcagctaccttgaaccggcagggattgagaataatgctaccacaaggcatttggttgagatgctgtgggccatggatgagacccgtgctgacattgtgatagcagctcaagatcgtgaagaccggaatcgcggaaagatttgcaagctggaggacaaggtggatcgtttggagaaggagccagccgcattgaagggagaagcaccactgcaaggaagagagctctattcgttcctcgctaccagttggcgccaaagatggtgcttactcgcagcaatgggaatggacccaaccccaacaacaacaacaacaatggagagaatcccacgcttgccccagtcctggctcaacaggcacagcttatgatgaatctgatgatgcagcaactccagaaccagcagaaccagggaaacaatcatgcacctccccagaataagctggcagaatttcttcgtgtgaggccgcctactttctctagcaccaccaatcctgttgaagctggtgattggctcacgccatagagaagaagttggacctgcttcagtgcacagatcaagagaaggtctcttttgcttcacaccagctgcatggccctgcctctgagtggtgggatcacttccgtctcaacaggactactgctgaacctatcacttggcttgaattcactgctgcttttcggaagacgcacataccatcaggagtggtgtctctcaagaagaaggagttcaggtcgctcactcagggatctcgcactgtcactgagtatctgcatgaatttaatcgcctggctcgttatgctccggaagatgtgcgcactgatgaagagcgccaagagaagttcctggaaggactgaatgatgagctttcttacccattgatgactggggattatcatgatttccagaagttggtggataaggctattcgccaggaggacaagtacaaccgcatggagcagaagaaacgcaggattgctcatttcaaagcttagcaggggagtagtcagaggctgcgtcttgccttgggacctcagtcagtgccacagggaggttcttcgtctattgttcgtccgcagcgtcagttcttcaacaacaatgctggcaacaacaaccgcaaccaagctccacgccctgttgcagctccgacacagaatcagccagccaagagggagcaaggcagcaagcccggagtgtgctttaactgtggtgacccaggacattacgctgataagtgtccgaagccccgccgcacgaaggttgtccctgccaagaacaactcctccgcaccagcgacaaaggctcgtgtcaaccatgttgctgctgcagaagctcaaggtgacccagatgtgattttgggtacgttccttgttaactcagttcctgcaacagtgcttttcgattctggtgctacacattcatttttatctatgagttttgcgggaaatcatgggatggaggtagaagatcttagacgtcctttgatggttagtactccgagtaaccaagcactctcatcacaacgtagcccctctgtcagaatagagattcaaggtgtaccatttctggccaaccttattctgttagaatccaaagaccttgatgtcatcctagggatggactggttagccagatataaaggtgtgatagactgtgccaatagaaaagtaactctcaccagcaatgacggtcaagttgtaactgttcatgcactgccttctgagactttaaggtcaagtctaaaccaaataactttggaagagattcctatagtacgggagtacccagatgtgttccttgatgatttacctggtatgccgcccaagagagatatagaattcagaatagatctggtaccaggaacaactccgatccataagagaccttatagaatggcagccaatgaattagcagaagtcaagaggcaggtagatgatttgcttcaaaaaggatacattagaccaagttcgtctccatggggagctccagttatttttgtggataagaaagaccatacccagaggatgtgtgtggactatcgagcactgaatgatgtgactatcaagaataagtacccgctgcccagaattgatgatttgtctgatcagcttaaaggtgccaccgttttctccaagatcgatcttcgatcaggatatcaccagttgaggatcaaagaggaagatatacctaagacggcttttaccactcggtatgggttgtttgaatgtacagtcatgtcttttggacttaccaatgcccccgctttcttcatgaacttgatgaataaggtgtttatggaatacctagacaagttcgtggtagtctttattgatgacattctcatttactcccgaaccaaagaagagcatgaggaacatcttcgtcttgcactagagaagctacgagaacatcaattgtatgccaagtttagcaaatgtgaattttgattgtctgaagtgaagttccttggtcacgtcatctcagccggaggagttgccgttgatcctagtaatgtggaatccgtaaccaactagaaacaaccgaaaacagtttcagagattcgcagtttcctgggtcttgcaggctattacatgaggtttatagagaatttctccaagattgctaagcccatgacacgactgcttcagaaagatgtgaagtacaagtggtcagaagaatgtgagcagagttttcaagagttgaaaagtcgcttaatatcagcacccattttgattctgcttgatccaaagaagggtttccaagtgtattgtgatgcatccaagcttgggttaggttgtgttctgatgcaagatgggaaggtggttgcctatgcatctcgccagttacgtccgcataagaagaactaccctactcatgaccttgagttagctgcagtggttcatgcgttgaagatttggcgtcattatctttttggtactcgtacggaggtgtatacggatcacaaaagtttgaagtatatctttacccagccggatctgaacatgagacagcggagatggctggaactgattaaggattatgacctgggaattcattatcacccaggaaaggctaatgttgtagcagatgctctcagcaggaaaggctattgcaatgctacggaaggatgacagttgccattggagttatgtaaggaatttgaaagattaaatttgggaattgtcagtagaggtttcgttgcagccttagaagcgaagcccactctcatcgatcaagttagagaagcccaaattaatgatcctgatattcatgagatcaagaagaatatgagaagaggaaaagctatcggtttcttggaagatgagcaaggaactgtatggttgggtgagaggatctgtgtcccagacaacaaagatttgaaagatgcaattctgaaggaagctcatgacacgttgtactccattcaccctggtagtactaagatgtaccaggatctcaaggagagattttggtgggcaagtatgaagcgagagatagcagagtatgtaacagtatgtgatgtttgtcagcgagtcaaggcagaacatcagaaactcgcaggtttgttgcaacctctgaagataccagaatagaagtgggaggaaatcggtatggatttcatcactggtctacccagaacgtcatcaggccatgactctatctaggtgatagtcgacagacttaccaaagtggctcatttcatcccagtgaggacaacatattccggaagtagcttggcggaattgtatatggcaagaattgtgtgtctgcacggtgtgcctaagaagatagtatcagatcgaggtagccagtttacttcaaagttttggaagaagcttcaagaagagatgggttccaagctgaactttagtactgcttatcatccgcggacagatgaacaaaccgaaaggataaatcagattttggaagacatgttgagagcttgtgctttagacttcggtggaagttgggataagaatctgctttacgcggaattctcatacaacaacagttatcaagctagtcttcaaatgcctccttatgaagcactgtatggtcggaagtgccgcacaccacttttgtgggatcaaacgggagaacgtcaggttttcgggactgatatcctaagggaagcagaagagaaggtaaagatcattcaagaaagattgcgagtggctcagtctcgtcataagagttatgccgacaatcgccgtagagatctaagttttgaagaaggagatcatgtgtaccttcgtgtctcgcctcttcgaggggttcatcgttttcacaccaaaggaaaattcgcaccgcgtttcgtgggaccttataagattgtcagtagaagaggtgaggtagcttatcagttggagttacctcaatccttggcaggtgtccataatgtgttccatgtgtcacagttgaaaaagtgtttaagggtacccactgaagaagctaatcctgaacagatagaattccaagaggatctgacgtatgttgagaaaccaatctgtatcttggagacagatgagagaagaaccaggaatcgagttatccatttttgtatggtccaatggagtaatcactcggaagaagaagctacttgggaacgagaagatgaattaaagtcagctcatccgcatctgttcaccagttcttccgaatctcgaggacgagattccgtt

SEQ ID NO: 15660 - DNA, 3960 bp, Oryza sativa
  Clone ID: TFbOSC401693j.C1.o22.fg
atggcttttgaagtaggcaatgaagttgctcccgagtatcgccggatttcccatgaccccaacgaggagaagtgtcgtgttcgtgtgacgttggctagtgatcgtgaagaccttccgtccattaagttcgaagctggaggaagaacgtatagccatgcttgtcaagaagctgctttggtggccattggagatttgcgtcaacgctttgaagaggagttggattcatcagctttccagtatcatccccacaagccccatgtgcatatgcttagtgctatggatgcagttagtgtggagcgagacaaagcagctcatgacagggaaaactggaatcgaggcaagatttgcaagttggagagcaaggtgtaccgtctacagaaggaattagctgagcttaaaggagaaacaccgccgccaacacccaagcttcgcctcactgcaaggaagagaacctgtccaccaccctgtctccagttagcttcgaagattcgcgtgatgggagatgccgtgcctgactgtgctgaacctatcatccacatcttaagtgatgaggaagaagaggaagatccagaggaaagaaaagcacagaatcaggaggcaaacaaccagaaccagaatcaaccccctaccttttcaagcaccactaaccccgtagaagcaggagattggttgcatgcagtggagaagaagttggatttgatccagtgtacgaagcaggaaaaagtttctttcgcttcgcatcagctgcatggtcccgctgctgaatggtgggatcactttcgccaaggcagggctgagggagagcctattacttggcaggaatttacggctgctttcaacaagacgcacataccgacgggtgttgtagctctgaggaagagagaatttagagcgctcaaccagggatcccgttcggtcatcgagtaccttcatgatttcaatcgtttagcccgttatgctccggaagatgttcgcaccgatgaagaacgtcaggagaagtttttggagggactgaatgatgagttgtcttatgctttgatgtctatggatttcagggatttccagcagttggtggacaaagcgattcgtcaggaagacaagtataatcgaatggagcagaagaagcgcagggctgcccaatttaaggctcaacagggcagtaaccagaggccgcgtctcgttacgggacctcaagctccatcgtaccctcaaggaggatcttcattagttgtccgccctcaacgccagttctaccacaacaatactggtaaccgcaccaatgacaaccgcaatatggtcgctcgtcctgcagcaactccagctcagaaccagcccgttaggaaggaacagggaagcaagccaggggtgtgcttcaattgtggtgatccaggacattatgctgataagtgtcctaagcctcgacgtgtgaagaatgctcccgccctgaagaactgcaatactccagcaccgaaggctcgtgttaatcatgttgcagcggcagaagcccagaatgcaccagatgcggttttagatgttatcttagggatggattggttatctcgtcatagaggagttatagattgtgccaatcgtaaggtgactttaaccagtagcgatggggaaaccgtttctttctttgcgtcctctcctaaatctcatggtgtgaccttaaaccaagttgttctacaagagatcccagtagtacaagactacccagatgtgtttcccgaggatttgccaggtgctacagttttctccaagatagatctccgttcgggatatcatcaacttcgaatccgtgaggaagatataccaaagaccgcctttacaactcggtatggtttgttcgaatgcacagttatgtcgtttggactcactaatgccccggccttgttcatgaatctgatgaacaaggtgtttatggaatatctggataagtttgtcgtggtgttcattgatgacattcttatttactccaagacaaaagaagaacatgaagagcatattcgtctagctttagagaaactacgtgagcatcagctctatgccaagttcagtaaatgtgaattttggttgtcggaagtgaagtttcttggtcatgtcatctcatctggaggagtggcagtagatccaagcaatgtggagtcagtgttaaattggaagcaacccaagacggtttcagaaattcgtagtttccttggacttgcggggtactaccgtaggtttattgagaacttctcaaagatcgctagaccgatgactcgtctgcttcagaaggaagtgaagtacaagtggacagaagattgtgaacaaagtttccaagaactgaagaaaaggctagtgactgcgcctgtgttaattctgcctgattcaaggaaagaaggaaaggtggttgcctatgcatctaggcaattacgtcctcatgagaataactacccaacgcatgacctagagttggcagctgtagtacatgcattgaagatttggcgtcattatcttttcggtaaccgtacagggatgtatacggatcataaaagtttgaagtacattttcactcaacctgatttgaacatgcgtcagcgaagattgttagagttgattaaagattatgatatggaaatccattatcacccgggtaaagcaaatgttgtagccgatgccctcagcaggaaaagctactgtaatatgtcagaaggtcgacatctaccttgggagttatgtcaggagtttgaaaagttaaacttgggtatagtcagcaaaggttttgtggctgctttagaagctcaacctactttgtttgatcaagttagagaagttcaagtgaatgatcctgatatccaagaaatcaaaaagaacatgagaagaggaaaagccatcggttatgtagaagatgagcaaggaactattccagagtggaagtgggaagaaataggtatggacttcataaccggtctacccagaacgtcggcaggacatgattctatttgggtagtggttgacagattgactaaagtcgctcatttcatacctgtcaaaacaacctacacggcgaacaagcttgcagagctatacatggccagagtggtatgtttgcatggagttcccaagaagatagtgtcagatagaggtagtcagtttacctcaaaattttggcagaaactacaagtagagatgggtacccgtttgaatttcagtaccgcttatcaccctcaaacagatggtcagaccgagagagtaaatcaaattttagaagacatgttgagagcctgtgttctagattttggtggaagttgggataagaatttgccatacgcggaattcccatataacaacagttatcaagctagtttgcaaatggctccgtatgaagcattatatggccgaaagtgtcgtacgccgctcctgtgggatcaaaccggtgagcatcaagtttttgggacagacatattgcgagagccagaagaaaaagtgaagattatccaagaaaggttgcgcgttgctcagtcacgtcagaagagctatgccaacaatcgtcgcagagatttggcttttgaagaaggggattatgtataccttcgggttacgccgttacgaggtgttcatcgtttccagaccaaagggaaattggcatcgcatttcgtgggaccttttaagatcgtgagtcgaagaggtgaagtagcttatcagctagaattgcctccgtcaatggcgggaatacatgacgtgttccacgtgtcacaattgaagaaatgtttacgtgtacctacggaagaagcagatcctgaacatatagagcttcaagaagatttaacttatgttgagaagccagtcagaatcttggaatttccgacgttccggaggagagcgtttctgttgaggaaggttccgaagcgtttgtggaagcccaaggcaagtcacacagatcccaaacaaccctttgagcatgttgaacccgtgtaa

SEQ ID NO: 15661 - DNA, 5197 bp, Oryza sativa
  Clone ID: TFbOSC401740j.C1.o1.np
attccgacgtttccggagagtccgttttcacaggagaagaatttgaagagttccaaggccagcaaggcaactcctggtttggaatggtatattcctggtttggagatagatctgtacagccgggtatggttgttcaggatggttgggcctgagcagcatgatgccgcgctacaagcctgagtacttgtttggtgttgagggatttgtccaggagttgcgtacgatgtcctttgccataggatttgggactgcccctttttatgcccagattcctcatgatcgtcacgaagagaagtgccgagtcaaagtcaccttgaacagtaatagtgaagatatctcctcagtgatgttcgaagctggaggaggaaactacatccatgcatgtcaggaggtggcaaggatcgccataggagagcttcgcgatcgctacagtgatcagttggccgacactgagtatcgctaccatcctcgccaaccacagggaagtgaccgtggcagctaccttgagactgagggaattgagaatgatgctaccacaaggcatttggttgagatgctgtgggctatggataaaactcgtgcggagactgtgttagcggctcaagatcgtgaagaccggaatcgtggtaagatttgcaagttagaggacaaagtggatcgtttggagaaggaactagccgcattgaagggagaagcaccaccgcagaaggccaggattcgtcttaccgcaaggaagagagctctatttgtccctcgctaccaattagcgctaaagatggtgctcactcgcagcaacgggaatggccccaacaacaacaataacaacaacaacaatggagagaatcccacacttgcccaagtcctggctcaacaggcacagcttatgaacatgatgatgcagcaactccagaaccagcagaaccagggaaataaccatgcacctccccagaacaagttagcagaatttcttcgtgtgaggccgcccactttctctagcaccactaatcatgttgaagctggtgattggctgcatgccatagaaaagaagttggatttgcttcagtgcactgattaggagaaggtctcatttgcatcacaccagctgcatggccctgcctctgaatggtgggatcacttccgcctgaacaggactactgctgaacctatcacttggcttgaattcaccgctgctttccggaagacgcatataccatcgggagtggtgtctctcaagaagaaggaattcaggtcgctcactcaggggtctcgctctgttactgagtatctgcacgagttcaatcgtctggctcgttatgctccggaagatgtgcgcactgatgaagagcgctaggagaggttcttggaaggacttaatgatgagctttcttacccactcatgactggggattatcatgatttccagaagttagtggataaggctattcgccaggaggacaagtacaatcgcatggagcagaagaaacgccggattgctcacttcaaggcacaacaggggaatagtcagaggccgcgtcttactttaggaccccagtccatgccacagggagtttcttcgtctgttgttcgtctgcagcgtcagttcttcaacaacaatgctggcaacaacatccgcaatcaagctccacgccctgttgcagcttcgacacagcaacagcctgccaagaaggagcaaggcagcaagcccggggtgtgcttcaactgtggagacccaggacattacgctgacaagtgtccgaagccccgacgcgtgaaggttgtccctgcccagagcaactctaccgcaccagcatcaaaggctcgtgtcaatcatgttgctgctgcagaagctcaaggtgctccagatgtgattttgggtacgttccttgttaacttagttcctgcaacattgcttttcgattctggtgctatacattcattcttatctatgagttttgcgggaaatcatgggatggaagtagaagatcttagacgtcctttgatggttagtaccccaagtaatcaagcactctctttgcaacatagcccctctgtcaggatagaaattcaaggagtaccatttctggccaatcttatcctgttagaatccaaagaccttgatgtcatcctagggatggactggttagccagatataaaggtgtgatagactgtgccaacagaaaagtaattctcaccaacaatgatggtcgagttgtaactgttcatgcattgtcttctgagtctttaaggtcaagtctgaaccaaataactttgaaagagattcctatagtccgggagtatcccgatgtgttcccagacgatttacctggtatgccgtctaaaagggatatagagttcagaatagatttggtaccaggaacaactccgatccataagagaccttatagaatggcagccaatgagttggtagaagtcaagaggcaagtagacgatttgcttcagaaaggatacatcagaccgagttcatctccatggagagctccggttatttttgtggaaaagaaagatcatacccagaggatgtgtgtggactatcgtgcactaaatgatgtgactatcaagaataagtatccgctgcccagaattgatgatttgtttgatcagcttaaaggtgccaccgttttctccaagatagatcttcgatcagggtatcaccagttgagaatcaaagaggaagatatacctaagacagcttttaccactaggtatgggttgttcgaatgtactgttatgtcttttggacttaccaatgcccccgctttcttcatgaacttgatgaataaggtgtttatggaatacctagacaagttcatggtggtctttattgatgacattcttatctactcccgaaccaaagaagagcatgaagaacatcttcgccttgcactagagaagctacgagaacatcaactgtatgccaagtttagcaagtgtgaattttggttgtctgaagtgaatttccttggtcacgtcatctcagcaggaggagttgccgtcgatcctagtaatgtggaatccgtaaccaactggaaacaaccaaagacagtttcagagattcacagtttcctaggcctcgcaggatattatcggaggtttatagagaatttttccaagattgctaagcccatgacacgactgcttcagaaagatgtgaagtacaagtggtcagaagaatgtgagcagagttttcaagagttgaagaatcgcttaatatcagctcctattttgattttacctgatccaaagaagggtttccaagtgtattgcgatgcatccaaacttgggttaggttgtgttctgatgcaagatgggaaggtggttgcctatgcatctcgtcagttacgtccgcatgagaagaactaccctactcatgatcttgagttagctgcagtggttcatgcgttgaaaatttggcgtcattatcttttcggtactcgtacagaggtgtacaccgatcacaagagtttaaagtatatctttactcagccggatctgaacatgagacaacggagatggttagaattaattaaggattatgacatgggaatttattatcacccgggaaaggctaatgttgtagcagacgctcttagcaggaaaggctattgcaatgctacggaaggacgacagttgccattagaattatgcaaggaatttgaaagattaaatttgggaatggtcagtagaggtttcgttgcagccttagaagcaaagcccactctaattgatgaagttagagaagcccaaattaatgatcctgatattcaagaaatcaagaagaatatgagaagaggaaaagctatcggtttcttggaggatgagcaaggaacggtatggttgggtgagagaatctgcgtccccgacaacaaagatttaaaagatgcaattctgaaagaagctcatgatactttatactccattcaccctggtagtaccaaaatgtaccaggatctcaaggaaagattttggtgggcaagtatgaagcgtgaaatcgcagaatacgtagcagtatgtgatgtttgtcagcgagtcaaggcagaacatcagaaacccgctggtttgctacagcctttgaagattcctgaatggaagtgggaggaaatcggtatggatttcatcactggtctacccagaacgtcatcaggccatgactctatttgggtgatagtcgacagacttaccaaagtggctcatttcatcccagtaaagacaacctattctggaagtcggttggcggaattgtatatggcaaggattgtgtgtttgcatggcgtccctaagaaaatagtatctgatcgaggcagtcagtttacttcaaagttttggaagaagcttcaggaagagatgggttctaagctgaactttagtactgcttatcatccgcagacagacggacaaaccgaaagggtgaatcagattttggaagacatgttgagagcttgtgctttagacttcggtggaagttgggataagaatctaccttatgcagaattttcgtacaacaacagttatcaagctagtcttcagatggctccttacgaagcactgtatggtcgtaagtgccgcactccgcttttgtgggatcaaacgggagaacgtcaggtcttcgggacggatatcctgagggaagcagaagaaaaggtgaaaatcattcaagaaagattgcgtgtggcccagtctcgtcataagagttatgccgacaatcgtcgtagagaactaagttttgacgaaggagattatgtgtaccttcgtgtcacgcctcttcgaggagttcatcgttttcacaccaaaggaaaattggcaccgcattttgtgggaccttataagattgtcagtagaagaggagaggttgcttatcagttggagttaccttaatctttggcaggagtccataatgtgttccatgtgtcgcaattgaaaaagtgtttaagggtacctaccgaagaaaccaatcttgaacagatagaagtccaagaggatctgacctatcttgagaaaccaatccgtatcttggaaatagatgagagaagaaccagaaatcgagttatccgtttttgcaaagtccaatggagtaatcactcggaagaagaatcaacttgggaacgagaagatgaattgaagtcagctcatccgcatctgttcgccagtttttctgaatctcgaggacgagattctgtt

SEQ ID NO: 15662 - DNA, 2966 bp, Oryza sativa
  Clone ID: TFbOSC401750j.C1.o20.np
aagaagagttggattcatcagctttccagtatcatcctcacaagcctcatggtcaagactatggaacctatacctgtcctgatggtgaagagagtgccactctgatgcatgcggtgcatatgcttagtgctatggatgcagtaagtgtggagcgagccaaagcagctcatgacagggaaaactggaatcgaggcaagatttgcaagttggagagcaaggtgtaccgtctacagaaggaattagctgaacttaaaggagaaacgccgccgccaacacccaagcttcgcctcactgcaagaaagagaacctgtccgccacctcgtctccagttagcttcgaagattcgcgtgatgggtgaagctgtgcccgatcgtgctgaacctgtcatcgacatcataagtgatgaggaagaggaggaagaccctgaagaaagagagccagctactccagaggaagaagatccatcgcttcgttccgacgcaaggcgcactaccaatccagtagaagcaggagattggctgcatgcggtggagaagaagttggacttgatccagtgtactgagcaggagaaagtttcttttgcttcgcatcaactgcatggacctgctgctgaatggtgggatcattttcgccaaggcagggctgaaggagagcctattacgtggcaggaattcacggccgctttcaaaaagacacatataccaacgggtgttgtagctctaaagaagagagaatttagagcactcaaccaaggatctcgttcggtcaccgagtacctccatgatttcaaccgtttagctcgttatgctccggaagatgttcgcaccgatgaagagcgtcaggagaagttcttggagggactgaatgatgagttgtcttatgccttgatgtctacggatttccgggatttccagcagttggtggacaaggcgattcgtcaggaagacaagtataaccggatggagcagaagaagcgcagggctgcccaattcaaggcacaacagggcagtaaccagaggccgcgtctcgttacgggacctcaagctccatcgtaccctcaaggaggatcttcatcagttgtccgcccccaacgccagttctacaacaacaatactggtaatcgtggtaatgacaaccgcaacatggttgctcgtcctgcagcaactccagctcagaaccagcccgtcaggaaggaacagggaagcaagccaggggtgtgcttcaattgtggtgatccaggacattatgctgataagtgtcctaagcctcggcgcgtgaagaacgctccagccccgaataactccaatgctccagcaccaaaggcacgtgttaatcatgttgcagcagcagaagctcagaatgcaccagatgtggttttgggtacgtttcctgttaactctatacccgcatctgtgctttttgattccggtgctacgcattcttttttgtctaaaagttttgcgagcaatcatgggatggaagttattagtcttgggagacctttactagttaataccccaggcaatcaagtattttcgacacagtattgtccttccgctactatagaaatagaagaagttcctttcccatcctcgcttatcttgctagaatccaaagatctagatgttatcttagggatggactggttatctcgtcacagaggagttatagattgtgccaaccgtaaggtgactttaaccaatagcaatggggaaacagtttctttctttgtgtcctctcctaaatctcatggtgtgatcttaaaccaagttgctctacaagagatccccatagtacaagactacccagacgtgtttcccgaggatttgccaggtatgccacctaagagagacatagagtttcggatagacttggtacctggaaccaaccctatccataagagaccgtacagaatggcagctaatgagttagctgaggtgaagagacaggtggatgatttgcttcagaaaggatacatcagacccagtacttcgccatggggagcaccagtcatctttgtggagaagaaagatcatacttagagaatgtgcgtggattatcgagcgttgaatgaggttactatcaagaataagtatcctctacccagaattgatgacctgtttgatcaactggaaggtgctacagttttctccaagatagatctccgttctggatattattaacttcgaatccgtgaggaagatataccaaagaccgccttcacaactcggtatggtttgttcgaatgtaccgttatgtcatttggactcactaatgccccagcctttttcatgaatctgatgaacaaggtgtttatggaatatctggataagtttgtcgtggtgtttattgatgacattcttatttactccaagacaaaggaagaacatgaagagcatcttcgtctagctttagagaaactacgtgagcatcagctttatgccaagttcagtaaatgtgaattttggttgtccgaagtgaagtttcttggtcatgtcatctcgtctggtggagtggcagtagatccaagcaatgtggagtcagtgttaagttggaagcaacccaagacggtttccgaaattcgtagtttccttggacttgcagggtattaccgcaggtttattgagaacttttcaaagatcgccagaccaatgactcgtctgcttcagaaggaagtgaagtacaagtggacagaggattgtgaacaaagtttccaagaattgaagaaaaggctagtgactgcgcctgtattaattttgcctgattcgaggaaaggtttccaagtgtattgtgatgcatcccgactcggtttgggttgtgtgttgatgcaagaaggaaaggtggttgcctatgcatctaggcaattacgtcctcatgagaataactacccaacgcatgacctagaattggcagctgtggtgcatgcattgaagatttggcggaaccacaccttcgcctgagatctg

SEQ ID NO: 15663 - DNA, 4731 bp, Oryza sativa
  Clone ID: TFbOSC405551j.C1.o5.fg
atggcttttgaggtaggctatgaagttgctcctgagtatcgccggatttcccatgaccccaacgaggagaagtgtcatgttcgtgtgacgttggctagtgatcgtgaagaccttccgtccattaagttcgaagctggaggaagatcgtacagccatgcttgtcaagaagcagctttggtggccattggagagttgcgtcaacgctttgaagaagagttggattcatcagctttccagtatcatcctcacaagcctcatggtcaagactatggaacctatacctgtcctgatggtgaagagagtgccgctctgatgcatgcggtgcatatgcttagtgctatggatgcagtaagtgtggagcgagacaaagcagctcatgacagggaaaactggaatcgaggcaagatttgcaagttggagagcaaggtgtaccgtctacagaaggaattagctgaacttaaaggagaaacgccgccgccaacacccaagcttcgcctcatcgcaagaaagagaacctgtccgccacctcgtctccagttagcttcgaagattcgtgtgatgggtgaagctgtgcccaatcgtgctgaacctgtcatcgacatcataagtgatgaggaagaagaggaagaccctgaagaaagagagccagctactccagaggaagaagatccgtcgcttcgttccgacgcaaggcgggattacaccaccaatccagtagaagcaggagattggctgcatccggtggagaagaagttggatttgatccagtgtactgagcaggagaaagtttcttttgcttcgcatcaattgcatggtcctgctgctgaatggtgggatcattttcgccaaggcagggctgaaggagagcctattacgtggcaggaattcacggccgcttttaagaagacacacataccaacgggtgttgtagctctaaagaagagagaatttagagcactcaaccagggatctcgttcggtcaccgagtacctccatgatttcaaccgtttagctcgttatgctccggaagatgttcttaccgatgaagagcgtcaggagaagttcttggagggactgaatgatgagttgtcttatgccttgatgtctacggatttccgggatttccagcagttggtggacaaggcgattcgtcaggaagacaagtataaccggatggagcagaagaagcgcagggctgcgcaattcaaggcacaacagggcagtaaccagaggccgcgtctcgttacgggacctcaagctccatcgtaccctcaaggaggatcttcatcagttgtccgcccccaacgccagttctacaacaacaatactgcaactccagctcagaaccagtccgtcaggaaggaacagggaagcaagccaggggtgtgcttcaattgtggtgatccaggacattatgctgataagtgtcctaagcctcggtgcgtgaagaacgttccagccccgaacaactccaatgctccagcaccgaaggcacgtgttaatcatgttgcagcagcagaagctcagaatgcaccagatgtggttttgggtacgtttcctgttaactctatacccgcatctgtgctttttgattccggtgctacacattcctttttgtctaaaagttttgcgagcaataatgggatggaagttattagtcttgggagacctttactagttaataccccaggcaatcaagtattttcgacacagtattgtccttccgttactatagaaatagaagaagttcctttcccatcctcgcttatcttgctagaatccaaagatctagatgttatcttagggatggactggttatctcgtcacagaggagttatagattgtgccaaccgtaaggtgactttaagcagtagcaatggggaaaccgtttctttctttgtgtcctctcctaaatatcatggtgtgatcttaaaccaagttgctttacaagagatccccatagtacaagactacccagacgtgtttcccgaggatttgccaggtatgccacctaagagagacatagagtttcggatagacttggtacctggaaccaaccctatccataagagaccatacagaatggcagctaatgagttagctgaggtgaagagacaggtggatgatttgcttcagaaaggatacatcagacccagtacttcgccgtggggagcaccagtcatctttgtggagaagaaagatcatactcagagaatgtgcgtggattatcgagcgttgaatgaggttactatcaagaataagtatcctctacccagaattgatgacctgtttgatcaactagaaggtgctacagttttctccaagatagatctccgttctggatatcatcaacttcgaatccgtgaggaagatataccaaagaccgccttcacaactcggtatggtttgttcgaatgtaccgttatgtcatttggactcactaatgccccagcctttttcatgaatctgatgaacaaggtgtttatggaatatctggataagtttgtcgtggtgtttattgatgacattcttatttactccaagacgaaggaagaacatgaagagcatcttcgtctagctttagagaaactacgtgagcatcagctttatgccaagttcagtaaatgtgaattttggttgtccgaagtgaagtttcttggtcatgtcatctcgtctagaggagtggcagtagatccaagcaatgtggagtcagtgttaagttggaagcaacccaagacggtttcagaaattcgtagtttccttggacttgcggggtattaccgcaggtttattgagaacttttcaaagatcgccagaccaatgactcgtctgcttcagaaggaagtgaagtacaagtggacagaggattgtgaacaaagtttccaagaactgaagaaaaggctagtgactgcgcctgtgttaattttgcctgattcgaggaaaggtttccaagtgtattgtgatgcatcccgactcggtttgggttgtgtgttgatgcaagaaggaaaggtggttgcctatgcatctaggcaattacgtcctcatgagaataactacccaacgcatgacctagaattggcagctgtggtgcatgcattgaagatttggcgtcattatcttttcggtaaccgtagagagatgtatacggatcataaaagtttgaagtacattttcactcaacctgatttgaacatgcgtcagcgaagatggttagagttgattaaagattatgatatggaaatccactatcacccggggaaagcaaatgttgtagccgatgctcttagcaggaagagctactgtaatatgtcagaaggtcgacatttaccttgggagttatgccaagaatttgaaaagttaaacttggatatagtcagcaaaggttttgtggctactttacaggctcaacctactctgtttgatcaagttagagaagctcaagtgaatgatcttgatatccaagaaataaaaaagaacatgagaagaggaaaagccatcggttatgtagaagatgagcaaggaactgtgtggttaggagaaagaatttgcgtcccagaaaataaggagttgaaggatactatcatgaaagaagctcatgaaactttgtattccattcaccctggaagcactaagatgtaccaagacctaaagcaacaattctggtgggccagtatgcgacgtgaaatagcagaatatgtggctctatgtgatgtatgtcagcgggtcaaggcagaacatcagaagccagccagtctgttacaaccgttgaagattccagagtggaagtgggaagaaataggaatggattttataaccggtctacccagaacgtcggcgggacatgattctatttgggtagtggttgataggttgacaaaagtcgctcacttcataccggtcaaaacaacctatacggggaataagcttgcagagttatacatggccagagtggtatgtttgcatggtgttcctaagaagatagtgtcagatagaggtagccagtttacttcgaagttttggcagaaattacaagtagagatgggtacccgtttgaatttcagtaccgcttatcaccctcaaacagatggtcagacggaaagagtaaaccaaattttagaagatatgttgagagcctgtgttctagattttggtggaagttgggataagaatttgccgtacgcggaattctcatataacaacagttatcaagctagtttgcaaatggctccgtatgaagcattatatggccgaaagtgccgtacgccgctcctttgggatcaaaccggtgaacgtcaagtttttgggacagacatattgcgcgaggcagaagaaaaagtgaagattatccaagaaaggttgcgcgttgctcagtcacgtcagaagagctatgccgacaatcgtcgcagagatttggctttcgaagaaggagattatgtataccttcgggttacgccattacgaggtgttcatcgtttccagaccaaagggaaattggcgccgcgtttcgtgggaccttttaagattgtgagtcgaagaggtgaagtagcttatcagctagagttgcctccgtcaatggcgggaatacatgacgtgttccatgtgtcgcagttgaagaaatgtttacgtgtacctacggaggaagcagatcctgatcgtatagagcttcaggaagatttaacttatgtggagaagccagtcagaatcttggaaaattttctgggaattatttga

SEQ ID NO: 15664 - DNA, 3795 bp, Oryza sativa
  Clone ID: TFbOSC407994j.C1.o15.fg
atggctgctgtccgaatgaccctccgatgggatgggtcataccaacctccactccgccggaagcagatgccgcgctacaagcctgagtacttgtttggtgttgagggatttgtccaggagttgcgtacgatgtcctttgccataggatttgggactgcccctttttatgcccagattcctcatgatcgccacgaagagaagtgccgagtcaaagtcaccttgaacagtaatagtgaagatatcccctcagtgatgttcgaagctggaggaagaaactacatccatgcatgtcaggaggtggcaaggatcgccataggagagctccgcgatcgctattgtgatcagttggccgacactgagtatcgctaccatcctcgtcaaccacagggaagtgaccgtggcagctaccttgagactgaaggaattgagaatgatgctaccacaaagcatttggttgagatgctgtgggctatggatgaaacccgtgcggagactgtgttagcagctcaagatcgtgaagaccggaatcgtggtaagatttgcaagctagaggacaaagtggatcgtttggagaaggaactagccgcgttgaagggagaagcaccaccgcagaaggccaggattcgtcttactgcaaggaagagagctctatttgtccctcgctaccaattggcgccaaaggtccgtgtggtggagaaagaagttaccccagccctagcggatcctccggtcgtcaataataagttagcagaatttcttcgtgtgaggccgcccactttctctagcaccactaatcctgttgaagctggtgattggctgcatgccatagaaaagaagttggatttgcttcagtgcactgatcaggagaaggtctcatttgcatcacatcagctgcatggccctgcctctgaatggtgggatcatttccgccttaacaggactactgctgaacctatcacttggcttgaattcaccgctgctttccggaagacgcatataccatcgggagtggtatctctcaagaagaaggaattcaggtcgctcactcaggggtctcgctctgtcactgagtatctgcacgagttcaatcgtctggcccgttatgctccggaagatgtgcgcactgatgaagagcgccaggagaagttcttggaaggacttaatgatgagctttcttacccactcatgactggggattatcctgatttccagaagttagtggataaggctattcgccaggaggacaagtacaaccgcatggaacagaagaaacgccggattgcttacttcaaggcacaacaggggaatagtcagaggccgcgtcttactttaggaccccagtccatgccacagggaggttcttcgtctgttgttcgtccgcagcgtcagttcttcaacaacaatgctggaaacaacatccgcaatcaagctccacgccctgttgcagctccaacacagcaacagcctgccaagaaggagcaaggcagcaagcccggggtgtgtttcaattgtggagacccaggacattacgctgacaagtgtccgaagccccgacgcgtgaaggttgtccctgcccagagcaactctaccataccagcatcaaaggcccgtgtcaatcatgttgctgctgcagaagctcaagatgctccagatatgattttgggtacgtttcttgttaacttagttcctgcaacagtgcttttcgattctggtgctacacattcattcttatctatgagttttgcgggaaatcataggatggaagtagaagatcttagacgtcctttgatggttagtaccccaagtaatcaggcactctctttgcaacgtagcccctctatcagaatagaaattcaaggagtaccatttctggccaatcttatcttgttagaatccaaagaccttgatgtcatactagggatggactggttagccagatataaaggtgtgatagactgtgccaacagaaaagtaactctcaccagtaatgatggtcgagttgtaactgttcatgcattgtcttctgagtctttaaggtcaagtctgaaccaaataactttggaagagattcctgtagttcgagagtatcccgatgtgttcccagacgatttacctggtatgccgcctaaaagggatatagagttcagaatagatttagtaccaggaacaactccgatccataagagaccttatagaatggcagccaatgagttggcagaagtcaagagacaagtagacgatttgcttcagaaaggatacatcagaccgagttcatctccatggggagctccggttatttttgtggaaaagaaagaccatacccagaggatgtgtgtggactatcgtgcactaaatgatgtgactatcaagaataagtatccgctgcccagaattgatgatttgtttgatcagcttaaaggtgccaccgttttctccaagatagatcttcgatcagggtatcaccagttgagaatcaaagaggaagatatacctaagacagcttttaccactaggtatgggttgtttgaatgtactgttatgtcttttggacttaccaatgcccctgctttcttcatgaatttgatgaataaggtgtttatggaatacctagacaagttcgtggtggtctttattgatgacattcttatctactcccgaaccaaagaagagcatgaagaacatcttcgccttgcactagagaagctacgagaacatcaactgtatgctaagtttagcaagtgtgaattttggttgtctgaagtgaagttccttggtcacgtcatctcagcaggaggagttgccgtcgatcctagtaatgtggaatccgtaaccaactggaaacaaccaaagacagtttcagagatttgcagtttcctaggcctcgcaggatattatcggaggtttatagagaatttttccaagattgctaagcccatgacacgactgcttcaggaagagatgggttctaagctgaactttagtactgcttatcatccacagacagacggacaaaccgaaagggtgaatcagattttggaagatatgttgagagcttgtgctttagacttcggtggaagttgggataagaatctaccttatgcagaattttcgtacaacaacagttatcaagctagtcttcagatggctccttacgaagcactgtatggtcggaagtgccgcactccgcttttgtgggatcaaacgggagaacgtcaggttttcgggacggatatcttgagggaagcagaagaaaaggtgaaaatcattcaagaaatattgcgtgtggcccagtctcgccataagagttatgccgacaatcgtcgtagagatctaagttttgacgaaggagattatgtgtaccttcgtgtcacgcctcttcgaggagttcatcgttttcacaccaaaggaaaattggcaccgcgttttgtgggaccctataagattgtcagtagaagaggagaggttgcttatcagttggagttacctcaatctttggcaggagtccataatgtgttccatgtgtcgcaattgaaaaagtgtttaagggtacctaccgaagaaactaatcttgaacagatagaagtccaagaggatctgacctatgttgagaaaccaatccgtatcttggaaatagatgagagaagaaccagaaatcgagttatccgtttttgcaaagttcaatggagtaatcactcggaagaagaatcaacttgggaacgagaagatgaattgaagtcagcccatccgcatctgttcgccagttcttccgaatctcgaggacgagattctgtttaa

SEQ ID NO: 15665 - DNA, 5972 bp, Oryza sativa
  Clone ID: TFbOSC408075j.C1.o2.np
gtgacaagttggtatcagagccaccttgaccttaggataagccaaatgatgccgccccattcaccgagaaatttgatcaaggtgttaggattcgtcagggagctgaggttgatggcttttgaggtaggctatgaagttgctcctgagtatcgccggatttcccatgaccccaacgaggagaagtgtcgtgttcgtgtgacgttggctagtgatcgtgaagaccttccttccattaagttcgaagctggaggaagatcgtacagccatgcttgtcaagaagcagctttggtggccattggagagttgcgtcaacgctttgaagaagagttggattcatcagctttccagtatcatcctcacaagcctcatggtcaagactatggaacctatacctgtcctgatggtgaagagagtgccactctgatgcatgcggtgcatatgcttagtgctatggatgcagtaagtgtggagcgagacaaagcagctcatgacagggaaaactggaatcgaggcaagatttgcaagttggagagcaaggtgtaccgtctccagaaggaattagttgaacttaaaggagaaacgccgccgccaacacccaagcttcgcctcatcgcaagaaagagaacctgtccgccacctcgtctccagttagctttgaagattcgcgtgatgggtgaagctgtgcccgatcgtgctgaacctgtcatcgacatcataagtgatgaggaagaagaggaagaccctgaagaaagagagccagctactccagaggaagaagatccatcgcttcgttccgacgcaaggcgcaccaccaatccagtagaagcaggagattggctgcatgcggtagagaagaagttggatttgatccagtgtactgagcaggagaaagtttattttgcttcgcatcaattgcatggtcctgctgctgaatggtgggatcattttcgccaaggcagggctgaaggagagcctattacgtggcaggaattcatggccgctttcaagaagacacacataccaacgggtgttgtagctctaaagaagagagaatttagagcactcaaccagggatctcgttcggtcaccgagtacctccatgatttcaaccgtttagctcgttatgctccggaagatgttcgcaccgatgaagagcgtcaggagaagttcttggagggactgaatgatgagttgtcttatgccttgatgtctacggatttccgggatttccagcagttggtggacaaggcgattcgtcaggaagacaagtataaccggatggagcagaagaagcgcagggctgcccaattcaaggcacaacagggcagtaaccagaggccgcgtctcgttacgggacctcaagctccatcgtaccctcaaggaggatcttcatcagttatccgcccccaacgccagttttacaacaacaatattggtaatcgtggcaatgacaaccgcaacatggttgctcgtcctacagcaactctagctcagaaccagcccgtcaggaaggaacagggaagcaagccaggggtgtgcttcaattgtggtgatccaggacattatgctgataagtgtcctaagcctcggcgtgtgaagaacgctccagcctcgaacaactccagtgttccagcaccgaaggcacgtgttaatcatgttgcagcagcagaagctcagaatgcaccagatgtggttttgggtacgtttcctgttaactctatacccgcatctatgctttttgattccggtgctacacattcctttttgtctaaaagttttgcgagcaatcatgggatggaagttattagtcttgggagacctttactagttaatcccccaggcaatcaagtatcttcgacacagtattgtccttccgctactatagaaatagaaaaagttcctttcccatcctcgcttatcttgctagaatccaaagatctagatattatcttagggatggactggttatctcgtcacagaggagttatagattgtgccaaccgtaaggtgactttaaccagtagcaatggggaaaccgtttctttctttgtgtcctctcctaaatatcatggtgtgatcttaaaccaagttgctctacaagagatccccatagtacaagactacccagacgtgtttcccgaggatttgccaggtatgccacctaagagagacatagagtttcggatagacttggtacctggaaccaaccctatccataagagaccatacagaatggcagctaatgaattagctgaggtgaagagacaggtggatgatttgcttcagaaaggatacatcagacccagtacttcgccatggggagcaccagtcatctttgtggagaagaaagatcatactcagagaatgtgcgtggattatcgagcgttgaacgaggttactatcaagaataagtatcctctacccagaattgatgacctgtttgatcaactggaaggtgctacagttttctccaagatagatctccgttctggatatcatcaacttcgaatccgtgaggaagatataccaaagaccgccttcacaactcggtatggtttgttcgaatgtactgttatgtcatttggactcactaatgctccagcctttttcatgaatctgatgaacaaggtgtttatggaatatctggataagtttgtcgtggtgtttattgatgacattcttatttactccaagacgaaagaagaacatgaagagcatcttcgtctagctttagagaaactacgtgagcatcagctttatgccaagttcagtaaatgtgaattttggttgtccgaagtgaagtttcttggtcatgtcatctcatctggaggagtggcagtagatccaagcaatgtggagtcagtgttaagttggaagcaacccaagacggtttcagaaattcgtagtttccttggacttgcggggtattaccgcaggtttattgagaacttttcaaagatcgccagaccaatgactcgtctgcttcagaaggaagtgaagtacaagtggacagaggattgtgaacaaagtttccaagaactgaagaaaaggctagcgactgcgccggtgttaattttgcctgattcgaggaaaggtttccaagtgtattgtgatgaatcccgactcggtttgggttgtgtgttgatgcaagaaggaaaggtggttgcctatgcatctaggcaattacgtcctcatgagaataactacccaacgcatgacctagagttggcagctgtggtgcatgcattgaagatttggcgtcattatcttttcggtaaccgtacagagatgtatacggatcataaaagtttgaagtacattttcacccaacctgatttgaacatgcgtcagcgaagatggttagagttgattaaagattatgatatggaaatccactatcacccggggaaagcaaatgttgtagccgatgctcttagcaggaaaagctactgtaatatgtcagaaggtcgacatttaccttgggagttatgccaagaatttgaaaagttaaacttggatatagtcagcaaaggttttgtggctactttagaagctcaacctactctgtttgatcaagttagagaagctcaagtgaatgatcctgatatccaagaaataaaaaagaacatgagaagaggaaaagccatcggttatgtagaagatgagcaaggaactgtgtggttaggagaaagaatttgcgtgcctgataataaggagttgaaggatactatcatgaaagaagctcatgaaactttgtattccattcaccctggaagcattaagatgtaccaagacctaaagcaacaattctggtgggccagtatgcgacgtgagatagaagaatatgtggctctatgtgatgtatgtcagcgggtcaaggcagaacatcagaagccagccggtctgttacaaccgttgaagattccagagtggaagtgggaagaaataggaatggattttataaccggtctacccagaacgtcggcaggacatgattctatttgggtagtggttgataggttgacaaaactcgctcacttcataccggtcaaaacaacttacacggggaataagcttgcagagttatacatggccagagtggtatgcttgcatggtgttcctaagaagatagtgtcagatagaggtagccagtttacttcaaagttttggcagaaattacaagtagagatgggtacccgtttgaatttcagtaccgcttatcaccctcaaacagatggtcagacggaaagagtaaaccaaattttagaagatatgttgagagcctgtgttctagattttggtggaagttgggataagaatcttcgaagtaagcgagaggaataccaggaatcgcgttatacggttctgcaagttgctatttactttgctccttgccctcctaagtgcttatctgactcttcctccgccctcttctgggagtttagatggctagccgcccccgccgtgcagctcgtgcaccagcccactttggttttgaagatggtagagtcgagccagaagaaaatcatgagtcagccaatgagcagtctcaacacagcaaccgttcgcaccgtactgcttcccgcaacgcagaagttgagcaaccccgccgtagcgaccgctcgcatcgcacagcttcccgtgatgcagagatggaacagtctcaccgctctcaccgctctgccagtcacaattctggagaagaacgcctcccttccccacctcatgtggaaaacaacatgaagcacttaatggcagttcagacacaaatctggcaaggattagtcgacacagacaagaagaagatcaggaaattcttgaaagggatcgcagttggaatgagactccagttgcttgctcatgatttccccacttttcaacatatgatcaacaatatccgaaaagatttcgagatcttctgtgatgcatcaagacaaggcttaggatgtgtcctaatgcaagaacgaaaggttgtggcctatgcatcccggcagctcaggcctcatgaagtcaattatcctacccatgatctcgagttggcagccgtggttcatgctcttaagatctggaggcactatttaatcgggaatagatgtgaagtatacaccgatcacaaaagtcttaagtatatcttcactcagaccgagttaaatatgaggcagagaagatggctggaactaatcaaggattacgatcttggaatccattaccaccccggtaaagctaacgtggtcgctgatgcgctaagtcgcaaggcctattgcaatgtagctcaaatacggcctgaccaagatcgcctgtgcagataaatggagaagttaaggctgaccgtggtacagtcaggtgtccctgctagcttgacagtacagcctaccctagaatcgcaaattcgggaggctcagaaagatgacgaagggataaaagagttaataaaaagaatacaggagaagaaagacaccaatttctccatagacgatcaaggcacagtttggtgcggtccacgcatctgtgtaccggccaagaaggagttaagagatctcatcctaaaggaagctcatgagtccgcctactccattcatccaggaagtacgaagatgtaccaagatatcaaggcatacttctggtgggctggaatgaagcgagatgtcacagaatacgtagccttgtgtgacatttgccaaagagtcaaggcagaacatcagaggccagctggtctgctgcaacccctaccgattcccgagaggaaatgggaagagatcggaatggatttcatcaccggtttgccaagaacccctagcgggtacgactccatctgggtaatcgtggaccgactcacgaaatcagctcatttcatgccagtgaaaaccacctttgatggaaaggaactagcagagaagaccatcaagttctacaaagtccaatggagcaaccattctgaagatgaggcaacctgggagcgagaagatcttctc

SEQ ID NO: 15666 - DNA, 3249 bp, Oryza sativa
  unsure (1)..(3249): unsure at all n locations
  Clone ID: TFbOSC409804j.C1.o8.gm
atggtgaacacgcgcaccggaagtggaagtggaagtggaagtggagctgctaacaatggaggagatcccacgctagctcagattctggcccaacaaacacaactgatcaatctgttagtgcagcaggcacagaatcagcaggcaaacaatcagaaccagaatccatccccacctccccaaaacaagctggcagatttcttacgtgtgagaccccctaccttttcaagcaccaccaatccagtagaagcaggagattggctgcatgcggtggagaagaagttggatttgatccagtgtactgagcaggagaaagtttcttttgcttcgcatcaattgcatggtcctgctgctgaatggtgggatcattttcgccaaggcagggctgaaggagagcctataacttggcaggaattcacggccgctttcaagaagacacacataccaacgggtgttgtagctctaaagaagagagaatttagagcactcaaccagggatctcgttcagtcaccgagtacctccatgatttcaaccgtttagctcgttatgctccggaagatgttcgcaccgatgaagagcgtcaggagaagttcttggagggactgaatgatgagttgtcttatgccttgatgtctacggatttccgggatttccagcagttggtggacaaggcgattcgtcaggaaaacaagtataaccggatggagcagaagaagcgcagggctgcccaattcaaggcacaacaaggcagtaaccagagaccgcgtctcgttacgggacctcaagctccatcgtaccctcaaggaggatcttcatcagttgtccgcccccaacgccagttctacaacaacaatactggtaatcgtggtaatgacaaccgtgacatggttgctcgtcctgcagcaactccagctcagaaccagcccgtcaggaaggaacagggaagcaagccaggggtgtgcttcaattgtggtgatccaggacattatgctgataagtgtcctaagcctcggcgcgtgaagaacgctccagccccaaacaactccaatgctccagtgccgaaggctcgtgttaatcatgttgcagcagcagaagctcaaaatgcaccagatgtggttttgggtatgccacctaagagagacatagagtttcggatagacttggtacctggaaccaaccctatccataagagaccatacagaatggcagctaatgagttagctgaggtgaagagacaggtggatgatttgcttcagaaaggatacatcagacccagtacttcgccatggggagcaccagtcatctttgtggagaagaaaaatcatactcagagaatgtgcgtggattatcgagcgttgaatgaggttactaccaagaataagtatcctctacccagaattgatgacctgtttgatcaactggaaggtgctacagttttctccaagatagatctccgttctggatatcatcaacttcgaatccgtgaggaagatataccaaagaccgccttcacaactcgcaaaggttttgtggctactttggaagctcaacctactctgtttgatcaagttagagaagctcaagtgaatgatcctgatatccaagaaataaaaaagaacatgagaagaggaaaagccatcggttatgtagaagatgagcaaggaaccgtgtggttaggagaaagaatttgcgtcccagataataaggagttgaaggatactatcatgaaagaagctcatgaaactttgtattccattcaccctggaagcactaagatgtaccaagacctaaagcaacaattctggtgggccagtatgcgacgtgagatagcagaatatgtggctctatgtgatgtatatcagcgggtcaaggcaaaacatcagaagccagccggggtggggaagcccggtcgcacctccgccctcgccgccggccgtcggagccccgtcgccgccgccgaccatccaatctccggcgaggtcgccaacccgggccggccattgatgatactgagaagcggcgagaagtccgtgtgggtcgctggggagtccatgcctctagttgtagagggggtgattatgatccagatagaaattttgggcgtgacagcttctgagccatacacgaggaagaagggtctctccttgttggacgttgtcggtgtgcactatgccgtttgccctttcgacttgtccattgctctgagggtgagaaaccgaggcgaagcaaatcttgactcccaatccaatacagtaatcctggaagtcagcgctgatgaactgagagccgttgtctgttatgatgcggtgaggcaatccatatctgcagaatatccctttgacaaacttgatggcattatcggccttgatttctcctgtgggcgttgcctcaatccacttggtgaatttgtcgatggacacaaacaggaacttgtggccgccttgtcctcgtgggaatggtctgagtatgtcgagccccagcacgagaacggccaagaggagatgtttgccgtcgtcggacgagatgcatttgagaagtactccgtttggagcctttttgtacagatctttgccgatcatacagtagattttggcttgtcgggttatcttctcagcttctctgtcgtcttcgggcaactcatcactactcagcaacttaatgagcggggtccgccagtcttccgtggtcttgatatcggcaacgacccgagggagagggcgcgcggaccgggtccacgggagtggggcccacacgtcagcctctcggtccacggtggaccgggtgcacgcggctggcgccggccggcgccgtgggtcccacgcgtcagccgcacccgcgggcgcgggcggctgacggccgggccctacctggcagccgcggggcgtgcccggaggcggcccttcccggcacagccgacgggagacggcgcacccgcgccccgatggtcaccgcccggcgaccaccggcgcggcggaacggcgcccgagagagcggagagganaggaacgaaggggcggtccacggctcaccccgggtcgacggcaacgacgggaacggcggccgaagcggaggaaggcggcggcgcggttcgggacgacgaggacgacggcgctccgacggtcggcgggcgaaacggaggcgcggacgaggtcgacgaggacgctgcgaagccgatggaggtgacgccgagacgggaggaggcgcgcggggacggcgggatgcggcggattcggcggcggcggcggcgctag

SEQ ID NO: 15667 - DNA, 2885 bp, Oryza sativa
  Clone ID: TFbOSC5118j.C1.o2.fg
atgggggtcgctggggagtccattgcctctggttttgagggggagattatgatccaggaacggtgcactgtgatgccgccccattcaccgagaaatttgatcaaggtgttaggattcgtcagggagctgaggttgatggcttttgagtatcatcctcacaagcctcatggtcaagattatggaacttacacctatcctgatggtgaggagagtgccactctgatgcaggcggtgcatatgcttagttctatgtatgcagtaagtgtggagcgagacaaagccgctcatgacagggaaaactggaatcgaggcaagatttgcaagttggagagtaaggtgtaccgtctacagaaggaattagctgagcttaaaggagagacgccgccgccaacacccaagcttcacctcaccgcaaggaagagaacctgtccaccacctcgtctccagttagcttcgaagcttcgcgtgatgggagatgctgtgccagatcgtgctgaacctgtcatccacgtcttaagtgatgaggaagaagaggaatacccagaagaaagaatggtgaacacgcgcactggaagtggaagtggagctgctaacaatggaggagattccacgctagctcagattttggcccaacaaacacaactgatcaatctgttagtgcagcaggcacagaatcagcaggcaaacaaccagaaccagaatcaacccccacctccccaaaacaagttggcagatttcttacgtctgcatggtcccgctgctgaatggtgggatcactttcgccaagccagggctgaaggagaacctatcacttggcaggaattcacggccgctttcaagaacacgcacataatgacaggtgttgtagctctgaagaagagagaatttagagcgctcaaccagggatctcgttcggtcactgagtacctccatgatttcaatcgtttagctcgctatgctccaaaatatgttcgcaccgatgaagaacgtcaggagaagtttttggagggactgaatgatgagttgtcttatgctttgatgtctacggatttccgggatttccagcagttagtggacaaggctattcgtcaggaagacaagtacaatcgaatagagcagaagaagcgcagggctgcccaatttaaggctcaacagggcagtaaccagaggtcgcgtctcgttacgggacctcaagctacatcataccctcaaggaggatcttcgtcagttgctcgccctcaacgccagttctacaacaacaatactggtaatcgtggcaatgacaaccgcaacgtggtcgctcgtcctgcagcaactccagctaagaaccagcctgtcaggaaggaacagggaagcaagccaggggtgtgcttcaattgtggtgatccagggcactatgctgataagtgtcctaagcctcggcgtgtgaagaacgctccagccccgaacaactctaatactccagcaccgaaggcacgtgttaatcatgttgtagcggcagaagctcagaatgcaccagatgtggttttgggtatgccacctaagagagacatagagttccggatagacttggtccctggaaccaaccctatccataagagaccttacagaatggcagctaatgagttagctgagataaagaggcaggtggatgatttgcttcagaaaggatatatcaggcccagtacttcgccgtggggagcaccagtcatctttgtggagaagaaagatcatactcagagagtgtttatggaatatctggataagtttgtcgtggtgtttattgatgacattcttatttactccaagacaaaagaagaacatgaagagcatcttcgtctagctttagagaaactacgtgagcatcagctctatgccaagttcagtaaatgtgaattttggttgtctgaagtgaagtttcttggtcatgtcatctcatccggaggagtggcagtagatccaagcaatgtggagtcagtgttaaattggaagcaacccaagacggtttcagaaattcgtagtttccttggacttgcggggtactaccgcaggtttattgagaacttctcaaagatcgccagaccaatgactcgtctgcttcagaaggatgtgaagtataagtggacagaagattgcgagcaaagtttccaagaactgaagaaaaggctagtgactgcgcctgtgttaattctgcctgattcaaggaaaggttttcatgtgtattgtgatgcatcccgactcggtttgggttgtgttttgatgcaagaaggaatggtggttgcctatgcatctaagcaattacgtcctcatgagaataactacccgacgcatgacctagagttggcagctgtagtgcatgcattgaagatttggcgtcattatcttttcggtaaccgtacagagatgtatacggatcataaaagtttgaaatggttagagttgattaaagattatgatatggaaatccattatcacccgggtaaagcaaatgttgtagccgatgccctcagcaggaaaagctattgtaatatgtcagaaggtcgacatctaccttgggagttatgccaagaatttgaaaagctgaatttggggatagtcagcaaaggttttgtggctgctttagaagctcaacctaccttgtttgatcaagttagagaagctcaagggaatgatcctgacatccaagaaatcaaaaagaacatgagaagaggaaaagccatcggttatgtagaagatgagcaaggaactgtgtggttaggagaaagaatttgggtacctgataacaaggagttgaaggataccatcgtgaaagaagctcatgaaactttgtattccattcaccctagaagcactaagatgtaccaagacctaaagcaacaattctg

SEQ ID NO: 15668 - DNA, 3940 bp, Oryza sativa
  Clone ID: TFbOSC5135j.C1.o1.np
atggtcgccgccggcgaccaccggcgcggcggagcggcgcccgagaaaggggagggaagggggaagtgaaacggcggtccacggctcaccccgggtcgacggtgacgacgggacggcgaccggagcggaggaaggcggcggcgcggctcgggtcaacgagggcgacggcgttccggcggtcggcgggcgaaacggaggggtggacgaggtcggcgaggttgcggcgaacccgaaaaaagcgacgccgaaacgggagagggtccggggcgacgacggcggcggaccggagctcggcggcgacggcggagagagggagtgacggcgcgagctcgattccgacggggagagagagcggcgagtggcggaaacggtggagggaggcacggggagcgtttatatagtgttgggagggggagagaacggccggaggggaaggaaaccggcgcggcgatctcgggctccatcaatggcgccggcgaggtttgcgggagtgtttccaaacgaatccgagggagagagagagggaaaaattaaatgatgatgttaatgtcttgtttaactcctggtttggaatggttaattcctagtttggagatagcactgtgcagccgatgccgcgctacaagcctgagtatttgttcggtactgaaggttttgtccaagagttgcgtacgatgtccttcctcataggatttgggattgcccctttgtatgcccagatccctcatgaccgtgatgaagagaagtgccgggtcaaagttaccttgaacagcaatcgtgaagatattccatcagtgatgttcgaggctggaggaggaagctacatccatgcttgtcaggaggtagcaaggatcgccataggagagctccgtgaaagctacaatgatcggttggccgacaccgagtatcgctaccatcctcgtcaaccccagggaagtgatcatggcagctaccttgaaccggctgggatcgagaatgatgctaccacaaggcacttggttgagatgctatgggctatggatgaaacccgcgctgagatcgtgatagccgctcaagatcgtgaagaccagaatcggggaaagatctgcaagctagaagacaagctggatcgtttggagaaagagctagcagcattgaagggagaagcaccaccgcagaaggccagggttcgtcttaccgcaaggaagagagctctattcgtccctcgctaccagttggcaccaaaggttcgtgtggtggaaaaagaagctaccctagccccagcggatcctccggtcgtcaatgtaagtgatgatgatgaagaggaatccaagcgcacccattccaagatcgagtggggaccaactcaagatgatggggacgtgccgaacgagccttcaatcaactccgatgcccggaagacctagacaacgggaatggccccaacaacaacaacaataacaacaatgcggagaatcccacgctcgctcaagtcctggcccaacagacacagttgatgaatctgatgatgcagcaacttcaaaaccagcagaaccaagggaacaatcatgcgcctcctcagaacaagcttgcagagtttcttcgcgtgaggccacctgttttctctagcaccactaatcctgtcgaagctagtgattggttgcacgccatagagaagaagttggatctgctccagtgcagagaccaggagaaggtctcttttgcgtcacaccagctgcatggccctgcttcggaatggtgggatcactcctgccttaacaggactactgctgaacctatctcttggcttgagttcaccgctgctttgcgcaagacgcatataccatcgggagtggtgtccctcaagaagaaggagttcaggtcgctcacacagggttctcgcacagtcacggagtatctgcacgagtttaatcatctggctcgttatgctccagaggatgtgcgcaccgatgaggagcgccaggagaagttcttggaaggacttaatgatgagctttcttacccactcatgactggagattatcacgatttccagaagttagtggataaggctattcgtcaggaggacaattataatcgcatggagcagaagaaacaccggattgctcacttcaaggcacagcagggaaatagtcagaggccgcgtattgcttcgggacccctgtccatgccacagggaggttcttcgtctgttgttcgtccgcagcgacaattctttaacaacaacgcgggcaacaacaaccgcaagccagctccatgtccggtggcaactccgtcgcagcaatagcctgccaagagggagcaaggcagcaagcccggtgtgtgcttcaactgtggagacccaggacattatgctgacaagtgtccgaagccctgccgcgcgaaggtcgtccctgcccagaacaactcctccgcaccagcagccaaggctcgtgtcaaccatgttgctgctgcagaagctcaaggtgctccagatgtgattttgggtacgttccctgttaactcagttcctgcaacagtgcttttcgattctggtgctacacattcgtttttatctatgagttttgcggaaaatcatgggatggaggtagaggagcttagacgtcctttgatggttagtactccgagtaaccaagcactctcctcacaacgtagcccctctgtcagaatagagatccgaggtgtacctttcctggccaaccttattctgttagaatctaaagatcttgatgtcatcctagggatggactggctagccagatataaaggtgtgatagattgtgccaatagaaaagtaactctcaccagcaatgatggtcaagttgtaactgttcatgcattgccctctgaacctcgaaggtcaagtctaaaccaaataactttggaagagattcctatagaccgggagtaccctgatgtgttccctgatgatttacctggtatgccgcctaaaagggatatagagttcagaatagatctggtgccaggaacaactccgatccataagcgaccatatagaatggcagccaacgaattggcagaagtcaagaggcaagtagatgatttgcttcagaaaggatacatcagaccgagttcatctccatggggagctcctgttatctttgtagaaaagaaagaccatacccagaggatgtgtgtggactatcgtgcacttaacgatgtgactatcaagaataagtatccactgcctagtattgatgatttgtttgatcaacttaaaggtgccaccgttttctccaagatagatcttcgatcagggtatcaccagttaaggattaaggagtatgggctatttgaatgtacagttatgtcttttggacttaccaatgcccctgctttcttcatgaacttgatgaacaaggtgttcatggaatacctggataagttcgtggttgtctttattgatgacattctcatatattcttaaactaaagaagagcatgaagaacatcttcgtcttgcattagagaagctgcgagaacatcagttgtatgccaagtttagcaaatgtgaattctggttgtctgaagtaaagttccttggtcacgtcatctcagcaggaggagttgccgttgatcctagtaatatggaatctgtaaccaactcgaaacaaccgaagacagttacagagattcgcagtttcctaggtctcgcaggatattaccggaggttcatagagaatttttccaagattgccaagcccatgacacgactgcttcagaaggatgtgaagtacaagcggttagaagaatgtgagcagagttttcaagagttgaaaagtcacttaatatcagctcccattttgattttgcctgatccaaagaagggtttccaagtgtactacgatgcatccaagcttggggtgcctaatgagtgagctaactcacattctgctgtaccagtgtagtcaattgcacgc

SEQ ID NO: 15669 - DNA, 3963 bp, Oryza sativa
  Clone ID: TFbOSC5376j.C1.o5.fg
atgggggtcgctggggagtccattgcctctggttttgagggggagattatgatccaggaacggtgcactgtgatgccgccccattcaccgagaaatttgatcaaggtgttaggattcgtcagggagctgaggttgatggcttttgagtatcatcctcacaagcctcatggtcaagattatggaacttacacctatcctgatggtgaggagagtgccactctgatgcaggcggtgcatatgcttagttctatgtatgcagtaagtgtggagcgagacaaagccgctcatgacagggaaaactggaatcgaggcaagatttgcaagttggagagtaaggtgtaccgtctacagaaggaattagctgagcttaaaggagagacgccgccgccaacacccaagcttcacctcaccgcaaggaagagaacctgtccaccacctcgtctccagttagcttcgaagcttcgcgtgatgggagatgctgtgccagatcgtgctgaacctgtcatccacgtcttaagtgatgaggaagaagaggaatacccagaagaaagaatggtgaacacgcgcactggaagtggaagtggagctgctaacaatggaggagattccacgctagctcagattttggcccaacaaacacaactgatcaatctgttagtgcagcaggcacagaatcagcaggcaaacaaccagaaccagaatcaacccccacctccccaaaacaagttggcagatttcttacgtctgcatggtcccgctgctgaatggtgggatcactttcgccaagccagggctgaaggagaacctatcacttggcaggaattcacggccgctttcaagaacacgcacataatgacaggtgttgtagctctgaagaagagagaatttagagcgctcaaccagggatctcgttcggtcactgagtacctccatgatttcaatcgtttagctcgctatgctccaaaatatgttcgcaccgatgaagaacgtcaggagaagtttttggagggactgaatgatgagttgtcttatgctttgatgtctacggatttccgggatttccagcagttagtggacaaggctattcgtcaggaagacaagtacaatcgaatagagcagaagaagcgcagggctgcccaatttaaggctcaacagggcagtaaccagaggtcgcgtctcgttacgggacctcaagctacatcataccctcaaggaggatcttcgtcagttgctcgccctcaacgccagttctacaacaacaatactggtaatcgtggcaatgacaaccgcaacgtggtcgctcgtcctgcagcaactccagctaagaaccagcctgtcaggaaggaacagggaagcaagccaggggtgtgcttcaattgtggtgatccagggcactatgctgataagtgtcctaagcctcggcgtgtgaagaacgctccagccccgaacaactctaatactccagcaccgaaggcacgtgttaatcatgttgtagcggcagaagctcagaatgcaccagatgtggttttgggtatgccacctaagagagacatagagttccggatagacttggtccctggaaccaaccctatccataagagaccttacagaatggcagctaatgagttagctgagataaagaggcaggtggatgatttgcttcagaaaggatatatcaggcccagtacttcgccgtggggagcaccagtcatctttgtggagaagaaagatcatactcagagagtgtttatggaatatctggataagtttgtcgtggtgtttattgatgacattcttatttactccaagacaaaagaagaacatgaagagcatcttcgtctagctttagagaaactacgtgagcatcagctctatgccaagttcagtaaatgtgaattttggttgtctgaagtgaagtttcttggtcatgtcatctcatccggaggagtggcagtagatccaagcaatgtggagtcagtgttaaattggaagcaacccaagacggtttcagaaattcgtagtttccttggacttgcggggtactaccgcaggtttattgagaacttctcaaagatcgccagaccaatgactcgtctgcttcagaaggatgtgaagtataagtggacagaagattgcgagcaaagtttccaagaactgaagaaaaggctagtgactgcgcctgtgttaattctgcctgattcaaggaaaggttttcatgtgtattgtgatgcatcccgactcggtttgggttgtgttttgatgcaagaaggaatggtggttgcctatgcatctaagcaattacgtcctcatgagaataactacccgacgcatgacctagagttggcagctgtagtgcatgcattgaagatttggcgtcattatcttttcggtaaccgtacagagatgtatacggatcataaaagtttgaaatggttagagttgattaaagattatgatatggaaatccattatcacccgggtaaagcaaatgttgtagccgatgccctcagcaggaaaagctattgtaatatgtcagaaggtcgacatctaccttgggagttatgccaagaatttgaaaagctgaatttggggatagtcagcaaaggttttgtggctgctttagaagctcaacctaccttgtttgatcaagttagagaagctcaagggaatgatcctgacatccaagaaatcaaaaagaacatgagaagaggaaaagccatcggttatgtagaagatgagcaaggaactgtgtggttaggagaaagaatttgcgtacctgataacaaggagttgaaggataccatcgtgaaagaagctcatgaaactttgtattccattcaccctagaagcactaagatgtaccaagacctaaagcaacaattctggtgggctagtatgcgacgtgagatagcagaatatgtggctctatgtgatgtatgtcagcgagtcaaggctgaacatcagaagccagccggtctgttgcaaccattgaagattccagagtggaagtgggaagaaatagagctatacatggccagagtggtatgtttgcatggagttcccaagaagatagtgtcagatagaggtagtcagtttacctcgaagttttggcagaagctacaagtagagatgggtacccgtttgaatttcagtaccgcttatcaccctcaaacagacggtcagacagaaagagtaaaccaaattttagaagacatgttgagaccatgtgttctagattttggtagaagttgggataagaatttgccgtacgcggaattctcatataacaacagttatcaagctagtttgcaaatggctccgtatgaagcattatatggccgaaagtgtcgtacgccgctcttgtgggatcaaaccggtgagcgtcaagtttttgggacagacatattgcgagaggcagaagaaaaagtgaagattatccaagaaaggttgcgcgttgctcagtcacgtcagaagagctatgccgacaatcgtcgcagagatttgactttcgaaggagattatgtgtaccttcgggttacgccgttacgaggtgttcatcgtttccagaccaaagggaaattggcaccgcgtttcgtgggaccttttaagatcgtaagtcgaagaggtgaagtagcttatcagctagagttgcctccgtcaatggcgggaatacacgacgtgttccacgtgtcacagttgaagaaatgtttgcgtgtacctacggaggaagcagatccggaacatatagagcttcaagaagatttaacctatgttgagaagccagtcagaatcttggaagtaagtgagaggaataccaggaatcgcgttatacggttctgtaaggttcagtggagcaatcattcagaagaagaagccacttgggagcgagaagatgaattaaagtcagctcaccctcatctcttcgccggttcttctgaatctcgaggacgagattccgtttaa

SEQ ID NO: 15670 - DNA, 4923 bp, Oryza sativa
  Clone ID: TFbOSC5848j.C1.o1.np
gtgacaagttggtaccagagccaccttgaccttaggacaagccaaatgacgccgccccatccgccggaaagcttgatcaatgcggtaggattcgtcagggagctgagaatgatggcatttgaagtaggctacgacgttgcccctgagtatcgccagattccctatgaccccaacgaggagaagtgtcgtgttcgcgtgacgttgactagtgatcgagaagaccttctgtcgataaagtttgaagctgggggaagaaagtatagtcatgcttgtcaggaggtagccttggtggccattggagagctacgtcatcgctttgatgaggagttagagtcatcagctttccagtatcatccacacaagcctcatggtcaagactatggagtttaccactgccctgaagatgaagatagcaccactctgaagcatgctgtgtatatgcttagcgccatggatgcagtaggcgtggagcgggagaaaacagctgatgacagggaaaactggaaccgtggcaggatttgcaagttggagagcaaggtgtaccgtctgcagaaggaactggccgagcttaagggagaagcaccaccgccagcacccaaacttcgcctcaccgcaaggaagagaacccgtccaccacctcgtatccagttggcttcgaagactcgtgtggtgggagatgttgtgcctgatcatgctgaacctatcatccatgtcttaagtaatgatgaagaggaggaagacccagaagaaagagagccagctactccagaggaagaagatccatctcttcgttccgatgcaaggcgcaccactaacccagtagaggcaggtgattggctgcatgctgttgaaaagaagttagatttgattctgcgcaccgagtaggagaaggtttcctttgctttgcatcagttgcatggtcctgctgctgagtggtgggatcacttttgtcaaacacagagctgcgggagagcctatcacttggcgggagtttactgctactttcaagaagacacatataccatcaggtgttgtggcacttaagaagagagatttcagagcactcaatcagggatcctgttctgtcacagagtacctccatgactttaatcgcctagctcattatgtcccagatgatgttcgcactgatgaagaacgtcaggagaagtttttagagggactgaatgatgagttgtcttatgcattgatggctatagaataccggaatttccagcagttggtggacaaggcgattcgccaagaagacaagtacaataggatggaacagaagaagcgtagggctgcttatttcaaggctcaatagggtaatagccagaggccgcgcattgctttgggacctcaagctgcaccatacccatagggaggatcctcttcagttgctcgccctcaacgccagttctacaacaacaacactggtaatcacagcaacgacaatcgtaatgtggtcactcgtcctgtagcagctccaactcaaaatcagcctgtcaggaaggaacagggaatcaagccaggggtgtgcttcaattgtggtgatccaggacattatgctgataagtgtccaaagcctcggcgtgtgaagaatgctcctgtccagaacaactccaatgctccagcaccgaaggctcgtgttaatcacgttgcagctgcagaagcctagaatgcacctgatgtggttttgggtacgtttcctgttaactctatacccgcaactgtgctttttgatttcggtgctacacattcctttttgtctaaaagttttgcgagcaatcatggaatggaagttattagtcttgggaggcctttactagttaataccccaggcaatcaagtatcctcaacgcagtactgtccttccattactacagaaatacaagaaattcctttcccatcacacttatcttgctagaatccaaagatcttgatgttatcttaggggtggattggctaacccatcacagaggagttatagattgtgctaaccgtaaggtgactttaacaagtagcaatgggtaaacagtgtctttctttgtgtcctcccctagatctcatggtttgacattaaatcaagttgctttgcaagagatcccaatagtacaagactatccagatgtgttcccagaggatttgccaggtatgccacctaagagagacatagagttccggataaacttagtacctggaaccaaccctatccataagagaccttacagaatggcagctattgagttagcagaggtaaagagacaggtggatgatttgcttcagaaaggatatatcagacccagtacttcgccgtggggagcaccagtcatctttgtggagaagaaagatcatacccaaagaatgtgtgtggattatcgagcgttgaatgaggtcactatcaagaataagtatcctctacctaggattgatgacttgtttgatcaattggaaggtgctacagtcttctccaagaaagatctttgttccggatatcaccaactttgaatccgtgaggaggatataccaaagatcgcctttacaacacggtatggtttgtttgaaagtaccgttatgtcgtttggactcactaatgccccggcctatttcatgaacttgatgaacaacgtgtttatggaatatctagataagtttgtcgtggtgtttattgatgacatccttatttactccaagacaaaagaagagcatgaagagcatcttcgtcttgctttagagaaactacgtgagcatcagctctatgccaagtttagtaaatgtgaatttggttgcccgaagtgaagttccttagtcatgtcatctcagctggaggagttgtcgtggatccaagcaatgtggagtgagtgctaaattggaagcaacctaagatggtctcagagattcgtagtttccttggtctgcggggtactaccgcaggtttattgagaacttctcaaagatcgctagaccaatgtctcgactgcttcagaaggatgtgaagtataagtggacggaagagtgtgagcagagttttcaagaattgaagaaaaggctagtgactgcgccaatgttagtcttgcctgatccaaggaaaggttttcaggtgtattgtgatgcatctagacatggtttgggttgtgttttgatgcaagatgggaaggtggttgcctatacatctaggcagttacgccctcatgagaataactatccaacacatgatgtagagttggcagctgtggttcatgaattgaagatttggcgtcattacctttttgataaccgtacggagatgtatacggatcataaatgtttaaagtacattttcactcaacctaatctgaacatgcgtcaacgaagatggttagagttgatcaaggattatgacatggaaattcattatcatccaggtaaagcaaatgttgtagcagatgctctcagcaggaaaagctactgtaatatgtcagaaggacgacacctaccttgggagttatgccaggaattggaaaagttgaacttgggaatagtcaataaaggttttgttgccgctttagaagctcaacctactctttttgatcaagttagagaggctcaagtgaatgatcttgatatctaagaaattgaaaagaacatgagaagaggaaaaaccatcggttatatagaagatgagcaaggaactgtgtggctaggagaaagaatttgcgtgcccgataataaggagttgaaggatactattatgaaagaagctcatgaaactttgtattccattcatcctgggagcactaagatgtatcaagacctgaagcaacaattctggtgggctagcatgcgatgagagatagcggaatatgtggctctatgtgatgtgtgtcagcgagtcaaggcggagcatcagaagccagcctgtcagctgcaaccgttgaagattctagagtggaaatgggaggaaataggaatggattatatcaccggtctacccagaacgtcggcaggacaagattctatttgggtagtggttgataggcttactaaagttgctcattttatacctgtcaaaacaacctactcgggaaataagcttgcagagttatatatggcaagagttgtatgtttacatggtgttcccaagaaaatagtgtcagacagaggtagtcagtttacttcgatgttttggcggaaactacaagaagagatgcgtactcgtttgaatttcagtactacttatcaccctcaaactgatggccagacaaaaagagtgaatcaaattttagaagacatgttgagagcctgtgttctagatttcggtggaagttgggataagaatatgccgtacgccgaattcggttatatcaacagttatcaagctagtcttcaaatggctccatatgaagcattgtatggtcgaaagtgtcgtacaccgctccatttgggatcaaaccggtgagcgtcaagtttttgggacagatatattgcgagaggcagaagaaaaagtgaagattatccaagaaaggttgcgtattgcccagtcacgttagaagagctatgcagacaatcgtcgtagggatttgactttcgaagaaggagattatgtatacctacgggttacgctgctgcggggagttcatcgttttcagaccaaagggaaattggcaccgcgatttgtgggaccttttaagattgtgagtcggagaggtgaagtagcttatcaactagagttgcctccgtcaatggcgggaatacatgacgtgttccatgtgtcgcagttgaagaaatgtttgcgtgtacctacggaggaagcagatcctgagcatatagagcttcaaaaagatttaacttatgttgagaagccagtccgaattcttgtgtttccgacgttccggaggagagcgtttacgttgaggaaggcgattgatcaatactaaaatgctt

SEQ ID NO: 15671 - DNA, 3426 bp, Oryza sativa
  Clone ID: TFbOSC900055j.C1.o25.gm
atggtgaacacgcgcaccggaagtggaagtggaagtggaagtggagctgctaacaatggaggagatcccacgctagctcagattctggcccaacaaacacaactgatcaatctgttagtgcagcaggcacagaatcagcaggcaaacaatcagaaccagaatccatccccacctccccaaaacaagctggcagatttcttacgtgtgagaccccctaccttttcaagcaccaccaatccagtagaagcaggagattggctgcatgcggtggagaagaagttggatttgatccagtgtactgagcaggagaaagtttcttttgcttcgcatcaattgcatggtcctgctgctgaatggtgggatcattttcgccaaggcagggctgaaggagagcctataacttggcaggaattcacggccgctttcaagaagacacacataccaacgggtgttgtagctctaaagaagagagaatttagagcactcaaccagggatctcgttcagtcaccgagtacctccatgatttcaaccgtttagctcgttatgctccggaagatgttcgcaccgatgaagagcgtcaggagaagttcttggagggactgaatgatgagttgtcttatgccttgatgtctacggatttccgggatttccagcagttggtggacaaggcgattcgtcaggaaaacaagtataaccggatggagcagaagaagcgcagggctgcccaattcaaggcacaacaaggcagtaaccagagaccgcgtctcgttacgggacctcaagctccatcgtaccctcaaggaggatcttcatcagttgtccgcccccaacgccagttctacaacaacaatactggtaatcgtggtaatgacaaccgtgacatggttgctcgtcctgcagcaactccagctcagaaccagcccgtcaggaaggaacagggaagcaagccaggggtgtgcttcaattgtggtgatccaggacattatgctgataagtgtcctaagcctcggcgcgtgaagaacgctccagccccaaacaactccaatgctccagtgccgaaggctcgtgttaatcatgttgcagcagcagaagctcaaaatgcaccagatgtggttttggacgtgtttcccgaggatttgccagctaatgagttagctgaggtgaagagacaggtggatgatttgcttcagaaaggatacatcagacccagtacttcgccatggggagcaccagtcatctttgtggagaagaaaaatcatactcagagaatgtgcgtggattatcgagcgttgaatgaggttactaccaagaataagtatcctctacccagaattgatgacctgtttgatcaactggaaggtgctacagttttctccaagatagatctccgttctggatatcatcaacttcgaatccgtgaggaagatataccaaagaccgccttcacaactcggtatggtttgttcgaatgtaccgttatgtcatttggactcactaatgccccagcctttttcatgaatctgatgaacaaggtgtttatggaatatctggataagtttgtcgtggtgtttattgatgacattcttatttactccaagacgaaggaagaacatgaagagcatcttcgtctagctttagagaaactacgtgagcatcagctttatgccaagttcagtaaatgtgaattttggttgtccgaagtgaagtttcttggtcatgtcatctcatctggaggagtggcagtagatccaagcaatgtggagtcagtgttaagttggaagcaacccaagacggtttcagaaattcgtagtttccttggacttgcggggtattaccgcaggtttattaagaacttttcaaagatcgccagaccaatgactcgtctgcttcagaaggaagtgaagtacaacaaaggttttgtggctactttggaagctcaacctactctgtttgatcaagttagagaagctcaagtgaatgatcctgatatccaagaaataaaaaagaacatgagaagaggaaaagccatcggttatgtagaagatgagcaaggaaccgtgtggttaggagaaagaatttgcgtcccagataataaggagttgaaggatactatcatgaaagaagctcatgaaactttgtattccattcaccctggaagcactaagatgtaccaagacctaaagcaacaattctggtgggccagtatgcgacgtgagatagcagaatatgtggctctatgtgatgtatatcagcgggtcaaggcaaaacatcagaagccagccgtgaagaaatgtttacgtgcacctacggaggaagcagatcctgatcgtatagagcttcaagaagatttaacttatgttgagaagccagtcagaatcttggaactcatcctcatctcttcgccagttcttctgaatctcgaggacgagattccgtttaagggggcctcgccgccgtcgccgcctagtccacgccgccgccggccgagctccatccggcgccgcgccgccgcctccaccatcaccgtcgcttgccgtcgccgccattgttttcgccaaggggtggggaagcccggtcgcacctccgccctcgccgccggccgtcggagccccgtcgccgccgccgaccatccaatctccggcgaggtcgccaacccgggccggccattgatgatactgagaagcggcgagaagtccgtgtgggtcgctggggagtccatgcctctagttgtagagggggtgattatgatccagatagaaattttgggcgtgacagcttctgagccatacacgaggaagaagggtctctccttgttggacgttgtcggtgtgcactatgccgtttgccctttcgacttgtccattgctctgagggtgagaaaccgaggcgaagcaaatcttgactcccaatccaatacagtaatcctggaagtcagcgctgatgaactgagagccgttgtctgttatgatgcggtgaggcaatccatatctgcagaatatccctttgacaaacttgatggcattatcggccttgatttctcctgtgggcgttgcctcaatccacttggtgaatttgtcgatggacacaaacaggaacttgtggccgccttgtcctcgtgggaatggtctgagtatgtcgagccccagcacgagaacggccaagaggagatgtttgccgtcgtcggacgagatgcatttgagaagtactccgtttggagcctttttgtacagatctttgccgatcatacagtagattttggcttgtcgggttatcttctcagcttctctgtcgtcttcgggcaactcatcactactcagcaacttaatgagcggggtccgccagtcttccgtggtcttgatatcggcaacgacgtgttccgcctctgtagcccccgaaatacatcctcgaaattgtgccgagaataa

SEQ ID NO: 15672 - DNA, 4695 bp, Oryza sativa
  Clone ID: TFbOSC900186j.C1.o15.fg
atggttgacctcgtcaaaatgattccgacgtttccggagagtccgttttcgcaggggaagattttgaagagttccaaggccagcaaggcaactcctggtttggaatggtatattcctggtttggagatagatctgtatagccggatgccgcgctacaagcctgagtacttgtttggtgttgagggatttgtccaagagttgcgtacgatgtcctttgccataggatttgggactgcccctttttatgcccagattcctcatgatcgtcacgaagagaagtgccgagtcaaagtcaccttgaacagtaatagtgaagatatcccctcagtgatgttcgaagctggaggaagaaactacatccatacatgtcaggaggtggcaaggatcgccataggggagctccgcgatcgctacagtgatcagttggccgacactgagtatcgctaccatcctcgtcaaccactgggaagtgaccgtggcagctaccttgagactaagggaattaagaatgatgctaccacaaggcatttggttaagatgctgtgggctatggatgaaacccgtgcggagactgtgttagcggctcaagatcgtgaagaccggaatcgtggcaagatttgcaagttagaggacaaagtggatcgtttggagaaggaactagctgcattgaagggagaagcaccaccgcagaaggccaggattcgtcttactgcaaggaagagagctctatttgtccctcgctaccaattggcaccaaaggtccgtgtggtggaaaaagaagttaccccagccctagcggatcctccggtcgtcaacatggtgctcactcgcaacaacgggaatgaccccaacaacaataataacaacagcaatggagagaatcccacacttgcccaagtcctggctcaacaggcacagcttatgaacatgatgatgcagcaactccagaaccagcagaaccagggaaataaccatgcacctccccagaacaagttagcagaatttcttcgtgtgaggccgcccactttctctagtaccactaatccagttgaagctggtgattggctgcatgccatagagaagaagttggatttgcttcagtgcgccgatcaggagaaggtctcatttgcatcacaccagctgcatggccctgcctctgaatggtgggatcactttcgccttaacaggactactgctgaacctatcacttggcttgaattcaccgctgctttccggaagacgcatataccatcgggagtggtgtctctcaagaagaaggaattcaggtcgctcactcaggggtctcgctctgttaccgagtatctgcacgagttcaatcgtctggctcgttatgctccggaagatgtgcgcactgatgaagagcgccaggagaagttcttggaaggacttaatgatgagctttcttatccactcatgactggggattatcctgatttccagaagttagtggataaggctattcgccaggaggacaagtacaatcacatggagcagaagaaacgccggattgctcacttcaaggcacaacaggggaatagtcagaggccgagtcttactttaggaccccagtccatgccacagggaggttcttcgtttgttgttcgtccgcagcatcagttcttcaacaacaatgctggcaacaacatccgcaatcaagctccacgccctgttgcagcttcgacacagcaacaacctgccaagaaggagcaaggcagcaagtccggggtgtgcttcaattgtggagacccaggacattacgctgacaagtgtccgaagccccgacgcgtgaaggttgtccctgcccagagcaactctaccgtaccagcatcaaaggcccgtgtcaatcatgttgctgctgcagaagctcaagatgctccagatgtgattttgggtacgtttcttgttaacttagttcctacaacagtgcttttcgattctggtgctacacattcattcttatctatgagttttgcgggaaatcatgggatggaagtagaagatcttagacatcctttgatggttagtaccccaagtaatcaggcactctctttgcaacgtagcccctctgtcagaatagaaattcagggagtaccatttctggccaatcttatcctgttagaatccaaagacattgatgtcatcttagggatagactggttagccagatataaaggtgtgatagactgtgccaacagaaaagtaactctcaccagcaatgatggtcgagttgtaactgttcatgcattgtcttctgagtctttaaggtcaagactgaaccaaataactttggaagagattcctgtagtccgggagtatcccgatgtgttcccagacgatttacctggtatgccgcctaaaagggatatagagttcagaatagatttggtaccaggaacaactccgatccataagagaccttatagaatggcagccaatgagttggcagaagtcaagaggcaagtagacgatttgcttcagaaaggatacatcagaccgagttcatctccatggggagctccagttatttttgtggaaaagaaagaccatacccagaggatgtgtgtggactatcgtgcactaaatgatgtgactatcaagaataagtatccgttgcccagaattgatgatttgtttgatcagcttaaaggtgccaccgttttctccaagatagatcttcgatcaggatatcaccagttgagaatcaaagaggaagatatacctaagacagcttttaccactaggtatggattgttcgaatgtactgttatgtcttttggacttaccaatgcccccgctttcttcatgaacttgatgaataaggtgtttatggaatacctagacaagttcgtggtggtctttattgatgacattcttatctactcccgaaccaaagaagagcatgaagaacatcttcgccttgcactagagaagctacgagaacatcaactgtatgctaagtttagcaagtgtgaattttggttgtctgaagtgaagttccttggtcacgtcatctcagcaggaggagttgccgtcgatcctagtaatgtggaatccgtaaccaactggaaacaaccaaagacagtttcagagattcgcagtttcctaggcctcgcaggatattatcggaggtttatagagaatttttccaagattgctaagcctatgacacggctgcttcagaaagatgtgaagtacaagtggtcagaagaatgtgagcagagttttcaagagttgaagaatcgtttaatatcagctcctattttgattttacctgatccaaagaagggtttccaagtgtattgcgatgcatccaaacttgggttaggttgtgttctgatgcaagatgggaaggtggttgcctatgcatctcgtcagttacgtccgcatgagaagaactaccctactcatgatcttgagttagctgcagtggttcatgcgttgaagatttggcgtcattatcttttcggtactcgtacagaggtgtataccgatcacaagagtttaaaatatatctttactcagccggatctgaacatgagacaacggagatggttggaattaattaaggattatgacatgggaattcattatcacccgggaaaggctaatgttgtagcagacgctcttagcaggaaaggctattgcaatgctacggaaggacgacagttgccattggagttatgcaaggaatttgaaagattaaatttgggaatggtcagaagaggtttcgttgcagccttagaagcaaagcccactctaattgatcaagttagagaagcccaaattaatgatcctgatattcaagaaatcaagaagaatatgagaagaggaaaagctatcggtttcttggaggatgagcaaggaactgtatggttgggtgagagaatctgcgtccccgacaacaaagatttaaaagatgcaattctgaaagaagctcatgatactttatactccattcaccctggtagtaccaaaatgtaccaggatcttaaggaaagattttggtgggcaagtatgaagcgtgaaatcgcggaacacgtagcagtatgtgatgtttgtcagcgagtcaaggcagaacatcagaaacccgccggtttgctgcagcctttgaagattcccgaatggaagtgggaggaaatcggtatggatttcatcactggtctacccagaacgtcatcaggtcatgactctatttgggtgatagtcgacagacttaccaaagtggctcatttcatcccagtaaagacaacttattctggaagtcggttggcggaattgtatatggcaaggattacagacggacaaaccaaaagggtaaatcagattttggaagacatgttgagagcttgtgctttagacttcggtggaagttgggataagaatctaccttatgcagaattttcgtacaacaacagttatcaagctagtcttcagatggctccttacgaagtactgtatggtcggaagtgccgcactccgcttttgtgggatcaaacgggagaacgtcaggttttcgggatggatatcctgagggaagcagaagaaaaggtgaaaatcattcaagaaagattgcgtgtggcccagtctcgtcataagagttatgccgacaatcgtcgtagagatctaagttttgacgaaggagattatgtgtaccttcgtgtcacgcctctttga

SEQ ID NO: 15673 - DNA, 2322 bp, Oryza sativa
  Clone ID: TFbOSC900399j.C1.o17.gm
atggtgctcactcgcagcaacgggaatggccccaacaacaacaacaacaacaacaatggagagaatcccacacttgcccaagtcctggctcaacaggcacagcttatgaacatgatgatgcagcaactccagaaccagcagaaccagggaaataaccatgcacctccccagaacaagttagcagaatttcttcgtgtgaggccgcccactttctctagtaccactaatcctgttgaagctggtgattggctgcatgccatagaaaagaagttggatttgcttcagtgcaccgatcaggagaaggtctcatttgcatcacatcagttgcatggccctgcctctgaatggtgggatcacttccgccttaacaggacaactgctgaacctatcacttggcttgaattcaccgctgctttccggaagacgcatataccatcgggagtggtgtctctcaaaaagaaggaattcaggtcgctcactcaggggtctcgctctgttaccgagtatctgcacgagttcaatcgtctggctcgttatgctccggaagatgtgcgcactgatgaagagcgtcaggagaagttcttggaaggacttaatgatgagctttcttacccactcatgactggggaacagaagaaatgccggattgctcacttcaaggcacaacaggggaatacttcgacaccgcaacaacctgccaagagggagcaaggcagcaagcccggggtgtgcttcaattgtggagacccaggacattacgctgacaagtgtccgaagccccgacgtgtgaaggttgtccctgaccagagcaactctaccgtaccagcatcaaaggcccgtgtcaatcatgttgttgctgcagaagctcaagatgctccagatgtgattttggaaaagaaagatcatacccagaggatgtgtgtggactatcgtgcactaaatgatgtgactatcaagaataagtatccgctgcccagaattgatgatttgtttgatcagcttaaagccgaggggagggggcgcgcggaccgggtccacgggagtggggcccacgcggcagcctcacggtccacggtggaccggccactcggcgcgcccgagggcggccaagccggcgcagccggcgggaggcggcgcgcctgtgccccgatggtcgccgccggctaccaccagcgcgacggagcggcgcccgagagaggggagggaaagggggaaacgaagcggcggtccacggctcaccacgggtcgacggcgacgatggaaacggcgaccggagcggaggaaggcggtggcgcggctcgggtcgacggggtcgacggcgttccggcggtcggcgagcgaaacggaggggtggacgaggtcggtgaggatgcggcgaagccgaaggaggcggcgtcgaggtgggaggtggtccggggcgacaacggcggcggaccggagctcggcagcgacggcggagagagagagcgacggcgcgagctcgattccggcggggagagagggcggcgagtggcggaaacggtggtggggagctcggggagggtttatatagggttgggagtgagagagggtggccggaggagggggaaatgggcgcgggagacccggccgccattaatggcgccggcgagcaagtgtgaattttggttgtctgaagtgaagttccttggtcacgtcatctcagcaggaggagttgccgtcgatcctagtaatgtggaatccgtaaccaactggaaacaaccaaagacagtttcagagattcgccgtttcctaggcctcgcaggatattatcggaggtttatagagaatttttccaagattgctaagcccatgacacgactgcttcagaaagatgtgaagtacaagtgcctcgcgacgccgtcgtcaccgttgctccagccgtgctccgccatcgctccagtcatcgccgtcgctcggggaggtcgccatcgtggtcgccgttgcgtcgccgtcctcgtccgccccttcgccgttgctgtcgaccgccggaacaccgccgccgtcgtcaagccgaaggtcgccgccgcttcttccttgacgccgtcgccgtccgttgatcttccgccgccgttttggtcaccggtgagttcgccgcgtcaccctctacgtgctggtgccctccgttcgcgtcgtcgcgccgtcgttcgccggcgagtttgcaagcccgagccgccgccggtggtgacgtcaccgctgacgtcatcgtcgtcgtctctcgtggtccggccgtggaccggagaagattttgaagagttccaaggccagcaaggcaagtcacacagatcccaaacaaccctttga

SEQ ID NO: 15674 - DNA, 4900 bp, Oryza sativa
  Clone ID: TFbOSC9428j.C1.o1.np
gtgacaagttggtatcagagccaccttgaccttaggataagccaaatgatgccgccccattcaccgagaaatttgttcaaggtgttaggattcgttagggagctgaggttgatggtttttgaggtaggctatgaagttgctcccgagtaccgccaaatttcccatgaccccgacgaggagaagtgtcgtgttcgtgtgacgttggctagtgatcgtgaagaccttccgtccattaagttcgaagctggaggaagatcgtacagccatgcttgtcaagaagcagctttggtggccattggagagttgcgtcaacgctttgaagaggagttggattcatcagctttccagtatcatcctcacaagcctcatggacaagactatggaacctatacctgtcctgatggtgaagagagtgccactctgatgcatgcggtgcatatgcttagtgctatggatgcagtaagtgtggagcgagacaaagcagctcatgacagggaaaactggaatcgaggcaagatttacaagttgaagagcaaggtgtaccgtctacagaaggaattagctgaacttaaaggagaaacgccgccgccaacacccaagcttcgcctcaccgcaagaaagagaacctgtccgccacctcgtctccagttagctttgaagattcgcgtgatgggtgaagctgtgcccgatcgtgctgaacctgtcattgacatcataagtgatgaggaagaggaggaagaccctgaagaaagagagccagctactccagaggaagaagatccatcgcttcgttccgacgcaaggcgcaccaccaatccagttgaagcaggagattggctgcatgcggtggagaagaagttggacttgatccagtgcactgagcaggagaaagtttcttttgcttcgcatcaactgcatggacctgctgctgaatggtgggatcattttcgccaaggcagggctgaaggagagcctattacgtggcaggaattcacggccgctttcaagaagacacatataccagcgggtgttgtagctctaaagaagagagaatttagagaactcaaccagggatctcgttcggtcaccaaatacctccatgatttcaaccgtttagctcgttatgctccggaagatgttcgcaccgatgaagagcgtcaggagaagttcttggagggactgaatgatgagttgtcttatgctttgatgtctacggatttccgggatttccagcagttggtagacaaggcgattcgtcaagaagacaagtataaccggatggagcagaagaagcgcagggctgcccaattcaagacacaacagggcagtaaccagaggccgcgtctcgttactggacctcaagttccatcgtatcctcaaggaggatcttcatcagttgtccgcccccaacgccagttctacaacaacaatactggtaatcgtggcaatgacaaccgcaacgtggttgctcgtcctgcagcaactccagctcagaaccagcccgtcaggaaggaacagggaagcaagccaggggtgtgtttcaattgtggtgatccaggacattatgctgataagtgtcctaagcctcggcgcgtgaagaacgctccagccccgaacaactccaatgctccagcaccaaaggcacgtgttaatcatgttgcagcagcagaagctcagagtgcaccagatgtgattttgggtacgtttcctgttaactctatacccgcaactgtgctttttgattccggtgctacacattcctttttgtctaaaagttttgcgagcaatcatgggatggaagttattagtcttgggagacctttactagttaataccctaggcaatcaagtattttcgacacaatattgtccttccgctactatagaaatagaagaagttcctttcccatcctcgcttatcttgctagaatccaaagatctagatgttatcttagggatggactggttatctcgtcacagaggagttatagattgtgccagtcgtaaggtgactttaaccaatagcattggggaaaccgtttctttccttgcgtcctctcctaaatctcatggtgtgatcttaaaccaagttgctctacaagagatccccatagtacaagactacccagacgtgtttcccgaggatttgctaggtatgccacctaagagagacatagagtttcggatagacttggtacctggaaccaaccctatccataagagaccgtacagaatggcagctaatgagttagctgaggtgaagagacaggtggatgatttgcttcagaaaggatacatcagacccagtacttcgccatggggagcaccagtcatctttgtggagaagaaagatcatactcagagaatgtgtgtggattatcgagcgttgaatgaggttactatcaagaataagtatcctctacccagaattgatgacctgtttgatcaactggaaggtgctacagttttctccaagatagatctccgttctggatatcatcaacttcgaatccgtgaggaagatataccaaagaccgccttcacaactcggtatggtttgttcgaatgtaccgttatgtcatttggactcactaatgccccagcctttttcatgaatctgatgaacaaggtgtttatggaatatctggataagtttgtcgtggtgtttattgacgacattcttatttactccaagacgaaggaagaacatgaagagcatcttcgtctagctttagagaaactacgtgagcatcagctttatgccaagttcagtaaatgtgaattttggttgtccgaagtgaagtttcttggtcatgtcatctcgtctggaggagtagcagtagatccaagcaatgtggagtcagtgttaagttggaagcaacccaagacggtttcagaaattcgtagtttccttggacttgcagggtattaccgcaggtttattgagaacttttcaaagatcgccagaccaatgactcgtctgcttcagaaggaagtgaagtacaagtggacggaggattgtgaacgaagtttccaagaactgaagaaaaggctagtgactgcgcctgtattaattttgcctgattcgaggaaaggtttccaagtgtattgtgatgcatcccgactcggtttgggttgtgtgttgatgcaagaaggaaaggtggttgcttatgcatctaggcaattacgtcctcatgagaataactacccaacgcatgacctagagttggcagctgtggtgcatgcattgaagatttggcgtcattatcttttcggtaaccgtacagagatatatacggatcataaaagtttgaagtacattttcactcaacctgatttgaacatgcgtcagcgaagatggttagagttgattaaagattatgatatggagatccactatcacccggggaaagcaaatgttgtagccgatgctcttagcaggaaaagctactgtaatatgtcagaaggtcgacgtttaccttgggagttatgccaagaatttgaaaaattgaacttgggaatagtcagcaatggttttgtggccgctttagaagctaaacctactctgtttgatcaagtcagagaagctcaagtgaatgatcctgatatccaagaaataaagaagaacatgagaagaggtaaagccatcggttatgtagaagatgagcaaggaactgtgtggttaggagaaagaatttgcgtcccagaaaataaggggttgaaggatactatcatgaaagaagctcatgaaactttgtattccattcaccctggaagcactaagatgtaccaagacttaaagcaacaattctggtgggccagtatgcgacgtgagatagcagaatatgtggctctatgtgatgtatgtcagcgggtcaaggcagaacatcagaagccagccggtctgttacaaccgttgaagattccagagtggaagtgggaagaaataggaatggattttataaccggtctacccagaacgtcggcaggacatgattctatttgggtagtggttgataggttgacaaaagtcgctcatttcataccggtcaaaaccacctacacggggaataagcttgcagagttatacatggccagagtggtatgtttgcatggtgttcctaagaagatagtgtcagatagaggtagccagtttacttcgaagttttggcagaagttacagttagagatgggtacccgtttgaatttcagtaccgcttatcatcctcaaacagatggacagacggaaagaataaaccaaattttagaagatatgttgagagcttgtgttctagattttggtggaagttgggataagaatttgccgtacgcggaattctcatataacaatagttatcaagctagtttgcaaatggctccgtatgaagcattatatggtcgaaagtgccgtacgccgctcctttgggatcaaaccggtgaacgtcaagtttttgggacagacattttgcgagaggcagaagaaaaagtgaagattatccaagaaaggttgcgcgttgctcagtcacgtcagaagagctatgccgacaatcgtcgcagagatttggctttcgaagaaggagattatgtataccttcgggttacgccgttacgaggtgttcatcgtttccagaccaaagggaaattggcaccgcgtttcgtgggaccttttaagattgtgagtcgaaggggtgaagtagcttatcagttagagttgcctccgtcaatggcgggaatacatgacgtgttccacgtatctcagttgaagaagtgtttacgtgtacctacggaggaagcagatcctgatcgtatagagcttcaagaagatttaacttatgttgagaagccagtcagaatcttggaatttccgacgttccggaggagagcgtttcctttgaggaagg

SEQ ID NO: 15675 - DNA, 3546 bp, Oryza sativa
  Clone ID: TFbOSC29927j.C1.o3.fg
atgtcggacttagtggaaaaaaacggggaaaatggaaatcaagatggagcgagcagcaagggaacttcaccacccaagggagctactataccttttgattacaacaaacttaccattccctctcacaacttcgtctccgtgccttccgggcgtgctcctcgatttgatgggacacattacgccgcttggaagcacaagatgaagttgcatctaatctctttgcatccaagtatttggaaagttgtttgtacaggtattgatgtacctcatgatgacatggagctcacttcggagcaagagcaactcatccaccgcaatgctcaagcttccaatgcaattctctccgcgttgagtccggaggagttcaacaaggttgatggacttgaggaggccaaggagatatgggatactttgcaattagctcatgagggatcacccgccgttcgtgaggccaagattgaattattggaaggaagggttggaagatttgtgatggatgacaaggagacaccacaagagatgtatgataggatgatgatccttgtcaacaagattaaaggacttgggagtgaggacatgacaaatcactttgttgtcaagagacttctccgtgcatttggtccaagaaatccctctcttgtatcaatgatacgggaaaggaaagacttcaagaggctcactccaagtgacattcttggaagaattgtgtctcatgagatgcaagaagaggaagctcgtcaagtgagccaaatagtgaagaatgtcgccatgatcaaaaatcaagaagtagctttgaaggcaaaacaagaagaagagtcaagttgtgaagaaagtgaagatgaagaaatggcttttattgtcaagagattcaagcactttcttcgcaagaggggctatggcaaagggaggaaggatgatgacaagggaaagaggcaatcaaagagagcttgcttcaattgtggcgaatatggccacttcattaacgattgtcccaatgatgaggaaagtgataatgaattagatgatgtgcttaagagctttagcaaacccgctatgcaacatttggctaagttaatgagagctttggatagtaaagaacaatcactcgaaaggcaagaagaattgtttattcttgagaagaaaagaaacattgccttagaggagagcctagctaaagaatgtgctaaaaatgaacaactagctaatgagcttaatttggctaatggttctctagctagccttagggatgtcaatgaaactcttcaagagaaatttgctaatttagacaaaactcttaagaaagagaatgagaggttgggcactttggtgaaatatggatgcatgaagacataccattcaaaggatgccatttacaagaccatcactgctcatcctaacaaggatggacacgggctcgggttttctagtggaagtcctgtgtctaagcgtgtgatgacatactcctccggtggctcaagttgggttgtggacagtggctgcaccaatcatatgacaggagagaggagtatgtttacaagtcttgatgaggagggtggaagtcgtgaaaatattgtctttggagatgatggtaagggaaaggtaatgggtctcggtaagattgccatttccaagaatcaatctctatctaatgtcctccttgtcaattcattaagctacaatttattatccgtgtttcaattgtataagttaggatttaattgcttgtttaccgatgtggatgtgaccgtttttaggcgagatgactcttccgtagcattcaagggtgtgttaaagggtgatctctatctcgttgatttcgacatagatagagtgaatccagaggcatgcttgattgctaaatcctctatgggttggctatggcaccgtaggctagcccatgttggaatgaggaatttggcatctcttctaaaaggggaacacattcttggtttatctaatgtttcttttgagaaggatcgtgtgtgtagtgcttgccaagccgggaagcaagttgggagtccgcatcctataaaaaacatcatgactacaacaagaccactcgagcttcttcatatggacttatttgggccagtggcctacataagcattggaggtaacaagtatggttttatcattgttgatgatttttcacgcttcacttgggtgtactttctccatgacaaaagcgaagctcaagatgtcttcaagcgcttcgcaaagcaagcccaaaacctctatgatctcactatcaagagggtgcgaagtgacaatggaggagagtttaagaacactcaagtggaggaatttcttgatgaagaaggaatcaagcacgagttctccgccccctatgatcctccccaaaatggcattgttgaaaggaagaaccgaaccctcattgaagccgcaagggcaatgattgatgagtacaagatttcggatttctcacctaaggtggatgagggattcttacttggctatgaatcaaatgcacatgcctatcgtgtcttcaacaaaacctccggtattgttgaagtcactagggatgtgacatttgatgaatctaatggcttccaaggagagcaagttgttgtacatgttgtaggtgatgtggatccaagtcaagctataggcccggaagttccaggttctacagtccggaacctccggaccagtggcagtgaagacgtgccaacggtgcaagtggatgggatcgatgctgcgagcactttagagcatactgatcaggctcagagacccaagcaaaatgtcatcggcaccaagtggatctttcgcaacaagcaagatgaacatggggtgattgtaaggaacaaagcccggttattccaaatggatgtcaagagtgcctttctcaatggacctatctcggagttagtctatgtggagcaaccaccggggttcgaggatccaaagttgccaaaccatgtgtacaagctccacaaggcgctctatgggctcaaacaagcccctagagcttgtagtatcatgactaaaaggttcgagatgtctatgatgggcgagttgaccttcttcctcgggctacaagtgaagcaagcactagagggcaccttcatctctcaaaccaagtacgtgaaagacatactcaagaagtttgggatggaggatgccaaacctatcaagacgcccatgcctactaatggacacctagacctcgaccataatggtaaatgtgtagaccaaaaggtatatcgctccatgagaggatctttgctttacttatgtgcatctcgtcccgatatcatgcttagtgtttgcatgtgtgcctgttttcaagcggagcctaaagagtgtcatttgattgccgtcaagagaattctaagatatttagttcatactcctaatctttgcttgtggtatcctaagggttgtggctttgagcttttgggctattctgattcggattatgccaagtgtaaggttgatagaaaaagcacaactgggacttgccaatttcttgggcggtcccttgttttttggtcctccaagaagcaaaattcctttggataa

SEQ ID NO: 15676 - DNA, 2079 bp, Oryza sativa
  Clone ID: TFbOSC400219j.C1.o70.gm
atgtcgaacgaggtgaaccatgtagggaaggctcatatgttaaatggcacaactactccacttggaaaattaaaatgctttgctatcaccggcacgcccttgacggagattgatcaccacaacctccaactcaatgcccaagccatgaatgccttgttcaactctttaagccaagaggagttcgatagggtgagcaaccttgagaccgcatatgagatttggaacaagttggcgaagatccatgagggtgcaagtgagtacaaggatgccaagcttcatttccttaagatccaatatgagacattctccatattgcctcatgagagtgtgaatgacatgtatgggaggctcaatgtcattgtgaatgatctcaagggacttggggcaacctacaccgatcttgaggatgcccaaaagatgcttagggctctaccagagaagtatgagacccttgtcaccatgctcatcaactccgacatgttaaggatgacacccgcaagcctcttggtgaagatcaacaccaatgacatatacaagttgaagaagaaggagatggaggaagcctcaccttccaagaagtgcattgctctccaagccgaagttgaagacaaagggaagaccaaggtgaatgtagccaatgaagacttggaggaagagattgcccttcttgctagaaggttcaatgatctcttgggaaaaagaaatgagagaggaaggggctccaactccaataggagaagaaatagaagacccaataagactctcaccaacttgaggtgctttgagtgtggtgagaagggacactttgcttccaagtgcccttccaaggatgatgatggagacaagtcatccaagaagaagagtggaggctacaagctcatgaagaagctcaagaaggaagggaagaagattgaggccgtcatcagggaatgggactcaaatgaggagagctccgcctcatccgggtccgaagaagaaggtggtgatgatgcaagctccaagaaaaagaagatggccgttgtagccatcaaggaggctccatcactctttgctccactttgtctcatggcaaagggctcttctaaggtaacatctcttagtgatagtgagagtgatgatgtttcctatcatgagcttgtgagtatgtttgaggagctccatgcttatagtgagaaggaaattgtcaagttcaaggctctaaagaaggatcatgcttctttggaggatcaccggtgtctcctctacccgccgccaccttcgccttcgtctctcgccgtcggaagcgccctagcgccgtgtgacctcgagccgccgtcgccgccgtcgctccagccgtgcgccgccgtcgctccagttgtcgtcgtcgctcggggaggtcgccatcgtggtcgccgtcgcgtcgccgtcctcgtccgccccttcgccgccgctgtagaccgccggagcaccgccgtcgtcgtcaagccgaagaccgccgccgcttcttcctcgtcgccgccgccgtccgttgcttttccgccgtggtcttgtgtttctatttgtgatgcctcacttgttgttgagaacaatgagcttaaggagcaagtggctaagctcaacaagagtttggagagatgcttcaagggtaagaacactcttgacaagattttgagtgagcaacggtgcatccttaacaagaagggacttggattcattccaaagaagggtaagaaaccttctcaccgtgccattcattttgtcaagagcaatggtaagtattgctccaagtgtcgtgatgttgggcatttggtaaatgattgccccggtggttatgcctcaaatagcaaggcataccatgtctacaacaagaacaaaggtattgtggaagaaaccgccgatgttcaatttgatgaaactaatggctcccaagaggggcacgagaatttggataatgtaggtgatgaaggcttgatgagagctatgaagaacatgtctattggagatgtcaagcctattgaagtggaagacaagccatccacctccactcaagatgagccatatcgacttccgctacgccaagtcaagctcaagttgaagtga

SEQ ID NO: 15677 - DNA, 1935 bp, Oryza sativa
  Clone ID: TFbOSC900079j.C1.o11.gm
atgaatgccttgttcaactctttaagccaagaggagttcgatagggtgagcaaccttgagaccgcatatgagatttggaacaagttggcgaagatccatgagggtgcaagtgagtacaaggatgccaagcttcatttccttaagatccaatatgagacattctccatattgcctcatgagagtgtgaatgacatgtatgggaggctcaatgtcattgtgaatgatctcaagggacttggggcaacctacaccgatcttgaggatgcccaaaagatgcttagggctctaccagagaagtatgagacccttgtcaccatgctcatcaactccgacatgttaaggatgacacccgcaagcctcttggtgaagatcaacaccaatgacatatacaagttgaagaagaaggagatggaggaagcctcaccttccaagaagtgcattgctctccaagccgaagttgaagacaaagggaagaccaaggtgaatgtagccaatgaagacttggaggaagagattgcccttcttgctagaaggttcaatgatctcttgggaaaaagaaatgagagaggaaggggctccaactccaataggagaagaaatagaagacccaataagactctcaccaacttgaggtgctttgagtgtggtgagaagggacactttgcttccaagtgcccttccaaggatgatgatggagacaagtcatccaagaagaagagtggaggctacaagctcatgaagaagctcaagaaggaagggaagaagattgaggccgtcatcagggaatgggactcaaatgaggagagctccgcctcatccgggtccgaagaagaaggtggtgatgatgcaagctccaagaaaaagaagatggccgttgtagccatcaaggaggctccatcactctttgctccactttgtctcatggcaaagggctcttctaaggtaacatctcttagtgatagtgagagtgatgatgtttcctatcatgagcttgtgagtatgtttgaggagctccatgcttatagtgagaaggaaattgtcaagttcaaggctctaaagaaggatcatgcttctttggaggatcaccggtgtctcctctacccgccgccaccttcgccttcgtctctcgccgtcggaagcgccctagcgccgtgtgacctcgagccgccgtcgccgccgtcgctccagccgtgcgccgccgtcgctccagttgtcgtcgtcgctcggggaggtcgccatcgtggtcgccgtcgcgtcgccgtcctcgtccgccccttcgccgccgctgtagaccgccggagcaccgccgtcgtcgtcaagccgaagaccgccgccgcttcttcctcgtcgccgccgccgtccgttgcttttccgccgtggtcttgtgtttctatttgtgatgcctcacttgttgttgagaacaatgagcttaaggagcaagtggctaagctcaacaagagtttggagagatgcttcaagggtaagaacactcttgacaagattttgagtgagcaacggtgcatccttaacaagaagggacttggattcattccaaagaagggtaagaaaccttctcaccgtgccattcattttgtcaagagcaatggtaagtattgctccaagtgtcgtgatgttgggcatttggtaaatgattgccccggtggttatgcctcaaatagcaaggcataccatgtctacaacaagaacaaaggtattgtggaagaaaccgccgatgttcaatttgatgaaactaatggctcccaagaggggcacgagaatttggataatgtaggtgatgaaggcttgatgagagctatgaagaacatgtctattggagatgtcaagcctattgaagtggaagacaagccatccacctccactcaagatgagccatatcgacttccgctacgccaagtcaagctcaagttgaagtga

SEQ ID NO: 15678 - DNA, 4407 bp, Oryza sativa
  Clone ID: TFbOSC402542j.C1.o9.fg
atggatgggctcgtccccttgatcttcaaggtgctcaagaagaagaaggccatgagggtttgcctcctactctgtactgcgccgtcgctcgtagactactccatcccgctcgccggcgtgcaccggcgatcgggagagcaggtctccggaacctctgccttcgacgtcctgcaccgggagaaggcggcaataagattaaatcattatatgtctataatctcaacaatccaaaaaccttattataggcactgtgattttactatggctggttttgccgatgcactgaggccggataaattcaccggtgtgcattttaagagatggcagatcagggtcactctgtggctgacagctatgaaatgcttctgggtgagtactggcaaacctgaaggagttcttactgctgaacagcagaagcaattcgaggaagccactactctctttgtgggatgcattcttagcgttcttggcgatcgtctggtcgaggtgtatatgcatatgaccgacgctaaggagttgtgggatgcactgaatactaaattcggtgctactgatgctagcaatgatctgtatatcatggagcagtttcatgactacaagatggctgacaaccgttctgtagtcgaacaggctcatgagatacaaaccatggctaaggaactcgaactccttaagtgtgtcttacccgacaaatttgtggccgggtgtattattgcaaaactacctccatcttggagaagtttcggtactgcactcaaacacaagagacaggaatactccgttgaggggttgatagcgtctcttgatgttgaggagaaagctcgggaaaaagatgccgcgtctaagggcgatggtgggcagtccagtgccaatgttgtgcacaaggcccagaacaagagcaaggggaaatacaaagctcagcagaccaccaacttcaagaagcagaagaagaacaacatcaatcctaatcaggatgagaggacttgctttgtgtgtggccaagttggtcatctggctaggaagtgtctacagtgcaaggggatgaaggcacctgcagggcagacttctaagtctgctaatgtgaccattggcaacactggagatggaagcgggtatggtaatttacctactgttttttcagttaatcaatctactaattggtgggttgatactggggccaatgtacatgtttgtgctgacatctcattgttttcttcttatcaggtcgcacggggttccaccgtcctaatggggaatgggtcacatgcttctgttcatggtgttggcacggtagatctgaagtttacttcgggaaagatcgtgcagctgaagaacgtgcagcatgtcccttctatcgataggaatcttgttagtggctcccgtctgactagagacggatttaagttggtttttgagtctaataaagtagtcgtgtctaaacatggatattttattggtaaaggttatgagtgcggaggcctgttccgcttttccctttctgatttctgcaataagtctgtgaaccatatttgtggcagtgtggatgatgaggctaatgtttggcattcacgtttatgtcatattaattttggcttgatgtctcggctttccagcatgtgtttaattcctaagttttccattgtcaaaggttctaagtgccatagttgtgtgcaatcgaagcaacctcgcaagcctcacaaggctgccgaggagagaaacttggcaccactagaactcctacattcagatctttgtgaaatgaatggggtgttgacgaagggtggaaaacgatatttcatgacattgattgatgatgctactagattttgctatgtgtacttgttgaaaacgaaagacgaggctctagactattttaaaatttataaggcagaagttgaaaatcaacttgacagaaagataaaaaggcttaggtctgatcgtggtggagagtttttctcgaacgagtttgacttattctgtgaggaacatggcatcatacatgagaggacgcctccctattctcccgagtctaatgggattgctgaaaggaagaaccgcacactgactgacttggtgaatgccatgttggacaccgcgggactgcctaagacatggtggggggaggcattgttgacctcaaatcatgtgttaaacagagttcctaacagaaataaggacaaaacaccatatgagatatggattggtagaaaaccatcactttcttatttacgcacatgggggtgcttggcgaaagtcaatgtaccaataacgaagaagcgcaaacttggacctaagactgtggactgtgtttttctgggatatgctcatcatagcattgcctatagatttttaatagttaaatccgaggtaccggacatgcatgttggtacaattatggagtctcgtgatgctaccttctttgagagctttttcccaatgaaggatacacatagtggttcgaaccaaccctctgaaataattcccaattcaatcacaccaccagaacaaactgaacatacacatgaacttgtctctgaggaggatgtcagtgaagctcctcgaaggagtaagagacaaaggacggctaagtcttttggtggtgatttcactgtgtacctcgtggatgacactcctaagtcaatttcagaagcatatgcatctcctgatgcagactactggaaggaggctgtccgtagtgaaatggattccattatcgctaacgggacttgggaggtgacagagcgaccctatgggtgtaaacctgtggggtgcaagtgggtgttcaagaagaagcttaggcctgacggtactattgaaaaatacaaggctcggcttgttgctaagggctatactcagaaagaaggcgaagatttctttgacacttactcacctgttgctagattgaccacaattcgtgtgctactttccctagcagcctcacatggtcttctcgttcatcaaatggacgttaagacagcttttcttaatggagagctggatgaggagatctatatgtatcaacctgatgggtttgtagttgaaggtcaagaaggcaaagtgtgcaaattgttgaagtctttgtatggtctgaaacaagctattaagcaatggcatgagaaatttgacaaaacattgacatctgcaggctttgcagtcaatgaggcagataaatgtgtgtactatcgctatggtgggggtgagggagttattttgtgcttgtatgttgacgacatactgatatttgggacaaaccttgaggtgataaatgaggttaaatcattcttgtctcaaaattttgatatgaaggatttgggagtagctgatgttatcttaaacattaagctaattagaggtgagaatgggattacactcttgcagtcccattatgtggagaagatcttgaatcgttttggctacattgatagtaagccttctccaacaccttatgatcctagcttgttgcttcgcaagaacaagagaattgctaggaatcaactggaatactcccaaatcattggctcgttgatgtacctggctagtgcaactaggcctgatatctcctttgctgtgagcaagttgagccgatttacctctaatccgggagatgatcactggcgtgcgcttgagcgagtaatgcgctatctgaaaggtactgtggaattggggcttcactatactgggtatcctgcggtactggagggttatagtgattctaactggatctctgatgtggatgagatcaaagccactagtggatatgttttcacactgggtggtggtgctgtttcatggaggtcttgcaaacagaccattttgacgaggtcaaccatggaagcagagctaacggtactggatactgctactgttgaggcagaatggctgcgtgatctattaatggatctgcctgttgttgaaaaaccggtgccggctattcttatgaactgtgacaatcaaacgacatgtgaaaagacgattgaagtctgtcaggaaattaagaaactccggagttataacgttggattacatccaaacagcgagaaacctggcagatcccttcacgaagggactatcacgaaatgtgatagacaatgcatcgaaggagatgggtttgagacccatattaaatcattatatgtctataatctcaacaccctctcctcatcgtcctccttctccggcaccggcggcccgccgcgcatcgacgatatcgtcgccgccgccacgatgacgacgccacgcgatcataagcttaaggtggtgaccaagcctggcggcggcgcgcagcgcgttgcggccatggagacgctgccgcgggagacgttctcgccgcgcttccgttgcggcggcggcgccgccgccgccgtggcgtcggccattgttggtagaagctaccttggtggtaaatga

SEQ ID NO: 15679 - DNA, 4788 bp, Oryza sativa
  Clone ID: TFbOSC101703j.C1.o1.gm
gttgtgtccttcaatggtgagaagaaagcgatagcaatgtaccgtaattttataaagaagtcatacaaggctactattgaggaaggcattatcactggttttggcatgggctctgtcatgtgcgtcgtatttggcagctatggattagccttctggtatggtggaaagctaatcattgagaaaggttacacaggaggaaaaatcatgactatcttgtttgccgtgttgaccggtgcatcctcattaggcaatgcaacacctgcagttgctgcagttgtggaaggtcaatctgcagcatacaatttgttcaaaacaattgagaggaaaccagagatagattccgatgataacaatggcatggttttagaagatatgaatggcgatattgagctaaaggatgtgtactttcgttaccctgcaagaccagagcagttgatattggatggattgtcgttacaagtagcgagtggaacaacaatggctatagtcggagagagtggaagcggaaagtcaactgttatcagcctagtcgaaagattctacgatccacagtctggcgaagttttaatagatggaattagcatcaagaaactgagacttgattggataagagggaagatcggtcttgttagccaagagcctctgctttttatggcctccattaaagataacataatatatggtaaaaaagatgcaacgcttgaagagatcaagagagcagcggagcttgcaaatgcagctaacttcattgacaagttaccaaatggttatgatactttagttggccagcgcggtactcagctctctggaggacaaaaacagagaattgcaattgcaagagccatcctcaaagatccaaaaatccttttgctcgatgaagcaacaagtgcacttgatgtggagtctgagaggatagttcaggaggcactaaatagaatgatggtagaaagaaccacactcgttgtcgctcatcgtttgagcactgtgaggaatgttgattgcatcacagtcgtccgcaaaggaaaaatagttgaacaaggtcctcatgatgcactggtgaaggatcccgatggagcttactcccagctaattaggctacaagagactcatcgtgatgaaaggcataaactaccagattccagatcaaaaagtactagtttgtcattcagacgatcaagaactaaagattttctcagcaagagcaacagtggggcacttggtacaaggctctcagtcgatgcgttgaatgtccgccgtttagtaggagataacctggcccttatagtccaggctgtagctacactaatcactggctttgccatagcttttgcggcagattggaggcttgcactgatcatcacttgtgtaattcctttagtgggtgcacagggctatgctcaagttaagttcttgaaggggttcagtgaagaatctaagaccatagcacttgttggagaaagcggtagtgggaagtccacgataattgctttattagagcgtttctatgatcctgattctggtaatatctcactagatggagttgaaattagaagcttaaaagtcagctggttgagggatcagatggggcttgtaggccaggagccagtgcttttcaacgacacaatccgtgccaacataacatacgggaaacacagtgaggtaacagaggaagagatcactgctgtggccaaggcagcaaacgcccatgagttcgtatcaagcctgccacaaggatacgacacagtggtaggtgagaaaggggtgcaactatctggtgggcaaaaacagagggtagcaattgcaagggccatcctaaaggaccctaagatactgctacttgatgaggcaaccagtgctctagatgcagaatcagaacgtgttgttcaagatgcattggatcgagtcatggtcaacaggactaccattgtagtggcacaccgcctctccacaatcaaaggggctgatatgattgcagtcctcaaggaaggaaaaattgcagaaaaaggaaagcatgaagcactattgcggatcaaggatggtgcatatgcttcacttgacgccgagctcgccgcagcagaagagcgcaggcgagcaacggctcagaccgctgcagcagcagcgagggcggccagactggcggcagcggagttggcagcagccagggcggaggcggaggcggaggcggcggaagatgcggcacgtgcggcggaggtagaggttgagaccttgcgcagcagcatcaacggctccatcgccggcgacatcaccgccgacagggagcttgaggagctggcaagaggaagggcacgggagcgagcagagcggtgggcagcagcccacctccacggcggcggcggcggcccaagggaccgcgcgcccgccgacgggaacccagacgggcgcaggcgtgccggcggcagcccggagctcgcacgcggccctcgcaggcagcacggctctctctcccctgaccggcgccatggtcaccacggtgtccagacggtggtcagggactttggtcccggcggtgggtggcctaccctcaccaaaaccaactacatcgagtgggccgcggtgatgagggtgaggctccaggtgcggcacatgtgggaggcagtccggtacggtgacgtcaactacgacgaggatcggcgggcactggatgccctcatcgctgcagtcccgcccgagatgcagttctcgctttcccagaagcggactgccaaggaggcctgggacgccatcgctgcggcacgcatcggcagcgaccgcgcccgcaagtccacactgcaggcactccgcaaggagtgggagaacctggccttcaagccaggtgaggatgttgatgactttgctctccgtctcaacactctcttgcagaaaatggtgcagtacggcgacgacacctacgacgaggagagagctgtcgagaagctcttccgctgcgtccctgagaagtacagacagatcgctcgctcgatcgaatctctgctggacctctccacgatgttgatcgaggaggcgttaggtcgcctcaaggtcgtcgatggtgatgagccacagcctttctcggggcccatcaccatcggcgggaagctccatctcactagggagcagtgggaggcctctcagggtgacgggaggaagggggagtcatcttccccgacaggcggccgtaagccgcgcaaggcgcggggaggtgtccagctacggtgggcgcgaagacgtgccgagggtggcgcccgcagaggcgcccagggcgttgccaccggcaaccacaagccggcacgagacgacgcctgccgcaactgtggcaagcttggccattgggccaaagactgtcgacagccacgacgcggccaggcccacgtcgcacgggtggaggaggaagagccggctctgctcctggctcacgcaagcatcgagctacctccagcggcaccggccgcagcggctttcctccaccttgatgagccgaaggtactcgtctccctctgcaacggctccagcaacgacaaggctgatgggtggtacctcgacaccggcgccacccatcacatgaccggccgacgggagttcttcaccgagttcgactccagcgtccgaggctccgtcaagttcggggacgcctccggcgtggagatcaagggtgttggctccgtcaccttcaccgccaagtccggtgagcacaggctgctcaccggagtctactacatccccgcgttgaggaattctatcatcagcgtgggacagctggatgagaacggctcacgcgtgttggtcgaggacggactcatgaggatttgggatcgccgtcgtcgccttcttgccaagtggcacgagcgcttcgggcacctccacttcgaggccctgaagcagctcagtgccaaggagatggtgcgaggcatgccgtgccttgaccacgtggagcagctctgcgacgtctgcgtggtgacgaagcagcggcggctcccctttccccagcagatgagcttccgagccaaggagcggctcgagctcgtgcacggggacttgtgtggcccagtgacaccggccacaccaggaggacgacgttacttcctgctgctcgtcgacgacctctcccgctacatgtgggtgacggtcctcggcagcaagggagaggctgcggacgccatcaggcatgcacaggctgctgcagaggcggagtgcggccgcaagctgcgcgtgctgcgcaccgacaacggcggcgaattcacagcggctgaattcgcgtcgtactgcgctgatgagggcattcagcgccactacaccacgccgtacagcccgcagcagaacggcgtcgtcgagcggcgcaaccagacggttgtggggatggctcgggccctcctcaagcagagggggatgccggccatcttctggggggaggcggtggtgacggcaacggcaacctcaacaatggcgtcggatggtcagggacaggggcggatgtggctaggggcagatgcggcggcgtgggaaggcagagaggagtgcaagcggcggcgccggatgcagccgggggtggaggtgatggtgtcggatgtggcggctcaaccgggggagccggatgaggcgggaaggagcgacgctggaatactcgccatggagctcgtgctagcggcggcggtcgtggcgggcgacgacgcggactgcagcggcggtcgcggcgggcgacggtgtggccgcggacggcggcggggctcgcggacgacggcggaggtcgcggtcagcgacgacacggatggcagcgacggtcgtggcgggtga

SEQ ID NO: 15680 - DNA, 4428 bp, Oryza sativa
  Clone ID: TFbOSC14030j.C1.o1.fg
atgtccgacgctcggtctcggagttcggtcgcctcgagcactcggcgtcagcaggacgccgagctcgctgcagcagaagagcgcaggcgagcaacggctcagaccgctgtagcagtagcgagggcggccagactggcggcagcggagttggcagcagccagggcggaggcggaggcggcggaagatgcggcacgtgcggcggaggtagaggttgagaccttgcgtagcagcatcaacggctccatcgccggtgacatcaccgccgacagggagcttgaggagctggcaagaggaagggcacgggagcgggcagagcggtgggcagcagcccacctccacggcggcggcggcggcccaagggaccgcgcgcccgccgacgggaacccagacgggcgcgggcgtgccagcggcagcccggagcccgcacgcgcccctcgcaggcagcgcggctctctctcccttgacctgcgccatggtcaccacggcgtccagacggtggtcagggactttggtcccggcggtgggtggcctaccctcaccaaaaccaactacatcgagtgggccgcggtgatgagggtgaggctccaggtgcggcacatgtgggaggcagtccgcaacgaccgcgcccgcaagtccacactgcaggcactccgcaaggagtgggagaacctggccttcaagccaggtgaggatattgatgactttgctctccgtctcaagactctcttgcagaaaatggtgcagtacggcgacgacacctactacgaggagagagctgtcgagaagctcttccgctgcgtccctgagaagtacaggcagatcgctcgctcgatcgaatctctgctggacctctccacgatgtcgctcgaggaggcgttaggtcgcctcaaggtcgtcgatggtaatgagccacagcctctctcggggcccatcaccattggcgggaagctccatctcactcgggagcagtgggaggcctctcagggtgacgggaggaagggggagtcatcttcctcgacaggcggccgtaagccgcgcaaggtgcgggaaggtgtccagctacggtgggcgcgaaaacgtgccgagggtggcgcccgcagaggcgcccagggcgttgccaccggcaaccacaagccggcacaagacgacgcctgccgcaactgtggcaagcttggccattgggccaaagactgtcgacagccacgacgcggccaggcccacgtcgcacgggtggaggagaaaaagccggctctgctcttggctcacgcaagcatcgaactacctccagcggcaccggccgcagcggctttcctccaccttgatgagccgaaggtactcgtctccctctgcaacggctccagcaacgacaaggctgatgggtggtacctcgacaccggcgccacccatcacatgaccggccgacgggagttcttcaccgagttcgactccagcgtccgaggctccgtcaagttcgggaacgcctccggcgtggagatcaagggtgttggctccgtcaccttcaccgccaagtccggtgagcataggctgctcaccggagtctactacatccccacgttgaggaattctatcatcagcgtgggacagctgaatgagaacggctcacgcgtgttggttgaggacggactcatgaggatttgggatcgccgtcgtcgccttcttgccaaggtaaccggaggcactaatcgactctacatcctcagcgcgcaggtcgcacaaccagtttgcctcgccgctcgtcgggacgacgaggcgtggcagtggcacgagcgcttcgggcacctccacttcgaggccctgaagcagctcagtgccaaggagatggtgcgaggcatgccgtgccttgaccatgtggagcagctctgcgacgtctgcgtggtgacgaagcagcggcggctcccctttccccagcagacgagcttccgagccaaggaacggctcgagctcatgcacggggacttgtgtggcccagtgacaccggccacaccaggaggacgatgttacttcctgctgctcgttgacgacctctcccgctacatgtgggtgatggtcctcggcagcaagggagaggctgcggacgccatcaggcatgcgcaggctgctgcagaggtggagtgcggccgcaagctgcgcgtgctgcgcaccgacaacggcggcgaattcacagcggctgaattcacgtcgtactgcgctgatgagggcattcagcgccactacaccatgccgtatagcccgcagcagaacggcgtcgtcgagcggcgcaaccagacggttgtggggatggctcgggccctcctcaagcagagggggatgccggccatcttctggggggagacggtggtgacggctgcctacatcctcaaccgctcgcctaccaaggccctcgatggtaggacaccgtacgaggtttggcatgggcgcaagccggcggtctcccacctacgggtcttcagctgcctcgcgttcgccaaggagcttggccacatcggcaagctcgacgacaggagcaccccaagggtgttcatcggctacgcgaagggctcgaaggccttccgcatcctcgacccggagacacagcgtgtgcgcactgcgcgcgatgttgtgttcgacgaagggcgagggtgggtatgggacaaggcggtggacgatggttcgactccgacgtacgacgacttcaccgtcgagtacgtctacttcgagggagctgggggagtaggtagctcttcttcaccgagcgtgtctaccccagcccccgaatccccaccgactccgacaccaacacaccctcgggccacgacttcgactacgacgagctcttcgttgacaccaccccagccagtgactccacatgctccagcaccaacagccactcctccaagcacgtctactccgacgccagctcgtgttgagcgcagcccggtggagttcgctactccgctctcccacgacggggagcgcatcgacgcgtaccacgacggcgagcagctacggtaccgtacgatggaggatcttctcggcgaccagccggtgccggtgcctcgcgacctagaggcgcagttgcaccttgcgtgcaacgacggtgagcctcggtcttttgcagaggccgagaaacacgcggcatggcgtgccgcgatgcagtcggagatggacgcggttcaggagaaccgcacctgggagcttgctgacctccctcgtggtcaccgcgcgatcacccttaagtgggtgttcaagctgaagagggatgaagccggagccatcgtcaagcacaaggctcgcttggtggcacgcggtttcgtgcagcaggaggggatcgactacgacgatgccttcgctcccgtggcacggatggagtccgaaggctggggcgtccatcacatggacgtcaagtcggcgtttctgaacgacaacttgaaggaggaggtctacgtgcaccagccgccgggatttgtgatccccggcaaggagggcaaggatgcagaggtcgcggcgttcaaggaggagatgaaggccaccttccagatgagtgatctggggcctctctccttctacctggggatcgaagtgcaccaggacgactccgagatcacgcttcgacagaccgcctacgccaagcgcgtcgttgagctggctgggctcaccgattgcaacccagctctcactccgatggaggagagactgaagctgagccgcgacagcacagcggaggaggtggatgctacacagtaccggtgtcttgtggggagccttcgctacctcacccacacacggccggacttggccttctccgtcggctacgtcagtcggttcatgcagcgaccgacgatggagcaccagcaggctgtgaagaggatcatccgctacattgcggggactctcgaccacggtctctactacccaaggtgtcctggcaaggcacacttcgtcgggtacagcgacaacgaccacgccggcgacatcgacaccaacaagagcacgagcaggattctcttcttcctcggcaagtgcctcgttagctggcagtcggacaagcagcaagtggtggccctgtccagctacaaggccgagtacatagcggcctccgccgcttcgacccaggcgctctggcttgctcgactgcttagtgatctccccggcagagacactggaacggtggagctcagggtggatagcaagtccgctctggccctggcaaagaaccccgtttttcacgaacggagcaagcacatccgggtgaggtaccacttcatccgaagctacttggaggaagggagcatcaaggcgagctacatcaataccaaggaccagcttgcggacttgctcaccaagcctcttgggaggatcaagttcctcgagctctgctccaggatcgggatggcccaacttgcccacaagacgacgcacaagacttag

SEQ ID NO: 15681 - DNA, 4803 bp, Oryza sativa
  Clone ID: TFbOSC23522j.C1.o7.fg
atgtccgacgctcggtctcggcgttcggtcgcctcgagcacttggcgtcagcaggacgccgagctcgccgcagcagaagagcgcaggcgagcaacagctcagaccgctgcagcagcagcgagggcggccagactggcgacagcggagttggcagcagccagggcggaggcggaggcggaggcggcggaagatgcggcacgtgcggcggaggtagaggttgagaccttgcgcagcagcatcaacggctccatcgccggcgacatcaccgccgacagggagcttgaggagctggcaagaggaagggcacgggagcgggcagagcggtgggcagcagcccacctccacggcggcggcggcggcccaagggaccgcgggcccgccaacgggaacccagatgggcgcgggcgtgccggcggcagcccggagcccgcacgcggccctcgcaggcagcgcggctctttctcccctgaccggcgccatggtcactacggtgtccagacggtggtcagggactttggtcccggcggtgggtggcctaccctcaccaaaaccaactacatcgagtgggccgcagtgacgagggtgaggctccaggtgcggcacatgtgggaggcagtccggtacggcgacgtcgactacgacgaggatcggcgagcactggatgccctcatcgctgcagtcccgcccgagatgcagttctcgctttcccagaagcggactgccaaggaggcctgggacgccatcgctgcggcacgcatcggcagcgaccgcgcccgcaagtccacactgcaggcactccgcaaggagtgggagaacctggccttcaagccaggtgaggatgttgatgactttgctctccgtctcaacactctcttgcagaaaatggtgcagtacggcgacgacacctatgacgaggagagagctgtcgagaagctcttccgctgcgtccctgagaagtacaggcagatcgctcgctcgattgaatctctgctggacctctccacgatgtcgatcgaggaggcgttaggtcgcctcaaggtcgtcgatggtgatgagccacagcctctctcggggcccatcaccatcggcgggaagctccatctcactcgggagcagtgggaggcctctcagggtgacgggaggaagggggagtcatcttccccgacaggcagccgtaagccgcgcaaggcgcggggaggtgtccagctacggtgggcgcgaagacgtgccgagggtggcgcccgcagaggcacccagggcgttgccaccggcaaccacaagccgggacgagacgacgcctgccgcaactgtggcaagcttggccattgggccaaagactgtcgacagccacgacgcggccaggcccacgtcgcacgggtggaggaggaagagccggctctgctcctagctcacgcaagcatcgagctacctccagcggcaccggccgcagcggctttcctccaccttgatgagccgaaggtactcgtctccctctgcgacggctccagcaacgacaaggctgatgggtggtacctcgacaccggcgccacccatcacatgaccggccgacgggagttcttcaccgagttcgactccagcgtccgaggctccgtcaagttcggggacgcctccggcgtgaagatcaagggtgttggctccgtgaccttcaccgccaagtccggtgagcacaggctgctcaccgaagtctactacatccccgcgttgaggaattctatcatcagcgtgggacagctggatgagaacggctcacgcgtgttggtcgaggacggactcatgaggatttgggatcgccgtcgtcgccttcttgccaaggtaaccagaggcactaatcgactctacatcctcagcgcgcaggtcgcacaaccagtttgcctcgccgctcgtcgggacgacgaggcatggcagtggcacgagcgcttcgggcacctccacttcgaggccctgaagcgcctcagtgccaaggagatggtgcgaggcatgccgtgccttgaccacgtggagcagctctgcgacgtctgcgtggtgacgaagcagcggcggctcccctttccccagcagacgagcttccgagccaaggagcggctcgagctcgtgcacggggacttgtgtggcccagtgacaccggccacaccaggaggacgacgctacttcctactgctcgtcgacgacctctctcgctacatgtgggtgatggtcctcggcagcaagggagaggctgcggatgccatcaggcgcgcgcaggccgctgcagaggcggagtgcggccgcaagctgcgcgtgctgcgcaccgacaacggcggcgaattcacggcggctgaattcgcgtcgtactgcgctgatgagggcattcagcgccactacaccgcgccgtacagcccacagcagaacggcgtcgtcgagcggcgcaaccagacggttgtggggatggctcgggctcttctcaagcagagggggatgccggccatcttctggggggaggcggtggtgacagccgtctacatcctcaatcgctcgcctaccaaggccctcgatggcaggacaccgtacgaggcctggcatgggcacaagccggcggtctcccacctacgggtcttcggctgcctcgcgttcgccaaggagctcggccacatcggtaagctcgacgacaggagcaccccaggggtgttcatcggctacgcggagggctcgaaggcctaccgcatcctcgacccggagacacagcgtgtgcgcactgcgcgcgatgttgtgttcgacgaagggcgagggtgggtatgggacaaggcggtggacgatggttcgactccgacgtacgacgacttcaccatcgagtacgtccacttcgagggagctgggggagtaggcagctcttcatctagcgtgtctaccccagcccccgaatctccaccgactccgacaccaacacaccctcgggccacgacttcgactacgacgagctcttcgtcgacaccaccccagccagtgactccacatgctccagcaccaacagccactcctccaagcacgtctactccgacgccagctcgtgttgagcgcagcccggtggagttcgctactccgctctcccacgacggggagcgcatcgacgcgtaccacgacggcgagcagctacggtaccgtacgatggaggatcttctcggcgaccagccggtgccgggactggtgcctcgcgacttagaggcgcagttgcaccttgcgtgcgacgacggtgagcctcggtcttttgcagaggccgagaaacacgcggcatggcgtgccgcgatgcagtcggagatggacgcggttcaggagaaccgcacctgggagcttgctgacctccctcgtggtcaccgcgcaatcacccttaagtgggtgttcaagctgaagagggatgaagccggagccatcgtcaagcacaaggctcgcttggtggcacgcggtttcgtgcagcaggaggggatcgactacgacgatgccttcgctcccgtggcacagatggagtccgtgcgactccttcttgcgctggctgctcaggaaggctggggcgtccatcacatggacgtcaagtcggcgtttctaaacggcgacttgaaggaggaggtctacgtgcaccagccgccgggatttgtgatccccggcaaggagggcaaggtgctacgcctgcacaaggccctctacggcttgcggcaggcaccgagggcgtggaatgccaagttggattccacgctcaaggggatgggcttcgagcaaagcccgcacgaggcggccatctaccggcggggcaatggaggaaatgccttgctggtgggtgtctacgtcgacgacttggtgatcaccgacaccaaggatgcggaggtcgcggcgttcaaggaggagatgaaggccactttccagatgagtgatctggggcctctctccttctacctggggatcgaagtgcaccaggacaactccgggatcacgcttcgacagaccgcctatgccaagcgcgtcgttgagctggctgggctcaccgattgcaacccagctctcactccgatggaggagagactgaagctgagccgcgacagcacggcggaggaggtggatgctacacagtaccgacgtcttgtggggagccttcgctacctcacccacacacggccggacttggccttctccgtcggctacgtcagtcggtttatgcagcgaccgacgacggagcaccagcaggctgtgaagaggatcatccgctacgttgcggggactctcgaccacggtctctactacccgaggtgtcctggcaaggcacacttcgtcgggtacagcgacagcgaccacgccggcgacattgacaccagcaagagcacgagcgggattctcttcttcctcggcgagtgcctcgttagctggcagtcaatcaagcagcaggtggtggccctgtccagctgcgaggccgagtacatggcggcatccgccgcttcgacccaggcgctctggcttgctcgactgcttagtgatctcctcggcagagatactggagcggtggagctcagggtggatagcaagtccgctctggccctggcaaagaaccccgtttttcacgaacggagcaagcacatccgggtgaggtaccatttcatccgaagctacttggaggaagggagcatcaaggcgagctacatcaacaccaaggaccagcttgcggatttgctcaccaaaccccttgggaggatcaagttccttgagctttgctcccggatcgggatggctcaactttcccacaagacggcgcacaagacttag

SEQ ID NO: 15682 - DNA, 4572 bp, Oryza sativa
  Clone ID: TFbOSC28294j.C1.o8.fg
atgtccgacgttcggtctcggcgttcggtcgtctcgagcactcggcgtcagcaggacgccgagctcgccgcagcagaagagcgcaggcgagcaacggctcagaccgctgcagcagcagcgagggcggccagactggcggcagcagagttggcagcagccagggcggaggcagaagcagaggcggcggaagatgcggcacgtgcggcggaggtagaggttgagaccttgcgcagcagcatcaacggctccatcgccggcgacatcaccgccgacagggagcttgaggagcttgcaagaggtagggcacgggagcgggcagagcggtgggcagcagcccacctccacggcggcggcggcggcccaagggaccgcgcgcccgccgacgggaacccagacgggcgcgggcgtgccggcggcagcccggagcccgcgcgcggccctcgcaggcagcgtggctctccctcccctgaccggcaccatggccaccacggcgtccagacggtggtcagggactttggtcccggcggtgggtggcctaccctcaccaaaaccaactacatcgagtgggccgcggtgatgagggtgaggctccaggtgcggcacatgtgggaggcagtccggtacggcgacgtcgactacgacgaggatcggcgggcactggatgccctcatcgctgcagtcccgcccgagatgcagttctcgctttcccagaagcggactgccaaggaggcctgggacgccatcgctgcggcacgcatcggcagcgatcgcgcccacaagtcaacactgcaggcactccgcaaggagtgggagaacctggccttcaagccaggtgaggatgttgatgactttgccctccgtctccacactcttttgcagaagatggtgcagtacggcgacgacacctacgacgaggagagagctgtcgagaagctctttcgctgcgtcccagagaagtacaagcagatcgctcgctcgattgagtctttgctggacctctccacgatgtcgatcgaggaggcgttaggtcgcctaaaggtcgtcgacggcgatgagccacagcctctctcggggcctatcaccattggcgggaagctccatctcactcgggagcagtgggaggccagccagagtaacgggaggaagggggagtcccctccctcgacaggcggccgcaagccgcgcaaggcgcgcggaggcgtccagctgcggtgggcgcgaagacgcgccgagggtggcgctcgcagaggtgcccagggcgacgccgctggcaaccacaagccggcacgagacgacgcctgccgcaactgtggcaagcttggccattgggccaaagactgtcgacagccacgacgcggccaggcccacgtcgcacaggtggaggaaaagccggctctgctcctagcacacgccagcatcgagctatcttcagcggcaccggccgcaacggctttcctccacctcgaggagccgaaggtacacgccttcctcggcaacagctccagcaacgacaaggctgatgggtggtacctcgacaccggcgccacccatcatatgactggccggcgggagttcttcaccgagcttgactccagcgtccgaggctccgtcaagtttggggatgcctccggcgtggagatcaagggcgtcggctccgtcaccttcaccaccaagtccggtgagcacaggctgctcaccggagtctactacatccccgcgttgagaaactctatcatcagcgtgggacagctggatgagaacggctcaagcgtgttggtcgagcacggagtcatgaggatttgggatcgccgccgtcgccttcttgccaaggtaaccagaggcactaatcgactctacatcctcagcgcgcaggtcgcacaaccagtttgcctcgccgctcgtcgagacggcgaggcgtggcagtggcacgagcgtttcgggcaccttcactttgaggccctgaagcggctcagcgccaaggagatggtgcgaggcctgccgtgccttgaccacgtggagcagctctgcgacgtctgcgtcctaacgaagcagaggcggctcccctttccccagcagacgagtttccgagccaaggagcggctcgagctcatgcacggggacttgtgtggcccagtgacaccggccacaccaggaggacgacgttacttcctgctgctcgtcgacgacctctcccgctacatgtgggtgatggtcctcggcagcaagggagaggctgcggacaccatccggcgcgcgcaggctgctgcagaggcggagtgcggccgcaagctacgcgtactgcgcaccgacaacggcggcgaattcacggcggctgaattcgcgtcgtactgcgctgatgagggcattcagcgccactacaccgcgccgtacagcccgcagcagaacggcgtcgtcgagcggcgcaaccagacggttgtggggatggctcgggctctcctcaagcagagggggatgccggccatcttctggggagaggcggtggtgacggccgtctacatcctcaaccgctcgcctaccaaggccctcgatggcaggacaccgtacgaggcttggcatgggcgcaagccaggggtctcccacctgcgggtcttcggctgcctcgcgttcgtcaaggagcttggccccatcagcaagctcgatgacaggagcaccccaggggtgttcatcggctacgcggagggctcgaaggcctatcgcatcctcgacccggagacacagcgtacggtggacgatggttcgactctgacgtacgacgacttcaccgtcgagtatgtccacttcgagagagctgggggagtaggcagctcttcttcaccaagcgtgtctaccccagtccccgagcctccatcgactccgacaccaacacaccctcgggccacggcttcgactgcgacgagctcttcgccgacaccaccacagccggcaaccccacgcgccccagcaccaacagccactcctccgagcacgtctactccgacgccagctcgtgttgagcgcagcccggtggagttcgctactccgctctcccacgacggggagcgcatcgacgcgtaccacgacggcgagcagctacggtaccgtacgatggaggatcttctcggtgaccagcccgtgccaggaatggtgcctcgcgacctggaggcgcagttgcaccttgcgtgcgacgacggtgagcctcggtctttcgcagaggccgagaaacacgcggcatggcgtgccgcgatgcagtcggagatggacgcggttcaggagaaccgcacctgggagcttgttgatctccctcgtggtcaccgcgcgatcacccttaagtgggtgttcaagttgaagagggataaagccggagccatcgtcaagcacaaggctcgcttggtggcacgcggtttcgtgcagcaggaggggatcgactacgacgatgccttcgctcccgtggcacggatggagtccgtgcgactccttgcgctggctgctcaggaaggctggggcgtccatcacatggacgtcaagtcggcgtttctgaacggcgacttgaaggaggaggcaccgagggcgtggaatgccaagttggattccacgctcaaggggatgggcttcgagcaaagcccgcacgaggcggccatctaccggcggggcaatggaggaaatgccttgctggtgggtgtctacgtcgacgacttggtgatcaccggcaccaaggatgcggaggtgtaccaggacgactccggaatcacgcttcggcagaccgcctacgccaagcgcgtcgttgagctggctgggctcaccgattgcaacccagctctcactccgatggaggagagactgaagctgagccgcgacagcacggcggaggaagtggatgctacacagtaccggcgtcttgtggggagccttcgctacctcacccacacacggccggacttggccttctccgtcggctacgtcagtcggttcatgcagcgaccgacgacggagcaccagcaggctgtgaagaggatcatccgctacgttgcggggactctcgaccacggtctctactacccgaggtgtcctggcaaggcacacttcgtcgggtacagcgacagcgaccacgccggcgacattgacaccagcaagagcacgagcgggattctcttcttcctcggcgagtgcctcgttagctggcagtcaatcaagcagcaggtggtggccctgtccagctgcgaggccgagtacatggtggcatccgccgcttcgacccaggcgctctggcttgctcgactgcttagtgatctcctcggcagagatactggagcggtggagctcagggtggatagccagtccgctctggccctggcaaagaaccccgtttttcacgaacggagcaagcacatccgggtgaggtaccatttcatccgaagctacttggaggaagggagcatcaaggcgagctacatcaacaccaaggaccagcttgcggatttgctcaccaaaccccttgggaggatcaagttccttgagctttgctcccggatcgggatggctcaactttcccacaagacgacgcacaagacttag

SEQ ID NO: 15683 - DNA, 843 bp, Oryza sativa
  Clone ID: TFbOSC30052j.C1.o1.fg
atgagggtgaggctccaggtgcggcacatgtgggaggcagtccggtacggcgacgttgactacgatgaggatcggcgggcactggatgccctcatcgctgcagtcccgctcgagatgcagttctcgctttcccataagtggactgccaaggaggcctgggatgccatcgctgtggcacgtatcggcagcgaccgcgcccgcaagtccacactgcaggcactccgcaaggagtgggagaacctggccttcaagccaggtgaggatgttgatgactttgccctccgtctcaacactcttttgcagaagatggtgcagtacggcgacgacacttacgacgaggagagagctgtcgagaagctctttcgttacgtccctgagaagtacaggcagatcgctcgctcgatcgaatctctgctggacctctccacgatgtcgatcgaggaggcgttaggtcgcctcaaggtcgtcgacggcgatgagccacagcctctctcggggcctatcaccattggcgggaagctccatctcactcgggagcagtgggaggccagccagggtgacgggaggaagggggagtcctctccctcgacaggcggccgcaagccgtgcaaggcgcgcggaggcgtccaactgcggtgggcgcgaagacgcgccgagggtggtgctcgcagaggcgcccagggcggcgccgccggcaaccacaagccggcacgagacgacgcttgccgcaactgtggcaagcttggccattgggccaaagactgtcgacagccacgacgcggcatcgagctatctccagcggcaccggccgcaacggctttcctccacctcgatgagccgaag

SEQ ID NO: 15684 - DNA, 6507 bp, Oryza sativa
  Clone ID: TFbOSC400397j.C1.o58.fg
atggcgcttcaggatgaggtcgcccaaaacctgagatggtctatggatagcgcacgcgatacagcctcatgcccatcgtacccctcagcaatggacggctggatgaaaactggggtaccgaaaggaggacgggagaaaatctcttgtcggggatttcactccagctttcgacccactgacagtggcctgtcactgaatgttgatgtatccacgacgatgatcgtcagacctggacctgtcatagagtttcttctcttcaaccagaatatcaagaaccctcatgaaattgactggggaaagttttaccttttccaggacagcatctacccttcagcatatttttcagttgctaggacaactgcgaccgctgcagcagcagcgagggcggccagactggcggcagcggagttggcagcagccagggcggaggcggaggcggcgaaagatgcggcacgtgcggcggaggtagaggttgagaccttgcgcagcagcatcaacggctccatcgccggcgacatcaccgccgacagggagcttgaggagctggcaagagcaagggcacgggagcgagcagagcggtgggcagcagcccacctccacggcggcggcggcggcccaagggaccgcgcgcccgccgacgggaacccagacgggctcgggcgtgccggcggcagcccggagcccgcacgtggccctcgcaggcagcacggctctctctcccctgaccggcaccatggtcaccacggcgtccagacagtggtcagggactttggtcccggcggtgggtggcctaccctcaccaaaaccaactacatcgagtgggccgcggtgatgagggcagtccggtacggtgacgtcgactacgacgaggatcggcgagcactggatgccctcatcgctgcagtcccgcccgagatgcagttctcgctttcccagaagcggactgccaaggaggcctgggacgccatcgctgcggcacgcatcggcagcgaccgcgcccgcaagtccacactgcaggcactccgcaaggagtgggagaacctggccttcaagccaggtgaggatgttgatgactttgctctccgtctcaacactctcttgcagaaaatggtgcagtacggcgacgacacctacgacgaggagagagctgtcgagaagctcttccgttgcgtccctgagaagtacaggcagatcgctcgctcgatcgaatctctgctggacctctccacgatgtcgatcgaggaggcgttaagtcgcctcaaggtcgtcgatggtgatgagccacagcctctctcggggcccatcaccatcggcgggaagctccatctcactcgggaacagtgggaggcctctcaaggtgacgggaggaagggggagtcatcttccccgataggcggccgtaagccgcgcaaggcacagggaggtgtccagctacggtgggcgcgaagacgtgccgagggtggcgcccgcagaggcgcccagggcgttgccaccggcaaccacaagccggcacgagacgacgcctgccgcaactgtggcaagcttggccattgggccaaagactgtcgacagccacgacgtggccaggcccacgtcgcacgggtggaggaagagccggctctgctcctggctcacgcaagcatcgagctacctccagcggcaccggccgcagcggctttcctccaccttgatgagccgaaggtactcgtctccctctgcaacggctccagcaacgacaaggctgatgggtggtacctcgacaccggcgccacccatcacatgaccagccgacgggagttcttcaccgagttcgactccagcgtccgaggctccgtcaagttcggggacgcctctggcgtggagatcaagggtgttggctccgtcaccttcaccgccaagtccggtgagcacaggctgctcaccggagtctactacatccccgcgttgaggaattctatcatcagcttgggacagctggatgagaacggctcacgcgtgttggtcgaggacggactcatgaggatttgggatcgccgtcgtcgccttcttgccaaggtaaccagaggcactaatcgactctacatcctcagcgcgcaggtcgcacaaccagtttgcctcgccgctcgtcgggatgacgaggcgtggcagtggcacgagcgcttcaggcacctccacttcgaggccctgaagcagctcagtgccaaggagatggtgcgaggcatgccgtgccttgaccacgtggagcagctctgtgacgtctgcgtggtgacgaagcagcggcggctcccctttccccagcagacgagcttccgagccaaggagcggctcgagctcgtgcacggggacttgtgtggcccagtgacaccggccacaccaggaggacgacgttacttcctactgctcgtcgacgacctctcctgctacatgtgggtgatggtcctcggcagcaagggagaggctgcggacgccatcaggcatgcgcaggctgctgcagaggcagagtgcggccgcaagctgcacgtgctgcgcaccgacaacggcggtgaattcacagcggctgaattcgcgtcgtactgcgctgatgagggcattcagcgacactacaccacgccttacagcccgcaacagaacgacgtcgtcgagcggcgcaaccagacggttgtggggatggctcgggccctcctcaagcagagggggatgccggccatcttctggggggaggcggtggtgacggccgcctacatcctcaaccgctcgcctaccaaggccctcgatggcaggacaccgtacgaggcttggcatgggcgcaagccggcggtctcccacctgcgggtcttcggctgcctcgcgttcgccaaggagcttggccacatcggcaagctcgacgacaggagcaccccaggggtgttcatcggctacgcggagggctcgaaggcctaccgcatcctcgacccggagacacagcgtgtgcgcactgcgcgcgacgttgtgtttgatgaagggcgagggtgggtatgggacaaggcggtggacgatggttcgactccgacgtacgacgacttcaccgtcgagtacgtccacttcgagggagctgggggagtaggcagctcttcttcacctagcgtgtctaccccagcccccaaatctccaccgactccaacaccaacacaccctcgggccacgacttcgactacgacgagctcttcgtcgactccacatgctccagcaccaacagccactcctccaagcacgtctactccgacgccagctcgtgttgagcgcagcccggtggagttcgctactccgctctcccacgacggggagcgcatcgacgtgtaccacgacggcgagcagctatggtaccgtacgatggaggatcttctcggcgaccagccggtgccgggactggtgcctcgcgacctagaggcgcagttgcaccttgcgtgcgatgacggtgagcctcggtcttttgcagaggccgagaaacacgcggcatggcgtgccgcgatgcagtcggagatggacgcggttcaggagaaccgcacctgggagcttgctgacctccctcgtggtcaccgcgcgatcacccttaagtgggtgttcaagctgaagagggatgaagccggagccatcgtcaagcacaaggctcgcttggtggcacgcggtttcgtgcagcaggaggggatcgactacgacgatgccttcgctcccgtggcacggatggagtccgtgcgactccttcttgcgctggctgctcaggaaggctggggcgtccatcacatggacgtcaagtcggcgtttctaaacggcgacttgaaggaggaggtctacgtgcaccagccgccgggatttgtgatccccggcaaggagggcaaggtgctacgcctgcacaaggccctctacggcttgcggcaggcatcgagggcgtggaatgccaagttggattctacgctcaaggggatgggcttcgagcaaagcccgcacgaggcggccatctaccggcggggcaatggaggaaatgccttgctggtgggtgtctacgtcgacgacttggtgatcaccggcaccaaggatgcggaggtcgcggcgttcaaggaggagatgaaggccaccttccaaatgagtgatctggggcctctctccttctacctggggattgaagtgcaccaggacaactccgggatcacgcttcgacagaccgcctacgccaagcgcgtcgttgagctggctgggctcaccgattgcaacccagctctcactccgatggaggagagactgaagctgagccgcgacagcacggcggaggaggtggatgctacacagtaccgacgtcttgtggggagccttcgctacctcacccacacacggccggacttggccttctccgtcggctacgtcagtcggttcatgcagcgaccaacgacggagcaccagcaggctgtgaagaggatcatccgctacgttgcggggactctcgaccacggtctctactacccgaagtgtcctggcaaggcacacttcgtcgggtacagcgacagcgaccacgccggtgacatcgacaccagcaagagcacgagcgggattctcttcttcctcggcaagtgcctcgttagctggcagtcagtcaagcagcaggtggtggccctgtccagctgcgaggccgagtacatggcggcctccgccgcttcgacccaggcgctctggcttgctcgactgcttagtgatctcctcggcagagacactggaaaggtggagctcagggtggatagcaagtccgctctagccctggcaaagaaccccgtttttcacgaacggaccaagcacatccgggtgaggtaccacttcatccgaagctacttggaggaatggagcatcaatgcgagctacatcaacaccaaggaccagcttgcggacttgctcaccaagcctcttgggaggatcaaactaggagggtgcagcaataggctagcagccagctatggctatatatatatgtatccaacctcccttggacaggccaagtgtgcactgaagaacctgaggataaaaacgactcacaccggctctgaatttaggatcatcggtttgtctgaagacacttgctattcgcagacgttccaaataaagagaaaaaatggcaacggtggctcggatacagtggaagaagtgacagtctttgaatactacaggaagaattggaaaatagatttgaagggatctgctcactttccctgtctaaatgttgggaagccaaagcggccaacatatatcccattggagctttgccatttggtgccattgcaaaggtacaaaaaggctttgtcgacgttacagcggtccacgttggttgagagatcaaggcagaatcctcaagagaggatgtttgtcttgtctggtgtgttgagggacagtgattataactctgtgccaatgctgagggagtgtggcatttctatagctcaagaatttacccaggttgctgctagagtccttccggcaccaaagctgaaatctggagatggcgaagatatttttgcgcgcaatgggaggtggaacttcaataaaaattgcaatgcccatcatcttgctcagcgtctcatccattgtgggaacttgaagggacttatcaacgatcagtacctgactaatgtgcttctaaagataaatgcaaagcttggagggttgaattcgctgctgcaaattgaaagaaaccaagccattcctctcttgtcgaagactccaaccattatcttaggcatggatgtttcccatggctcaccgggacgggatgatgtaccgtctgtcgctgcggttgttagttccctggagtggcctctcatatcaaaatataaagcctccgtatgcacccagtctcccaggctagaaatgatcgattccttgtttaagctagtggggaatgaggatcatgttatcattagagatggggttagtgaaggccagtttaatcaggtgctgaacattgagctagcccagataatcaaggcatgcgagtttcttgccaatgagaaaaatgacagtgaatggtctccaaagttcacggtgatagttgcgcagaagaaccatcacaccaaattttttcagacagatcgatcgaacaaagttgtcaatgttcctcctggtactgttgttgacaaaggaatctgtcatcccaggaactgtgatttctacatgtgtgctcatgctgggatgattgggactacaaggccgacgcattaccatgtgctgcatgatgagaacaatttcacccctgatgacttgcaggagcttgtgcacaacctctcatacgtgtaccagaggagcacgacggccatctcaggtgtcgctccgatctgctacgcgcacctggcggcggcgcaggtgtcgcagttcgtgagactcgacgacgcggcgtcggagggcagcggtgacggcggcgcgccgccgcggccggtgccggagctcccgcgcctgcacccggacgtcaggcagtccatgttcttctgctga

SEQ ID NO: 15685 - DNA, 1399 bp, Oryza sativa
  Clone ID: TFbOSC400397j.C1.o76.gp
ctctgcagcagcctgcgcatgcctgatggcgtccgcagcctctcccttgctgccgaggaccatcacccacatgtagcaggagaggtcgtcgacgagcagtaggaagtaacgtcgtcctcctggtgtggccggtgtcactgggccacacaagtccccgtgcacgagctcgagccgctccttggctcggaagctcgtctgctggggaaaggggagccgccgctgcttcgtcaccacgcagacgtcacagagctgctccacgtggtcaaggcacggcatgcctcgcaccatctccttggcactgagctgcttcagggcctcgaagtggaggtgcctgaagcgctcgtgccactgccacgcctcgtcatcccgacgagcggcgaggcaaactggttgtgcgacctgcgcgctgaggatgtagagtcgattagtgcctctggttaccttggcaagaaggcgacgacggcgatcccaaatcctcatgagtccgtcctcgaccaacacgcgtgagccgttctcatccagctgtcccaagctgatgatagaattcctcaacgcggggatgtagtagactccggtgagcagcctgtgctcaccggacttggcggtgaaggtgacggagccaacacccttgatctccacgccagaggcgtccccgaacttgacggagcctcggacgctggagtcgaactcggtgaagaactcccgtcggctggtcatgtgatgggtggcgccggtgtcgaggtaccacccatcagccttgtcgttgctggagccgttgcagagggagacgagtaccttcggctcatcaaggtggaggaaagccgctgcggccggtgccgctggaggtagctcgatgcttgcgtgagccaggagcagagccggctcttcctccacccgtgcgacgtgggcctggccacgtcgtggctgtcgacagtctttggcccaatggccaagcttgccacagttgcggcaggcgtcgtctcgtgccggcttgtggttgccggtggcaacgccctgggcgcctctgcgggcgccaccctcggcacgtcttcgcgcccaccgtagctggacacctccctgtgccttgcgcggcttacggccgcctatcggggaagatgactcccccttcctcccgtcaccttgagaggcctcccactgttcccgagtgagatggagcttcccgccgatggtgatgggccccgagagaggctgtggctcatcaccatcgacgaccttgaggcgacttaacgcctcctcgatcgacatcgtggagaggtccagcagagattcgatcgagcgagcgatctgcctgtacttctcagggacgcaacggaagagcttctcgacagctctctcctcgtcgtaggtgtcgtcgccgtactgcaccattttctgcaag

SEQ ID NO: 15686 - DNA, 5127 bp, Oryza sativa
  Clone ID: TFbOSC401340j.C1.o28.fg
atggccatcgcggtgaggtcggctgcggcggtggcgaggcactccctgcgccctccgctggccgcgcccggcagcatccgcggcgcctcgctcctgccgccgcagcgcgctcgcggcgtgggcccgtgtcgcgcccgcgctcgcgcggcgagctcctccgcgactggaggtggcgggcaccttcctccgctgttcagcgtggcgccgatgatggactggacggacaaccactaccggacgctcgcgcggctgatctcgaagcacgcgtggctctacacggagatggtggtcgcggagaccatcgtgcatcagaaagataacttggatagatttttagcgtttcctgctgaacagcatcctattgtgttgcaaattggtggaagtaatctggataacttagcgaaggcaactgaactggcaaatgcttattcgtacgatgagatcaacctaaactgtggctgccccagtggcaaagttgctggtcatggttgcttcggtgctcgcttaatgtttgatccagagtttgtaggggatgctatgtcagctattgctgccaattgtaatgtcccagtcagcgttaagtgcagaattggtgttgatgatcgtgactcctacgaagaactttgtgaatttgtagataaggttgtttcaaaatcaccaactaggcatttcattattcatgcccggaaggcattgctaagtggcctcagtcctgcagaaaatcggaacgttcctcctttaaaaaaaccagaaaattgccccatctcgagtgccatcctcttctcaatgagagtaaccattgaagttctaacatctgggagcttgaggagctggcaagaggaagggcacgggaacgggcagagcggcggcggcggcccaagggaccgcgcacccgccgacgggaacccagatgggcgcgggcgtgccggcggcagcccggagcccgcgcgcggccctcgcaggcagcgcggctctccctcccctgaccggtgccatggtcaccacggcgtccagacggtggtaagggactttggtctcggcggtgggtggcctaccctcaccaaaaccaactacatcgagcgggccgcggtgatgagggtgaggctccaggtgcggcacatgtgggaggcagtccggtacggcgacgttgactacgatgaggatcggcgggcactggatgccctcatcgctgcagtcccgctcgagatgcagttctcgctttcccataagtggactgccaaggaggcctgggatgccatcgctgtggcacgtatcggcagcgaccgcgcccgcaagtccacactgcaggcactccgcaaggagtgggagaacctggccttcaagccaggtgaggatgttgatgactttgccctccgtctcaacactcttttgcagaagatggtgcagtacggcgacgacacctacgacgaggagagagctgtcgagaagctctttcgttgcgtcccagagaagtacaggcagatcgctcgctcgatcgagtctctgctggacctctccacgatgtcgatcgaggaggcgttaggtcgcctcaaggtcgtggacggcgatgagccacagcctctctcggggcctatcaccattggcgggaagctccatctcactcgggagcagtgggaggccagccagggtgacgggaggaagggggagtcctctccctcgacaggcggccgcaagccgtgcaaggcgcgcggaggcgtccaactgcggtgggcgcgaagacgcgccgagggtggtgctcgcagaggcgcccagggcggcgccgccggcaaccacaagccggcacgagacgacgcttgccgcaactgtggcaagcttggccattgggccaaagactgtcgacagccacgacgcggcatcgagctatctccagcggcaccggccgcaacggctttcctccacctcgatgagccgaaggtacacgccttcctcggcaacagctccagcaacgacaaggctgatgggtggtacctcgacaccggcgccacccatcacatgactggccggcgggagttcttcaccgagcttgactctagcgtccgaggctccatcaagtttggggatgcctccggcatggagatcaagggcgtcggctccgtcaccttcaccgcaaagtccggtgagcacaggctgctcaccggagtctactacatccccgtgttgaggaactctatcatcagcgtgggacagctggatgagaacggctcacgcgtgttggtcgagcacggagtcatgacgatttgggatcgccgccgtcgccttcttgccaaggtaaccagaggcactaatcgactctacatcctcagcgcgcaggtcgcacaaccagtttgcctcgccgctcgtcgggacgacgaggcgtggcagtggcacgagcgtttcgggcacctccactttgaggccctaaagtggctcagcgccaaggagatggtgcgaggcctgccgtgccttgaccacgtggagcagctctgcgacgtctgcgtcctaacgaagcagaggcggctcccctttccccagcagacgagtttccgagccaaggagcagctcgagctcgtgcacggggacttgtgtggcccagtgacaccggccacaccaggaggacgacgttacttcctgctgctcgtcgacgacctctcccgctacatgtgggtgatggtcctcggcagcaaggcagaggctgcggacgccatccggcgcgcgcaggctgctgcagaggtggagtgcggccgcaagctgcgcgtgctgcgcaccgacaacggcggcgaattcacggcggctgaatttgcgtcgtactgcgctgatgagggcattcagcgccagtacaccgcgccgtacagcccgcaacagaacggtgtcaagcggcgcaaccagacggttgtagggatggctcgggctctcctcaagcagagggggatgccggccatattctggggagaggtggtggtgacggccgtctacatcctcaaccgctcgcctacgaaggccctcgatggcaggacaccgtacgaggcttggcatgagcgcaagccgggggtctcccacctgcgggtcttcggctgccttgcgttcgtcaaggagcttggccacatcggcaagctcgacgacaggagcaccccaggggtgttcatcggctacgcggagggctcgaaggcctatcgcatcctcaactcggagacacagcgtgtgcgcacagcgcgcgatgtagtgttcgacgaagggcgagggtgggtatgggacaaggcggtggacgatggttcgactccgaagtacgacgacttcaccgtcgagtacgtccacttcgagggagctgggggagtaggcaactcttcttcaccgagcgtgtctaccccagtccccgagcctccaccgactccgacaccaacacactctcgggccacgacttcgactacgacgagctcctcgcctacaccaccacagccggtgaccccacgcgctccagcaccaacagccactcctccgagcacgtctactccgacgccagctagtgttgagcgcaacccggtggagttcgctactccgctctcccacgacggggagcgcatcgacgcgtaccacgacggcgagcagctacggtaccgtacgatggaggatcttctcggcgaccagccggtgccgggactggtgcctcccgacctggaggcgcagttgcaccttgcgtgcgacgacggtgagcctcggtctttcgcagaggccgagaaacacgtggcatggcgtgccgcgatgcagtcggagatggacgcagttcaggagaaccgcacctgggagcttgctgaccttcctcgtggtcaccgcgcgatcacccttaagtgggtgttcaagctgaagagggatgaagccggagccatcgtcaagcacaaggctcgcttggtggcacgcggaaggctgggcgtccatcacatggacgtcaagtcggcgtttctaaacggcgacttgaaggaggaggtctacgtgcaccagccgccaggatttgtgatccccggcaaggagggcaaggtgctacgcctgcacaaggccctctacggcttgcggcaggcaccgagggcgtggaatgccaagttggattccacgctcaaggggatgggcttcgagcaaagcccgcacgaggcggccatctaccggcggggcaatggaggaaatgccttgctggtgggtgtctacgtcgacgacttggtgatcaccggcaccaaggatgcggaggtcgcggcgttcagggaggagatgaaggccaccttccatatgagtgatcaggggcctctctctttctacctggggattgaggtgcaccaggacgactccgggatcacgcttcgacagaccgcctacgccaagcgcgtcgttgagctggctaggctcaccgattgcaacccagctctcactccaatggaggagagactgaagctgagccgtgatagcacgacggaggaagtggatgctacacagtaccggcgtcttgtgggaagccttcgctacctcacccacacggctggacttggccttctccgtcggctacgtcagtcggctgtgaagaggatcatccgctacgttgcggggactctcgaccacggtctctactacccgaggtgtcctggcaaggcacacttcgtcgagtacagcaacagcaaccacgccggtgacatcgacaccagcaagagcacgagcgggattctcttcttcctcggcgagtgcctcgttagctggcagtcagtcaagcagcaggtggtggccctgtccagctgcgaggccgagtacatggcggcctccgccgcttcgacccaggcgctctggcttgctcgactgcttagtgatctcctcggcagagatactggagcggtggagctcagggtggatagcaagtccgctctggccctggcaaagaaccccgtttttcacgaatggagcaagcacatctgggtgaggtaccacttcatccgaagctacttggaggaagggagcatcaaggcgagctacatcaacaccaaggaccagcttgcggacctgctcaccaagcctcttgggaggattaagttcctcgagctctgcttcaggatcgggatggctcaacttccccacaagacgacgcacaagacttag

SEQ ID NO: 15687 - DNA, 7602 bp, Oryza sativa
  Clone ID: TFbOSC401545j.C1.o1.fg
atggcgctggagaggcggctcgcgtacgccgcgctcatcccgttcctccttctcgcgctccccatcctgccgtccgattccccgtccggcggcggcggcggtggcgcgggtgggggtgggggagggggagaaaccctagacccgcccgcggcgaagtacgtggtgcggttcgtcgagtaccggcccgccgacgagcaccgggagtacctggaggacggcctccgcggggccgcgcggcctccccccgccgcgtcgtggcggtgggtggagcggcggaaccccgccgccgcgttccccaccgacttcgccgtgctcgagatccgcgacgcgtgccgcgcggctgtcgtcgacgccgtcagtgcgctcggccgtgtccgggacgtgcacgccgatgcgagctactccaggggcgtcctgtctgcggatcggccgcggcagcaggggaagctgttcacagccatgtcgttcgagggggaggaaggagggggagatagggaggtcgggtgcagcactgatagtaataattcctcttctgctggttggaggcggaagcttctcgtgcagagatcacaagtaacgtctctttttggagctgaacgactatgggggagaggtttcactggtaggaaagtcaagatggccatttttgacactggtattcgagcagatcatccgcacttccgtaatattaaggagcgcactaattggacaaacgaagacacactaaatgataaccttggacatggaacatttgtagctggagttattgctggtcaagatgcagaatgccctggatttgcacctgacactgagatatatgcatttcgagtgttcacagatgctcagatatcctacacatcgtggttcttggatgcatttaattatgcaattgcaactggtatggatgtactgaatttgagtattggtggacctgattatctggatctcccctttgtggaaaaggacgccgagctcgccgcagcagaagagcgcaggcgagcaacagctcagaccgctgcagcagcagcgagggcggccagactggcggcagcggagttggcagcagccagggcggaggcggaggcggaggcggcgaaagatgcggcacgtgcggcggaggtagaggttgagaccttgcgcagcagcatcaacggctccatcgccggcgacatcaccgccgacagggagcttgaggagctggcaagaggaagggcacgggagcgggcagagcggtgggcagcagcccacctccacggcggcggcggcggtccaagggaccgcgggcccgccaacgggaacccagatgggcgcgggcgtgccggcggcagcccggagcccgcacgcggccctcgcaggcagcgcggctctttctcccctgaccggcgccatggtcaccacggcgtccagacggtggtcagggactttggtcccggcggtgggtggcctaccctcaccaaaaccaactacatcgagtgggccgcagtgatgagggtgaggctccaggtgcggcaaatgtgggaggcagtccggtacggcgacgtcgactacgacgaggatcggcgagcactggatgccctcatcgctgcagtcccgcccgagatgcagttctcgctttcccagaagcggactgccaaggaggcctgggacgccatcgctgcggcacgcatcggcagcgaccgcgcccgcaagtccacactgcaggcactccgcaaggagtgggagaacctggccttcaagccaggtgaggatgttgatgactttgctctccgtctcaacactctcttgcagaaaatggtgcagtacggcgacgacacctatgacgaggagagagctgtcgagaagctcttccgctgcgtccctgagaagtacaggcagatcgctcgctcgattgaatctctgctggacctctccacgatgtcgatcgaggaggcgttaggtcgcctcaaggtcgtcgatggtgatgagccacagcctctctcggggcccatcaccatcggcgggaagctccatctcactcgggagcagtgggaggcctctcagggtgacgggaggaagggggagtcatcttccccgacaggcggccgtaagccgcgcaaggcgcggggaggtgtccagctacggtgggcgcgaagacgtgccgagggtggcgcccgcagaggcgcccagggcattgccactggcaaccacaagccggcacgagacgacgcctgccgcaactgtggcaagcttggccattgggccaaagactgtcgacagccacgacgcggccaggcccacgtcgcacgggtggaggaggaagagccggctctgctcctagctcacgcaagcatcgagctacctccagcggcaccggccgcagcggctttcctccaccttgatgagccgaaggtactcgtctccctctgcgacggctccagcaacgacaaggctgatgggtggtacctcgacaccggcgccacccatcacatgacctgccgacgggagttcttcaccgagttcgactccagcgtccgaggctccgtcaagttcggggacgcctccggcgtggagatcaagggtgttggctccgtgaccttcaccgccaagtccggtgagcacaggctgctcaccggagtctactacatccccgcgttgaggaattctatcatcagcgtgggacagctggatgagaacggctcacgcgtgttggtcgaggacggactcatgaggatttgggatcgccgtcgtcgccttcttgccaaggtaaccagaggcactaatcgactctacatcctcagcgcgcaggtcgcacaaccagtttgcctcgccgctcgtcgggacgacgaggcatggcagtggcacgagcgcttcgggcatctccacttcgaggccctgaagcgcctcagtgccaaggagatggtgcgaggcatgccgtgccttgaccacgtggagcagctctgcgacgtctgcgtggtgacgaagcagcggcggctcccctttccccagcagacgagcttccgagccaaggagcggctcaagctcgtgcacggggacttgtgtggcccagtgacaccggccacaccaggaggacgacgctacttcctactgctcgtcgacgacctctctcgctacatgtgggtgatggtcctcggcagcaagggagaggctgcggatgccatcaggcgcgcgcaggccgctgcagaggcggagtgcggccgcaagctgcgcgtgctgcgcaccgacaacggcggcgaattcacggcggctgaattcgcgtcgtactgcgctgatgagggcattcagcgccactacaccgcgccgtacagcccacagcagaacggcgtcgtcgagcggcgcaaccagacggttgtggggatggctcgggctcttctcaagcagagggggatgccagccatcttctggggggaggcggtggtgacagccgtctacatcctcaatcgctcgcctaccaaggccctcgatggcaggacaccgtacgaggcctggcatgggcacaagccggcggtctcccacctacgggtcttcggctgcctcgcgttcgccaaggagctcggccacatcggtaagctcgacgacaggagcaccccaggggtgttcatcggctacgcggagggctcgaaggcctaccgcatcctcgacccggagacacagcgtgtgcgcactgcgcgcgatgttgtgttcgacgaagggcgagggtgggtatgggacaaggcggtggacgatggttcgactccgacgtacgacgacttcaccatcgagtacgtccacttcgagggagctgggggagtaggcagctcttcatctagcgtgtctaccccagcccccgaatctccaccgactccgacaccaacacaccctcgggccacgacttcgactacgacgagctcttcgtcgacaccaccccagccagtgactccacatgctccagctccaacagccactcctccaagcacgtctactccgacgccagctcgtgttgagcgcagcccggtggagttcgctactccgctctcccacgacggggagcgcatcgacgcgtaccacgacggcgagcagctacggtaccgtacgatggaggatcttctcggcgaccagttggtgccgggactggtgcctcgcgacttagaggcgcagttgcaccttgcgtgcgacgacggtgagcctcggtcttttgcagaggccgagaaacacgcggcatggcgtgccgcgatgcagtcggagatggacgcggttcaggagaaccgcacctgggagcttgctgacctccctcgtggtcaccgcgcaatcacccttaagtgggtgttcaagctgaagagggatgaagccggagccatcgtcaagcacaaggctcgcttggtagcacgcggtttcgtgcagcaggaggggatcgactacgacgatgccttcgctcccgtggcacggatggagtccgtgcgactcctttttgcgctggctgctcaggaaggctggggcgtccatcacatggacgtcaagtcggcgtttctaaacggcgacttgaaggaggaggtctacgtgcaccagccgccgggatttgtgatccccggcaaggagggcaaggtgctacgcctgcacaaggccctctacggcttgcggcaggcaccgagggcgtggaatgccaagttggattccacgctcaaggggatgggcttcgagcaaagcccgcacgaggcggccatctaccggcggggcattggaggaaatgccttgctggtgggtgtctacgtcgacgacttggtgatcaccggcaccaaggatgcggaggtcgcggcgttcaaggaggagatgaaggccactttccagatgagtgatctggggcctctctccttctacctggggatcgaagtgcaccaggacaactccgggatcacgcttcgacagaccgcctatgccaagcgcgtcgttgagctggctgggctcaccgattgcaacccagctctcactccgatggaggagagactgaagctgagccgcgacagcacggcggaggaggtggatgctacacagtaccgacgtcttgtggggagccttcgctacctcacccacacacggccggacttggccttctccgtcggctacgtcagtcggtttatgcagcgaccgacgacggagcaccagcaggccgtgaagaggatcatccgctacgttgcggggactctcgaccacggtctctactacccgaggtgtcctggcaaggcacacttcgtcgggtacagcgacagcgaccacgccggcgacattgacaccagcaagagcacgagcgggattctcttcttcctcggcgagtgcctcgttagctggcagtcaatcaagcagcaggtggtggccctgtccagctgcgaggccgagtacatggcggcatccgccgcttcgacccaggcgctctggcttgctcgactgcttagtgatctcctcggcagagatactggagcggtggagctcagggtggatagcaagtccgctctggccctggcaaagaaccccgtttttcacgaacggagcaagcacatccgggtttgggagctcacagcaaataacattattatggtatcagctattggaaatgatggccctctttatggcacgctaaataacccggctgatcagagtgacgtcattggtgttggtggtattgattacaataaccatatagcttcattttcctctcgaggcatgactacttgggagcttcctcatgggtatggccgtgttaaacctgatgttgttgcgtatagtcgtgatataatgggttcaaagatcagcacaggttgtaaaaccctttcaggcaccagtgttgcaagcccggtggttgctggtgtagtatgcttgcttgttagtgttataccagaggagcatcggaaatccatccttaaccctgcaacaatgaaacaagcccttgtagagggtgcttctaggctttcaggaccaaacatgtatgagcagggcgctggcaagattgacctctggcaatcatacgaaatcttgaaaagttaccaaccgcgtgcaagcatctttcctaatacccttgacttcactgattgtccctatttctggcctttttgccgccaacctctgtatgctggagctatgccagtggtcttcaatgctacaattctgaacgggatgggggtgattggttatgttaaggatcctcctgtatggcagccctctgaggatgtcggcaatattcttagtgttcacttcacctactcagatgtcatatggccttggacaggttatcttgccctgcacttacaagttaaagatgaaggatctcagttttcaggcataatcagtggcaaggtcacattgtcaatttacagcccagcagcccatggggaaagcagtccacgaagtagttcatgtgttctttacctgaaggtcaaggtggtgccaacacctgttaggtccagaagaatattgtgggaccaatttcataatatcaaatacccatctggttttgttccaagagattcacttaatgtgcataatgatatccttgactggcatggcgatcacttgcacacgaattttcatatactgttcaacatgctgagagatgcaggatactacattgagacccttggatctccacttacctgctttgatgctagcaattatgggacactgcttatggttgaccttgaggatgagtacttcagtgaggagattcagaaacttaaggatgatgttgtacacaaagggcttggcgttgttgtttttgcagagtggtatcatgtcgacacaatggttaagatgacattctttgatgaaaatacacgcagttggtggactccaattactgggggtgcaaatgttcctgcacttaatgaacttttggcaccatttggcattgcttttggggacaaagtactaagtggtgacttctcaatcaatggtgagcagacccactatgcttctgggactgatatagtgcaattcccagcaggaggttttttgcatagcttccaactccaggacaactctaaaatttctcaggataactcaagaagcgcagatacacaaaataccccagataaaagcaagtgcctcctagtctgtggctctgtgcacatgctctcttctattcttggaatgatggaagcaggcaaaggtcgggttgcagtctatggagattcaaattgccttgacagtagtcacatggtaacaaactgctattggcttttgagaaaacttgtggagttcactggcaatagaatcaaagatcctgttcttttctcagaatctgctcagttaaaatttccagtttttgagagcatccatcaactgtcacgtagaccagatgtgaacttctcaacatattcaactgtcgttggcaatgaattgatctgtcaccaggattcccgatttgaggtttggggaacgaaaggttatggtacccaacaaacaggcacaacaagaaagttgccagagtaccagaaaagtgaagcttacaacatttcaacaccaatagcttctgacagcacaccagatgaagctggcctgcaaagaaatatttcaacaccaatagcttctaagtttgataaaagaatggactattttggttttctcgggcacgaagag

SEQ ID NO: 15688 - DNA, 1409 bp, Oryza sativa
  Clone ID: TFbOSC401606j.C1.o6.gp
actccgcctctacagcagcctgcgcatgcctgatggcgtctgcagcctctcccttgctgccgaggaccatcacccacatgtagcgggagaggtcgtcgacgagcagcaagaagtaacgtcgtcctcctggtgtggccggtgtcattgggccacacaagtccccgtgcacgagctcgagccgctccttggctcggaagctcgtctgctggggaaaggggagccgccgctgcttcgtcaccacgcagacgtcgcagagctgctccacgtggtcaaggcacggcatgcctcgcaccatctccttggcactgagctgcttcagggcctcgaagtggaggtgcccgaagcgctcgtgccactgccacgcctcgtcgtcccgacgagcggcgaggcaaactggttgtgcgacctgcgcgctgaggatttagagtcgattagtgcctctggttaccttggcaagaaggcgacgacggcgatcccaaatcctcatgagtccgtcctcgaccaacacgcgtgagccgttctcatccagctgtcccacgctgatgatagaattcctcaacgcggggatgtagtagactccggtgagcagcctgtgctcaccggacttggcggtgaaggtgacggagccaacacccttgatctccacgccggaggcgtccccgaacttgacggagcctcggacgctggagttgaactcggtgaagaactcccgtcggccggtcatgtgatgggtggctccggtgtcgaggtaccacccatcagccttgtcgttgctggagccgttgcagagggagacgagtaccttcggctcatcaaggtggaggaaagccgctgcggccggtgccgctggaggtagctcgatgcttgcgtgagccaggagcagagccggctcttcctcctccacccgtgcgacgtgggcctggccgcgtcgtggctgtcgacagtctttggcccaatggccaagcttgccacagttgcggcaggcgtcgtctcgtgccggcttgtggttgccggtggcaacgccctgggcgcctttgcaggcgccaccctcggcacgtcttcgcacccaccgtagctggacacctccccgcgccttgcgcggcttacggccgcctgtcggggaagatgactcccccttcctcccgtcaccctgagaggcctcccactgcttccgagtgagatggagcttcccgccgatggtgatgggccctgagagaggctgtagctcatcaccatcgacgaccttgaggcgacctaacgcctcctcgatcgacatcgtggagaggtccagcagagattcgatcgagcgagcgatctgcctgtacttctcagggacgcagcggaagagcttctcgacagctctctcctcgtcgtaggtgtcgtcgccgtactgcaccattttctgcaag

SEQ ID NO: 15689 - DNA, 4380 bp, Oryza sativa
  Clone ID: TFbOSC401606j.C1.o8.fg
atgtccgacgctcggtctcggcgttcggtcgcctcgagcactcggcgtcagcaggacgccgagctcgccgcagcagaagagcgcaggcgagcaacgggtcagaccgctgcagcagcagcgagggcggccagactggcggcagccgagttggcagcagccagggcggaggcggaggcggaggcggcggaagatgcggcacgtgcggcggaggtagaggttgagaccttgcgcagcagcatcaacggctccatcgccggcgacatcaccgccgacagggagcttgaggagctggcaagaggaagggcacgggagcgggcagagcggtgggcagtagcccacctccacggcggcggcggcggcccaagggaccgcgcgcccgccgacgggaacccagacgggcgcgggcgtgccggcggcagcccggagcccgcacgcggccctcgcaggcagcgtggctctctctcccctgaccggcgtcatggtcaccacggcgtccagacggtggtcagggactttggtcccggcggtgggtggcctaccctcaacaaaaccaactacatcgagtgggccgcggtgatgagggtgaggctccaggtgcggcacatgtgggaggcagtccgaagcggactgccaaggaggcctgggacgccatcgctgcggcacgcatcggcagcgaccgcgccagcaagtccacactgcaggcactccgcaaggagtaggagaacctggccttcaagccagaaaatggtgcagtacggcgacgacacctacgacgaggagagagctgtcgagaagctcttccgctgcgtccctgagaagtacaggcagatcgctcgctcgatcgaatctctgctggacctctccacgatgtcgatcgaggaggcgttaggtcgcctcaaggtcgtcgatggtgatgagctacagcctctctcagggcccatcaccatcggcgggaagctccatctcactcggaagcagtgggaggcctctcagggtgacgggaggaagggggagtcatcttccccgacaggcggccgtaagccgcgcaaggcgcggggaggtgtccagctacggtgggtgcgaagacgtgccgagggtggcgcctgcaaaggcgcccagggcgttgccaccggcaaccacaagccggcacgagacgacgcctgccgcaactgtggcaagcttggccattgggccaaagactgtcgacagccacgacgcggccaggcccacgtcgcacgggtggaggaggaagagccggctctgctcctggctcacgcaagcatcgagctacctccagcggcaccggccgcagcggctttcctccaccttgatgagccgaaggtactcgtctccctctgcaacggctccagcaacgacaaggctgatgggtggtacctcgacaccggagccacccatcacatgaccggccgacgggagttcttcaccgagttcaactccagcgtccgaggctccgtcaagttcggggacgcctccggcgtggagatcaagggtgttggctccgtcaccttcaccgccaagtccggtgagcacaggctgctcaccggagtctactacatccccgcgttgaggaattctatcatcagcgtgggacagctggatgagaacggctcacgcgtgttggtcgaggacggactcatgaggatttgggatcgccgtcgtcgccttcttgccaaggtcgcacaaccagtttgcctcgccgctcgtcgggacgacgaggcgtggcagtggcacgagcgcttcgggcacctccacttcgaggccctgaagcagctcagtgccaaggagatggtgcgaggcatgccgtgccttgaccacgtggagcagctctgcgacgtctgcgtggtgacgaagcagcggcggctcccctttccccagcagacgagcttccgagccaaggagcggctcgagctcgtgcacggggacttgtgtggcccaatgacaccggccacaccaggaggacgacgttacttcttgctgctcgtcgacgacctctcccgctacatgtgggtgatggtcctcggcagcaagggagaggctgcagacgccatcaggcatgcgcaggctgctgtagaggcggagtgcggccgcaagctgcgcgtgctgcgcaccaacaacggcggcgaattcacagcggctgaattcgcgtcgtactgcgctgatgagggcattcaacgccactacacgccgtacagcccgcagcagaacgacgtcgtcgagtggcgcaaccagacggttgtggggatggctcaggccctcctcaagcagagggggatgccggccatcttctggggggaggcggtggtgacggccgcctacatcctcaaccgctcacctaccaaggccctcgatggcaggacaccgtacgaggcttggcatgggcgcaagccggcggtctcccacctgcgggtcttcggctgcctcgcgttcgccaaggagcttggccacatcggcaagctcgacgacaggagcaccccaggggtgttcatcggctacgcggagggctcgaaggcctaccgcatcctcgacccggagacacagcgtgtgcgcactgcgcgcgacgttgtgttcgacgaagggcgagggtgggtatgggacaaggcggtggacgatggttcgactccgacgtacgatgacttcaccgtcgagtacgtccactttgagggagctgggggagtaggcagctcttcttcaccaagcgtgtctaccgcagcccccgaatctccaccgactctgacaccaacacacccttgggccacgacttcgactacgacgagctcttcgtcgacaacaccccagccagtgactccacatgctccagcaccaacagccactcctccaagcacgtctactccgacgccagctcgtgttgagcgcagcccggtggagttcgctactccgctctcccacgacggggagcgcatcgacgcgtaccacgacggcgagcaactacagtaccaggccgagaaacacgcggcatggcgtgccgcgatgcagtcggagatggacgcggttcaggagaaccgcacctgggagcttgctgacctccctcgtggtcaccgcgcgatcacccttaagtgggtgttcaagctgaagagggatgaagccggagccatcgtcaagcacaagactcacttggtggcacgcggtttcgtgcagcaggaggggatcgactacgacgatgccttcgctcccgtggcacggatggagtccgtgcgactccttgcgctggctgctcaggaaggctggggcgtccatcacatggacgtcaagttggcgtttctgaacggcgacttgaaggaggaggtctacgtgcaccagccgccgggatttgtgatccccggcaaggagggcaaggtactacgcctgcacaaggccctctacggcttgcggcaggcactgagggcgtggaatgccaagttggattctacactcaaggggatgggcttcgagcaaagcccgcacgaggcagctatctaccggcggggcaatggaggaaatgccttgctagtgggtgtctacgtcgacgacttggtgatcaccggcaccaaggatgcggaggtcgcggcgttcaaggaggagatgaaggccaccttccagatgagtgatctggggcctctctccttctacctggggatcaaagtgcaccaggacgactctgggatcacgcttcgacagaccgcctacgccaagcgcgtcgttgagctggctgggctcaccgattgcaacccaactctcactccgatggaggagagactgaagctgagccgcgacagcatggcggaggaggctgtgaagaggatcatccgctacgttgcggggactctcgaccacggtctctactacccgaggtgtcctggcaaggcacacttcattgggtacagcgacagcgaccacgccggcgacatcgacaccagcaagagcacgagcgggattctcttcttcctcggcaagtgcctcgttagctggcagtcggtcaagcagcaggtggtggccctatccagctgcgaggccgagtacatggcggcctccgccgcttcgacccaggcgctctggcttgctcgactgcttagtgatctcctcggcagagacactggaacggtggagctcagggtggatagcaagtccgctctggccctggcaaagaaccccgtttttcacgaacggagcaagcacatctgggtgaggtaccactttatccgaagctacttggaggaagggagcatcaaggcgagctacatcaacaccaaggaccaacttgcggacttgctcaccaagcctcttgggaggatcaagttcctcgagctctgctccaggatcgggatggcccaacttccccacaagacgacgcacaagacttag

SEQ ID NO: 15690 - DNA, 3507 bp, Oryza sativa
  Clone ID: TFbOSC401785j.C1.o5.fg
atgtcgatcgaggaggcgttaggtcgcctcaaggtcgtcgatggtgatgagccacagcctctctcggggcccatcaccatcggcgggaagctccatctcactcgggagcagtgggaggcctctcagggtgacgggaggaagggggagtcatcttccccgacaggcggccgtaagccgcgcaaggcgcggggaggtgtccagctacggtgggcgcgaagacgtgccgagggtggcgcccgcagaggcgcccagggcgttgccaccggcaaccacaagccggcacgagacgacgcctgccgcaactgtggcaagcttggccattgggccaaagactgtcgacagccacgacgtggccaggcccacgtcgcacgggtggaggaagagccggctctgctcctggctcacgcaagcatcgagctacctccagcggcaccggccgcagcggctttcctccaccttgatgagccgaaggtactcgtctccctctgcaacggctccagcaacgacaaggctgatgggtggtacctcgacaccggcgccacccatcacatgaccggccgacgggagttcttcaccgagttcgactccagcgtccgaggctccgtcaagttcggggacgcctccggcgtggagatcaagggtgttggctccgtcaccttcaccgccaagtccggtgagcacaggctgctcaccggagtctactacatccctgcgttgaggaattctatcatcagcgtgggacagctggatgagaacggctcacgcgtgttggtcgaggacggactcatgaggatttgggatcgccgtcgtcgccttcttgccaaggtaaccagaggcactaatcgactcgacatcctcaacgtgcaggtcgcacaaccagtttgcctcgccgctcatcgggacgacgaggcgtggcagtggcacgagcgcttcgggcacctccacttcgaggccctgaagcagctcagtgccaaggagatggtgcgaggcatgccgtgtcttgaccacgtggagcagctctgcgacgtctgcgtggtgacgaagcagcggcggctcccctttccccagcagacgagcttccgagccaaggagcggctcgagctcgtgcacggggacttgtgtggcccagtgacaccagccacaccaggaggacgacgttacttcctgctgctcgtcgacgacctctcccgctacatgtgggtgatggtcctcggcagcaagggagaggctgcggacgccatcaggcatgcgcaggctgctgcaaaggcggagtgcggccgcaagctgcgcgtgctgcgcactgacaacggcggcgaattcacagcggctgaattcgcgtcgtactgcgctgatgagggcattcagcgccactacaccacgccgtacagcccgcagcagaacggcgtcgtcgagcggcgcaaccagacggttgtggggatggctcgggccctcctcaagcagagggggatgccggccatcttctgggggcaggcggtggtgacggccgcctacatcctcaaccgctcgcctaccaaggccctcgatggcaggacaccgtacgaggcttggcatgggcgcaagccggcggtctcccacctgcgggtcttcggctgcctcgcgttcgccaaggagcttggccacatcggcaagctcgacgacaggagcaccccaggggtgttcatcggctacgcggagggctcgaaggcctaccgcatcctcgacccggagacacagcgtgtgcgcactgcgcgcgacgttgtgttcgacgaagggcgagggtgggtatgggacaaggcggtggacgatggttcgactccgacgtacgacgacttcaccgtcgagtacgtccacttcgagggagctgggggagtaggcagctcttcttcacctagcgtgtctaccccagcccccgaatctccaccgactccgacaccaacacaccctcgggccacgacttcgactacgacgagctcttcgtcgacacaaccccagccagtgactccacatgctccagcaccaacagccactcctccaagcacgtctactccgacgccagctcgtgttgagcgcagcccggtggagttcgctactccgctctcccacgacggggagcgcatcgacgcgtaccacgacggcgagcagctacggtaccgtacgatggaggatcttctcggcgaccagccggtgccgggactggtgcctcgcgacctagaggcgcagttgcaccttgcgtgcgacgacggtgagcctcggtcttttgtagaggccgagaaacacgcggcatggcgtgccgcgatgcagtcggagatggacgcggttcaggagaaccgcacctgggagcttgctgacctccctcgtggtcaccgcgcgatcacccttaagtgggtgttcaagctgaagagggatgaagccggagccatcatcaagcacaaggctcgcttggtggcacgcggtttcgtgcagcaggaggggatcgactacgacgatgccttcgctcccgtggcacggatggagtctgtgcgactccttgcgctggctgctcgggaaggctggggcgtccatcacatggacgtcaagtcggcgtttctaaacggcgacttgaaggaggaggtctacgtgcaccagccgccgggatttgtgatccccggcaaggagggcaaggtgctacgcctgcacaaggccctctacggcttgcggcaggcaccgagggcgtggaatgccaagttggattccacgctcaaggggatgggcttcgagcaaagcccgcacgaggcggccatctaccggcggggcaatggaggaaatgccttgctagtgggtgtctacgtcgacgacttggtgatcaccggcaccaaggatgcggaggacaactccgggatcacgcttcgacagaccgcctacgccaagcgcgtcgttgagctggctgggctcaccgattgcaacccagctctcactccgatggaggagagactgaagctgagccgcgacagcacggcggaggaggtggatgctacacagtaccgacgtcttgtggggagccttcgctacctcacccacacacggccggacttggccttctccgtcggctacgtcagtcggttcatgcagcgaccgacgacggagcaccagcaggctgtgaagaggatcatccgctacgttgcggggactctcgaccacggtctctactacccgaggtgtcctggcaaggcacacttcgtcgggtacagcgacagcgaccacgccggcgacatcgacaccagcaagagcacgagcgggattctcttcttcctcggcaagtgcctcgttagctggcagtcggtcaagcagcaggtggtggccctgtccagctgcgaggccgagtacatggcggcctccgccgcttcgacccaggcgctctggcttgctcgactgcttagtgatctcctcggcagagacactagaacggtggagctcagggtggatagcaagtccgctctggccctggcaaagaaccccgtttttcactaa

SEQ ID NO: 15691 - DNA, 1408 bp, Oryza sativa
  Clone ID: TFbOSC401841j.C1.o11.gp
ctctgcctctgcagcagcctgcgcatgcctgatggcgtccgcagcctctcccttgctgccgaggaccatcacccacatgtagcaggagaggtcgtcgacgagtagcaggaagtaacgtcgtcctcctggtgtggccggtgtcactgggccacacaagtccccgtgcacgagctcgagccgctccttggctcggaagctcgtctgctagggaaaggggagccgccgctgcttcgtcaccacgcaaacgtcgcagagctgctccacgtggtcaaggcacggcatgcctcgcaccatctccttggcactgagctgcttcagggcctcgaagtggaggtgcccgaagcgctcgtgccactgccacgcctcgtcgtcccgacgagcggcgaggcaaactggttgtgctacctgcgcgctgaggatgtagagtcgattagtgcctctggttaccttggcaagaaggcgacgacggcgatcccaaatcctcatgaatccgtcctcgaccaacacgcgtgagccgttctcatccagctgtcccacgctgatgatagaattcctcaacgcggggatgtagtagactccggtgagcagcctatgctcaccggacttggcggtgaaggtgacggagccaacacccttgatctccacgccggaggcgtccccgaacttgacggagcctcggacgctggagtcgaactcggtgaagaactcccgtcggccggtcatgtgatgggtggcgccggtgtcgaggtaccacccatcagccttgtcgttgctggagccgttgcagagggagacgagtaccttcggctcatcaaggtggaggaaagccgctgcggccggtgccgctggaggtagctcgatgcttgcgtgagctaggagcagagccggctcttcctcctccacccgtgcgacgtgggcctggtcgcgtcgtggctgtcgacagtctttggcccaatggccaagcttgccacagttgcggcaggcgtcgtctcgtgccggcttgtggttgccggtggcaacgccctgggcgcctctgcgggcgccaccctcggcacgtcttcgcgcccaccgtagctggacacctccccgtgccttgcgcggcttacggccgcctgtcggggaagatgactcccccttcctcccgtcaccctgagaggcctcccactgctcccgagtgagatggagcttcccgccgatggtgatgggccccgagagaggctgtggctcatcaccatcgacgaccttgaagcgatctaacgcctcctcgatcgacatcgtggagaggtctagcagagattcgatcgagcgagcgatctgcctgtacttctcagggacgcagcggaagagcttctcgacagctctctcctcgtcgtaggtgtcgtcgccgtactgcaccattttctgtaag

SEQ ID NO: 15692 - DNA, 3879 bp, Oryza sativa
  Clone ID: TFbOSC401841j.C1.o8.fg
atgtccgacgctcggtctcggcgttctgtcgcctcgagcactcggcgtcagcaggacgctgagctcgccgcagcagaagagcgtaggcgagcaacggctcagaccgctgcagcagcagcaagggcggccagactggcggcagcggagttggcagcagccagggcggaggcggaggcgtcggaagatgcggcacgtgtgacggaggtagaggttgagaccttgcgcagcagcatcaacggctccatcgccggcgacatcaccgccgacagggagcttgaggagctggcaagaggaagggcacgggagcgggcagagcggtgggcagcagcccacctccacggcggtggcggcggcccaagggaccacgcgcccgccgacgggaacccagacgggcgcgggcgtgccggcggaagcccggagcccgcacgtggccctcgcaggcagcgcggctctctctcccctgaccggcgccatggtcaccacggcgtccagacggtggtcagggactttggtcccggcggtgggtggcctaccctcaccaaaaccaactacatcgagtgggccgcggtgatgagggtgaggctccaggtgcggcacatgtgggaggcagtccgcgaccgcgcccgcaagtccacattgcaggcactccgcaaggagtgggagaacctggccttcaagccaggtgaggatgttgatgactttgctctccgtctcaacactctcttacagaaaatggtgcagtacggcgacgacacctacgacgaggagagagctgtcgagaagctcttccgctgcgtccctgagaagtacaggcagatcgctcgctcgatcgaatctctgctagacctctccacgatgtcgatcgaggaggcgttagatcgcttcaaggtcgtcgatggtgatgagccacagcctctctcggggcccatcaccatcggcgggaagctccatctcactcgggagcagtgggaggcctctcagggtgacgggaggaagggggagtcatcttccccgacaggcggccgtaagccgcgcaaggcacggggaggtgtccagctacggtgggcgcgaagacgtgccgagggtggcgcccgcagaggcgcccagggcgttgccaccggcaaccacaagccggcacgagacgacgcctgccgcaactgtggcaagcttggccattgggccaaagactgtcgacagccacgacgcgaccaggcccacgtcgcacgggtggaggaggaagagccggctctgctcctagctcacgcaagcatcgagctacctccagcggcaccggccgcagcggctttcctccaccttgatgagccgaaggtactcgtctccctctgcaacggctccagcaacgacaaggctgatgggtggtacctcgacaccggcgccacccatcacatgaccggccgacgggagttcttcaccgagttcgactccagcgtccgaggctccgtcaagttcggggacgcctccggcgtggagatcaagggtgttggctccgtcaccttcaccgccaagtccggtgagcataggctgctcaccggagtctactacatccccgcgttgaggaattctatcatcagcgtgggacagctggatgagaacggctcacgcgtgttggtcgaggacggattcatgaggatttgggatcgccgtcgtcgccttcttgccaaggtaaccagaggcactaatcgactctacatcctcagcgcgcaggtagcacaaccagtttgcctcgccgctcgtcgggacgacgaggcgtggcagtggcacgagcgcttcgggcacctccacttcgaggccctgaagcagctcagtgccaaggagatggtgcgaggcatgccgtgccttgaccacgtggagcagctctgcgacgtttgcgtgggctcgaaggcctaccgcatcctccacctggagacacagcgtgtgcgcattgtgcgcgatgttgtgttcgacgaagggcgagggtgggtatgggacaaggcggtggacgatggttcgactccgacgtacgacgacttcaccgtcgagtacgtccacttcgagggagctgggggagtaggcagctcttcttcaccgagcgtgtctaccctagcccccgaatctccaccgactccgacaccaacacaccctcgggccacgacttcgactacgacgagctcttcgtcgacaccaccccagccagtgactccacatgctccagcaccaacagccactcctccaagcacgtctactccgacgccagctcgtgttgagcgcagcccggtggagttcgctactccgctctcccacgacggggagcgcatcgacgcgtaccacgacggcgagcagctacggtaccaggccgagaaacacgcggcatggcgtgccgcgatgcagtcggagatggacgcggttcaggagaaccgcacctgggagcttgctgacctccctcgtggtcaccgcgcgatcacccttaagtgggtgttcaagctgaagagggatgaagccggagccatcgtcaagcacaaggctcgcttggtggcacgcggtttcgtgcagcaggaggggatcgactacgatgatgccttcgctcccgtggcacggatggagtccgtgcgactccttgcgctggctgctcaggaaggctggggcgtcgatcacatggacgtcaagtcggcgtttctgaacagcgacttgaaggaggaggtctacgtgcaccagccgccgagatttgtgatccccggcaaggagggcaaggtgctacgcctgcacaaggccctctacggcttgcggcaggcaccgagggcgtggaatgccaagttggattccacgctcaaggggatgggcttcgagcaaagcccgcacgaggcggccatctaccggcggggcaatggaggaaatgccttgctggtgggtgtctacgtcgacgacttggtgatcaccggcaccaaggatgcggaggtcgcggcgttcaaggagatgaaggccaccttccagatgagtgatctggggcctctctccttctacctggggatcgaagtgcaccaggacgactccgggatcacgcttcgacagaccgcctacgccaagcgcgtcgttgagctggctgggctcaccgattgcaacccagctcttactccgatggaggagagactgaagctgagccgcgacagcacggcggaggaggtggatgctacacagtaccggcgtcttgtggggagccttcgctacctcacccacacacggccggacttggccttctccgtcggctacgtcagtcggttcatgcagcgaccgacgacggagcaccagcaggctgtgaagaggatcatccgctacgttgcggggactctcgaccacggtctctactacccgaggtgtcctggcaaggcacacttcgtcgggtacagcgacagcgaccacgccggcgacatcgacaccagcaagagcacgagcgggattctcttcttcctcggcaagtgcctcgttagctggcagtcggtcaagcagcaggtggtggccctgtccagctgcgaggccgagtacatggcggcctccgccgcttcgacccaggcgctctggcttgctcgactgcttagtgatctcctcggcagagacactggaacggtggagctcagggtggatagcaagtccactttggccctggcaaagaaccccgtttttctcgaacggagcaagcacatccgggtgaggtaccacttcatccgaagctacttggaggaagggagcatcaaggcgagctacatcaacaccaaggaccagcttgcgtacttgctcaccaagcctcttgggaggatcaagtttctcgagctctgctccaggatcgggatggcccaacttccccacaagacgacgcacaagacttag

SEQ ID NO: 15693 - DNA, 5448 bp, Oryza sativa
  Clone ID: TFbOSC401948j.C1.o6.gm
atggacgagtcaggcagaggaacaggtgatgatcatggccgggagacgaaggatgctgcggcggcggcgtcgtcgtcgtcggggaagaaggtgccgctgttcagcttgttccggtacgccgaccgcctcgacgtgctgctgatggttgtcggcacggtgggcgcgctcggcaacggcatctcgcagcccctcatgacggtcctcttcggcaacgtcatcaactccttcggcgcgaacaccagcggcagcgtcctccgcagcgtgaccaaggttgtcctcaacttcatatatctgggaattggaacttcagtagcttcctttcttcaggtatcatgctggactatggcaggagaaaggcagtctgcccgcatccgttctttatacctgaaagccgttctgaggcaggatattacattcttcgacacagagatgacaactggtgaagcagtttctagaatgtctagtgataccctcctaattcaaggtgctcttggtgagaaggttgtgtccttcaatggtgagaagaaagcgatagcaatgtaccgtaattttataaagaagtcatacaaggctactattgaggaaggcattatcactggttttggcatgggctctgtcatgtgcgtcgtatttggcagctatggattagccttctggtatggtggaaagctaatcattgagaaaggttacacaggaggaaaaatcatgactatcttgtttgccgtgttgaccggtgcatcctcattaggcaatgcaacacctgcagttgctgcagttgtggaaggtcaatctgcagcatacaatttgttcaaaacaattgagaggaaaccagagatagattccgatgataacaatggcatggttttagaagatatgaatggcgatattgagctaaaggatgtgtactttcgttaccctgcaagaccagagcagttgatattggatggattgtcgttacaagtagcgagtggaacaacaatggctatagtcggagagagtggaagcggaaagtcaactgttatcagcctagtcgaaagattctacgatccacagtctggcgaagttttaatagatggaattagcatcaagaaactgagacttgattggataagagggaagatcggtcttgttagccaagagcctctgctttttatggcctccattaaagataacataatatatggtaaaaaagatgcaacgcttgaagagatcaagagagcagcggagcttgcaaatgcagctaacttcattgacaagttaccaaatggttatgatactttagttggccagcgcggtactcagctctctggaggacaaaaacagagaattgcaattgcaagagccatcctcaaagatccaaaaatccttttgctcgatgaagcaacaagtgcacttgatgtggagtctgagaggatagttcaggaggcactaaatagaatgatggtagaaagaaccacactcgttgtcgctcatcgtttgagcactgtgaggaatgttgattgcatcacagtcgtccgcaaaggaaaaatagttgaacaaggtcctcatgatgcactggtgaaggatcccgatggagcttactcccagctaattaggctacaagagactcatcgtgatgaaaggcataaactaccagattccagatcaaaaagtactagtttgtcattcagacgatcaagaactaaagattttctcagcaagagcaacagtggggcacttggtacaaggctctcagtcgatgcgttgaatgtccgccgtttagtaggagataacctggcccttatagtccaggctgtagctacactaatcactggctttgccatagcttttgcggcagattggaggcttgcactgatcatcacttgtgtaattcctttagtgggtgcacagggctatgctcaagttaagttcttgaaggggttcagtgaagaatctaagaccatagcacttgttggagaaagcggtagtgggaagtccacgataattgctttattagagcgtttctatgatcctgattctggtaatatctcactagatggagttgaaattagaagcttaaaagtcagctggttgagggatcagatggggcttgtaggccaggagccagtgcttttcaacgacacaatccgtgccaacataacatacgggaaacacagtgaggtaacagaggaagagatcactgctgtggccaaggcagcaaacgcccatgagttcgtatcaagcctgccacaaggatacgacacagtggtaggtgagaaaggggtgcaactatctggtgggcaaaaacagagggtagcaattgcaagggccatcctaaaggaccctaagatactgctacttgatgaggcaaccagtgctctagatgcagaatcagaacgtgttgttcaagatgcattggatcgagtcatggtcaacaggactaccattgtagtggcacaccgcctctccacaatcaaaggggctgatatgattgcagtcctcaaggaaggaaaaattgcagaaaaaggaaagcatgaagcactattgcggatcaaggatggtgcatatgcttcacttgacgccgagctcgccgcagcagaagagcgcaggcgagcaacggctcagaccgctgcagcagcagcgagggcggccagactggcggcagcggagttggcagcagccagggcggaggcggaggcggaggcggcggaagatgcggcacgtgcggcggaggtagaggttgagaccttgcgcagcagcatcaacggctccatcgccggcgacatcaccgccgacagggagcttgaggagctggcaagaggaagggcacgggagcgagcagagcggtgggcagcagcccacctccacggcggcggcggcggcccaagggaccgcgcgcccgccgacgggaacccagacgggcgcaggcgtgccggcggcagcccggagctcgcacgcggccctcgcaggcagcacggctctctctcccctgaccggcgccatggtcaccacggtgtccagacggtggtcagggactttggtcccggcggtgggtggcctaccctcaccaaaaccaactacatcgagtgggccgcggtgatgagggtgaggctccaggtgcggcacatgtgggaggcagtccggtacggtgacgtcaactacgacgaggatcggcgggcactggatgccctcatcgctgcagtcccgcccgagatgcagttctcgctttcccagaagcggactgccaaggaggcctgggacgccatcgctgcggcacgcatcggcagcgaccgcgcccgcaagtccacactgcaggcactccgcaaggagtgggagaacctggccttcaagccaggtgaggatgttgatgactttgctctccgtctcaacactctcttgcagaaaatggtgcagtacggcgacgacacctacgacgaggagagagctgtcgagaagctcttccgctgcgtccctgagaagtacagacagatcgctcgctcgatcgaatctctgctggacctctccacgatgttgatcgaggaggcgttaggtcgcctcaaggtcgtcgatggtgatgagccacagcctttctcggggcccatcaccatcggcgggaagctccatctcactagggagcagtgggaggcctctcagggtgacgggaggaagggggagtcatcttccccgacaggcggccgtaagccgcgcaaggcgcggggaggtgtccagctacggtgggcgcgaagacgtgccgagggtggcgcccgcagaggcgcccagggcgttgccaccggcaaccacaagccggcacgagacgacgcctgccgcaactgtggcaagcttggccattgggccaaagactgtcgacagccacgacgcggccaggcccacgtcgcacgggtggaggaggaagagccggctctgctcctggctcacgcaagcatcgagctacctccagcggcaccggccgcagcggctttcctccaccttgatgagccgaaggtactcgtctccctctgcaacggctccagcaacgacaaggctgatgggtggtacctcgacaccggcgccacccatcacatgaccggccgacgggagttcttcaccgagttcgactccagcgtccgaggctccgtcaagttcggggacgcctccggcgtggagatcaagggtgttggctccgtcaccttcaccgccaagtccggtgagcacaggctgctcaccggagtctactacatccccgcgttgaggaattctatcatcagcgtgggacagctggatgagaacggctcacgcgtgttggtcgaggacggactcatgaggatttgggatcgccgtcgtcgccttcttgccaagtggcacgagcgcttcgggcacctccacttcgaggccctgaagcagctcagtgccaaggagatggtgcgaggcatgccgtgccttgaccacgtggagcagctctgcgacgtctgcgtggtgacgaagcagcggcggctcccctttccccagcagatgagcttccgagccaaggagcggctcgagctcgtgcacggggacttgtgtggcccagtgacaccggccacaccaggaggacgacgttacttcctgctgctcgtcgacgacctctcccgctacatgtgggtgacggtcctcggcagcaagggagaggctgcggacgccatcaggcatgcacaggctgctgcagaggcggagtgcggccgcaagctgcgcgtgctgcgcaccgacaacggcggcgaattcacagcggctgaattcgcgtcgtactgcgctgatgagggcattcagcgccactacaccacgccgtacagcccgcagcagaacggcgtcgtcgagcggcgcaaccagacggttgtggggatggctcgggccctcctcaagcagagggggatgccggccatcttctggggggaggcggtggtgacggcaacggcaacctcaacaatggcgtcggatggtcagggacaggggcggatgtggctaggggcagatgcggcggcgtgggaaggcagagaggagtgcaagcggcggcgccggatgcagccgggggtggaggtgatggtgtcggatgtggcggctcaaccgggggagccggatgaggcgggaaggagcgacgctggaatactcgccatggggtttggccagcgggatagcttggtcagcccgttagagaggctgttggaggacattttttttcatgtggttgctataatttggtttggagatgctctaacaattggattatatcacggtagatattacaagtttttagctctgaacattgagctaaaagagctcgtgctagcggcggcggtcgtggcgggcgacgacgcggactgcagcggcggtcgcggcgggcgacggtgtggccgcggacggcggcggggctcgcggacgacggcggaggtcgcggtcagcgacgacacggatggcagcgacggtcgtggcgggtga

SEQ ID NO: 15694 - DNA, 4668 bp, Oryza sativa
  Clone ID: TFbOSC410155j.C1.o3.fg
atgtccgacgctcggtctcggcgttcggtcgcctcgagcactcggcgtcagcaggacgccgagctcgctgcagcagaagagcgcaagcgagcaacagctcagaccgctgcagcagcagcgagggcggccagactggcggcagcggagttggcagcagccagggaggaggcggaggcagaggcggcggaagatgcggcacatgcggcggaggtagaggttgagaccttgcgcagcagcatcaacggctccatcgccggcgacatcaccgccgacagggagcttgaggagctggcaagaggaagggcacgggagcgggcagagcggtgggcagcagcccacctccacggcggcggcggcggcccaagggaccgcgcgcccgccaacgggaacccagatgggcgcgggcgtgccggcggcagcccggagcccgcacgcggcccttgcaggcagcgcggctctctctcccctgaccggcgccatggtcaccacggcgtccagacggtggtcagggactttggtcccggcggtgggtggcctaccctcaccaaaaccaactacatcgagtgggccgcagtgatgagggtgaggctccaggtgcggcacatgtgggaggcagtccggtacggcgacgtcgactacgacgaggatcggcgggcactggatgccctcatcgctgcagtcccgcccgagatgcagttctcgctttcccagaagcggactgccaaggaggcctgggacgccatcgctgcggcacgcatcggcagcgaccgcgcccgcaagtccacactgcaggcactccgcaaggagtgggagaacctggccttcaagccaggtgaggatgttgatgactttgctctccgtctcaacactctcttgcagaaaatggtgcagtacggcaacgacacctacgacgaggagagagctgtcgagaagctcttccgctgcgtccctgagaagtacagacagatcgctcgctcgatcgaatctctgctggacctctccacgatgtcgatcgaggaggcgttaggtcgcctcaaggtcgtcgatggtgatgagccacagcctctctcggggcccatcaccatcggcgggaagctccatctcactcgggagcagtgggaggcctctcagggtgacgggaggaagggggagtcatcttccccgacaggcggccgtaagccgcgcaaggcgcggggaggtgtccagctacggtgggcgcgaagacgtgccaagggtggcgcccgcagaggcgcccagggcgttgccaccggcaaccacaagccggcacgagacgatgcctgccgcaactgtggcaagcttggccattgggccaaagactgtcgacagccacgacgcggccaggcccacgtcgcacgggtggaggaggaagagccggctctgctcctagctcacgcaagcatcgagctacctccagcggcaccggccgcagcggctttcctccaccttgatgagccgaaggtactcgtctccctctgcaacggctccagcaacgacaaggctgatgggtggtacctcgacaccggcgccacccatcacatgaccggccgacgggagttcttcaccgagttcgactccagcgtccgaggctccgtcaagttcggggacgcctccggcgtggagatcaagggtgttggctccgtcaccttcaccgccaagtccggtgagcacaggctgctcaccggagtctactacatccccgcgttgaggaattctatcatcagcgtgagacagctggatgagaatggctcacgcgtgttggtcgaggacggactcatgaggatttgggatcgccgtcgtcgccttcttgccaaggtaaccagaggcactaatcgactctacatcctcagcgcgcaggtcgcacaaccagtttgcctcgccgctcgtcgggacgacgaggcatggcagtggcacgagcgcttcgggcacctccacttcgaggccctgaagcgcctcagtgccaaggagatggtgcgaggcatgccgtgccttgaccacatggagcagctttgcgacgtctgcgtggtaacgaagcagcggcggctcccctttcctccgcagatgagcttccgagccaaggagcggctcgagctcatgcacggggacttgtgtggcccagtgacaccggccacaccaggaggacgacgttacttcctgctgctcgtcgacgacctctcccgctacatgtgggtgatggtcctcggcagcaagggagaggctgcggatgccatcaggcgcgcgcaggccgctgcagaggcggagtgcggccgcaagctgcgcgtgctgcgcaccgacaacggcggcgatgagggcatccagcgccactacaccgcgtcgtacagcccacagcagaacggcgtcgtcgagcggcgcaaccagacgggggaggcggtggtgacagccgtctacatcctcaatcgctcgcctaccaaggccctcgatggcaggacaccgtacgaggcttggcatgggcacaagccggcggtctcccacctacgggtcttcggctgcctcgcgtttgccaaggagcttggccacatcggtaagctcgacgacaggagcaccccaggggtgttcatcggctacgcggagggctcaaaggcctaccgcatcctcgacccggagacacagcgtgtgcgcacagtgcgcgacgtagtgttcgacgaagggcgagggtgggtatgggacaaggcggtggatgatggttcgactccgacgtacgacgacttcaccatcgagtacgtccacttcgagggagctgggggagtaggcagctcttcttcaccgagtgtgtctaccccagtccccgagcctccaccgactccaacaccaacacaccctcgggccacgacttcgactacgacgagctcttcgtcgacaccaccccagccggtgtccccacgcgctccagcaccaacagccactcctccgggcacgtctactccgacgccagctcgtgttgagcgcagcccggtggagttcgttactccgctctcccacgacggggagcgcatcgacgcgtaccacgacggcgagcagctacggtaccgtacgatggatgatcttctcggcgaccagccggtgccgggactggtgcctcgcaacctggaggcgcagttgcaccttgcgtgcgacgacggtgagcctcggtcttttgcagaggccgagaaacacgcggcatggcgtgccgcgatgcagttggagatggacgcggttcaggagaaccgcacctgggagcttgctgacctccctcgtggtcaccgcgcaatcacccttaagtgggtgttcaagctgaagagggatgaagccggagccatcgtcaagcacaaggctcgcttggtagcacgcgacttcgtgcagcaagaggggatcgactacgacgatgccttcgctcccgtggcacggatggagtccgtgcgactccttgcgctggctgctcaggaaggctggggtgtccatcacatggacgtcaagtcggcgtttctgaacggcgacttgaaggaggaggtctacgtgcaccagccgccgggattcgtgctccccggcaaggagggcaaggtgctacgcctgcacaaggccctctacggcttgcggcaggcaccgagggcgtggaatgccaagttggattccacgctcaaggggatgggcttcgagcaaagcccgcacgaggcggccatctaccggcggggcaatggaggaaaatgccttgctgatgcggaggtggcgacgttcaagaaggagatgaaggccaccttccagatgagtgatctggggcctctctccttctacctggggatcgaagtgcaccaggacgactccggaatcacgcttcgacagaccgcctacgctaagcgcgtcgttgagctggctgggctcaccgattgcaacccagctctcactccgatggaggagagactgaagctgagccgtgacagcacggcggaggaggtggatgctacacagtaccggcgtcttgtggggagccttcgctacctcacccacacacgatcggacttggccttctccgtcggctacgtcagtcgattcatgcagcaaccgacgacggagcaccagcaggctgtgaagaggatcatccgctacgttgcggggactctcgaccacggtctctactacccgaggtgtcctggcaaggcacacttcgtcgggtacagcgacagcgaccacgccggcgacatcgacaccagcaagagcacgagcgggattctcttcttcctcggcgagtgcctcgttagctggcagtcggtcaaacaacaggtggtggccctgtccagctgcgaggccgagtacatggcggcatccgccgcttcgacccaggcgctctggcttgctcgactgcttggtgatctcctcggcagagacactggagcagtagagctcagggtggacagcaagtccgctctggccctggcaaagaaccccgttttccacgaacggagcaagcacatccgggtgaggtaccactttatccgaaactacttggaggaagggagcatcaaggcgagctacatcaacaccaaggaccagcttgcggacttgctcaccaagcctcttgggaggatcaagttcctcgagctctgctccaggatcgggatggcccaactttcccacaagacgacacacaagacttag

SEQ ID NO: 15695 - DNA, 4056 bp, Oryza sativa
  Clone ID: TFbOSC420547j.C1.o5.fg
atgagggtgaggctccaggtgcggcacatgtgggaggcagtccggtacggtgacgtcgactacgatgaggatcggcgggcactggatgccctcatcgctgcaatcccgcccgagatgcagttctcgctttcccaaaagcggactgccaaggaggcctgggacgccatcgctgcggcacgcatcggcagcgaccgcgcccgcaagtccacactgcaggcactccgcaaggagtgggagaacctggccttcaagccaggtgaggatgttgatgactttgctctccgtctcaacactctcttgcagaaaatggtgcagtacggcgacgacacctacgacgaggagagagctgtcgagaagctcttccgctgcgtccctgagaagtacaggcagatcgctcgctcgatcgaatctctgctggacctctccacgatgacgatcgaggaggcgttaggtcgcctcaaggtcgtcgatagtgatgagccacagcctctctcggggcccatcaccatcggcgggaagctccatctcactcgggagcagtgggaggcctctcaaggtgacggaaggaagggggagtcatcttccccgacaggcggctgtaagccgcgcaaggcgcggggaggtgtccagctacggtgggtgcgaagacgtgccgagggtggcgcccgcagaggcgcccagggcgttgccaccggcaaccacaagccggcacgagacgacgcctgccgcaactgtggcaagcttggccattgggccaaagactgtcgacagccacgacgtggccaggcccacgtcgcacgggtggaggaagagccggctctgctcctggctcacgcaagcatcgagctacctccagcggcaccggccgcaacggctttcctccaccttgatgagccgaaggtactcgtctccctctgcaacggctccagcaacgacaaggctgatgggtggtacctcgacaccggcgccacccatcacatgaccggccgacgggagttcttcatcgagttcgactccagcgtccgaggctccgtcaagttcggggacgcctccggcgtggagatcaagggtgttggctccgtcaccttcaccgccaagtccgcgtgggacagctggatgagaacggctcacgcgtgttggtcgaggacggacactaatcgactctacatcctcagcgcacaggtcgcacaaccagtttgcctcaccgctcgtcgggacgacgaggcgtggcagtggcatgagcgcttcgggcacctccacttcgaggccctgaagcagctcggtgccaaggagatggtgcgaggcatgccgtgccttgaccacatggagcagctctgcgacgtttgcgtggtgacgaagcagtggcggctcccctttccccagcagacgagcttccgagccaaggagcggctcgagctcgtgcacggggacttgtgtggcccagtgacaccggccacaccaggagggcgacgttacttcttactgctcgtcgacgacctctcccgctacatgtgggtgatggtcctcggcagcaagggagaggctgcggacgccatcaggcatgcgcaggctgctgcagaggcagagtgcggccgcaagctgcacgtgctgcgcaccgacaacagcggcgaattcacagcggctgaatttgcgtcgtactgcgctgatgagggcattcagcgccactacaccacgccgtacagcccgcagcagaacggcgtcgttgagcggcgcaaccagacggttgtggggatggctcgggccctcctcaagcagagggggatgccggccatcttctggggggaggcggtggtgacggccgcctacatcctcaaccgctcgcctaccaaggccctcgatggcaggacaccgtacgaggcttggcatgggcgcaagccggcggtctcccacctgcgggtcttcggctgcctcgcgttcgccaaggagcttggccacattggcaagctcgatgacaggagcaccccaggggtgttcatcggctacgcggagggctcgaaggcctaccgcatcctcgacccggagacacagcgtgcggtggacgatggttcgactccgacgtacgacgacttcaccgtcgagtacgtccacttcgagggagctgggggagtaggcagctcttcttcacctagcgtgtctaccccagcccccgaatctccaccgactccaacaccaacacaccctcgggccacgacttcgactacgacgagctcttcgtcgacaccaccccagccagtgactccacatgctccagcaccaacagccactcctccaagcacgtctactccgatgccagctcgtgttgagcgcagcccggtggagttcgctactccgctctcccacgacggggagcgcatcgacgcgtaccacgacggcgagcagctacggtaccgtacgatggaggatcttctcggcgaccagccggtgccgggactggtgcctcgcgacctagaggcgcagttgcaccttgcgtgcgacgacggtgagcctcggtcttttgtagaggccgagaaacacgcggcatggcgtgccgcgatgcagtcggagatggacgcggttcaggagaaccgcacctgggagcttgctgacctccctcatggtcaccgcgcgatcacccttaagtgggtgttcaagctgaagagggatgaagccgaagccatcgtcaagcacaaggctcgcttggtggcacgcggtttcgtgcagcaggaggggatcgactacgacgatgccttcgctcccgtggcacggatggagtccgtgcgactccttcttgcgctggctgctcaggaaggctggggcgtccatcacatagacgtcaagtcggcgtttctaaacggcgacttgaaggaggaggtctacgtgcaccagccgccgggatttgtgatccccggcaaggagggcaaggtgctacgcctgcacaaggccctctacggcttgcggcaggcaccgagggcgtggaatgccaagttggattccacgctcaaggggatgggcttcgagcaaagcccgcacgaggcggccatctaccggcggggcaatggaggaaatgccttgctggtgggtgtctacgtcgacgacttggtgatcactggcaccaaggatgcggaggtcgcggcgttcaaggaggagatgaaggccaccttccagatgagtgatctggggcctctctccttctacctggggatcgaagtgcaccaggacaactccgggatcatgcttcaacagaccgcctacgccaagcgcgtcgttgagctggctgggctcaccgattgcaacccagctctcactccgatggaggagagactgaagctgagccgcgacagcacggcggaggaggtggatgctacacagtaccgacgtcttgtggggagccttcgctacctcacccacacacggccggacttggccttctccgtcggctacgtcagtcggttcatgcagcgaccgacgacggagcaccagcaggctgtgaagaggatcatccgctacgttgcggggactctcgaccacggtctctactacccgaggtgtcctggcaaggcacactttgtcgggtacagcgacagcgaccacgccggcgacatcgacaccagcaagagcacgagcgggattctcttcttcctcggcaagtgcctcgttagttggcagtcggtcaagcagcaggtggtggccctgtccagctgcgaggccgagtacatggcggcctccgccgcttcgacccaggcgctctggcttgctcgactgcttagtgatctcctcggcagagacactggaacggtggagctcagggtggatagcaagtccgctctggccctggcaatgaaccccgtttttcacgaacggagcaagcacatccgagtgaggtaccacttcatccgaagctacttggaggaagggagcatcaaggcgagctacatcaacaccaaggaccagcttgcggacttgctcaccaagcctcttgggaggatcaagttcctcgagctctgctccaggatcgggatggcccaacttccccacaagacgacgcacaagacttag

SEQ ID NO: 15696 - DNA, 3507 bp, Oryza sativa
  Clone ID: TFbOSC422293j.C1.o3.fg
atgtcgatcgaggaggcgttaggtcgcctcaaggtcgtcgatggtgatgagccacagcctctctcggggcccatcaccatcggcgggaagctccatctcactcgggagcagtgggaggcctctcagggtgacgggaggaagggggagtcatcttccccgacagccggccgtaagccgcgcaaggcgcggggaggtgtccagctacggtgggcgcgaagacgtgccgagggtggcgcccgcagaggcgcccagggcgttgccaccggcaaccacaagccggcacgagacgacgcctgccgcaactgtggcaagcttggccattgggccaaagactgtcgacagccacgacgtggccaggcccacgtcgcacgggtggaggaagagccggctctgctcctggctcacgcaagcatcgagctacctccagcggcaccggccgcagcggctttcctccaccttgatgagccgaaggtactcgtctccctctgcaacggctccagcaacgacaaggctgatgggtggtacctcgacaccggcgccacccatcacatgaccggccgacgggagttcttcaccgagttcgactccagcgtccgaggctccgtcaagttcggggacgcctccggcgtggagatcaagggtgttggctccgtcaccttcaccgccaagtccggtgagcacaggctgctcaccggagtctactacatccctgcgttgaggaattctatcatcagcgtgggacagctggatgagaacggctcacgcgtgttggtcgaggacggactcatgaggatttgggatcgccgtcgtcgccttcttgccaaggtaaccagaggcactaatcgactcgacatcctcaacgtgcaggtcgcacaaccagtttgcctcgccgctcatcgggacgacgaggcgtggcagtggcacgagcgcttcgggcacctccacttcgaggccctgaagcagctcagtgccaaggagatggtgcgaggcatgccgtgtcttgaccacgtggagcagctctgcgacgtctgcgtggtgacgaagcagcggcggctcccctttccccagcagacgagcttccgagccaaggagcggctcgagctcgtgcacggggacttgtgtggcccagtgacaccagccacaccaggaggacgacgttacttcctgctgctcgtcgacgacctctcccgctacatgtgggtgatggtcctcggcagcaagggagaggctgcggacgccatcaggcatgcgcaggctgctgcaaaggcggagtgcggccgcaagctgcgcgtgctgcgcactgacaacggcggcgaattcacagcggctgaattcgcgtcgtactgcgctgatgagggcattcagcgccactacaccacgccgtacagcccgcagcagaacggcgtcgtcgagcggcgcaacccgacggttgtggggatggctcgggccctcctcaagcagagggggatgccggccatcttctgggggcaggcggtggtgacggccgcctacatcctcaaccgctcgcctaccaaggccctcgatggcaggacaccgtacgaggcttggcatgggcgcaagccggcggtctcccacctgcgggtcttcggctgcctcgcgttcgccaaggagcttggccacatcggcaagctcgacgacaggagcaccccaggggtgttcatcggctacgcggagggctcgaaggcctaccgcatcctcgacccggagacacagcgtgtgcgcactgcgcgcgacgttgtgttcgacgaagggcgagggtgggtatgggacaaggcggtggacgatggttcgactccgacgtacgacgacttcaccgtcgagtacgtccacttcgagggagctgggggagtaggcagctcttcttcacctagcgtgtctaccccagcccccgaatctccaccgactccgacaccaacacaccctcgggccacgacttcgactacgacgagctcttcgtcgacacaaccccagccagtgactccacatgctccagcaccaacagccactcctccaagcacgtctactccgacgccagctcgtgttgagcgcagcccggtggagttcgctactccgctctcccacgacggggagcgcatcgacgcgtaccacgacggcgagcagctacggtaccgtacgatggaggatcttctcggcgaccagccggtgccgggactggtgcctcgcgacctagaggcgcagttgcaccttgcgtgcgacgacggtgagcctcggtcttttgtagaggccgagaaacacgcggcatggcgtgccgcgatgcagtcggagatggacgcggttcaggagaaccgcacctgggagcttgctgacctccctcgtggtcaccgcgcgatcacccttaagtgggtgttcaagctgaagagggatgaagccggagccatcatcaagcacaaggctcgcttggtggcacgcggtttcgtgcagcaggaggggatcgactacgacgatgccttcgctcccgtggcacggatggagtctgtgcgactccttgcgctggctgctcgggaaggctggggcgtccatcacatggacgtcaagtcggcgtttttaaactgcgacttgaaggaggaggtctacgtgcaccagccgccgggatttgtgatccccggcaaggaggccaaggtgctacgcctgcacaaggccctttacggcttgcggcaggcaccgagggcgtggaatgccaagttggattccacgctcaaggggatgggcttcgagcaaagcccgcacgaggcggccatctaccggcggggcaatggaggaaatgccttgctagtgggtgtctacgtcgacgacttggtgatcaccggcaccaaggatgcggaggacaactccgggatcacgcttcgacagaccgcctacgccaagcgcgtcgttgagctggctgggctcaccgattgcaacccagctctcactccgatggaggagagactgaagctgagccgcgacagcacggcggaggaggtggatgctacacagtaccgacgtcttgtggggagccttcgctacctcacccacacacggccggacttggccttctccgtcggctacgtcagtcggttcatgcagcgaccgacgacggagcaccagcaggctgtgaagaggatcatccgttacgttgcggggactctcgaccacggtctctactacccgaggtgtcctggcaaggcacacttcgtcgggtacagcgacagcgaccacgccggcgacatcgacaccagcaagagcacgagcgggattctcttcttcctcggcaagtgcctcgttagctggcagtcggtcaagcagcaggtggtggccctgtccagctgcgaggccgagtacatggcggcctccgccgcttcgacccaggcgctctggcttgctcgactgcttagtgatctcctcggcagagacactagaacggtggagctcagggtggatagcaagtccgctctggccctggcaaagaaccccgtttttcactaa

SEQ ID NO: 15697 - DNA, 3762 bp, Oryza sativa
  Clone ID: TFbOSC900377j.C1.o6.fg
atggtgcagtacggcgacgacacctacgacgaggagagagctgtcgagaagctcttccgctgcgtccctgagaagtacaggcagatcgctcgctcgatcgaatctctgctggacctctccacgatgtcgatcgaggaggcgttaggtcgcctcaaggtcgtcgatggtgatgagccacagcctctctcggggcccatcaccatcggcgggaagctccatctcactcgggagcagtgggaggcctctcagggtgacgggaggaagggggagtcatcttcctcgacaggcggccgtaagccgcgcaaggtgcggggaggtgtccagctacggtgggcgcgaagacgtgccgagggtggcgcccgcagaggcgcccagggcgttgccaccggcaaccacaagccggcacgagacgacgcctgccgcaactgtggcaagcttggccattgggccaaagactgtcgacagccacgacgcggccaggcccacgtcgcacgggtggaggaggaagagccggctctgctcctggctcacgcaagcatcgaactacctccagcggcaccggccgcagcggctttcctccaccttgatgagccgaaggtactcgtctccctctgcaacggctccagcaacgacaaggctgatgggtggtacctcgacaccggcgccacccatcacatgaccggccgacgggagttcttcaccgagttcgactccagcgtccgaggctccgtcaagttcggggacgcctccggcgtggagatcaagggtgttggctccgtcaccttcaccgccaagtccggtgagcataggctgctcaccggagtctactacatccccacgttgaggaattctatcatcagcgtgggacagctggatgagaacggctcacgcgtgttggttgaggacggactcatgaggatttgggatcgccgtcgtcaaaaaaatgccaaggtaaccggaggcactaatcgactctacatcctcagcgcgcaggtcgcacaaccagtttgcctcgccgctcgtcgggacgacgaggcgtggcagtggcacgagcgcttcgggcacctccacttcgaggccctgaagcagctcagtgccaaggagatggtgcgaggcatgccgtgccttgaccatgtggagcagctctgcgacgtctgcgtggtgacgaagcagcggcggctcccctttccccagcagacgagcttccgagccaaggaacggctcgagctcatgcacggggacttgtgtggcccagtgacaccggccacaccaggaggacgatgttacttcctgctgctcgttgacgacctctcccgctacatgtgggtgatggtcctcggcagcaagggagaggctgcggacgccatcaggcatgcgcaggctgctgcagaggtggagtgcggccgcaagctgcgcgtgctgcgcaccgacaacggcggcgaattcacagcggctgaattcacgtcgtactgcgctgatgagggcattcagcgccactacaccatgccgtatagcccgcagcagaacggcgtcgtcgagcggcgcaaccagacggttgtggggatggctcgggccctcctcaagcagagggggatgccggccatcttctggggggagacggtggtgacggctgcctacatcctcaaccgctcgcctaccaaggccctcgatggtaggacaccgtacgaggtttggcatgggcgcaagccggcggtctcccacctacgggtcttcagctgcctcgcgttcgccaaggagcttggccacatcggcaagctcgacgacaggagcaccccaagggtgttcatcggctacgcgaagggctcgaaggccttccgcatcctcgacccggagacacagcgtgtgcgcactgcgcgcgatgttgtgttcgacgaagggcgagggtgggtatgggacaaggcggtggacgatggttcgactccgacgtacgacgacttcaccgtcgagtacgtctacttcgagggagctgggggagtaggtagctcttcttcaccgagcgtgtctaccccagcccccgaatctccaccgactccgacaccaacacaccctcgggccacgacttcgactacgacgagctcttcgttgacaccaccccagccagtgactccacatgctccagcaccaacagccactcctccaagcacgtctactccgacgccagctcgtgttgagcgcagcccggtggagttcgctactccgctctcccacgacggggagcgcatcgacgcgtaccacgacggcgagcagctacggtaccgtacgatggaggatcttctcggcgaccagccggtgccggtgcctcgcgacctagaggcgcagttgcaccttgcgtgcaacgacggtgagcctcggtcttttgcagaggccgagaaacacgcggcatggcgtgccgcgatgcagtcggagatggacgcggttcaggagaaccgcacctgggagcttgctgacctccctcgtggtcaccgcgcgatcacccttaagtgggtgttcaagctgaagagggatgaagccggagccatcgtcaagcacaaggctcgcttggtggcacgcggtttcgtgcagcaggaggggatcgactacgacgatgccttcgctcccgtggcacggatggagtccgaaggctggggcgtccatcacatggacgtcaagtcggcgtttctgaacgacaacttgaaggaggaggtctacgtgcaccagccgccgggatttgtgatccccggcaaggagggcaagcggggcaatggaggaaatgccttgctggtgggtgtctacgtcgacgacttggtgatcgccggcaccaaggatgcagaggtcgcggcgttcaaggaggagatgaaggccaccttccagatgagtgatctggggcctctctccttctacctggggatcgaagtgcaccaggacgactccgagatcacgcttcgacagaccgcctacgccaagcgcgtcgttgagctggctgggctcaccgattgcaacccagctctcactccgatggaggagagactgaagctgagccgcgacagcacagcggaggaggtggatgctacacagtaccggtgtcttgtggggagccttcgctacctcacccacacacggccggacttggccttctccgtcggctacgtcagtcggttcatgcagcgaccgacgatggagcaccagcaggctgtgaagaggatcatccgctacattgcggggactctcgaccacggtctctactacccgaggtgtcctggcaaggcacacttcgtcgggtacagcgacaacgaccacgccggcgacatcgacaccaacaagagcacgagcaggattctcttcttcctcggcaagtgcctcgttagctggcagtcggacaagcagcaagtggtggccctgtccagctacgaggccgagtacatagcggcctccgccgcttcgacccaggcgctctggcttgctcgactgcttagtgatctcctcggcagagacactggaacggtggagctcagggtggatagcaagtccgctctggccctggcaaagaaccccgtttttcacgaacggagcaagcacatccgggtgaggtaccacttcatccgaagctacttggaggaagggagcatcaaggcgagctacatcaataccaaggaccagcttgcggacttgctcaccaagcctcttgggaggatcaagttcctcgagctctgctccaggatcgggatggcccaacttgcccacaagacgacgcacaagacttag

SEQ ID NO: 15698 - DNA, 5951 bp, Oryza sativa
  unsure (1)..(5951): unsure at all n locations
  Clone ID: TFbOSC34299j.C1.o1.np
atgcttaaattggtaataatttgattagctcctggtttggaatggtatattcctggtttggagatagaactgtgcagccgatgccgcgctacaagcctgagtacttgtttggtgttgagggttttgtccaggagttgcgtactatgtcctttgtcattggatttgggactgcccctttttatgcctagattcgtcatgatcgtcatgaagagaagtgccgagtcaaagttaccttgaacagtaacagtgaagatatcccatcagtgatgttcgaagctggaggaaggaactacatccatgcatgtcaggaagtggcaaggatcgccataggagagctccgtgatcgctacagtgatcagttggccgacactgagtatcgttaccatcctcgtcaaccgcagggaagtgaccgtggcagttaccttgagactgaaggaattgagaatgatgctaccacaagacatttggttgagatgctatgggctatggatgaaagtcgtgcggagactgtgttagcagctcaagatcgtgaagatcggaatcgtggtaagatttgcgagctagaagacaaggtggatcgtttggagaaggaactagccgcattgaagggagaagcaccgccgcagaaggccaggattcgtcttaccgcaaggaagagagctctatttgtccctcgctatcaattggcgccaaaggtccgtgtggtggagaaagaagttgccccagcagatcctccgatcatcatcataagtagtgatgaagaagaagaatccaagcgcaaccattccaagattgagtgggtagcaactcaagatgatgaagacgagccgaacgagccttcaatcgaccttcgatgctcggaagaacaagacaacaggaatggtcccaatctcaacaaccccaataacaataacaatggagagaatccaacccttgctcaagttcttgctcaacagactcagcttatgaacatgatgatgcagcaacttcagaaccagcagaaccaaggaaataaccatgcaccccctcagaataagttagcagaatttcttcgtgtaaggccgcctgttttctctagtaccactaatcctgttgaagctggcgattggttgcatgccatagagaagaagttggatttgcttcagtgcactgatcaggagaaggtctcatttgcatcacatcagttgcatggccctgcctctgaatggtgggatcacttccgcctgaataggactactgctgaacctatcacttggcttgaattcaccgctgctttccggaagacacatataccatcgggagtggtgtctctcaagaagaaggagttcaggtcgctcactcaaggatctcgctctgttacggagtatttgcacgagttcaatcgtctagctcgttatgctccggaagatgtacgcaatgatgaagagcgtcaagagaagttcttggaaggacttaatgatgagctttcttacccactcatgactggagattatcatgatttccagaagttagtggataaggctattcgtcaggaggacaagtataaccgcatggagcagaagaaacgccggattgctcacttcaaggcacaacaggggagtnnnnnnnnnnnnnnnnnnnntttaggaccccagtccatgccacaaggaggttcttcgtctgttgttcgtccgcagcgttagttcttcaacaacaatgctggcaataacatccgcaatcaagctccacgtcctgttgcagcttcgacacagcaacaacctgccaagagggagcaaggcagcaagcctatggtatgcttcaactgtggagacccaggacattatgctgacaagtgtccgaagccccgacgcgtgaaggttgtccctgcccagagcaactctgctgtaccagcatcaaaggcccgtgtcaatcatgttgcagctgcagaagctcaagatgctccagatgtgattttgggtacgttccttgttaactcagttcctgcaacagtacttttcgattctggtgctacacattcatttctatctatgagttttgcgggaaatcatgggatggaagtagaagatcttagacgtcctttgatggttagtaccccaagcaatcaagcactctctttgcaacgtagcccctatgtcagaatagaaattcaaggggtaccatttctggccaatcttatattgttagaatccaaagaccttgatgtcattctagggatggactggttagctagacataaaggtgtgatagactgtgctaacagaaaagtaactctcaccagcaatgatggtcgagttgtaactgttcatgcattgtcttctgagtttttaaggtcaagactgaaccagataactttggaagagattcctatagtccgggagtatcctgatgtgttcccagatgatttacctggtatgccgcctaaaagggatatagagttcagaatagatttggtacctggaacaactccgatccataagagaccttatagaatggtagccaatgagttggcagaagtcaagaggcaagtagatgatttgcttcagaaaggatacatcagaccgagttcatctccatggggagctccggttattttttgtggaaaagaaagatcatacccagaggatgtgtgtggactatcgtgcattaaatgatgtgactattaagaataagtacccgctacccagaattgatgatttgtttgatcagcttaaaggtgccaccgttttctccaagatagatcttcgatcagggtatcaccagttgaggatcaaagagtacaggttgttcgaatgtactgttatgtcttttggacttaccaatgcccccgctttcttcatgaacttgatgaataaagtgtttatggaatacctagacaagtttgtggtggtctttattgatgacattcttatctactctaagaccaaagaagagcatgaagaacatcttcgccttgcattggaaaagttatgagaacatcaactgtatgctaagtttagcaagtgtgaattttggttgtctgaagtgaagttccttggtcacgtcatctcagcaggaggagttgccgttgatcctagtaatgtggaatccgtaaccaactggaaacaaccaaagacagtttcagagatccgcagtttcctaggcctcggcaggatattatcggaggtttatagagaatttttccaagattgctaagcccatgacacgactgcttcagaaagatgtgaagtacaagtggtcagaagaatgtgagcagagttttcaagagttgaaaagtcgcttgatatcagctcctattttgattttgcctgatccaaatgagggtggccaactgtattgcgatgcatccaaactggggttacgttgtgttctgatgcaagatgggaaggtggttgcctatgcatctcgtcagttacgtccgcatgagaaaaactaccctactcatgatcttgaattggctgcagtagttcatgcgttgaagatttggcgtcattatcttttcggtactcgtacagaggaatttgaaagattgaatttgggaattgtcagtataggtttcgttgcagccttagaagcgaagcccactctaattgatcaagttagagaagctcaaactaatgatcctgatatccaagaaattaagaagaatatgagaagaggaaaagctattggtttcttggaggatgagcacggaactgtatggttgggtgaaagaatctgtgtccccgacaacaaagatttaaaagatgcaattctgaaagaagctcatgatactttatactccatacaccctggtagtactaagatgtactaggatctcaaggaaaggttttggtgggcaagtatgaagcgtgaaatcgcagaatacgtagcagtatgtgatgtttgtcagcgagtcaaggcagaacatcagaaacccgccggtttgttgcagccttcaaagattcctgaatggaaatgggaagaaatcggtatggattttatcactggtttgcccagaacgtcattaggccaggactctatttgggtgatagtcgatagacttactaaagtggcacacttcattccggtaaagacaacttattccggaagtcgcttagcggaattgtatatggcaaggattgtgtgtttgcatggcgttcctaagaagatagtgtctgatcgaggtagtcaatttacttcaaatttttggaagaaacttcaggaagagatgggttctaagctgaactttagtactgcttatcatccgcagacagacggacaaactgaaagggtgaatcagattttggaagacatgttgagagcttgtgctttagatttcggtggaagttgggataagaatctaccttatgcagaattttcatacaacaacagttatcaagctagtcttcagatggctccttacgaagcactgtatggtcggaagtgccgcactccgcttttgtgggatcaaacgggagaacgtcaggttttcgggacggatatcgtaagggaagcagaagaaaaggtaaagatcattcaagaaagattgcgtgtggctcagtcgcgtcataagagttatgccgacaatcgccgcagagatttgagttttgaagaaggagattatgtgtatcttcgtgtcacgcctctacggggagttcatcgttttcataccaaaggaaaattggcactgcgttttgtgggaccttataagattgtcagtagaagaggagaggttgcttatcagttagagttacctcaatctttggcaggagtccataatgtgttccatgtgtcgcaattgaaaaagtgtttaagggtacctaccgaagaagctaatcttgaacagatagaagtccaagaggatctgacctatgtggagaaaccaatccgtatcttggaaacaaatgagagaaaaaccaggaatcgagttatccgtttttgcaaagtccagtggagtaatcactcggaagaagagtcaacttgggaacgagaagatgaattgaatcgtggaatcgagttcgattcggatcggcctctttccttcaagcccgagctttccttcctcgtcgccggcagccatgggccttcgccttcgcctccgagcccctttaaaagcctccccagtgtctcctccacccgccgccaccctcgccttcgcctctcgtcgtcagagtcgctctagcgccccgtgtgccgccgtcgattcagccgtcgccgtcgctcgggaaggacgtcatcgtggtcgccaagtcgtcgccgtcctcgtccgccgcttcgccatcgtcggagaccgccggagcatcgtcgccgtcgtcaagccgaagaactccgccgtttcctcttcgtcgccggcgccgtccgttgcttctccgccgtcgttttggtcgtcgcgccgccgttcgccggcgagcgtgcgccgcccgagccgtccgctccgccgagccgccgccgccgtcggtgacgtcattgctgacgtcatcaaggtcgtccgccattccgtcgtttccggagagtccgttttcgccggagaagagtttgaagagttccaaggccagcaaggcaagtcacacagatcccaaacaacccgtgatgtgtgccagcgtgtcaaggcagagcaccaacgaccggccggacttctccaacctctccaagtaccagaatggaaatgggatgaaattgggatggatttcatcaccggacttccaaaaacccaaggtggatatgattctatatgggtagttgtggatcggttaaccaaggtagctcgatttattcctgtgaagaccacctatggagggaacaaattagccgagctctacttcgctaggatcacggatggacagaccgagtgtctaaatcagatcctagaagatatgcttcgcgcatgtgtcctagatttcgggaagacctgggataagagtctcccctacgccgagttctcctacaataactgtcgcgtcccaaaacgactc

SEQ ID NO: 15699 - DNA, 2400 bp, Oryza sativa
  Clone ID: TFbOSC400724j.C1.o1.gm
atggtgaacactcgcagcaacaggaatggtcccaatctcaacaaccccaataacaataacaatggagagaatccaacccttgctcaagttcttgctcaacagactcagcttatgaacatgatgatgcagcaacttcagaaccagcagaaccaaggaaataaccatgcaccccctcagaataagttagcagaatttcttcgtgtaaggccgcctgttttctctagtaccactaatcctgttgaagctggcgattggttgcatgccatagagaagaagttggatttgcttcagtgcactgatcaggagaaggtctcatttgcatcacatcagttgcatggccctgcctctgaatggtgggatcacttccgcctgaataggactactgctgaacctatcacttggcttgaattcaccgctgctttccggaagacacatataccatcgggagtggtgtctctcaagaagaaggagttcaggtcgctcactcaaggatctcgctctgttacggagtatttgcacgagttcaatcgtctagctcgttatgctccggaagatgtacgcaatgatgaagagcgtcaagagaagttcttggaaggacttaatgatgagctttcttacccactcatgactggagattatcatgatttccagaagttagtggataaggctattcgtcaggaggacaagtataaccgcatggagcagaagaaacgccggattgctcacttcaaggcacaacaggggagtagtcagaagccgcgtcttactttaggaccccagtccatgccacaaggagcttcgacacagcaacaacctgccaagagggagcaaggcagcaagcctatggtatgcttcaactgtggagacccaggacattatgctgacaagtgtccgaagccccgacgcgtgaaggttgtccctgcccagagcaactctgctgtaccagcatcaaaggcccgtgtcaatcatgttgcagctgcagaagctcaagatgctccagatgtgattttggtccgggagtatcctgatgtgttcccagatgatttacctgaaaggatacatcagaccgagttcatctccatggggagctccgtgaagttccttggtcacgtcatctcagcaggaggagttgccgttgatcctagtaatgtggaatccgtaaccaactggaaacaaccaaagacagtttcagagatccgcagtttcctaggcctcgcaggatattatcggaggtttatagagaatttttccaagattgctaagcccatgacacgactgcttcagaaagatgtgaagtacaagtggtcagaagaatccgtcgccgtcgctcgggaaggacgtcatcgtggtcgccaagtcgtcgccgtcctcgtccgccgcttcgccatcgtcggagaccgccggagcatcgtcgccgtcgtcaagccgaagaactccgccgtttcctcttcgtcgccggcgccgtccgttgcttctccgccgtcgttttggtcgtcgcgccgccgttcgccggcgagcgtgcgccgcccgagccgtccgctccgccaagccgccgccgccgtcggtgacgtcattgctgacgtcatcaagatggccggcagcgtcagccgtcgtggtttggacatgactggcttcgtcttggagctacggggcatgtgcgttgtcctggggtatccgcctggagtggactaccaggccaggccgcttccggagcaggagggtgacgatgcagagccccacgctgcgtgggaggttactgcagtgatcctcactggctctcccgagcggacttcgctggcagtcaccgcgggtggagattccttccccgccgcttgccagaacgccgctctcctcgccatcggcactcttcaccagcgctacccggacgagttgcagcactcgccctaccgctaccaccctcgctgcggaggagcccgcgacttcgccaccttccgggatgctagctcggaggatgacgctaccatcgtgcacctggcgcgcatggtggaggcgtacgacgcggctcgtatcgacttccaacagatggtgcgccgtgggatggtcgagaacaacatgaagatcctggagctgcgtcaggagaatctgcagctgaagaaggacctacacgcgttggaggcgcagctgtgtcagcttaaggtcgcccagggtgaggtctgtcgtcccaagcgccgccgcgtctgccgcagccagaagatcaccgcccgcaagagcacctccaggcccgagcttgttcgtcagtccctggcgtggacctgcttcgtggagacccctcgtgccgagcccgcgcccgtggttccccaggagggggaagcctccggcgttggtagcacggaggatgcgctgttgctcaccttccgtcctggcccgtcgcagcgatag

SEQ ID NO: 15700 - DNA, 4785 bp, Oryza sativa
  Clone ID: TFbOSC401061j.C1.o17.fg
atggtgcgctgcggtggattgtgttgtgcgaggggtactgtcacagctcctttccgagctcctggtttggaatggtatattcctggtttggagatagatctgtacagccggatgccgcgctacaagcctgagtacttgtttggagttgagggatttgtccaggagttgcgtacgatgtcctttgtcaaaggatttgggactgcccctttttatgcccagattcctcatgatcgtcatgaagagaagtgccgtgtcaaagtcaccttgaacagtaatagtgaagatatcccctcagtgatgttcgaagctggaggaagaagctacatccatacatgtcaggaggtggcaaggatcgccataggagagcttcacgatcgctacagtgatcagttggccgacactgagtatcgctaccatcctcgccaaccccagggaagtgaccgtggcagctaccttgagactgaaggaattgagatcgatgctaccacaaggcatttggttgagatgctgtgggctatggatgaaacccgtgcggagactgtgttagcagctcaagatcgtgaagaccggaatcgtggtaagatttgcaagttagaggacaaggtggatcgtttggagaaggaactagccgcattgaagggagaagcaccaccgcagaaggccagaattcgtcttaccgcaaggaagagagctctatttgtccctcgctaccaattggcgccaaaggtccgtgtggtggaaaaagaagttaccccagccccagcggatcctccagtcgtcaatatggtgctcactcacagcaacgggaatggccccaacaacaacaacaataacaacaacaatggagagaatcctacacttgcccaagttctggctcaacaggcacagctcatgaacatgatgatgcagcaactccagaaccagcagaaccagggaaataaccatgcacctccccagaacaagttagcagaatttcttcgtgtgaggccgcctactttttctagcaccactaatcctgttgaagctggtgattggctgcatgccatagagaagaagttggatttgcttcaatgcactgatcaggagaaggtctcatttgcatcacaccagctgcatggccctgcctctgaatggtgggatcacttccgcctgaataggactactgctgaacctatcacttggcttgagttcaccgctgctttccggaagacgcatataccatcgggagtggtgtctctcaagaagaaggaattcaggtcgctcacccagaggtctcgctctgttacggagtatctgcacgagttcaatcgtttggctcgttatgctccggaagatgtacgcactgatgaagagcgccaggagaagttcttggaaggacttaatgatgagctttcttactcactcatgactggggattatcatgatttccagaagttagtggataaggctattcgtcaagaggacaagtacaaccgcatggagcagaagaaacgccggattgctcaattcaaggcacaacaggggaatagtcaaaggccgcgtcttactttaggaccccagtccatgccacagggaggttcttcgtctgttgttcgtccgcaacgtcagttcttcaacaacaatgcgggcaacaacatccgcaatcaagctccacgccatgttgcagcttcgacacagcaacaacctgccaagaaggagcaaggcagcaagcccatggtgtgtttcaactgtggagacccaggacattacgctgacaagtgtccgaagccccgacgcgtgaaggttgtccctacccagagcaactctaccgtaccagcatcaaaggcccatgtcaatcatgttgctgctgcagaagctcaaggtgctccagatgtgattttgggtacgtttcttgttaactcagttcctgcaacagtgcttttcgattctggtgctacacattcattcttatctatgagttttgcgggaaatcatgggatggaagtagaagatcttagacgtcctttgatggttagtaccccaagtaatcaagtactctctttgcgacgtagcccctccgtcagaatagaaattcaaggagtaccatttctggccaatcttatcttgttagaatccaaagaccttgatgtcatcctagggatggactggttagccagatataaaggtgtgataaactgtgctaacagaaaagtaactctcactagtaatgatggtcgagttgtaactgttcatgcatcgtcttccgagtctttaaggtcaagactgaaccaaataactttggaagagattcctgtagtccgggagtatcgtgatgtgttcccagacgatttacctggtatgccgcctaaaagggatatagagttcagaatagatttggtaccaggaataactccgatccataagagaccttatagaatggcagccaatgagttggcagaagtcaagaggcaagtggacgatttgcttcagaaaggatacatcagaccgagttcatctccatggggagctccagttatttttgtggaaaagaaagatcatatccagaggatgtgtgtggactatcgtgcactaaatgatgtgactatcaagaataagtacccgctacccagaattgatgatttgtttgatcagcttaaaagtgccactgttttctccaagatagatcttcgatcagggtatcaccagttgagaatcaaagaggaagatatacctaaaacagcttttaccactaggtatgggttgtttgaatgtactgttatgtcttttggacttaccaatgcccccgctttcttcatgaacttgatgaataaggtgtttatggaatacctagacaagtttgtggtggtctttattgatgacattcttatctactcccgaaccaaagaagagcatgaagaacatcttcgtcttgcactagagaagctacgagaacatcaactgtatactaagtttagcaagtgtgaattttggttgtctgaagtgaagttccttggtcacgtcatctcagcaggaggagttgccgttgatcctagtaatgtggaatccgtaaccaactggaaacaaccaaagacagtttcagagatccgcagtttcctaggcctcacaggttattatcggagatttatagagaatttctccaagattgctaagcccatgacacgactgcttcagaaagatgtaaagtacaagtggtcagaagaatgtgagcagagttttcaagagttgaaaagtcgcttaatatcagcacccatcttgattttgcctgatccaaagaagggtttccaagtgtattgcgatgcatctaagcttgggttaggatgtgttctgatgcaagatgggaaggtggttgcctacgcatctcatcagttacgtccgcatgagaagaactaccctactcatgatcttgaattagctgcagtggttcatgcgttgaagatttggcgtcattatcttttcggtactcgtacagaggtgtacaccgatcacaagagtttaaaatatatctttactcagccggatctgaacatgagacaaaggagatggttggaattaattaaggattatgacatgggaattcattatcacccgggaaaggctaatgttgtagcagatgctcttagcaggaaaggctattgcaatgctacggaaggacgacagttaccattggaattatgcaaggaatttgaaagattaaatttgggaattgtcagtagaggttttgttgcagccttagaagcgaagcccactctaattgatcaagttagagaagcccaaattaatgatcctgatattcaagaaatcaagaagaatataagaagaggaaaagctatcggtttcttggaagatgagcaaggaactgtatggttgggtgagagaatctgcgtccccgacaacaaagatttaaaagatgcaattctgaaagaagctcatgatactttatactccattcaccctggtagtaccaagatgtaccaggatctcaaggaaagattttggtgggcaagtatgaagcgtgaaatcgcagaatacgtagcagtatgtgatgtttgtcagcgagtcaaggcagaacatcagaaacccgtaggtttgctgcagcctttgaagattcctgaatggaaatgggaggaaatcggaatggatttcatcactggtctacccagaacgtcatcaggccatgactctatttgggtgatagtcgacagacttaccaaagtggctcatttcatcccagtaaagacaacttattctggaagtcggttggcggaattgtatatggcaaggattgtgtgtttgcatggcgtccctaagaaaatagtgtctgatcgaggtagtcagtttacttcaaatttttggaagaagcttcaggaagagatgggttctaagctgaactttagtactgcttatcatctgcagacagacggacaaaccgaaagggtaaatcagattttggaagacatgttgagagcttgtgctttagacttcggtggaagttgggataagaatctaccttatgcagaattttcgtacaacaacagttatcaagctagtcttcagatggcttcttacgaagcactgtatggtcggaagtgccgcactccgcttttgtgggatcaaacgggagaacgtcaagttttcgggacggatatcctaagggaagcagaagaaaagattccgacgttttcggagagtccgttttcgcaggagaagaatttgaagagttccaaggccagcaaggcaagtcacacagatcccaaacaaccctttaagcatgttgatcccatttaa

SEQ ID NO: 15701 - DNA, 4797 bp, Oryza sativa
  unsure (1)..(4797): unsure at all n locations
  Clone ID: TFbOSC4272j.C1.o3.fg
aaattccatgataagctgtcaaacatgagattggtcgacnggnccgggcggccgcaaggggttcgcgttggccgattcattaatgcagctggcacgacaggtttcccgactggaaagcgggcaatgccgcgctacaagcctgagtacttgtttggagttgagggatttgtccaggagttgcgtacgatgtcctttgtcaaaggatttgggactgcccctttttatgcccagattcctcatgatcgtcatgaagagaagtgccgtgtcaaagtcaccttgaacagtaatagtgaagatatcccctcagtgatgttcgaagctggaggaagaagctacatccatacatgtcaggaggtggcaaggatcgccataggagagcttcacgatcgctacagtgatcagttggccgacactgagtatcgctaccatcctcgccaaccccagggaagtgaccgtggcagctaccttgagactgaaggaattgagatcgatgctaccacaaggcatttggttgagatgctgtgggctatggatgaaacccgtgcggagactgtgttagcagctcaagatcgtgaagaccggaatcgtggtaagatttgcaagttagaggacaaggtggatcgtttggagaaggaactagccgcattgaagggagaagcaccaccgcagaaggccagaattcgtcttaccgcaaggaagagagctctatttgtccctcgctaccaattggcgccaaaggtccgtgtggtggaaaaagaagttaccccagccccagcggatcccccagtcgtcaatatggtgctcactcacagcaacgggaatggccccaacaacaacaacaataacaacaacaatggagagaatcctacacttgcccaagttctggctcaacaggcacagctcatgaacatgatgatgcagcaactccagaaccagcagaaccagggaaataaccatgcacctccccagaacaagttagcagaatttcttcgtgtgaggccgcctactttttctagcaccactaatcctgttgaagctggtgattggctgcatgccatagagaagaagttggatttgcttcaatgcactgatcaggagaaggtctcatttgcatcacaccagctgcatggccctgcctctgaatggtgggatcacttccgcctgaataggactactgctgaacctatcacttggcttgagttcaccgctgctttccggaagacgcatataccatcgggagtggtgtctctcaagaagaaggaattcaggtcgctcacccagaggtctcgctctgttacggagtatctgcacgagttcaatcgtttggctcgttatgctccggaagatgtacgcactgatgaagagcgccaggagaagttcttggaaggacttaatgatgagctttcttactcactcatgactggggattatcatgatttccagaagttagtggataaggctattcgtcaagaggacaagtacaaccgcatggagcagaagaaacgccggattgctcaattcaaggcacaacaggggaatagtcaaaggccgcgtcttactttaggaccccagtccatgccacagggaggttcttcgtctgttgttcgtccgcaacgtcagttcttcaacaacaatgcgggcaacaacatccgcaatcaagctccacgccatgttgcagcttcgacacagcaacaacctgccaagaaggagcaaggcagcaagcccatggtgtgtttcaactgtggagacccaggacattacgctgacaagtgtccgaagccccgacgcgtgaaggttgtccctacccagagcaactctaccgtaccagcatcaaaggcccatgtcaatcatgttgctgctgcagaagctcaaggtgctccagatgtgattttgggtacgtttcttgttaactcagttcctgcaacagtgcttttcgattctggtgctacacattcattcttatctatgagttttgcgggaaatcatgggatggaagtagaagatcttagacgtcctttgatggttagtaccccaagtaatcaagtactctctttgcgacgtagcccctccgtcagaatagaaattcaaggagtaccatttctggccaatcttatcttgttagaatccaaagaccttgatgtcatcctagggatggactggttagccagatataaaggtgtgataaactgtgctaacagaaaagtaactctcactagtaatgatggtcgagttgtaactgttcatgcatcgtcttccgagtctttaaggtcaagactgaaccaaataactttggaagagattcctgtagtccgggagtatcgtgatgtgttcccagacgatttacctggtatgccgcctaaaagggatatagagttcagaatagatttggtaccaggaataactccgatccataagagaccttatagaatggcagccaatgagttggcagaagtcaagaggcaagtggacgatttgcttcagaaaggatacatcagaccgagttcatctccatggggagctccagttatttttgtggaaaagaaagatcatatccagaggatgtgtgtggactatcgtgcactaaatgatgtgactatcaagaataagtacccgctacccagaattgatgatttgtttgatcagcttaaaagtgccactgttttctccaagatagatcttcgatcagggtatcaccagttgagaatcaaagaggaagatatacctaaaacagcttttaccactaggtatgggttgtttgaatgtactgttatgtcttttggacttaccaatgcccccgctttcttcatgaacttgatgaataaggtgtttatggaatacctagacaagtttgtggtggtctttattgatgacattcttatctactcccgaaccaaagaagagcatgaagaacatcttcgtcttgcactagagaagctacgagaacatcaactgtatactaagtttagcaagtgtgaattttggttgtctgaagtgaagttccttggtcacgtcatctcagcaggaggagttgccgttgatcctagtaatgtggaatccgtaaccaactggaaacaaccaaagacagtttcagagatccgcagtttcctaggcctcacaggttattatcggagatttatagagaatttctccaagattgctaagcccatgacacgactgcttcagaaagatgtaaagtacaagtggtcagaagaatgtgagcagagttttcaagagttgaaaagtcgcttaatatcagcacccatcttgattttgcctgatccaaagaagggtttccaagtgtattgcgatgcatctaagcttgggttaggatgtgttctgatgcaagatgggaaggtggttgcctacgcatctcatcagttacgtccgcatgagaagaactaccctactcatgatcttgaattagctgcagtggttcatgcgttgaagatttggcgtcattatcttttcggtactcgtacagaggtgtacaccgatcacaagagtttaaaatatatctttactcagccggatctgaacatgagacaaaggagatggttggaattaattaaggattatgacatgggaattcattatcacccgggaaaggctaatgttgtagcagatgctcttagcaggaaaggctattgcaatgctacggaaggacgacagttaccattggaattatgcaaggaatttgaaagattaaatttgggaattgtcagtagaggttttgttgcagccttagaagcgaagcccactctaattgatcaagttagagaagcccaaattaatgatcctgatattcaagaaatcaagaagaatataagaagaggaaaagctatcggtttcttggaagatgagcaaggaactgtatggttgggtgagagaatctgcgtccccgacaacaaagatttaaaagatgcaattctgaaagaagctcatgatactttatactccattcaccctggtagtaccaagatgtaccaggatctcaaggaaagattttggtgggcaagtatgaagcgtgaaatcgcagaatacgtagcagtatgtgatgtttgtcagcgagtcaaggcagaacatcagaaacccgtaggtttgctgcagcctttgaagattcctgaatggaaatgggaggaaatcggaatggatttcatcactggtctacccagaacgtcatcaggccatgactctatttgggtgatagtcgacagacttaccaaagtggctcatttcatcccagtaaagacaacttattctggaagtcggttggcggaattgtatatggcaaggattgtgtgtttgcatggcgtccctaagaaaatagtgtctgatcgaggtagtcagtttacttcaaatttttggaagaagcttcaggaagagatgggttctaagctgaactttagtactgcttatcatctgcagacagacggacaaaccgaaagggtaaatcagattttggaagacatgttgagagcttgtgctttagacttcggtggaagttgggataagaatctaccttatgcagaattttcgtacaacaacagttatcaagctagtcttcagatggcttcttacgaagcactgtatggtcggaagtgccgcactccgcttttgtgggatcaaacgggagaacgtcaagttttcgggacggatatcctaagggaagcagaagaaaagattccgacgttttcggagagtccgttttcgcaggagaagaatttgaagagttccaaggccagcaaggcaagtcacacagatcccaaacaaccctttaagcatgttgatcccatttaa

SEQ ID NO: 15702 - DNA, 5190 bp, Oryza sativa
  Clone ID: TFbOSC900176j.C1.o15.fg
atgggccttcgccttcgcctccgagcccctttaaaagcctccccagtgtctcctccacccgccgccaccctcgccttcgcctctcgtcgtcagagtcgctctagcgccgtgcaaccttgcgccgctgccgccgccgccgctccagccgtgtgccgccgtcgattcagccgtcgccgtcgctcgggaaggacgtcatcgtggtcgccaagtcgtcgccgtcctcgtccgccgcttcgccatcgtcggagaccgccggagcatcgtcgccgtcgtcaagccgaagaactccgccgtttcctcttcgtcgccggcgccgtccgttgcttctccgccgtcgttttggtcgtcgctcctggtttggaatggtatattcctggtttggagatagaactgtgcagccgggatggttgttcagaatggttgggcctatgcaacaggattcgtcatgatcgtcatgaagagaagtgccgagtcaaagttaccttgaacagtaacagtgaagatatcccatcagtgatgttcgaagctggaggaaggaactacatccatgcatgtcaggaagtggcaaggatcgccataggagagctccgtgatcgctacagtgatcagttggccgacactgagtatcgttaccatcctcgtcaaccgcagggaagtgaccgtggcagttaccttgagactgaaggaattgagaatgatgctaccacaagacatttggttgagatgctatgggctatggatgaaagtcgtgcggagactgtgttagcagctcaagatcgtgaagatcggaatcgtggtaagatttgcgagctagaagacaaggtggatcgtttggagaaggaactagccgcattgaagggagaagcaccgccgcagaaggccaggattcgtcttaccgcaaggaagagagctctatttgtccctcgctatcaattggcgccaaaggtccgtgtggtggagaaagaagttgccccagcagatcctccgatcatcatcataagtagtgatgaagaagaagaatccaagcgcaaccattccaagattgagtgggtagcaactcaagatgatgaagacgagccgaacgagccttcaatcgaccttcgatgctcggaagaacaagattttcccccggtttctcttcttgtgccctatccatgccagatggtgaacactcgcagcaacaggaatggtcccaatctcaacaaccccaataacaataacaatggagagaatccaacccttgctcaagttcttgctcaacagactcagcttatgaacatgatgatgcagcaacttcagaaccagcagaaccaaggaaataaccatgcaccccctcagaataagttagcagaatttcttcgtgtaaggccgcctgttttctctagtaccactaatcctgttgaagctggcgattggttgcatgccatagagaagaagttggatttgcttcagtgcactgatcaggagaaggtctcatttgcatcacatcagttgcatggccctgcctctgaatggtgggatcacttccgcctgaataggactactgctgaacctatcacttggcttgaattcaccgctgctttccggaagacacatataccatcgggagtggtgtctctcaagaagaaggagttcaggtcgctcactcaaggatctcgctctgttacggagtatttgcacgagttcaatcgtctagctcgttatgctccggaagatgtacgcaatgatgaagagcgtcaagagaagttcttggaaggacttaatgatgagctttcttacccactcatgactggagattatcatgatttccagaagttagtggataaggctattcgtcaggaggacaagtataaccgcatggagcagaagaaacgccggattgctcacttcaaggcacaacaggggagtagtcagaagccgcgtcttactttaggaccccagtccatgccacaaggagcttcgacacagcaacaacctgccaagagggagcaaggcagcaagcctatggtatgcttcaactgtggagacccaggacattatgctgacaagtgtccgaagccccgacgcgtgaaggttgtccctgcccagagcaactctgctgtaccagcatcaaaggcccgtgtcaatcatgttgcagctgcagaagctcaagatgctccagatgtgattttgggtacgttccttgttaactcagttcctgcaacagtacttttcgattctggtgctacacattcatttctatctatgagttttgcgggaaatcatgggatggaagtagaagatcttagacgtcctttgatggttagtaccccaagcaatcaagcactctctttgcaacgtagcccctatgtcagaatagaaattcaaggggtaccatttctggccaatcttatattgttagaatccaaagaccttgatgtcattctagggatggactggttagctagacataaaggtgtgatagactgtgctaacagaaaagtaactctcaccagcaatgatggtcgagttgtaactgttcatgcattgtcttctgagtttttaaggtcaagactgaaccagataactttggaagagattcctatagtccgggagtatcctgatgtgttcccagatgatttacctggtatgccgcctaaaagggatatagagttcagaatagatttggtacctggaacaactccgatccataagagaccttatagaatggtagccaatgagttggcagaagtcaagaggcaagtagatgatttgcttcagaaaggatacatcagaccgagttcatctccatggggagctccggttattttttgtggaaaagaaagatcatacccagaggatcttaaaggtgccaccgttttctccaagatagatcttcgatcagggtatcaccagttgaggatcaaagaggaagatatacctaagacagcttttaccactaggtacaggttgttcgaatgtactgttatgtcttttggacttaccaatgcccccgctttcttcatgaacttgatgaataaagtgtttatggaatacctagacaagtttgtggtggtctttattgatgacattcttatctactctaagaccaaagaagagcatgaagaacatcttcgccttgcattggaaaacaagtgtgaattttggttgtctgaagtgaagttccttggtcacgtcatctcagcaggaggagttgccgttgatcctagtaatgtggaatccgtaaccaactggaaacaaccaaagacagtttcagagatccgcagtttcctaggcctcgcaggatattatcggaggtttatagagaatttttccaagattgctaagcccatgacacgactgcttcagaaagatgtgaagtacaagtggtcagaagaatgtgagcagagttttcaagagttgaaaagtcgcttgatatcagctcctattttgattttgcctgatccaaagaagggtttccaagtgtattgcgatgcatccaaacttgggttaggttgtgttctgatgcaagatgggaaggtggttgcctatgcatctcgtcagttacgtccgcatgagaaaaactaccctactcatgatcttgaattggctgcagtagttcatgcgttgaagatttggcgtcattatcttttcggtactcgtacagaggtatatatcgatcacaagagcttaaagtatatctttactcagtcggatctgaacatgagacaaaggagatggttggaattaattaaggattatgacatgggaattcattatcacccgggaaaggctaatgtagtagcagacgctcttagcaggaaaggctattgcaatgctacggaaggacgacagttgccattggaattatgcaaggaatttgaaagattgaatttgggaattgtcagtataggtttcgttgcagccttagaagcgaagcccactctaattgatcaagttagagaagctcaaactaatgatcctgatatccaagaaattaagaagaatatgagaagaggaaaagctattggtttcttggaggatgagcacggaactcgagtcaaggcagaacatcagaaacccgccggtttgttgcagccttcaaagattcctgaatggaaatgggaagaaatcggtatggattttatcactggtttgcccagaacgtcattaggccaggactctatttgggtgatagtcgatagacttactaaagtggcacacttcattccggtaaagacaacttattccggaagtcgcttagcggaattgtatatggcaaggattgtgtgtttgcatggcgttcctaagaagatagtgtctgatcgaggtagtcaatttacttcaaatttttggaagaaacttcaggaagagatgggttctaagctgaactttagtactgcttatcatccgcagacagacggacaaactgaaagggtgaatcagattttggaagacatgttgagagcttgtgctttagatttcggtggaagttgggataagaatctaccttatgcagaattttcatacaacaacagttatcaagctagtcttcagatggctccttacgaagcactgtatggtcggaagtgccgcactccgcttttgtgggatcaaacgggagaacgtcaggttttcgggacggatatcgtaagggaagcagaagaaaaggtaaagatcattcaagaaagattgcgtgtggctcagtcgcgtcataagagttatgccgacaatcgccgcagagatttgagttttgaagaaggagattatgtgtatcttcgtgtcacgcctctacggggagttcatcgttttcataccaaaggaaaattggcactgcgttttgtgggaccttataagattgtcagtagaagaggagaggttgcttatcagttagagttacctcaatctttggcaggagtccataatgtgttccatgtgtcgcaattgaaaaagtgtttaagggtacctaccgaagaagctaatcttgaacagatagaagtccaagaggatctgacctatgtggagaaaccaatccgtatcttggaaacaaatgagagaaaaaccaggaatcgagttatccgtttttgcaaagtccagtggagtaatcactcggaagaagagtcaacttgggaacgagaagatgaattgaagtcagctcatccgtatctgttcgccagttcttccgaatctcgaggacgagattctgtttaa

SEQ ID NO: 15703 - DNA, 2527 bp, Oryza sativa
  Clone ID: TFbOSC400155j.C1.o1.np
ccggttcggtttacgcgggcgccctgatcaggcgatcgtctggtcgaggtgtatatgcatatgaccgatgctaaggagttgtgggatgtactgaatactaaattcggtgctactgatgctagcaatgatctatatatcatggagcagtttcatgactacaagatgactgacaaccgttctgtagtcgaacaggctcatgagatataaaccatggctaaggaactcgaactccttaagtgtgtcttacccgacaaatttgtggccgggtacattattgcgaaactacctccatcatggagaagtttcggtactgcactcaaacacaagagacaggaatactccgttaaggggttgatagcatctcttgatgttgaggagaaagctcgggaaaaagacgtcgtgtctaagggcgatggtgggcagtccaatgccaatgttgtgcacaaggcccagaacaagagcaaggggaaatacaaagctcaacagaccaccaacttcaagaagcagaagaagaaaaacaacaatcctaaccaggatgagaggacttgctttgtgtatgggcaacctggtcatctggctagaaagtgtccacagcgtaaggggatgaaggcaccttcagggcagacttctaagtctgctaatgtgaccattggcaacactggagatggaagcgggtatggtaatttacctactgttttttttgttaatcagtctactaattggtgggttgatactggggctaatgtacatgtttgtgctggcatctcattgttttcttcttatcaggtcgcacggggttccaccatcctaatggggaatggtgttggcacggtagatctgaagtttacttcgggaaagatcgtgcagctgaagaacgtgcagcatgtcccttctatcgacaggaatcttgttagtggctcccgtctgactagagacggatttaagttggtttttgagtctaataaaatagtcgtgtctaaacatggatattttattggtaaaggttatgagtgcggagacctgttccgcttttccgtttctgatttctgcaataaatctgtgaaccatatttgtgctagtgtggatgatgaggctaatgtttgacactcacgtttatgtcatattaattttggcttgatgtcttggctttccagcatgtgtttaattcctaagttttccattgtcaaaggttctaagtgccatagttgtgtgcaatcgaagcaacctcgcaagcctcacaaggttgccgaggagataaacttggcaccagtagaactcctacattcagatctttgtgaaatgaatggggtgttgacgaagggtggaaaacgatatttcatgacattgattgatgatgctactagattttgctatgtgtacttgttgaaaatgaaagacgagactctagactattttaaaatttataaggcagaagttgaaaatcaacttgacagaaagataaaaaggcttaggtctaatcgtggtggagagtttttctcgaacgagtttgacttattttgtgaggaacatggcatcatacatgagaggacgcctccctattctcccgaatctaatgggattgttgaaaggaagaaccgcacactgactgacttggtgaatgccatgttagacaccgcgggactacctaaggcatggtggggggagggattgttgatctcgaatcatatgttaaacagagttcctaacagaaatagagaccaaacaccatatgagatatggattgggagaaaaccatcactttcttatttgcgcacatgggggtgtttggcgaaagtcaatgtaccaataacgaagaagcgcaaacttggacctaagactgtggactgtgtctttctgaaatatgctcatcacaacattgcctatagatttttaatagttaaatccgaggtacctgacatgcatgttggtacaattatggagtctcgtgatgctaccttctttgagagctttttcccaatgaaggatacacatagtggttcgagccaaccctctgaaataattcccagttcaatcacaccaccagaacaaattgaacatacacatgaacatgtctctgaggaggatgttagtgaagctcctcgaaggagtaagagacaaaggacggctaagtcctttggtgatgatttcactgtgtacctcgtggataacactcctaagtcaatttcagaagcatatgcatctcctgatgcagactactggaacgaggctgtccgtagtgaaacgggacttgggaggtgacagagcgaccctatgggtgtaaacctgtggggtgcaagtgggtgttcaagaagaagtttaggcctgacggtactactaaaaagtacaaggctcggcttgttgctaagggctatactcagaaagaaggcgaatatttctttgacacttactcacctgttgctagattgaccacaattcgtgtgctactttccctagcagcctcatattgtcttcttgttcatcaaatggacgttaagacagcttttcttaatggagagctggatgagga

SEQ ID NO: 15704 - DNA, 864 bp, Oryza sativa
  Clone ID: TFbOSC12955j.C1.o6.fg
atggctggttttgccgatgcactgaggccggataaatttaccggtgtgcactttaagagatggcagatctgggtcattctgtggctgacagctatgaaatgcttctgggtgagtactggcaagtctatgggcgttcttaatgctgaccagcagaaaaaattcgatgaggccactactctctttatgggatgcattcttagcgtgcttggcgatcgtcttgtcgaggtgtatatgcatatgaccgacgctaaggaattgtgggatgcactgaatactaaatttggtgctactgatgctagcaatgatctgtatatcatggagcagtttcatgactacaagatggctaacaaccgttctgtagtcgaacaggctcatgagatacaaaccatagctaaggaactcgaactccttaagagaaagcattgggaaaaagatgccgcgtctaagggcgatggtgggcagtccactgccaatgttgtgcacaaggcccagaacaagagcaaggggaaatacaaagctcagcagaccaccaacttcaagaagaataagaacaacaacaatcctaatcaggataagaggacttgctttgtgtgtggtcaacctggccatctggccaggaagtgtccacaacgcaaggggatgaaggcacctgcagggcagacctctaattctgctaatgtgaccattggcaacactagagatggaagcgggtatggtcgcacggggttccatcgtcctactggggaatgggtcacatgcttctgttcatggtgttggtacggtagatatgaagtttacttcgggaaagatcgtgcagctgaagaacgtgcagcatgtcccttctatcgacaggaatcttgttag

SEQ ID NO: 15705 - DNA, 4068 bp, Oryza sativa
  Clone ID: TFbOSC24526j.C1.o2.fg
atggctggttttgccgatacattgaggccggataaattcaccggtgtgcactttaagagatggcagatcagggtgagtactggcaaacctgaaggagttcttactgctgaacagcagaagcaattcgaggaagccactactctctttgtgggatgcattcttagcgttcttggcgatcgtctggtcgaggtgtatatgcatatgaccgacgctaaggagttgtgggatgcactgaatactaaattcggtgctactgatgctagcaatgatctgtatatcatggagcaatttcatgactacaagatggctgacaaccgttctgtagtcgaacaggctcatgagatacaaaccatagctaaggaactcgaactccttaagtgtgtcttacccgacaaatttgtggccgggtgcattattgcgaaatttcctccatcttggagaagtttcaatactgcactcaaacacaagagacaggaatactctgttgaagagttgatagcgtctcttgatgttgaggagaaagctcgggaaaaagatgctgcgtctaagggcgatgatgggcagtccagtgccaatgttgtgcacaaggcccagaacaagagcaaggggaaatacaaagctcagcagaccaccaacttcaagaagcagaagaacaacaacaacaatcctaatcaggatgagaggacttgctttgtgtgtggccaacctggtcatctggctaggaagtgtccacagcgtaaggggatgaaggcacctgcagggcagacttctaagtctgctaatgtgaccattggcaacactggagatggaaacgggtatagtaatttacctactgttttttcagttaatcagtctaataattggtgggttgatactggggccaatgtcgcacggggttccaccgtcctaatggggaatgggtcgcatgcttctgttcatggtgttggcacgttttccattgtcaaaggttctaagtgccatagttgtgtgcaatcaaagcaacctcgcaagcctcacaaggctgctgaggagagaaacttggcacatctagaactcctacattcagatctttgtgaaatgaatggggtgttgacgaagggtggaaaacgatatttcatgacgttgattgatgatgctactagattttgctatgtgtacttgttgaaaacgaaagacgaggctctagactattttaaaatttataaggcagaagttgaaaatcaacttgacagaaacataaaaagacttaggtctgatcgtggtggagagtttttcttatacgagtttgacttattctgtgaggaatatggcattatacatgagaggacgcctccctattctcccgagtctaatgggattgccgaaaggaagaaccgcacactgactgacttggtgaatgccatgttggacaccgcgggactacctaaggcatggtggggggagtcaatttcagaagcatatgcatctcctgatgcagactactggaaggaggctgtccgtagtgaaatggattccattatcgctaacggaacttgggaggtgacagagcgaccctatgggtgtaaacctgtggggtgcaagtgggtgttcaaaaagaagctgaggcctgacagtaccattgaaaagtacaaggctcggcttgttgctaagggctatactcaaaaagaaggtgaagatttctttgacacttactcacctgttgccagattgaccacaatttgtgtgctactttccctagcagcctcacatggtattctcgttcatcaaatggacgttaagacagcttttcttaatggagagctggatgaggagatctatatggatcaacctgatgggtttgtagttgaaggtcaagaagccaaggtgtgcaaattgttgaagtctttgtatagtctgaaacaagctcctaagcaatggcatgagaaatttgatagaacattgacatctgcatgcttcgcagtcaatgagacagataaatgtgtatactatcgccatggtgggggtgagggagttattttgtgcttgtatgttgatgacatactgatatttaggacaaatcttgaggtgataaatgaggttaaatcattcttgtctcaaaaatttgatatgaaggatttgggagtagctgatgttatcctaaacatcaagctaattagaggtaagaatgggattacactcttgcagtcccattatgtggagaagatcttgaatcactttggctacattgatagtaagccttctccaacgccttatgatcctaacttattgcttcgcaagaacaagagaattgctaggaatcaactggaatactcccaaatcattggctcgctgatgtacctggctagtgcaactaggcctgatatctcctttgctgtgagcaagttgagccggtttacctctaatccaggagatgatcactggcgtgcgcttgagcgagtaatgcgctatctgaaaggtactatggaattggggcttcactattctgggtaccctgcggtactggaaggatatagtgattctaactggatctctgatgtggacgagatcaaagccactagtgggtatgtcttcacactaggtggtagtgctgtttcgtggaggtcttgcaaacagaccattttgacaaggtcaaccatggaagcagagttaacggcactggatactgctactgttgaggcagaatggctgcgtgatctattaatggatctgcctattgttgaaaaaccggtgccggctatccttatgaactgtgacaatcaaacggtaattgtcaaagtgaatagttctaaggataatatgaaatcgtctagacatgtgaaaagacgattgaagtctgtcaggaagttgagaaactccggagttataacgttggattacatccaaacaactagaaacctggcagatcctttcacgaagggactatcacgaaatgtgatagacaatgcatcgaaggaaatgggtttgagacccatgactgcggtcactgcgggcgggcgttggcggcacacgcggcagatcattccaaaagaatttgtgcagcgtttaaagggtgacatccctggagaaatccaactggaaacacgtaacagaaacagtcacactgttagagttgacaagacccaagaaaaggttatctttacagagggatgggcacaattcgtcaaaacctttgatctgcagatgggtgactccatgatgttcagattcaatggaaattctcagtttgatgtcattatagttgatcaaattggccgcgagaaagcatgttctgctgttgtggatgattctcagaatcctaatgtgcaagaaaggcgtgtagatgctactgaaacattgaacagttcgcgcgctcattctcagcccatgccaatgcagtcaactactgaaactgtgaaccattcacatgctcgtccttgtcccatgcatactgctgttgattgcatgcccctttctcatgctcatcctcaacccatgccgatgcaattccctaccgaaactgtgaaccattgtcatgctcctactggtcccatggaaatgccacttgaaaacgttgccctttctcatgctcatgctaggcccttgcaaatgcagtcacaaccaacggatagattgacacaggtgcaaagaggatattctttgtcctctaaagatcaggattgcagagtaggtgttatacctgatcccatcatcgggcaaaagaccatactaagtcgagttcaggtgaatgtggtgaagcgcaagatccaaaatattggttctcaaattccaatctttgtatctgtcattggaaagaacaacgcctctggaagaatatcctctctaagtatcgccaaccgatatgttgataattaccttcaagacgagaaaactatccgtctttcgcgtcttggggacaagtggaacatcaggctttctgattcgagtggtaacagaaggatggttggtggatgccgaaagtttgcggaagacaatgatgttggagtgggtgatatctgcctgttcgagctgttgaagaatcataaatgcacaatgaaagttcatatcatcagggcaaaggatatctgttaa

SEQ ID NO: 15706 - DNA, 299 bp, Oryza sativa
  Clone ID: TFbOSC32480j.C1.o1.hg
aagaacaacaacaatcctaaccaggatgagaggacttgctttgtgtgtgggcaacctggtcatctggctaggaagtgtccacaacgcaaggggatgaaggcacctgtagggcagacttctaagtctgctaatgtgaccattggcaacactggagatggaagcgggtatggtcgcacggggttccaccgtcctaatgggctaggtcacatgcttctgttcatgctgaagaacgtgcagcatgtcccttctatcgacaggaatcttgttagtggctcccgtctgactagagacggatttaa

SEQ ID NO: 15707 - DNA, 8214 bp, Oryza sativa
  Clone ID: TFbOSC400022j.C1.o2.fg
atggctggttttgccgatgcactgaggccggataaatttaccggtgtgcactttaagagatggcagatcaagatcactctgtggctgatagctatgaaatgcttctgggtgagtactggcaagcctatgggcgttcttaatgctgatcagcagaaagaattcgatgaggccactactctctttgtgggatgcattcttagcgtgcttggcgatcgtctggtcgaggtgtatatgcatatcaccgatgctaaggagttgtgggatgcactgaatactaaattcggtgctactgatgctagcaatgatctgtatatcatggagcagtttcatgactacaagatggctgacaaccgttctgtagtcgaacatgctcatgagatacaaaccatggctaaggaactcgaactccttaagtttcggtactgcactcaaacacaagagacaggaatacgatccgttgaggggttgatagcgtctcttgatgttgaggagaaagctcgggaaaaagatgtcgcgtctaagggcgatggtgggcagtccactgccaatgttgtgcacaaggcccagaacaagagcaaggggaaatacaaagctcagcagaccaccaacttcaagaagaaaaacaacaacaacaattctaatcaggatgagaggacttgttttgtgtgtggtcaacctggccatctggccaggaagtgtccacaacgcaaggggatgaaggcacctgcagggcagacctctaagtctgctaatgtgaccattggcaacactggagatggaagcgggtatggtaatttacctactgttttttcagttaatcagtctactaattggtgggttaatacaggggccaatgtcgcacggggttccaccgtactaatggggaatgggtcacatgcttctgttcatggtgttggcacggtagatctgaagtttacttcgggaaagatcgtgcagctgaagaacgtgcaacatgtcccttctatcgacaggaatcttgttagtggctcccgtctgactagagacggatttaagttggtttttgagtctaataaagtagtcgtgtctaaacatggatattttatttgtcaaggtcatgagtacagaggcctgttccgcttttccctttctgatttctgcaataagtctgtgaaccatatttttggcagtgtggatgatgaggctaatgcagaagttgaaaatcaacttcacagaaagataaaaagacttaggtctaatcgtggtggagagtttttctcaaacgagtttgacttattctgtgaggaacatggcattatacatgagaggacgcctccctattctcccgagtctaatgggattgctgaaaggaagaaccgtacactgatcgacttggtgaatgccatgttggacaccgcgggattacctaaggcatggtggggggaggcattgttgacctcgaatcatgtgttaaacagagttcctaacagaaataaggacaaaacaccatatgagatatggattgggagaaaaccatcactttcttacttgcgcacatgggggtgcttggcgaaagtcaatgtaccaataacgaagaagtgcaaacttggacctaagactgtggactgtgtctttctgggatatgctcaccacagcattgcctatagatttttaatagttaatctgagttcaatcacaccaccagaacaaactgaacatacacatgaacatgttacagaggaggatgacagtgaagctcctcgaaggagcaaaagacaaaggacggctaagtcttttggtgatgatttcactgtgtaccttgtggatgacactcctaagtcaatttcagaagcatacgcatctcctgatgcagactactggaaggaggctgtccgtagtgaaatggattccattatcgctaacgggacttgggaggtgaaaacctgtggggtgcaagtggcctcacatggtcttctcgtttatcaaatggacgttaagatagcttttcttaatggagagctggatgaggagatctatatggatcaacctgattggtttgtagttgaaggtcaagaaggcaaagtgtgcaaattgttgaagtctttgtatggtctgaaacaagctcctaagcaatggcatgagaaatttgacaaaacattgacatttgcaggctttgcagtcaatgagacaaataaatgtgtatactatcgccatggtgggggtgagggagttattctgtgcttatatgttgatgacatactgatatttgggacaaaccttgaggtgataaatgaggttaaatcattattgtctcaaaattttgatatgaaggatttgggagtagctaatgttatcttaaacattaagctaattagaggtgagaatgggattacactcttgcagtcccattatgtggagaagatcttgaatcgctttggctacattgatagtaagccttctccaacaccttatgatcctaacttgttgcttcgcaagaataagagaattactaggaatcaactagaatactcccaaatcattggctcgctgatatatctggctagtgcaactaggcctgatatctcctttgctggatatagtgattctaactggatctctgatgtggatgagatcaaagccactagtggatatgtctttacactgggtggtggtgctgtttcgtggaggtcttgcaaacagactattttgacgaggtcaaccatggaagcagaactgacggcactggatactgctactgttgaggcagaatggctgcgtgatctattaatggatctgcctattgttgaaaaaccggtgccggctatccttatgaactgtgacaatcaaacggaaaattcggatttgtttagttttggaaacattccgaaaaatccgatggatcggcaatggatgtacgctgaccggcggtccaaagagtttattgacggcgtgcactattttttgagagtggccgaagctaacaggcaaaggggttttatttgttgtccatgcaataagtgtaagaatcagaaggagtattctgcatccaggactatttatttccacttgtttgagtcggggttcatgccaagctataattgttggacatcccacggagagcaaggtgttgaaatggaagaagatgaagtggaagacgacaatattccggactttgctcagtatgatggatttgaagaaaatcaaacgggcgaggaggaaatagctgctgatggtaacgacattgcggatgatcttggtcagatgttgcaggacgccagggaggactgcgaaagtgaaaaggaggcccataaattggacaagatgttggaggaccacagaacttcgttgtacccaggttgcgagcaggggcacaaaaagttggataccactctggagttcttgcaatggaaggcaaaaaatggggttagtgccaaggcatttggcgatttattgaaactcgtcaagaacattcttccggggggaaacaaattgcccgagacaacgtacgaggctaagatagtctgcccgttaggactggaagttcataagattcacgcatgtccgaacgattgtatcctatatcgcggtgaggagtatgagaacctagaagcatgccctgtttgcaaagcactacgatacaagattagacgagacgatccaggagaagttgacgggcagctaacaaagaagagaattcctgctaagtggcgaaacatcgacagaaaatttaaagaatttggaaaggatgcacgaaacatacggtttggtttgagtacggatggcatgaatccttttggagagatgagcagcggccatagcacttggcccgttacgatgtgtatctacaacctctccccctggctatgcatgaagaggaagtacataatgatgccgattattattcaaggccccaagcaacctggtaacgacatcgatgtgtacctaagaccactggtcgaagatcttaaacagttgtggaagaaggaaggtgtccccgtgtgggacgaggacaaacaggaggagtttaacctacgagcgctgctgttcgtaaccatcaacgattggcctgcacttagcaacctatccggacagtccaacaaggggtacaaggcttgcactcactgtatggatgaaacagaaagtacgtatcttaagcactgtaggaaggttgtatacatgggtcatcgtcgattccttgcagcaaaccacccggtacggaagaaaggcaagcacttcaaacataaggccgaccaccgtatgaagcctaaacatcacagcgggaaaacagtgtttgctatgattaaagatcttaaagtagtgttcggaaaggggcctggaagccagcctatagagagcgaagatagtcacgcggcgatgtggaaaaagaactctatattttgggagttaccatatcgggaattcttggacgtacgccacgcaatcgacgtgatgcacctcactaagaacctttgcgtaaaccttcttggcttcctaggtgtatacggaaagtcaaaagatacactggaagcacgtaatgatctgaagcatatggaacaacgcggcgaccttcacccggaaccaaaggagaaaggaagccattacttgagtccagccagctacactctaagcaaggcagagaaggaaagtatatttgaatacttggagagcataaaggtaccgtctggatactccacgaatatcaagcgaataataagcatgaaggagaagaagttcacaaacctaaaatctcatgactgtcacgtgttgatgacacaactgctaccagttgtaataaggggtatccttccagaaaatgtccgggcaacaataacaaagctatgtgcattcatgaacgcaatttcgcagaaggtcatcgatccggatagattagaagcccttcagaatgaagtggtgcaatgtctcgtcagttttgagttgatatttctaccttcatttttcaatataatgacgcatctgctttgtcaccttgtgaaagagatccgtattctcaggcctgtgtacctacacaacatgtttcctttcgagaggtacatgggcgttctgaagaagtatgttcgtaaccgtgctcgtccagaggcaagcatcgccaagggttatggaacagaggaggtcatcgaattttgcgcagaatttatcgaagaccttcgcccaatcggggtacctgaatcacgccatgaagggagactacggggaaagggaactctcggaaggaaaagcaataatgacgctccttacatcgaggagcacttggctctagttcgcgccaggaacatcggtaagtccgatgcatggattacatggcatcacattgatactttccccacgtggctacgacaacatctcatgggtaacgagtcaatcaaccaacaacttgccttcctggcgaggggaccgtctgggtcgatcgcgacattccagggatatgagatcaatgggtacacattctacacgagagcccaagacatgaagagcacgaaccaaaacagcgctgttcgtgtcgatgccatgggacacgatgcaacaactgccacgtattacggtgccatcgaggatatatgggaacttgactatggtcctctcaaggttcctttgttctggtgccaacgggttaggttgactggtggaggcataatgattgatgacagtggtatgacaactgttgaccttaacaaggttggatactcggacgaaccttttgtccttgccaatgatgtaacgcaagtctttttcgtgaaggacatgtctagcaaaggaaagaagggcagagggcctaatgagcctaagcgtcaagtggttctcccaggcaaaagaaaaatcgtcggagctgaggacaagactgacgaggattacgatcagttggataggcaaccccctttcacggtgacgattgaccctagcatcctcctatcaaatgaagacaccccttactcacgcagcgatcacaaggagggaacaataatggctgaccgcgatgaggaacagatattgtacgatacaatcgcggagggaagcagccagtactggaatgaagaagaggggaacgaggatccaaatcagtacttgaacgagaaagggaacgtggagagggatgcggaggggaaccagcaggggcacgtggaaagggatgtggaggggaaccaggaggaggaggctagtggtagtcaaccctccgttggacagaagagggcacgcgggcaacgaggtgcagcgaagaagcttgagggtcggcacatcataatggaagtggaagaagatggacgtcctagtgccccggccgtagccgccaagaactatgtacgtcacagcggttgggttgtgcgggataacgtgcctgtcagtacggtgtactggcgaagaacaaggacacgcggagatcatgagagctttgtcctagattcggagaaagagatgctgtggaccataatgctcgagacattcacccttcccgcgggtacagaggacaaagtgaaaaggtggactctgaagaaaatggcagaacagtttcagagcttcaagggagagctgtacaagaaatatatcctgaaggggcagacaccgaacttcgacacattcccaaagctaagggatcactgggacgagttcgttgcatataagacaggtgaacaagggcaggcgatgatggaaagaaacaaagaaaatgccgccaagaagaagtaccatcactacttggggtcaggaggctatagcgtcacgatgccgaagtgggaggagatggaggctatcttgattgagaggggtatcgaaccggcaaccgccaattggccggaacgatcgaagttctggtactatgctcatggtggaacgctcaacccagctgatggctcactggtcttcggcgatcagatacgagaggctgcgcgacgactaacagatgcagtggaagcctcctctcagggcacgttccgatcggacagatatagggacgagctgacactcgccctgagtcggatgaggagtaagagagataccgaggcgaagattgcagatctagagttccgggtatcgagctacgaactcagcatgcaagaggaggtgacaaggaaggttgatgaacgcatagccgcacatcggtcccatgatccccagccgaccattcctcctgcaatgatgagcccgtcaggaaaccgtagcagctgtgccttaacggggcaggtaggattacagagcatggacgccattcaaacacaggacgaatcgacctgtcccgttgatgacatcactcagcagacaccatctgagctgcatattccttacaagaacttatcaataaaggtggcgtcgggcatggccatcccaacggacccttcaggtacttaccactgcaggccgattccagcaggatactcgaaggtcgaagttgagttggtcgaaggcgcatacgaggacctcgagctggattaccctggaggagacggctccagcaccgactcctcctcaggatcctgcaccgactcctcctcgggctcctacacctactcctccgcaagctcctcttccggcaccttcaaagtcaagggcccccccccagctccaccgcctgcccacacaagggcaacgaagaaggcgaaagttgacgccgccaagaacaaggacccggggtacgattgcacgcaagaggagcttgacgcttacgttgcatcagaagtcaagagacaattcaagcctcgaagtccagaaaagaagattcctatagaccctagtgtcaggaacttcttcaggggtatgtctgcatctgtcaaggaggccatcaagctatcggactatgagcgaacgctgaagaaagcatcttctggaaagtccaaaccagtccctcagcttggagagcgaccaaaccaggagatcgagccgttggtgaccggtaaagaaatgatgatagaacaatttattactgacaccggtctaactacggatcaattgctaggagtcgcaccaatcgaaaagacggaagtgaaatacatgtacgaactcggtaaaccgcttgtcaagcctgagctgctgcagtccctacccacacaaatgtacaagttccatcagctgtacatggagatgagcgccaccggtagagagatgatcggagcgaggatcagggacacggacttcttgcaaggagatgacattctctggatcaatttcaggggaatcaacgaactataccagctggacgccctcgacatctctattatgagttgctaa

SEQ ID NO: 15708 - DNA, 3399 bp, Oryza sativa
  Clone ID: TFbOSC400667j.C1.o2.fg
atggctcgtcttcctctccgctcgcgtgcgactctccttcgtcgacgcccgcaactgcgagtagttcctgcggagcaaccggtctttccggcacctcggtgctgtgattttactatggctggttttgccgatgcactgaggccggataaattcaccggtgtgcactttaagagatggcatatcagggtcactctatggctgacagctatgaaatgcttctggcagaagcaatttgaggaagccactactctctttgtggaatgcattcttagcgttcttggcgatcgtctggtcgaggtgtatatgcatatgaccgacgctaaggagttgtgggatgcactgaatactaaattcggtgctactgatgctagcaatgatctgtatatcatggagcagtttcatgactacaagatggctgacaaccgttctgtagttgaacaggctcatgagatacaaaccatggctaaggaactcgaactccttaagtgtgtcttacccgacaaatttgtggtcgggtgcattattgcgaaactacctccatcttggagaagtttcggcccagaacaagagaaggggaaatacaaagctcaacagaccaccaacttcaagaagcagaagaagaacaacaataatcctaatcaggatgagaggacttgctttgtgtgtggccaacctggtcatctggctaggaagtgtccacagcgcaaggggatgaagacacctacaagccagacttctaagtctgctaatgtgaccattggcaacactggagatcgaagcgggtatggtcgcacggggttccaccgtcctagtggggaatgggtcacatgcttctattcatggtgttggcacggtagatatgaagtttacttcgggaaagatcgtgcagctgaagaacgtgcaacatgtcccttctatcgacaggaatcttgttatgagtgcggaggcctgttccgcttttccctttctgatttctgcaataaatctgtgaaccatatttgtggcagtgtggatgatgaggctaatgtttggcactcacgtttatgtcatatcaattttggcttgatgtctcggctttccagcatgtttttaattcctaagttttccattgtcaaaggttctaagtgccatagttgtgtgcaatcgaagcaacctcgcaagcctcacaaggctgccgaggagagaaacttggcaccactagaactcctacattcagatctttgtgaaatgaatggggtgttgacgaagggtggaaaacgatatttcatgatgttgattgatgatgctactagattttgctatttgtacttgttaaaaacgaaagacgaggcactagactattttaaaatttataaggcagaagttgaaaatcaacttgatagaaagataaaaaggcttaggtttgatcgtggtggagagtttttctcaaacgagtttgacttattctgtgaggaacatggcatcatacatgagaggacgcctccctattctcccgagtctaatgggattgctaaaaggaagaaccgcacactgactgacttggtgaatgccatgttggacaccgcgggactacctaaggcacggtgggcggaggcattgttgacctcgaatcatgtgttaaacagagttcctaacagaaataaggacaaaacaccatatgagatatggattaggagaaaaccatcactttcttatttgcgcacatgggggtgcttggcgaaagtcaatataccaataacgaagaagcgcaaactgggacctaagtctgtggactgtgtctttctaggatatgctcatcacaacattgcctatagatttttaatagttaaatctgaggtacctgacatgcatgttggtacaattatggagtctcgtgatgctaccttctttgagaactttttcccaatgaaggatgcacatagtagtttgagccaaccctctgaagtaattcccagtccaatcacaccaccagaacaaactgaacatacacatgaacatgtcactgaggaggatgtcagtgaagctcctcgaaggagtaagagacaaaggacggctaagtcctctggtgatgatttcactgtgtacctcatggatgacactcctaagtcaattttagaagcatatgcatctcctgatgcagactactggaaggaggctatccgtagtgaaatggattccattattgctaacaggactttggaggtgacagagcgaccctatgggtgtaaacctgtggggtgcaagtgggtgttcaagaagaagcttaggcctgacggtactattgaaaagtacaaggctcggcttgttgctaaaggctatactcagaaagaaggcgaagatttctttgacacttactcacctgttgctagattgaccacaattcgtgtgctactttccctagcagcctcacatggtcttctcgttcatcaaatggacgttaagacagcttttcttaatggagagttggatgaggagatctatatggatcaacctgatgggtttgtagttgaaggtcaagaaggcaaagtgtgcaaattgttgaagtctttgtatggtctgaaacaggctcctaagcaatggcatgagaaatttgacaaaacattgacatctacaggctttgcagtcaatgaggcagataaatgtgtgtactatcgccatggtgggggagagggagttattctgtgcttgtatgttgatgacatactgatatttgggacaaaccttgaggtgataaatgagttctattatgtggagaagatcttgaatcgctttggctacattgatagtaagccttctccaacaccttatgatcctagcttgttgcttcgcaagaacaagagaattgctaggaaccaactggaatactcccaaatcattggctcgctgatgtacctggctagtgcaactaggcctgatatctcctttgttggatatagtgattctaactggatctctaatgtggatgagatcaaagccactagtggatatgtcttcacactgggtggtggtgctatttcgtggaggtcttgcaaacagatcattttgacgaggtcaaccatggaagcagagctgacggcactggatactgctactgttgaggcagaatggctgcgtgatctattaatggatctgcctattgttgaaaaaccggtgccgggtatccttatgaattgtgacaatcaaacggtaattgtcaaagtgaatagttctaaggataatatgaaatcgtctagacatgtgaaaagacgattgaggtctgtcaggaaattgagaaactccggagttataacgttggattacatccaaacagctagaaacctggcagatcccttcacgaagggactatcacgaaatgtgatagacaatgcatcgaaggagatgggtttgagacccatgtga

SEQ ID NO: 15709 - DNA, 3922 bp, Oryza sativa
  Clone ID: TFbOSC400820j.C1.o1.np
atggctggttttgccgatgcactgaggccggataaattcaccggtgcattttaagagatggcagatcagagtcactctgtggctgacagctatgaaatgcttctgggtgagtactggcaaacctgaaggagttcttactgctgaacagcagaagcaattcgaggaagccactactctctttgtgggatgcattcttagcgttcttggcgatcatctggtcgaggtgtatatgcatatgaccgacgctaaggagttgtgggatgcactgaatactaaattcggtgctactgatgctagcaatgatctgtatatcatggagcaatttcatgactacaagatggctgacaaccgttctatagtcgaacaggctcatgatatacaaaccatggctaaggaactcgaactccttaagtgtgtcttacccgacaaatttgtggtcgggtgtattattgcgaaactacctccatcttggagaagtttcggtactgcactcaaacacaagagacaggaatactccgttgaggggttgatagcgtctcttgatgttgaggagaaagctcgggaaaaagatgctgcgtctaagggcgatggtgggcagtccagtgccaatgttgtgcacaaggcccagaacaagagcaaggggaaatacaaagctcagcagaccaccaacttcaagaagcagaagaagaacaacaataatcctaatcaggatgagaggacttgctttgtgtgtggtcaacctggtcatctggctaggaagtgtccacagcgcaaggggatgaaggcacctgcagggcagatttctaagtctgctaatgtgaccattggcaacactggagatggaagcgggtatggtaatttacctactgttttttcagttaatcagtctactaattggtgggttgatactggggccaatgtacatgtttgtgctgatatctcattgttttcttcttattaggtcgcacggggttccaccgtcctaatgaggaatgggtcacatgcttctgttcatggtgttggcatggtagatctgaagtttacttcgggaaagatcgtgcagctgaagaacgtgcagcatgtcccttctatcgacaggaatcttgttagtggctcccgtctgactagagacggatttaagttggtttttgagtctaataaagtagtcgtgtctaaacatggatattttattggtaaaggttatgagtgcggaggcctgttccgcttttccctttctgatttctgcaataagtctgtgaaccatatttgtggcagtgtggatgatgaggctaatgtttggcactcacgtttatgtcatattaattttggcttgatgtttcggctttccagcatgtgtttaattcctaagttttccattgtcaaaggttctaagtgccatagttgtgtgcaatcgaagcaacctcgcaagcctcacaaagctgccgaggaaagaaacttggcaccactagaactcctacattcagatctttgtgaaatgaaatgggtgttgacaaagggtggaaaacgatatttcatgactttgattgatgatgctactagattttgctatgtgtacttgttgaaaacgaaagacgaggctctagactattttaaaatttataaggcagaagttgaaaatcaacttgacagaaagataaaaagacttaggtccgatcgtggtggagagtttttctcaaacgagtttgacttattctgtgaagaacatggcatcatacatgagaggacgcctccctattctcccgagtctaatgggattgctgaaaggaagaaccgcacactgactgacttggtgaatgccatgttggacactgcgggactacctaaggcgtggtgaggggaggcattgttgatctcgaatcatgtgttaaacagagttcctaacagaaataaggacgaaaccccatatgagatatggattgggagaaaaccatcactttcttatttgcgcacatgggggtgcttggcgaaagtcaatgtaccagtaacgaagaagcgcaaactgggacctaagactgtggactgtgtctttctgggatatgctcatcacagcattgcctatagatttttaatagtcaaatctgaggtacctgacatgcatgttggtacaattatggagtctcgtgatgctaccttctttgaaagctttttcccaatgaaggatacacatagtagttcgagccaaccatctgaaataattcccggttcaatcacaccaccagaacaaactgaacatacacatgaacatgtcactaaggaggatgacagtgaagctcctcgaaggagtaagagacaaaggacggctaagtcctttggtgatgatttcactgtgtacctcgtggatgacactcctaagtcaatttcagaagcatatgcatctcctgatgcaaactactggaaggaggctgtccgtagtgaaatggattccattatcgctaacgggacttgggaggtgacagagcgaccctatgggtgtaaacctgtgggatgcaagtgggtgttcaagaagaagcttagacctgacggtactattgaaaagtacaaggctcggcttgtcgctaagggctacactcagaaagaaggcgaagatttctttgacacttactcacctgttgctagattgaccacaattcgtgtgctactttccctagcagcctcacatggtcttctcgttcatcaaatggacgttaagacagcttttcttaatggagagctggatgaggagatctatatggatcagcctgatgggtttgtagttgaaggtcaagaaggcaaggtgtgcaaattgttgaagtctttgtatggtctgaaacaagctcctaagcaatggcatgagaaatttgacaagacattgacatctgcaggcttcgcagtcaatgaggcagataaatgtgtgtactatcgccatggtgggggtgagggagttattttatgcttgtatgttgatgacatactgatatttgggacaaaccttgaggtgataaatgaggttaaatcatttttgtctcaaaattttgatatgaaggatttgggagtagctgatgttatcttaaacattaagctaattagaggtgagaatgtgattacactcttgcagtcccattatgtggagaagatcttgaatcgctttggctacattgatagtaagccttctccaacaccttatgatcctagcttgttgcttcgcaagaacaagagaattgctaggaatcaactggaatactcccaaatcattggctcgttgatgtacctggctagtgcaactaggcctgatatctcctttgctgtgagcaagttgagccgatttacctctaatccgggagatgatcactggcgcgcgcttgagcgagtaatgcgctatctgaaaggtactgtggaattggggcttcactatactgggtatcctgcagtactggagggttatagtgattctaactggatctctgatgtggatgagatcaaagccactagtggatatgtcttcacactgggtggtggtgctgtttcatgaagatcttgcaaacagaccattttgacgaggtcaactatggaagcagagctgacggcactggatactgctactgttgaggcagaatggctgcatgatctattaatggatctgcctattgttgaaaaaccgacatgtgaaaagacgattgaagtttgtcaggaaattaagaaactctggagttataacgttggattacatccaaacagctagaaacctggcagatcccttcacgaagggactatcacgaaatgtgatagacaatgcatcgaaggagatgggtttgagacccatagcattcttgaaagaactcacctttgtgagcttgattgttggtcgcagtctatggagattttgggtgaatcttctaggaagcttactaaagacctaggagta

SEQ ID NO: 15710 - DNA, 1095 bp, Oryza sativa
  Clone ID: TFbOSC400991j.C1.o14.fg
atggctgacaaccgttctgtagtcgaacatgctcatgagatacaaaccatggctaaggaactcgaactccttaagtgtgtcttacccgacaaatttgtggccgagtgcattattgcaaaactacctccatcttggagaggtttcggtactgcactcaaacacaagagacaggaatactccgttgaggggttgatagcatctcttgatgttgaggagaaagctcgggaaaaagatgccgcgtctaagggcgatggtggacagtccactgccaatgttgtgcacaaggcccagaacaagagtaaggggaaatacaaagctcagcagaccaccaacttcaagaagaagaagaacaacaacaatcctaatcaggatgagaggacttgctttgtgtgtggtcaacctggtcatctggccaggaagtgtccacaacgcaaggggatgaaggcacctgcagggcagacctctaagtctgctaatgtgaccattggcaacactggagatggaagcgggtatgggggcaatgtcgcgcggggttccaccgtcctaatggggaatgggtcatatgcttctattcatggtgttggcacggtaggtcgagccgaaccaactaactgctacagccaaaaatgcaagggcaatttcacattacgaaaatgcagcctccgcctagccgccgaggatgagatccatgccctcctcgccatcatggagctcggcgcattccttcactcactcctcctccgcccggctgccagggatgagatcaatgccttcatgtcggcatggagttcggcgcgctcctccgcttactcggcccctgtctggcaaagcccacttctaataccatcgagttcgacgtgggttccgtcgagtttgatcgacgtgctcgcctccatactcacagaactcatcgtcgggccttgctgccccatcatcaccctcgaccaggcggaggtcaccgaggccttcagggcctttgactgcaagggcaacggcttcatctctgccattgagctcacacgctccatagctgacacggcgacaccgacagcctcatcatccttttatttgactgtgggtcccatcacccactga

SEQ ID NO: 15711 - DNA, 3108 bp, Oryza sativa
  Clone ID: TFbOSC401117j.C1.o5.fg
atggctggttttgccgatgcactgaggccggataaatttaccagtgtgcactttaagagatggcagatcagggtcaatctgtggctgacagctatgaaatgcttctgggtaagtactggcaagcctatgggcgttcttaatgctgatcagcagaaagaattcgatgaggccactactctttttgtgggatgcattcttagcgtgcttggcgatcgtctggtcgaggtgtatatgcatatgaccgacgctacggagttgtgggatgcactgaatactaaatttggtgctactgatgctagtaatgatctgtatatcatggagcagtttcatgtctacaagatggctgacaaccgttctgtagtcgaacaggctcataagatacaaaccatggctaaggaactcaaactccttaagtgtgtcttacctgacaaatttgtggccgggtgcattattgcgaaactatctccatcttggagaggtttcggtactgcactcaaacacaagagacaggaatacttcgttgaggggttgatagcgtctcttgatgttgaggagaaagctcgggaaaaagatgtcgcgtctaagggcgatggtgggcagtccagtaccaatgttgtgcacaaggcccaaaacaagagcaaggggaaatacaaagctcagcagaccaccaacttcaataagaagaagaaaaacaacaatcctaatcaggatgagaggacttgctttgtgtgtggtcaacctggccatctggccaggaagtgtccacaacgcaaggggatgaaggcacctgcaggacagacctctaagtctgctaatgtgaccattggcaacactggagatggaagcgggtatggtcgcacggggttccaccgtcctaatggggaatgggtcacatgcttctgttcatggtgttggcacggtagatctgaagtttacttcgggaaagatcgtgcagctgaagaacgtgtagcatactactggaaggaggatgtccgtagtgaaatggattccattatcgctaacgggacttgggaggtgacagagcgaccctatgggtgtaaacctgtggggtgcaagtgggtgttcaagaagaagctcaggcctgacggtactattgaaaagtacaaggctcggcttgttgctaagggctatactcagaaagaaggcgaagatttctttgacacttactcacctgttgctagattgaccacaattcgtgtgctactttccctagcagcctcacatggtcttctcattcatcaaatggacgttaagacaacttttcttaatgaagagctggatgaggagatctatatggatcaacctgatgggtttgtagttgaaggtcaagaagacaaagtgtgtaaattgttgaagtctttgtatggtctgaaacaagctcctaagcaatggcatgagaaatttgacaaaacattgacatctgcaggctttgcagtcaatgaggcagataaatatgtgtactatcgccatggtgggggtgagggagttattctgtgcttgtatgttgatgacatactgatatttaggacaaaccttgaggtgataaatgaggttaaatcattcttgtctcaaaattttgatatgaaggatttgggagtagctgatgttatcttaaacattaagctaattagaggtgagaatgggattacactcttgcagtcccattatgtggagaagatcttgaatcgctttgactacattgatagtactatggaattggggcttcactattctgggtatcctgcggtactggaggaatatagtggttctaactggatctctgatgtggatgagatcaaagccactagtggatatgtcttcacactgggtggtggtgctgtttcgtggaggtcttgcaaacagactattttgatgaggtcaatcatggaagcagaactgacggcactggatactgctactgttgaggcagaatggctgcgtgatctattaatggatctgcctattgttgaaaaaccggtgccggctatccttatgaactgtgacaatcaaacgataattgtcaaaatgaatagttctaaggataatatgaaatcgtctagacatgtgaaaagacgattgaagtttgtcaggaaattgagaaactccggagttataacgttggattatatccaaacagctagaaacctggcaaatcccttcacgaagggactatcacgaaatgtgatagataatgcatcgaaggagatgggtttgagacccatatctaatgatacgttaatgctattatatatctgtaatgtcatgatttatttatggaatatattaaatcattatatgcctatattctcaacattcaaaagacacgagatagaagcttatgaaaagttcaaaagaagtgcagtggggactgcattgtacattcatccctgcctgtcagaaatttcagagggtgatgctgcagatagggcgagcaacttgacagatgccactgttgacagcttgattgagtctatcatcattaaagatggggtgaaagccaagtttttctttaacattatgtctcttgctaactctgcaggagagaagttgcttgccttcagtcaatatatacttcccatgaaatttttggaaaggttgttggttaagaggctgggctggcatgtagggaaggagattttcatgatatctggtgatactagtgcagacgacagagaagtggcgatggatcagtttaacaactctgccgatgcaaaagttttgtttggttccatcaaggcctgtggagagggaatctcccttgttggtgcatctcgagtcatcattctagatgttcatttgaacccatctgtcacccgtcaagcaatcggacgtgcattcaggcccggacagcagaagaaagtgtttgtgtacaggcttgttgctgctgattctccagaggtgaagttccatgaaactgcattcaagaaagaagttatcccaaagctatggtttgaatggagtgagctctgcactactgaagacttcaaactgaatcaagttgatattgatgactctgaagatgaactattggaggctaatgctattcgccaggatatcaaggctttgtatagaaggatgttacagtag

SEQ ID NO: 15712 - DNA, 3925 bp, Oryza sativa
  Clone ID: TFbOSC401276j.C1.o11.np
atggctggttttgccgatgcactgaggccgaataaattcaccggtgtgcactttaagagatggcagatcagggtcactctgtggctgatggttatgaaatgcttctgggtgagtactggcaaacctgaaggaattcttactgctgatcaccagaagcaatttgaggaagccactactctctttgtgggatgcattcttagcgttcttggcgatcgtctggtcaaggtgtatatgcatatgaccgacgctaaggagttgtgggatgcactgaatactaaattcggtgctactgatgctagcaatgatctgtatatcatggagcagtttcatgactacaagatggctgacaaccgttctgtagtcgaacaggctcatgagatacaaaccatggctaaggaactcgaactccttaagtgtgtcttacccgacaaatttgtggccgggtgcattattgcgaaactacctccatcatggagaagtttcggtactgcactcaaacacaagagacaggaatactccgttgaggggttgatagcgtctcttgatgttgaggagaaagctcgggaaaaagacgccgcgtctaagggcgatggtgggcagtccagtgccaatgttgtgcacaaggtccagaacaagagcaaggggaaatacaaagctcaacagaccaccaacttcaagaagcagaagaagaacaacaacaatcctaaccaggatgagaggacttgctttgtgtgtgggcaacctggtcatctggctaggaagtgtccacaacgcaaggggatgaaggcacctgcagggcagacttctaagtctgctaatgtgaccattggcaacactggagatggaagcgggtatggtaatttacctactattttttcagttaatcagtctactaattggtgggttgatactggggccaatgtacatgtttgtgctgacatctcattgttttcttcttatcaggtcgcacggggttccaccgtcctaatggggaatggatcacatgcttctgttcatgtagttggcacggtagatctgaagtttacttcgggaaagatcgtgcagctgaagaacgtgcaacatgtcccttctatcgacaggaatcttgttagtggctcccgtctgactagagacggatttaagttagtttttgagtctaataaagtagtcgtgtctaaacatggatattttattggtaaaggttatgagtgcggaggcctgttccgcttttccctttctgatttctgcaataagtctgtgaactatatttgtgccagtgtggatgatgaggctaatgtttggcactcacgtttatgtcatattaattttggcttgatgtctcggctttccagcatgtgtttaattcctatgttttccattgtcaaaggttctaagtgccatagttgtgtgcaatcaaagcaatctctcaagcctcacaaggctgccgaggagagaaacttggcaccactagaactcctacattcagatctttgtgaaatgaatggggtgttgacgaagggtggaaaacgatattttatgacgttgattgatgatgctactagattttgctatgtgtacttgttgaaaacgaaagacgaggctctagactattttaaaatttataaggcagaagttgaaaatcaacttgacagaaaaataaaaaggcttaggtctgatcatggtggagagtttttctcgaacgagtttgacttattctgtgaggaacatggcatcatacatgagaggacgcctccctattctcccgagtctaatgggattgctgaaaggaagaaccgcacactgactgacttggtgaatgccatgttggacaccgcgggactacctaacgcatggtggggagaggcattgttgacctcgaatcatgtgttaaacagagttcctaacagaaataaggacaaaataccatatgagatatggattgggagaaaaccatcactttcttatttgcgcacatgggggtgcttggcgaaagtcaatgtaccaataacgaaaaagcgcaaacttggacctaagactgtggactgtgtctttctgggatatgatcatcacagcattgcctatagatttttaatagttaaatccgaggtacctgacatgcatgttggtacaattatggagtctcgtgatgctaccttctttgagagctttttcccaatgaaggatacacatagtggttcgagccaaccttctgaaataattcccagttcaatcacaccaccagaacaaactgaacatacacatgaacatgtctctgaggaggatgtcagtgaagctcctcgaagaagtaagagacaaatgacggctaagtcctttggtggtgatttcactgtgtacctcatggatgacactcctaagtcaatttcagaagcatatgcatctcctgatgcagactactggaaggaggctgtccgtagtgaaatggattccattatcgctaatgggacttgggaggtgacagagcgaccctatgggtgtaaacccctggggtgaaagtgggtgttcaagaagaagcttaggcctgagggtactattgaaaagtacaaggctcggcttgttgctaagggctatactcagaaagaaggcgaagatttctttgacacttactcacctgttgctcgattgatcatattttgtgtgctactttccctagcagcctcacatggtcttctcgttcatcaaatggacgttaagacagcttttcttaatggagagctggatgaggagatctatatggatcaacctgatgggtttgtagttgaaggtcaagaaggcaaagtgtgcaaattgttgaagtctttgtatggtctgaaacaagctcctaagcaatggcatgagaaatttgacaaaacattgacatctgccggctttgcagtcaatgaggcagataaatgtgtgtactatcgccatggtgggggtgagggagttattctgtgcttgtatgttgatgacatactgatatttgggacaaacccttgaggtgataaatgaggttaaatcattcttgtctcaaaattttgatatgaaggatttgggtgtagctgatgttatcttaaacattaagctaattagaggtgagaatgagattacactcttgcagtcccattatgtggagaagatcttgaatcgctttggctacagtgatagtaagccttctctaacaccttatgatcctagcttgttgcttcgcaagaacaaaagaattgctaggaatcaactggaatactcccaaatcattggctcgctgatgtacctggctagtgcaactaggtctgatatctcctttgctgtgagcaagttgagccggtttacctctaatccgggagatgatcactggcgtgcgcttgagcgagtaatgcgctatctgaaaggtaatatggaattggggcttcactatactgggtatcctgcggtactggagggttatagtgattctaactggatctctgatgtggatgagatcaaagccactagtggatatgtcttcatactgggtggtggtgctgtttcgtggaggtcttgcaaacagaccattttgacgaggtcaactatggaagcagaactgacggcactggatactgctactgttgaggcagaatggctgcgtgatctattaatggatctgcctattgttgaaaaaccgacatgtgaaaagacgattgaagtctgtcaggaaattgagaaactctggagttataacgttggattacatccaaacagctagaaacctggcagatcccttcacgaagggactatcacgaaatgtgatagataatgcatcgaaggagatgggtttgagacccatagcattcttgaaagaactcacctttgtaagcttgactgttggttgcagtctatggagattttgggtgaatcttctaggaagcttactaaagacctaggagta

SEQ ID NO: 15713 - DNA, 3120 bp, Oryza sativa
  Clone ID: TFbOSC401339j.C1.o49.fg
atggggagagcaggtctccggaacctctgccttcgacgtcctgcaccgggagaaggcgctgtgatttttactatggctggttttaccgatgcactgaggctggataaattcaccggtgtgcacttcaagagatggcagatcagggtcactctgtggttgatagctatgaaatgtttctgggtgagtactggcaagcctatgggcgttcttaatgctgatcagcagaaagaattctatgaggccactactctctttgtgggatgcattcttagcattcttggcgatcgtctggtcgaggtgtatatgcatatgaccgacgctaaggagttgtgggatgcattgaatactaaattcggtgctactgatgctagcaatgatctgtatatcatggagcagtttcatgactacaagatggctaacaaccattctgtagtcgaacaggctcatgagatacaaaccatggctaaggaactcgaactccttaagtgtgtcttacccgacaaatttgtgcccgggtgcattattgcgaaactacctccatcttggagaggtttcggtactgcactcaaacacaagagacgggaatactccattgaggggttgatagtgtctcttgatgttgaggagaaagcttgggaaaaatatgccgcgtctaagggcgatgctcaacagacaaccaacttcaagaagcagaagaagaacaacaacaatcctaaccaggatgagaggacttgctttgtgtgtgggcaacctggtcatctggctaggaagtgtccacagcgcaaggggatgaaggcacctgcagggcagacttctaagtctgctaatgtgaccattggcaacactggagatggaagcgggtatggtaatttacctactgttttttcagttaatcagtctactaattggtgggttgatactggggccaatgtcgcacggggttccaccatcctaatggggaatgggtcacatgcttctgttcatggtgttggcacggtagatctgaagtttacttcaggaaagatcgtgcagctgaagaacgtgcagcatgtcctttctatcgacaggaatcttgttagtggctcccgtctgactagagacagatttaagttggtttttgagtctaataaagtagtcgtgtctaaacatggatattttattggtaaaggttatgagtgcggaggcctgttccgctttttcctttctgatttctgcaataagtctgtgaaccatatttgtggcagtgtggatgatgaggctaatgtttggcactcacgtttatgtcatattaattttggcttgatgtctcggctttccagcatagttcctaacagaaataaggacaaaacaccatatgagatatggattgggagaaaaccatcactttcttatttgcgcacatgggggtgcttggcaaaagtcaatgtaccaataacgaagaagcgcaaacttggacctaagactgtggactgtgtctttctgggatatgctcatcacagcattgcctatagatttttaatagttaaatccgaggtacctgacatgcatgttggtacaattatggagtctcgtgatgctaccttctttgagagctttttcccaatgaaggatacacatagtggttcgagccaaccctctgaaataattcccagttcaatcacaccaccagaacaaactgaacatacacatgaacatgtctctgaggaggatgtcagtgaagctcctcgaaggagtaaaagacaaaggacggctaagtcttttggtgatgatttcactgtgtacctcgtggatgacactcctaagtcaatttcagaagcatacgcatctcctgatgcagactactggaaggaggatgttcgtagtgaaatggattccattatcactaacgggacttgggaggtgacagagcgaccctatgggtgtaaacctgtggggtgcaagtgggtgttcaagaagaagctcaggcctgacggtactattgaaaagtgcaaggctcggcttgttgctaagggctatactcagaaagaaggcgaagatttctttgacacttactcacctgttgctagattgaccacaattcgtgtgctactttccctagcagcctcacatggtcttctcgttcatcaaatggacgttaagacagcttttcttaatggagagctggatgaggagatctatatggatcaacctaatgggacaaaccttgaggtgataaatgaggttaaatcattcttgtctcaaaattttgatatgaaggatttgggaatagctgatgttatcttaaacattaagctaattagaggtgagaatgagattacactattgcagtcccattatgtggagaagatcttgaatcgctttggctacattgatagtaagccttctccaacaccttatgatcctagcttgttgcttcgcaagaataaaagaattgctaggaatcaactggaatactcccaaatcattggctcgctgatgtacctggctagtgcaactaggcctgatatctcctttgctgtgagcaagttgagccggtttacctctaatccgggagatgatcactggcgtgcgcttgagcgagtaatgcactatctgaaaggtactatggaattagggcttcactatactgggtatcctgcggtacttaagggttatagtgattctaactggatctctgatgtggatgagattaaagccactagtagatatgtcttcacactgggtggtggtgctgtttcgtggaggtcttgcaaacagaccattttgacgaggtcaaccatggaagcagaactgacggcactggatactgctactgttgaggcaggatggctgtgtgatctattaatggatctgcctattgttgaaaaaccagtgccggctatccttatgaactatgacaatcaaacggtaattgtcaaagtgaatagttctaaggataatatgaaatcgtctagacatgtgaaaagacgattgaagtctatcaggaaattgagaaactccggagttataacgttggattacatccaaacagctagaaacctggcagatcccttcacaaagggactatcacgaaatgtgatagacaatgcatcgaaggagatgggtttgagacccatgtga

SEQ ID NO: 15714 - DNA, 2046 bp, Oryza sativa
  Clone ID: TFbOSC401388j.C1.o3.gm
atggggctgccggtggatgggggaggggaaacgtgcttgagctccaccatgttgtcacaggcatcgctgcggctaggcttcaggaagggaaaaagagggcagcggtcttcggattcggtgcgggctaggcgaggtggcacgcgcgaaggagctgtagggagggtgcgaggtggtcgcagggaggaagaggaggcggcggcggtagagaagcaacatgaggtgcaacgctccgcaggaggagtcggtggacgcctcggcatcacgggagcgaatggtccttttgagtgcgccagagaggctggcaccatcctccaacatgacagagtcagccaccctggcgccgtcaccatgccaccgcggcagaaaggcaaacgtggatgggctaacgtggcaatgggggacgtcgtcccacataccacggcgccagccatgcttctcctctccctactcattttcgcccaatcccagcacgcagagaagccctcagtgacgacgccagggtggctggcgctgccattccagtgccaatgttgtgcacaaggcccagaacaagagcaaggaaaatacaaagctcaacagaccaccaacttcaagaggcagaagaagaacaacaataatcctaaccaggatgagaggacttgctttgtgtgtgggcaacctggtcatctggctaggaagtgtccacagtgcaaggggatgaaggcacctgcagggcagacttctcagtctgctaatgtgaccattggcaacactggagatggaagcgggtatgataatttacctactgtcgcacggggttccaccgtcctaatggggaatgggtcacatgcttctgttcatggtgttggcacggtagatctgaagtttacttcgggaaagatcgtgcagctgaagaacgtacagcatgtctcttctatcgacaggaatcttgttagtggctcccgtctgactagagacggatttaagttggttttcgagtctaataaagtagtcgtgtcaaaacatggatattttattggtaaaggttatgagtgcggaggcctgttccgttttcccctttctgatttctgcaataagtctgtgaaccatatttgtgacagtgtggatgatgaggctaatgtttggcactcacactactggaaggaggctgtccgtagtgaaatggattccattatcgctaacgggacttgggaggtgacagagcgaccctatgggtgtaaacctgtggggtgcaagtgggtgctcaagaagaagcttaggcctgacggtactattgaaaagtacaaggctcgacttgttgctaagggctatactcagaaagaaggcgaagatttctttgacacttactcacctgttgctagattgaccacaattcgtgtgctactttccctagaagactcacatggtcttctcgttcatcaaatggacgttaagacagcttttcttaatggagagctggatgaggagatctatatggatcaacctgatgggtttatagttgaagtcaatgaggcagataaatgtgtgtactatcgccatggtgggggtgagggagttattctgtgcttgtatgtggacgacatattgatatttgggacaaatattgaagtgataaatgagtcccattatgtggagaagatcttgaatcactttggctacattgataccgggcagaggcagcgcgcatggcgcggctgggcacagccgagacggcgcgagaccggcacggcagcggccgggaaaggtgcgcgaggctccggcgaccctccaatttcggcggcggcgcaaggcggagcaggggcgagcgttgcggcatggcaacgccatggccaagctcaggctgcaagtggcgggcttgagagcgacatgatggcgcacggcggcgcggggctcaaggcggcgatggcgatacgcggcgacgcgatggtgcggcagctacggcgacgcatgcgcgacgcgatggcggcagcggcgcacggggcgcgaggcactgatgtgacggcgacggtgacacgagtggcgcggggctcggcgcggcgcgggtga

SEQ ID NO: 15715 - DNA, 3771 bp, Oryza sativa
  Clone ID: TFbOSC401417j.C1.o24.fg
atggctggttttgccgatacattgaggccggataaattcaccggtgtgcactttaagagatggcagatcagggtgagtactggcaaacctgaaggagttcttactgctgaacagcagaagcaattcgaggaagccactactctctttgtgggatgcattcttagcgttcttggcgatcgtctggtcgaggtgtatatgcatatgaccgacgctaaggagttgtgggatgcactgaatactaaattcggtgctactgatgctagcaatgatctgtatatcatggagcaatttcatgactacaagatggctgacaaccgttctgtagtcgaacaggctcatgagatacaaaccatagctaaggaactcgaactccttaagtgtgtcttacccgacaaatttgtggccgggtgcattattgcgaaacttcctccatcttggagaagtttcaatactgcactcaaacacaagagacaggaatactctgttgaagagttgatagcgtctcttgatgttgaggagaaagctcgggaaaaagatgctgcgtctaagggcgatgatgggcagtccagtgccaatgttgtgcacaaggcccagaacaagagcaaggggaaatacaaagctcagcagaccaccaacttcaagaagcagaagaacaacaacaacaatcctaatcaggatgagaggacttgctttgtgtgtggccaacctggtcatctggctaggaagtgtccacagcgtaaggggatgaaggcacctgcagggcagacttctaagtctgctaatgtgaccattggcaacactggagatggaaacgggaatcttgttagtggctcccgtctgactagagacggatttaagttagtttttgagtctaataaagtagtcgtgtctaaacatggatattttattggtaaaggttatgagtgcggaggcctgttccgcttttccctttctgatttctgcaataagtctgtgaaccatatttgtggcagtgtggatgatgaggctaatgtctggcactcacgtttatgtcatattaattttggcttgatgtctcggctttccagcatgtgtttaattcctaagttttccattgtcaaaggttctaagtgccatagttgtgtgcaatcaaagcaacctcgcaagcctcacaaggctgctgaggagagaaacttggcacatctagaactcctacattcagatctttgtgaaatgaatggggtgttgacgaagggtggaaaacgatatttcatgacgttgattgatgatgctactagattttgctatgtgtacttgttgaaaacgaaagacgaggctctagactattttaaaatttataaggcagaagttgaaaatcaacttgacagaaacataaaaagacttaggtctgatcgtggtggagagtttttcttatacgagtttgacttattctgtgaggaatatggcattatacatgagaggacgcctccctattctcccgagtctaatgggattgccgaaaggaagaaccgcacactgactgacttggtgaatgccatgttggacaccgcgggactacctaaggcatggtggggggagtctcgtgatgttaccttctttgagagctttttcccaatgaaggatacacatagtaattctagtcaaccttctgaaataattcccagttcattcacaccaccagaacaaattgaatatacacatgaacatgtcactgaggaggatgatagtgaagctcctcgaaggagtaaaagacaaaggacgactaagtcttttggtgatgatttcactgtgtacctcgtggacgacactcctaagtcaatttcagaagcatatgcatctcctgatgcagactactggaaggaggctgtccgtagtgaaatggattccattatcgctaacggaacttgggaggtgacagagcgaccctatgggtgtaaacctgtggggtgcaagtgggtgttcaaaaagaagctgaggcctgacagtaccattgaaaagtacaaggctcggcttgttgctaagggctatactcaaaaagaaggtgaagatttctttgacacttactcacctgttgccagattgaccacaatttgtgtgctactttccctagcagcctcacatggtattctcgttcatcaaatggacgttaagacagcttttcttaatggagagctggatgaggagatctatatggatcaacctgatgggtttgtagttgaaggtcaagaagccaaggtgtgcaaattgttgaagtctttgtatagtctgaaacaagctcctaagcaatggcatgagaaatttgatagaacattgacatctgcatgcttcgcagtcaatgagacagataaatgtgtatactatcgccatggtgggggtgagggagttattttgtgcttgtatgttgatgacatactgatatttaggacaaatcttgaggtgataaatgaggttaaatcattcttgtctcaaaaatttgatatgaaggatttgggagtagctgatgttatcctaaacatcaagctaattagaggtaagaatgggattacactcttgcagtcccattatgtggagaagatcttgaatcactttggctacattgatagtaagccttctccaacgccttatgatcctaacttattgcttcgcaagaacaagagaattgctaggaatcaactggaatactcccaaatcattggctcgctgatgtacctggctagtgcaactaggcctgatatctcctttgctgtgagcaagttgagccggtttacctctaatccaggagatgatcactggcgtgcgcttgagcgagtaatgcgctatctgaaaggtactatggaattggggcttcactattctgggtaccctgcggtactggaaggatatagtgattctaactggatctctgatgtggacgagatcaaagccactagtgggtatgtcttcacactaggtggtagtgctgtttcgtggaggtcttgcaaacagaccattttgacaaggtcaaccatggaagcagagttaacggcactggatactgctactgttgaggcagaatggctgcgtgatctattaatggatctgcctattgttgaaaaaccggtgccggctatccttatgaactgtgacaatcaaacggtaattgtcaaagtgaatagttctaaggataatatgaaatcgtctagacatgtgaaaagacgattgaagtctgtcaggaagttgagaaactccggagttataacgttggattacatccaaacaactagaaacctggcagatcctttcacgaagggactatcacgaaatgtgatagacaatgcatcgaaggaaatgggtttgagacccatcgaagatgctgtcctacagagcattcttgaaagaactcacctttgtgagcttgactgttggtcgcagtctatgaagattttgggtgaatcttctaggaagcttactaaagacctaggagactgcggtcactgcgggcgggcgttggcggcacacgcggcaggtctgcagcagtgcgctagtgcggcactgcggctgcggcggcagccggccaaggcggcggactgctgcaggctacggcgccagtgcggcagtgggctgctgcggcgaccaagccggccaaggcgcgcacgcgtggcccggcggcgctcgctctcacgatctgatcagatcgctgctcgcgttggcgtcgcgactcgcgagggcgaggaggggagagacagagagtcctgcgatggcgcgacgcttcggtttctgaattccaattga

SEQ ID NO: 15716 - DNA, 2283 bp, Oryza sativa
  Clone ID: TFbOSC401478j.C1.o139.gm
atgacagaaaatagattccttgacaagacgtcgccaaaagacgaatcagagggtgcccaaatcgccacgccgatcagtggcgacgagacgccgagttcttccacaatgactagactcgtccaatacaactcctgccgctcggcgacgtcaacggtggcggcgaacctccccagaagcatgaggcggagatgggggacaagcacgacggccgcctcagtgccggtccaatgtcctcggtgccgcccaccgcccgccgcccgcctcactctccccaccgtgcgtgccgcacgcggcacccaccgcgccctcctagaggaggactcgtcgcccatcaccattgatgtggagctcgagaggggtctccagaacctctgccttcgacgccctgcactgggagaaggcggcaataagatttttgggaagcgcttcgcgcgactgctccctattcgtccgcgacggctcgccttcctctccgctcgcgtgctgtgcgccttcgtcgacgcccgcaaccgcgaggtcactctgtggctgggagctatgaaatgcttctgggtgagtactggcaagcctatgggcgttcttaatgctgatcagcagaaagaattcgatgaggccactactctctctgtgggatgcattcttagcgtgcttggcgatcgtctggtcgaggtgtatatgcatatgaccgacgctaaggagttgtgggatgcactgaatactaaattcggtgctactgatgctagcaatgatctgtatatcatggagcagtttcatgactacaagatggctgacaaccgttctgtagtcgaacaggctcatgagatacaaaccatggctaaggaactcgaactccttaagtgtgtcttacccgacaaatttgtggccgggtgcattattgtgaaattacctccatcttggagaggtttcagtactgcactcaaacacaagagacaggaatactccgttgaggggttgatagcatctcttgatgttgaggagaaagctcgggaaaaagatgtcgcgtctaagggcgatggtggccagtccactgccaatgttgtgcacaaggcccagaacaagagcaaggggaaatacaaagctcagcagaccaccaacttcaagaagaagaagaagaacaacaatcctaatcaggatgagaggacttgctttgtgtgtggtcaacctggccatctggccaggaagtgtccacaacgcaaagggatgaaggcacctgcaggacagacctctatgtctgctaatgtgaccattggcaacactggagatggaagcgggtatggaaagatcgtgcagctgaagaacgtgcagcatgtaccttctatcgacaggaatcttgttagtggctcccgcttcgcagtcaatgatgcaatgatgcagataaatgtgtatactatcgccatgatggggtcccattatgtggagaagatcttgaatcgctttggctacattgatagtaagccttctccaacaccttatgatcctagcttgttgcttcgcaagaacaagagaattgctaggaatcaactggaatactcccaaatcattggctcgctgatgtacctggctagtgcaactaggcctgatatctcctttgctgtgagcaagttgagccggaaattgagaaactccggagttataacattggattacatccaaacaactagaaacctggcagatcccttcacgaagggactatcacgaaatgtgatagacaatgcatcgaaggagatgggtttgagacccatcgaagatgctatcctgcagagcattcttgaaagaactcacctttgtgagcttgactgttggtcgcagtctatggatattttgggtgaatcttctaggaagcttactaaagaccacccgagcgtgcacctgcgatcgggagagcaggtctccggaacctctgccttcgacgccccgcactgggagaaggcagcaataaggggtgacagtcgatctacgagggctatggaatgggtgggtggcgagacggtggtgtcggtgccaccggagccacaggtggaggagcaccacgacgagcaacagaagcacatcgggcgccggctaggtgaagagaaactcatgagggctgaacattggaaatgggaaaggaaggtttgggatggcgagaatacaagggccaagaagtgtggcaaggagatggtagaaattgacaactcttgcaaggtcagggagaagccttgcaaggtcaagaacgttccaaagtactcggaacaaaatgttctagcactcaagaacgtctag

SEQ ID NO: 15717 - DNA, 4383 bp, Oryza sativa
  Clone ID: TFbOSC401518j.C1.o12.fg
atgccgctgcggcgcggagccctccctccccgcgcccctcttcggccggcacccggcggtctctgcggccgcgcgctcctccgccggacctgcagcctctcgtggccggcgacgacgggcggagcggcgctcaggcatacaaaatacaagaatttggcagatctctactatgcagaagatttggtagttgacttgatatctgcactctatagttaccagatgaaaaattctagatggaagccagtatttgccttggaaacaggtggaccatctaatgctgatagccaagacttcgaagatgatggtggctttcttggtagaacaaggctgggaaggctcatccaagctgctgggagggaactacttgaaaagctgaactctgccagaagcaactcccccacgaagatattccttgtgctgtttggcttctataccgccaacgcattggcaacaatcctagggcagactggtgactgggatgttcttgtggctggtgttgtagtggctgccatagagggaattggcatgcttatgtacagaaaaccgatgagtagacctcctggacgattccagtcattgattgcaatggtgaactactggaaagccggcgaggcaaaggtgagagagtgtctcggtgaccggcgacggcgaggcgagctagatgctggttgggaatggtggatcgtggaaggagatgagctcctactcgacatcatctgtcatagtccactcggcatcggcgcgctcctatgggtgtggcgcatccacacggttcacgctgcagcatatagtcagagggtgacgatccagctcccgacaatgggtcttgaaagcagggacgccacaagtggtggagacctaagatcgcgtgcgaaggacgactcttaccacaacccacaggcgccatgcaaggaggagcttggggcggtgaccggccagaggcgcaggaaaattcggatttgttttattgttggaaacattccgaaaaatccggtgagtactggcaagcctatgggcgttcttaatgctgatcagcagaaagaattcgatgaggccactactctctttgtgggatgcattcctagcgtgcttggcgatcgtctggtcgaggtgtatatgcatatgaccgacgctaaggagttgtgggatgcactgaatactaaattcggtgctactgatgctagcaatgatctgtatatcatggagcagtttcatgactacaagatggctgacaaccgttctgtagtcgaacaggctcatgagatacaaaccatggctaaggaactcgaactccttaagtgtgtcttacccgacaaatttgtggccgggtgcattattgcgaaactacctccatcttggagaggtttcggtactgcactcaaacacaagagacaggaatactccgttgaggggttgatagcgtctcttgatgttgaggagaaagctcgggaaaaagatgtcgcgtctaagggcgatggtgggcagtccactgccaatgttgtgcacaaggcccagaacaagagcaaggggaaatacaaagctcagcagaccaccaacttcaagaagaagaacaacaacaacaatcctaatcaggataagaggacttgctttgtgtgtggtcaacctggccatctggccaggaagtgtccacaatgcaaggggatgaaggcacctgcagggcagacctctaagtctgccaatgtgaccattggcaacactggagatggaagcgggtatggggccaatgtacatgtttgtgctgacatctcattgttttcttcttatcaggtcgcatggggttccaccgtcctaatagggaatgggtcacatgcttctgttcatggtgttggcacggtagatctgaagtttacttcgggaaagatcgtgcagctgaagaacgtgcagcatgtcccttctatcgacaggaatcttgttagtggctcccgtctgactagagacggatttaagttggtttttgagtctaataaagtagtcgtgtctaaacatagatattttattggtaaaggttatgagtgcggaggcctgttctgcttttccttttctgatttctgcaataagtctgtgaaccatatttgtggcagtgtggatgatgaggctaatgtatggcactcacgtttatgtcatattaattttggcttgatgtctcggctttccagcatgtgtttaattcctaagttttccattgtcaaaggttctaagtgccatagttgtgtgcaatcaaagcaacctcgcaagcctcacaaggctgctaaagagagaaacttggcacctctagaactcttacactcagatctctgtaaaatgaatggggtgttgacgaagggtggaaaacgatatttcatgacgttgattgatgatgctactagattttgctatgtgtacttgttgaaaacgaaagacgaggctctagactattttaaaatttataaggcaaaagttgaaaatcaacttgacagaaagataaaaagacttaggtctgatcgtggtggagagtttttctcaaacgagtttgacttattctgtgaggaacatggcattatacatgagaggacgcctccctattctcctgagtctaataagattgctgaaaggaagaaccgcacactgaccgacttggtgaatgccatgttggacaccgcaggactacctaaggcatggtggggggagacattgttgacctcgaatcatgtgttaaacagagttcctaacagaaataaggacaaaacaccatatgagatatggattgggagaaaaccatcactttcttacttgcgcacatgggggtgcttggcgaaagtcaacgtatcaataacgaataagcgcaaacttggacctaagactgtggactgtgtctttctgggatatgctcactacagcattgcctatagatttttaatagttaaatctgaggtacctgacatgcatgttggtacaattatggagtctcgtgatgctaccttctttgagagctttttcccaatgaaggatacacatagtagttctagccaaccctctgaaataattctcagttcaatcacaccaccagaacaaactgaacatacacatgaacatgtcactgaggaggatgacagtgaagctcctcgaaggagcaaaagacaaaggacggttaagtcttttggtgacgatttcactgtgtacctcgtggatgacactcctaagtcaatttcagaagcatacgcatctcctgatgcagactactggaaggaggttgtccgtagtgaaatggattccattatcgctaacgggacttgggaggtgacagagcggcctatgggtgtaaacatgtggggtgcaagtgggtgttcaagaagaagctcaggcctgatggtactattgaaaacttcatatggtcttctcgttcatcaaatggacgttaagacagcttttcttaatggagagctagatgaggagatctatatggatcaacctgatgggtttgtagttgaaggctttgcagtcaatgaggcagataaatgtgtgtactatcgccatggtgggggtgagggagttattctgtgcttgtatgttgatgacatactgatatttgggacaaaccttgaggatttgggagtagttgatgttatcttaaacattaagctaattagaggtgagaatgagattacacttttgcagtcccattatgtggagaagatcttgaattgctttggctacattgatagtaagccttctccaacaccttataatcctagcttgttgcttcgcaagaacaagagaattgctaggaatcaactggaatactcccaaatcattggctcgccgatgtacctggctagtgcaactaggcctgatatctcctttgctgtgagcaagttgagctggtttacctctaatccgggagatgatcactggcgtgcgcttgagcgagtaatgcgctatctgaaaggtactatggaattgggacttcactattctgggtatcctgcggtactagagggatatagtgattctaagtggatctctgatgtggatgagatcaaagccactagtggatatgtcttcacattgggtggtggtgctgtttcgtggaggtcttgcaaacagactattttgacgaggtcaaccatggaagcagaactgacggcactggatactgctactgttgaggcagaatggctgcatgatctattaatggatctgcctattgttgaaaaaccggtgctggctatccttatgaactgtgacaatcaaacggtaattgtcaaagtgaatagttctaaggataatatgaaatcgtctagacatgtgaaaagacgattgaagtctgttaggaaattgagaaactccggagttataacgttggattacatccaaacagcttga

SEQ ID NO: 15718 - DNA, 3774 bp, Oryza sativa
  Clone ID: TFbOSC403909j.C1.o3.fg
atgtgtggtggagagaaaagggggaacacgcgcgagctcgctcgcctcgcctcgcctcgcctcgcctcgcctggtagggcagggcaggtggcgcgcgtgcacgatgtatgcgtcgaatggtccgcgacggctcgacgcttgcagccgcgagtagttcgtgccgagcaaccggtctttccgccacctcggcactgtgattttactatggctagttttaccgatgcactgaggccggataaattcaccggtgtgcacttcaagagatggcagatcagggtcactctgtggctgacagctatgaaatgcttctgggtgagtactggcaagcctatgggtgttcttaaagctgatcagcagaaagaattcgatgaggccactactctctttgtgggatgcattcttagcgtgcttggcgatcgtctgatcgaggtgtatatgcatatgaccgacgctaaggagttgtgggatgcactgaatactaaattcggtgctactgatgctagcaatgatctgtatatcatggagcagtttcatgactacaagatggttggcaaccgttctgtagtcgaacaggctcatgagatacaagccatggataaggaactcagacttcttaagtgtgtcttacccgacaaatttgtggtcgggtgcattattgcgaaactacctccatcttggagaggtttctatactgcactcaaacacaagagacaggaatactctgttgaggggttgatagcgtctcttgatgttgaggagaaagctcgggaaaaagatgctgcgtctaagggcgatggtggccagtccactgccaatgttgtgcacatggcccagaataagagcaaggggaaatacaaagctcagcagaccaccaacttcaagaagaagaagaacaacaacaatcctaatgaggatgagaggacttgctttgtatgtggtcaacctggccatctggccaggaagtgtccacaacgtaaggggatgaaggcacctgcagggcagacctctaagtctgctaatgtgaccattggcaacactggagatggaagcgggtatggtaatttacctactgttttttcagttaatcagtctactaattggtgggttgatactggggccaatgtcgcacggggttccaccgtcctaatggggaatgggttacatgcttctgttcgtggtgttggcacggtagatctgaagtttacttcgggaaagatcgtgcagctgaagaacgtgcagcatgtcccttctatcgacaggaatcttgttagtggctcccgtctgactagagacggatttaagttggtttttgagtctaataaagtagtcgtgtctaaacatggatattttattggttctaagtgccatagttgtgtgcaatcgaagcaacctcgcaagcctcacaaggctgccgaggagagaaacttagcaccactagaactcctacattcagatctttatgaaatgaatggggtgttgacgaagggtggaaaacgatatttcatgacgttgattgatgatgctactagattatgctatgtgtacttgttaaaaacgaaagacaaggctctagactattttaaaatttataaggcagaagatgaaaatcaacttgacagaaagataaaaaggctttggtctgatcgtggtggagagtttttctcaaacgagtttgacttattctgtgaggaatatggcatcatacatgagaggacgcctccctattctcctgagtctaatgggattgctaaaaggaagaaccacacactgactgacttggtgaatgccatgttggatactgcgggactacctaaggcatggtggggggagacattgttgacctcgaatcatgtgttaaacagagtttctaacagaaataaggacaaaacaccatatgagatatggattaggagaaaaccatcactttcttacttgcgcacatgggggtgcttggcgaaagtcaatataccaataacgaagaagcgcaaacttggacctaagactgtggactgtgtctttctaggatatgttcatcacagcattgcctatagatttttaatagttaaatttgaggtacctgacatacatattggtacaatcatggagtctcgtgatgctaccttctttgagagctttttcccaatgaaggatacacatagtagttctagccaaacctctgaaataattcccaattcaatcacaccactagaacaaactgaacatacacatgaacatgtcactgaggaggatgacagtgaagctcttcgaaggagtaaaagacaaaggacggctaagtcttttggtgatgatttcactgtgtacctcgtggacgacactcctaagtcaatttcagaagcatatgcatctcctgatgcagactactggaaggaagctgtccgtagtgaaatggattccattatcgctaacggaacttgggagatgacagagcgaccctatgggtgtaaacctgtggggtgcaagtgggtgttcaaaaagaagctgaggcctgatggtaccattgaaaagtacaaggctcggcttgttgctaagggctatactcagaaagaaggcgaagatttcttttacacttactcacctgtttccagattgaccacaattcgtgtgctactttccctagcagcctcacatggtcttctcgttcatcaaatggacattaagacagcttttcttaatggagagctggatgaggagatctatatggatcagcctgatgggtttgtagttgaaggcttcgcagtcaatgagacagataaatgtgtatactatcgccatggtgggggtgagggagttattctgtgcttgtatgttgatgatatactgatatttgggacaaaccttgaggtgataaatgaggttaaatcattcttgtctcaaaaatttgatatgaaggatttgggattagctgatgttatcctaaacattaagctaattagaggtgagaatgggattgcacttttgcagtcccattatgtggagaaaattttgaatcgctttggctacattgatagtaatccttctccaacaccttatgattctagcttgttgcttcgcaagaacaagagaattgctaggaatcaactggaatacttccaaattattggctcgctgatgtacctggctagtgcaactaggcctgatatctcctttgctgtgagcaagttgagccggtttacctctaatccgggagatgatcactggcgtgcgcttgagcgagtaatgcgctatctgaaaggtactatagaattggggcttcactattctaggtatcctgcggtactggaaggatatagtgattttaactggatctctgatgtggatgagatcaaagccactagtggatatgccttcacactaggtggtggtgctgtttcgtggaggtcttgcaaacagaccattttgacgaggtcaaccatggaagcagagttgacggcactagacactgctactgttgaggcagaatggctgcgtgatctattaatggatctgcctattgttgaaaaaccggtgccggctatccttatgagctatgacaatcaaacggtaattgtcaaagtgaatagttctaaggataatatgaaatcgtctagacatgtgaaaagacgattgaagtctgtcaggaaattgagaaactccggagttataacatttgattacatccaaacagctagaaagctggcagatcccttcacgaagggactatcacgaaatgtgatagacaatgtatcgaaggagatgggtttgagacccatgtga

SEQ ID NO: 15719 - DNA, 3702 bp, Oryza sativa
  Clone ID: TFbOSC405599j.C1.o3.fg
atggtgagtactggcaaacctgaaggagttcttactgctgaccagcagaagcaattcgaggaagccactactctctttgtgggatgcattcttagcgttcttggcgatcgtctggtcgaggtgtatatgcatatgaccgacgctaaggagttgtgggatgcactgaatactaaattcggtgctactgatgctagcaatgatctgtatatcatggagcaatttcatgactacaagatggctgacaaccgttctgtagtcgaacaggctcatgagatacaaaccatagctaaggaactcgaactccttaagtgtgtcttacccgacaaatttgtggccgggtgcattattgcgaaacttcctccatcttggagaagtttcaatactgcactcaaacacaagagacaggaatactctgttgaagagttgatagcgtctcttgatgttgaggagaaagctcgggaaaaagatgctgcgtctaagggcgatgatgggcagtccagtgccaatgttgtgcacaaggcccagaacaagagcaaggggaaatacaaagctcagcagaccaccaacttcaagaagcagaagaacaacaacaacaatcctaatcaggatgagaggacttgctttgtgtgtggccaacctggtcatctggctaggaagtgtccacagcgtaaggggatgaaggcacctgcagggcagacttctaagtctgctaatgtgaccattggcaacactggagatggaaacgggaatcttgttagtggctcccgtctgactagagacggatttaagttagtttttgagtctaataaagtagtcgtgtctaaacatggatattttattggtaaaggttatgagtgcggaggcctgttccgcttttccctttctgatttctgcaataagtctgtgaaccatatttgtggcagtgtggatgatgaggctaatgtctggcactcacgtttatgtcatattaattttggcttgatgtctcggctttccagcatgtgtttaattcctaagttttccattgtcaaaggttctaagtgccatagttgtgtgcaatcaaagcaacctcgcaagcctcacaaggctgctgaggagagaaacttggcacatctagaactcctacattcagatctttgtgaaatgaatggggtgttgacgaagggtggaaaacgatatttcatgacgttgattgatgatgctactagattttgctatgtgtacttgttgaaaacgaaagacgaggctctagactattttaaaatttataaggcagaagttgaaaatcaacttgacagaaacataaaaagacttaggtctgatcgtggtggagagtttttcttatacgagtttgacttattctgtgaggaatatggcattatacatgagaggacgcctccctattctcccgagtctaatgggattgccgaaaggaagaaccgcacactgactgacttggtgaatgccatgttggacaccgcgggactacctaaggcatggtggggggagtctcgtgatgttaccttctttgagagctttttcccaatgaaggatacacatagtaattctagtcaaccttctgaaataattcccagttcattcacaccaccagaacaaattgaatatacacatgaacatgtcactgaggaggatgatagtgaagctcctcgaaggagtaaaagacaaaggacgactaagtcttttggtgatgatttcactgtgtacctcgtggacgacactcctaagtcaatttcagaagcatatgcatctcctgatgcagactactggaaggaggctgtccgtagtgaaatggattccattatcgctaacggaacttgggaggtgacagagcgaccctatgggtgtaaacctgtggggtgcaagtgggtgttcaaaaagaagctgaggcctgacagtaccattgaaaagtacaaggctcggcttgttgctaagggctatactcaaaaagaaggtgaagatttctttgacacttactcacctgttgccagattgaccacaatttgtgtgctactttccctagcagcctcacatggtattctcgttcatcaaatggacgttaagacagcttttcttaatggagagctggatgaggagatctatatggatcaacctgatgggtttgtagttgaaggtcaagaagccaaggtgtgcaaattgttgaagtctttgtatagtctgaaacaagctcctaagcaatggcatgagaaatttgatagaacattgacatctgcatgcttcgcagtcaatgagacagataaatgtgtatactatcgccatggtgggggtgagggagttattttgtgcttgtatgttgatgacatactgatatttaggacaaatcttgaggtgataaatgaggttaaatcattcttgtctcaaaaatttgatatgaaggatttgggagtagctgatgttatcctaaacatcaagctaattagaggtaagaatgggattacactcttgcagtcccattatgtggagaagatcttgaatcactttggctacattgatagtaagccttctccaacgccttatgatcctaacttattgcttcgcaagaacaagagaattgctaggaatcaactggaatactcccaaatcattggctcgctgatgtacctggctagtgcaactaggcctgatatctcctttgctgtgagcaagttgagccggtttacctctaatccaggagatgatcactggcgtgcgcttgagcgagtaatgcgctatctgaaaggtactatggaattggggcttcactattctgggtaccctgcggtactggaaggatatagtgattctaactggatctctgatgtggacgagatcaaagccactagtgggtatgtcttcacactaggtggtagtgctgtttcgtggaggtcttgcaaacagaccattttgacaaggtcaaccatggaagcagagttaacggcactggatactgctactgttgaggcagaatggctgcgtgatctattaatggatctgcctattgttgaaaaaccggtgccggctatccttatgaactgtgacaatcaaacggtaattgtcaaagtgaatagttctaaggataatatgaaatcgtctagacatgtgaaaagacgattgaagtctgtcaggaagttgagaaactccggagttataacgttggattacatccaaacaactagaaacctggcagatcctttcacgaagggactatcacgaaatgtgatagacaatgcatcgaaggaaatgggtttgagacccatcgaagatgctgtcctacagagcattcttgaaagaactcacctttgtgagcttgactgttggtcgcagtctatgaagattttgggtgaatcttctaggaagcttactaaagacctaggagactgcggtcactgcgggcgggcgttggcggcacacgcggcaggtctgcagcagtgcgctagtgcggcactgcggctgcggcggcagccggccaaggcggcggactgctgcaggctacggcgccagtgcggcagtgggctgctgcggcgaccaagccggccaaggcgcgcacgcgtggcccggcggcgctcgctctcacgatctgatcagatcgctgctcgcgttggcgtcgcgactcgcgagggcgaggaggggagagacagagagtcctgcgatggcgcgacgcttcggtttctgaattccaattga

SEQ ID NO: 15720 - DNA, 3018 bp, Oryza sativa
  Clone ID: TFbOSC411284j.C1.o10.fg
atggctcgccttcctctccgctcgcgtgctgcacgccttcatcgacgctcgcaaccgcgagtagttcctgccgagcaatcagtctttccgccacctcggcgctatgattttactatggctgtttttgccgatgcactgaggccggataaatttaatggtgtgcactttaagagatggcagatcagggtcactctgtggctgacagctatgaaatgcttctggaaagaattcgatgaggccactactctctttgtgggatgcattcttagcgtgcttggcgatcatctggtcgaggtgtatatgcatatgaccgacgctaaggagttgtgggatgcattgaatactaaattcggtgctactaatgctagcaatgatctgtatatcatggagcagtttcatgactacaagatggctgacaaccgttctgtagtcgaacaagctcatgagatacaaaccatggctaaggaactcgaactccttaagtgtgtcttacccgacaaatttgtggtcgggtgcattattgcgaaactacctccatcttggagaggtttcggtactgcactcaaacacaagagacaggaatactccgttgaggggttgatagcgtctcttgatgttgaggagaaagctcgggaaaaagatgcggcgtctaagggcgatggtgggcagtccattgccaatgttgtgcaccaggcccagaacaagagcaaggggaaatacaaagctcagcagaccaccaacttcaagaagaagaagaacaacagcaatcctaatcaggatgagaggacttgctttgtgtgtggtcaacctggccatctggccaggaagtgtccacaacgcaaggggatgaaggcacctggagggcagacctctaagtttgctaatgtgaccattggcaacactggagatggaagcgggtatggtaatttacctactgttttttcagttaaccagtctactaattggtgggttgatacaggggccaatgtacatgtttgtgctgacatctcattattgtcttcttatcaggtcgcacggggttctaccgtcctaatggggaatgggtcacatgcttctgttcatgatgttggcacggtagatctgaagtttacttcgggaaagatcgtgcagctgaagaacatgcagcatgtcccttctatcgacaagaatcttgttagtggctcccgtctgactagagacggatttaagttggtttttgagtctaataaagtagtcgtgtctaaacatggatattttattggtaaaggttatgagtgcggaggcctgttccgcttttccctttctgctttctgcaataagtctgtgaaccatatttgtggcagtgtggatgatgaggctaatgtatggcactcacgtttatgtcatattaattttggattgatgtctcggttttccagcatgtgtttaattcctaagttttccattgtcaaaggttctaagtgccatagttgtgtgcaatcaaagcaacctcgcaagcctcacaaggctactgaggagagaaacttggcacctctagaactcctacactcagatctctgtgaaatgaatggggtgttgacgaagggtggaaaacgatatttcatgacgttgattgatgatgctactagattttgctatgtgtacttgttgaaaacgaaagacgaggctctagactattttaaaatttataaggcagaagttgaaaatcaacttgacagaaagataaaaatacttaggtctgatcgtggtggagagtttttctcaaacgagtttgacttattctgtgaggaacatggtattatacatgagaggacgcctccctattctcccgagtctaataggattgctgaaaggaagaaccgcacactgaccgacttgtctcgtgatgctaccttctttgagagctttttcccaatgaaggatacacatagtagttctagccaaccctctgaaataattcccagttcaatcacaccaccagaacaaactgaacatacacatgaacatgttactaaggaggatgacagtgaagctcctcgaagtagcaaaagacaaaggacagctaagtcttttggttatgatttcactgtgtacctcgtggatgacactcctaagtcaatttcagaagcatacgcatctcttgatgcagactactggaaggaggctatccgtagtgaaatggattccattatcactaacgggacttgggaggtgacagagcgaccctatgggtgtaaacctgtggggtgcaagtgggtgttcaagaagaagctcaggcttgatggtactattgaaaagtacaaggctcggcttattgctaagggttatactcagaaagaaggcgaagatttctttgacacttactcacttgttgctagattgaccacaattcgtgtgctactttccctagcagcctcacatggtcttctcgttcatcaaatggacattaagacagcttttcttaatggagagctggatgaggagatctatatggatcaacgtgatgggtttgtagttgaaggtcaagaaggcaaagtgtgtaaattgttgaagtctttgtatggtctgaaacaagctcataagaaatggcataagaaatttgacaaaacattgacatctgcaagctttgcagtcaatgaggcagataaatgtgtgtattatcgccatggtgggggtgagggagttattctgtgcttgtatgttgatgacatactgatatttgggacaaaccttgaggtgataaatgaggttaaatcattcttgtctcaaaattttgatatgaaggatttgggagtagctgatgttatcttaaacattaagctaattagaggtgagaatgagattacactcttgcagtcccattatgtggagaagatcttgaatcgctttggctacattgatatattggagggatatagtgattctaattggatctctgatgtggataagatcaaagccactagtggatatgtcttcacactaggtggtggtgctgtttcgtggaggtcttgcaaatag

SEQ ID NO: 15721 - DNA, 2967 bp, Oryza sativa
  Clone ID: TFbOSC411372j.C1.o4.fg
atgaaatgcttctgggtgagtactggcaagcctatgggcattcttaatgctgatcagcagaaaaaattcgatgaggccactactctctttgtgggatgcattcttagcgtgcttgacgatcgtctggtcgaggtgtatatgcatatgaccaacgctaaggagttgtgggatgcactgaatactaaattcggtgctattgatgctagcaatgatctctatatcatggagcagtttcatgactacaagatggctgacaactgttctatagtcgaacaggctcatgagatacaaaccatggctaaggaactcgaactccttaagtgtgtcttacccgacaaatttgtggccgggtgcattatcgcgaaacaacctccatcttggagaggtttcagtactgcactcaaatacaagagacaggaatactccgttgaggggttgatagcgtctcttgatgttgaggagaaagctcgggaaaaagatgtcgcgtctaagggcgatggtggccagtccactgccaatgttgtgcacaaggcccagaacaagagcaaggggaaatacaaagctcagcagaccaccaactttaagaagaagaacaacaacaatcctaatcaggatgagaggacttgctttgtgtgtggtcaacctggccatctggccaggaagtgtccacaacgcaaggggatgaaggcacctgtagggcagacctctaagtttgctaatgtgaccattggcaacactggagatggaagcagtcgcacgggttccaccgtcctaatggggaatgggtcacatgcttctgttcatggttatgagtgcggaggcctgttccgcttttccctttctgatttctacaataagtctgtgaaccatatttgtggtagtgtggatgataaggcttatgtttggcactcacgtttatgtcatattaattttggcttgatgtctcggctttccagcatgtgtttaattcctaagttatccattgtcaaaggttctaagtgctatagttgtgtgcaatcgaagcaacctcgcaagcctcacaaggttgccgaggagagaaacttggcaccactagaactcctacattctgatctttgtgaaatgaatggggtgttgacgaagggtggaaaacgatatttcgtgatgttgattgatgatgctactagattttgctatgtgtacttgttgaaaacgaaagacgaggctctagactattttaaaatttataaggcagaagttgaaaatcaacttgacaggaagataaaaaggcttaggtctgatcgtggtggagagtttttctcaaacgagtttgacttattctgtgaggaacatggcatcatacatgagaggacgcctccctattctcccgagtctaatgggattgctgaaaggaagaatcgcacactgactgacttggtgaatgccatgttggacaccgcgggactacctaaggcttgcattgcctatagatttttaatagttaaatctgaggtacctgacatgcatgttggtacaatcatggagtctcgtgatgctaacttctttgagatcagctttttcccaatgaaggatacacatagtagttctagccaaacctctgaaataattcccaactcaatcacaccaccagaacaaactaaacatacgcatgaacatgtcactgaggaggatgacagtgaagctcctcgaaggagtaaaagacaaaggacggctaagtcttttggtgatgatttcactgtgtacctcatggacgacactcctaagtcaatttcagaagcatatgcatctcctgatgcagactactggaaggaggctgtccgtagtgaaatggattccattatcgctaacggaacttgggaggtgacagagcgaccctatgggtgtaaacctgtggggtgcaagtgggtgttcaaaaagaagctgaggcctgatggtaccattgaaaagtacaaggctcggcttgttgctaagggctatactcagaaagaaggcgaagatttctttgacacttactcacctgttgctagattgaccacaattcgtgtgctactttccctagcagcctcacatggtcttctcgtccatcaaatggatgttaagacaacttttcttaatggagagctggatgaggtgatctatatagatcagcctgatgggtttgtagttgaaggtcaagaagacaaggcgtgcaaattgttgaagtctttgtatggtctgaaacaagctcctaagcaatggcacgagaaacttgatagaacattgacatctgtaagctttgcagtcaatgaggcagttaaatgtgtatactatcgccatggtgggggtgagggagttattctgtgcttttatgttgatgacatactgatatttgggacaaaccttgaggtgataaatgaggatttgggagtagctgatgttatcctaaacattaagctaattagaggtgagaatgggattacactcttgcagtcccattatgtggagaagatcttgaatcactttggctacattgatagtaagccttctccaacaccttatgatcctagcttgttgcttcgcaagaacaagagaattgctaggaatcaactggaatactcccaaatcattggctcgctgatatacttggctagtgcaactaggcctgatatctcctttgctgtgagcaagttgagccggtttacctctaatccggaagatgatcactggcgtgcgcttgagcgagtaatgcgctatccgaaaggtactatggaatttgggcttcactattctgggtatcctgcggtactggaaggatataatgattctaactggatctctgatgtggatgagatcaaagccactagtggatatgtcttcacactacgtggtggtgctgtttcgtcgaggtcttgcaaacagaccattttgacgaggtcaaccatggaagcagagttgacagcactggatactgctactgttgaggcataa

SEQ ID NO: 15722 - DNA, 3903 bp, Oryza sativa
  Clone ID: TFbOSC419914j.C1.o1.fg
atggctggttttgccgatgcactgaggccagataaattcaccggtatgctcttcaagagatggcagatcagggtcactctgtggctgacagctatgaaatgcttctgggtgagtactagcaagcctatgggcgttcttaatgctgatcagcagaaagaattcgatgaggccactactctctttgtgggatgcattcttagcgtgcttggcgatcgtctggtcgaggtgtatatgcatatgaccgacactaaggagttgtgggatgcactgaatactgaattcggtgctactgatgctagcaatgatatgtatatcatggagcagtttcatgactacaagatggctgacaaccgttctgtagtcgaacaggctcatgaaatacaaaccatggctaaggaactcgaactccttaagtgtgtcttactcgacaaatttgtggccgggtgcattattgcgaaactacctccatcttggagaggtttcggtactgcactcaaacacaagagacaggaatactccgttgaggggttgatagcgtctcttgatgttgaggagaaagctcgggaaaaagatgccgcgtctaagggcgatggtgggcaatccaatgctaatgttgtgcacaaggcccagaacaagagcaaggggaaatacaaagctcaacagaccaccaacttcaagaagcagaagaagaacaacaacaatcctaaccaggatgagaggacttgctttgtgtgtgggcaacctggtcatctggctaggaagtgtccacagcgcaaggggatgaaggcacctgcaaggcagacttataagtctgctaatgtgaccattgacaacattggagatggaagcgggtatgataatttacctactgttttttcagttaatcagtctactaattggtgggttgatactagggccaatgtcgcacggggttccaccgtcctaatggggaatgggtcacatgcttctgttcatggtgttggcacggtagatctgaagtttacttcgggaaagatcgtgcagctgaagaacgtgcagcatgtcccttctatcgacaggaatcttgttagtggctcccgtctgactagagacggatttaagttggtttttgagtctaataaagtagtcatatctaaacatggatattttattggtaaaggttatgagtgcggaggcctgttccgcttttccctttctgatttctgcaataagtctgtgaaccatatttgtggcagtgtggatgatgaggctaatgtttggcactcacgtttatgtcatattaattttggcttgatgtctcggctttccagcatgtgtttaattcctaagttttccattgtcaaaggttctaagtgccatagttgtgtgcaatcgaagcaacctcgcaagcctcacaaggctgccgaggagagaaacttggcaccactagaactcctacattcagatctttgtgaaatgaatggggtgttgacgaagaaaacaaaagacgaggctctagactattttaaaatttataaggcagaagttgaaaatcaacttgacagaaagataaaaaggcttaggtctgatcatggtggagagtttttatcaaacgagtttgacttattctgtgaggaacatagcatcatacatgagaggacgcctccctattctcccgagactaatgggattgctgaaaggaagaaccgcatactgactgacttggtgaatgccatgttggacaccgcgggactacctaaggcatggtggggggaggcattgttgacctcgaatcatgtgttaaacagagttcctaacagaaataaggacaaaacaccatatgagatatggattgggagaaaaccatcactttcttatttgcgcacatgggggtgcttggtgaaagtcaatgtaccaataacgaagaagcgcaaacttggacctaagactgtggactgtgtctttctgggatatgctcatcacagcattacctatagatttttaatagttaaatccgaggtacctgacatgcatgttggtacaattatgaagtctcgtgatgctaccttgtttgagagctttttcccaatgaaggatacacatagtggttcgagccaaccctctgaaataattcccagttcaatcacaccaccagaacaaactgaacatacacatgaacatgtctctgaggaggatgtcagtgaagctcctcgaaggagtaagagacaaatgacggctaagtcctttggtgatgatttcactgtgtacctcgtggatgacactcctaagtcaatttcagaagcatatgcatctcctgatgcagactactggaaagaggctgtccgtagtgaaatggattccattatcgctaacgggacttgggaggtgacagagcgaccctatgggtgtaaacctgtggggtgcaagtgggtgttcaagaagaagcttaggcctgacggtactattgaaaagtacaaggctcggcttgttgctaagggctatactcggaaagaatgcgaagatttctttaacacttactcacctgttgctagattgaccacaattcgtgtgctactttccctagcagcctcacatggtcttctcgttcatcaaatggacgttaagacagcttttcttaatggagagctggatgaggagatctatatgtatcaacctgatgggtttgtagttgaaggtcaagaaggcaaagtgtgcaaattgttgaagtctttgtatggtctgaaacaagctcctaagcaatggcatgagaaatttgacaaaacattgacatctgcaggctttgtagtcaatgaggcagataaatgtgtgtactatcgccatggtgggggtgagggagttattttgtgcttgtatgttgatgacatactgatatttgggacaaaccttgaggtgataaatgaggttaaatcattcttgtctcaaaattttgatatgaaggatttgggagtagctgatgttatcttaaacattaagctaattagaggtgagaatgggattacactcttgcagtcccattatgtggagaagatcttgaatcgttttggctacattgatagtaagccttctccaacaccttatgatcctagcttgttgcttcgcaagaacaagagaattgctaggaatcaactagaatactcccaaatcattggctcgttgatgtacctggctagtgcaactaggcctgatatctcctttgctgtgagcaagttgagccgatttacctctaatccgggagatgatcactggcgtgcgcttgagcgagtaatgcgctatctgaaaggtactgtggaattggggcttcactatactgggtatcctgcggtactggagggttatagtgattctaactggatctctgatgtggatgagatcaaagccactagtggatatgttttcacactgggtggtggtgctgtttcatggaggtcttgcaaacagaccattttgacgaggtcaaccatggaagcagagctaacggcactggatactgctactgttgaggcagaatggctgcgtgatctattaatggatctgcttgttgttgaaaaaccggtgccggctatccttatgaactgtgacaatcaaacgacatgtgaaaagacgattgaagtctgtcaggaaattaagaaactccggagttataacgttggattacatccaaacagcgagaaacctggcagatcccttcacgaagggactatcacgaaatgtgatagacaatgcatcgaaggagatgggtttgagacccatttcactgatgtccgctcggcagcctacttcaatggacatcaacacaacatagaagctccccatcagaatcgtaaaaaagaataccgaatgagaacatacattacatatggcattcatataatgctactggatctcaaacttgtatattgctga

SEQ ID NO: 15723 - DNA, 2001 bp, Oryza sativa
  Clone ID: TFbOSC900064j.C1.o13.gm
atggaggacgccaaagctctgcgacgtctcctgaacgacaccgacctcgatcttgtcagtgatcgggaaagacaagcctactacatgctgagtgaccgggagtatgctcacatgcgagaatacgctccggagctgctgaaaaagataggaatacggttgatctacaccggcaagatcaacaacccacggagaggcgtgcacctgcgatcgggagagcaagtctccggaacctctgccttcgacgtcctgcaccgggagaaggcggcaataaggtttttgggaagcgcttcgcgagactgctccctgttcgtccgcgacggctcgccttcctctccgctcgcgtgctgcgcgccttcgtcgacgcccgcaaccacgagtagttcctgccgagcaaccgatctttccgccacctcgtggcttggcgatcgtctggtcgaggtgtatatgcatatgaccgacgctaaggagttgtgggatgcactgaatactaaattcggtgctactgatgctagcaatgatctatatatcatgcagcagtttcatgactacaagatggctgacaaccgttctgtagtcgaacaggctcatgagatacaaaccatggctaaggaacttgaactccttaagtgtgtcttaccagacaaatttgtggccgggtgtattattgcgaaactacctccatcttggagaggtttcggtactgcactcaaacacaagagacaggaatactccgttgaggggttgatagcgtctcttgatgttgaggagaaagctcgggaaaaagacaccgcgtctaagggcgatggtgggcagtgcagtgccaatgttgtgcacaaggccaagaacaagagcaaggggaaatacaaagctcaacagaccaccaacttcaagaagcagaagaagaacaacaacaatcctaaccaacatgagaggacttgctttgtgtgtgggcaacctggtcatctagctaggaagtgtccacagcgcaaggggatgaaggcacctgcagggcagacttctaagtctactaatgtgaccattggcaatactggagatggaagtgggtatggtaattttcctactgtcgcacggggttccaccgtcctaatggggaatgggtcacatgcttctgttcatggtgttggcacggtagatctgatgtttacctcgggaaagatcgtgcagctgaagaacgtgcagcatgtcccttctatagacaggaatcttgttagtggctcctactactggaaggaggctgtccgtagtgaaatggattccattatcgctaacgggacttgggaggtgacagagcgaccctatgggtgtaaacctgtggggtgcaagtgggtgttcaagaagaagcttaggcttgacgcctcacatggtcttctcgttcatcaaatggacgttaagacagcttttcttaatggagagctggatgaggagatctatatggatcaacctgatgggtttgtagttgaaggctttgcagtcaatgaggcaaacaaatgtgtgtactatcgccatggtgggggtgagggagttattatgtgcttgtatgttgacgacatactgatatttgggacaaaccttgagatgataaatgagtcccattatgtggagaagatcttgaatcgctttggctacattgatagtaagccttctccaacacattatgatcctagcttgttgcttcgcaagaacaaaagaattgctaggaatctactggaatactcccaaatcattggctcgctgatgtacctggctagtgcaactaggcctgatatctcctttgccgtgagcaagttgagccggcgtgcacctgcgatcaggagagcaggtctctggaacctctgccttcgacgtcctacactgggagaaggcggcaataaggtttttgggaagcgcttcgcgcgactgctccctgtttgtccgcgacggctcgccttcctctccgctcgcgtgttgcgcgccttcgtcgacgcccgcaaccgcgagtag

SEQ ID NO: 15724 - DNA, 2643 bp, Oryza sativa
  Clone ID: TFbOSC900186j.C1.o17.fg
atggcagatcagggtcactctgtggctggcagcgatgaaatgcttctgggtgtatacatgaccgacgctaaggagttatgggatgcactgaatactaaattcggtgctactgatgctagcaatgatctgtacatcatggagcagtttcatgactacaggatggctgacaaccgttctgtagtcgaacaagctcatgagatacaaaccatggctaaggaactcgaactccttaagtgtgtcgtacccgacaaatttgtggccgggtgcattattgcaaaactacctccatcttggagaagtttcggtactgcactcaaacacaagagacaggaatactctgttgaggggttgatagcgtctcttgatgttgagaagaaagctcgggaaaaagatgctgcgtctaagggcgatggtgggcaatccagtgccaatgttgtgcacaaggcccataacaagagcaaagggaaatacaaagctcaacagaccaccaacttcaagaagcagaagaagaagaagaacaatcctaatcaggatgagaggacttgctttgtgtgtggccaacctggtcatctggccaggaagtgtccacaacgcaaggggatgaaggcacctgcagggcagacttctaagtctgctaatgtgaccattggcaacactagagatggaagcgggtatgtcgcacggggttccaccgtcctaatggggaatgggtcacatgcttctgttcatggtgttggcacggtagatctgaagtttacttcgggaaagatcgtgcagctgaagaacgtgcagcatgtccctactatagacatgaatcttgttagtggctcccgtctgactagagacggatttaagttggtttttgagtctaataaagtagtcgtgtcaaaacatggatattttattggtaaaggttatgagtgcggaggcctgttctgtttttccctttctgatttctgcaataagtctgtgaaccatatttgtggcagtgtggataggggtgggaaaaataagaccgaaccgaagaaccgaaccgaaaagaccgagaccgagaccgaaaagaccgagatcgagaccgaaaagaccgagaccgagaaattcgggtctgatcatggtggagagcttttctcaaacaagtttgacttattttgtgaggaacatggcatcatacatgagaggacgcctccctattctcccgagtctaatgggattgctgaaaggaagaaccgcacactgactgacttggtgaatgccatgttggacaccgcgggactacctaaggcatggtgggggaaggcattgttgacctcgaatcatgtgttaaacagagttcctaatagaaataaggacaaaacaccatatgagatatggattgggagaaaaccatcactttcttatttgcgcacatgggggtgcttagcgaaagtcaatgtaccaataacgaagaagcgcaaacttggacctaagactgtggactgtgtctttctgggatatgctcatcacagcattgcctatagatttttaatagttaaatctgaggtacctgacatgcatgttggtacaattatggagtctcgtgatgctaccttctttgagagctttttcccaatgaaggatacacatagtagttcgagtcaaccctctgaaataattcccaattcaatcactgaacatacacatgaacatgtcactgaggaggatgtcagtgaagctcctcgaaggagtaagagacaaaggacggctaagtcctttggcgatgatttcactgtgtacctcgtggatgatactcctaagtcaatttcagaagcatatgcatctcctgatgcagactactggaaggaggctgtccgtagtgaaatggattccattatcgctaacgggacttgggagtgggtgttcaaaaagaagcttaggcctaacggtactattgaaaagtacaaggctcggcttgttgctaagggctacactcagaaagaaggcgaagatttctttgacacttactcacctgttgctagattgaccacaatttgtgtgctactttccttagcagcctcacatggtcttctcgttcatcaaatggacattaagacaacttttcttaatggagagctggatgagatctatatggatcaacctgatgggtttgtagttgaaggctttgcagtcaatgaggtagataaatgtgtgtactatcgccatggtgggggtgagggagttattctgtgcttgtatgttgatgacatactaatatttgggacaaaccttgaggtgataaataaggttaaatcattcttgtctcaaaattttgatatgaaggatttgggagtagctgatgttatcttaaacattaagctaattagaggtgagaatgggatcacactcttgcagtcccattatgtggagaagatcttgaatcgctttggctacattgatagtaagccttctccaacaccttatgatcctagcttgttgcttcgcaagaacaagagaattgctaggaatcaactggaatactcccaaatcattggctcgctaatgtacttggctagtgcaactaggcttgatatctcctttgctgtgagcaagttgacccggtttacctctaatccgggagatgatcattgcgtgcgcttgagcgagtaa

SEQ ID NO: 15725 - DNA, 4329 bp, Oryza sativa
  Clone ID: TFbOSC900199j.C1.o19.fg
atgtgtggtggagagaaaagggggaacacgcgcgagctcgctcgcctcgcctcgcctcgcctcgcctcgcctggtagggcagggcaggtggcgcgcgtgcacgatgtatgcgtcgaatggtccgcgacggctcgacgcttgcagccgcgagtagttcgtgccgagcaaccggtctttccgccacctcggcactgtgattttactatggctagttttaccgatgcactgaggccggataaattcaccggtgtgcacttcaagagatggcagatcagggtcactctgtggctgacagctatgaaatgcttctgggtgagtactggcaagcctatgggtgttcttaaagctgatcagcagaaagaattcgatgaggccactactctctttgtgggatgcattcttagcgtgcttggcgatcgtctgatcgaggtgtatatgcatatgaccgacgctaaggagttgtgggatgcactgaatactaaattcggtgctactgatgctagcaatgatctgtatatcatggagcagtttcatgactacaagatggttggcaaccgttctgtagtcgaacaggctcatgagatacaagccatggataaggaactcagacttcttaagtgtgtcttacccgacaaatttgtggtcgggtgcattattgcgaaactacctccatcttggagaggtttctatactgcactcaaacacaagagacaggaatactctgttgaggggttgatagcgtctcttgatgttgaggagaaagctcgggaaaaagatgctgcgtctaagggcgatggtggccagtccactgccaatgttgtgcacatggcccagaataagagcaaggggaaatacaaagctcagcagaccaccaacttcaagaagaagaagaacaacaacaatcctaatgaggatgagaggacttgctttgtatgtggtcaacctggccatctggccaggaagtgtccacaacgtaaggggatgaaggcacctgcagggcagacctctaagtctgctaatgtgaccattggcaacactggagatggaagcgggtatggtaatttacctactgttttttcagttaatcagtctactaattggtgggttgatactggggccaatgtcgcacggggttccaccgtcctaatggggaatgggttacatgcttctgttcgtggtgttggcacggtagatctgaagtttacttcgggaaagatcgtgcagctgaagaacgtgcagcatgtcccttctatcgacaggaatcttgttagtggctcccgtctgactagagacggatttaagttggtttttgagtctaataaagtagtcgtgtctaaacatggatattttattggttctaagtgccatagttgtgtgcaatcgaagcaacctcgcaagcctcacaaggctgccgaggagagaaacttagcaccactagaactcctacattcagatctttatgaaatgaatggggtgttgacgaagggtggaaaacgatatttcatgacgttgattgatgatgctactagattatgctatgtgtacttgttaaaaacgaaagacaaggctctagactattttaaaatttataaggcagaagatgaaaatcaacttgacagaaagataaaaaggctttggtctgatcgtggtggagagtttttctcaaacgagtttgacttattctgtgaggaatatggcatcatacatgagaggacgcctccctattctcctgagtctaatgggattgctaaaaggaagaaccacacactgactgacttggtgaatgccatgttggatactgcgggactacctaaggcatggtggggggagacattgttgacctcgaatcatgtgttaaacagagtttctaacagaaataaggacaaaacaccatatgagatatggattaggagaaaaccatcactttcttacttgcgcacatgggggtgcttggcgaaagtcaatataccaataacgaagaagcgcaaacttggacctaagactgtggactgtgtctttctaggatatgttcatcacagcattgcctatagatttttaatagttaaatttgaggtacctgacatacatattggtacaatcatggagtctcgtgatgctaccttctttgagagctttttcccaatgaaggatacacatagtagttctagccaaacctctgaaataattcccaattcaatcacaccactagaacaaactgaacatacacatgaacatgtcactgaggaggatgacagtgaagctcttcgaaggagtaaaagacaaaggacggctaagtcttttggtgatgatttcactgtgtacctcgtggacgacactcctaagtcaatttcagaagcatatgcatctcctgatgcagactactggaaggaagctgtccgtagtgaaatggattccattatcgctaacggaacttgggagatgacagagcgaccctatgggtgtaaacctgtggggtgcaagtgggtgttcaaaaagaagctgaggcctgatggtaccattgaaaagtacaaggctcggcttgttgctaagggctatactcagaaagaaggcgaagatttcttttacacttactcacctgtttccagattgaccacaattcgtgtgctactttccctagcagcctcacatggtcttctcgttcatcaaatggacattaagacagcttttcttaatggagagctggatgaggagatctatatggatcagcctgatgggtttgtagttgaaggcttcgcagtcaatgagacagataaatgtgtatactatcgccatggtgggggtgagggagttattctgtgcttgtatgttgatgatatactgatatttgggacaaaccttgaggtgataaatgaggttaaatcattcttgtctcaaaaatttgatatgaaggatttgggattagctgatgttatcctaaacattaagctaattagaggtgagaatgggattgcacttttgcagtcccattatgtggagaaaattttgaatcgctttggctacattgatagtaatccttctccaacaccttatgattctagcttgttgcttcgcaagaacaagagaattgctaggaatcaactggaatacttccaaattattggctcgctgatgtacctggctagtgcaactaggcctgatatctcctttgctgtgagcaagttgagccggtttacctctaatccgggagatgatcactggcgtgcgcttgagcgagtaatgcgctatctgaaaggtactatagaattggggcttcactattctaggtatcctgcggtactggaaggatatagtgattttaactggatctctgatgtggatgagatcaaagccactagtggatatgccttcacactaggtggtggtgctgtttcgtggaggtcttgcaaacagaccattttgacgaggtcaaccatggaagcagagttgacggcactagacactgctactgttgaggcagaatggctgcgtgatctattaatggatctgcctattgttgaaaaaccggtgccggctatccttatgagctatgacaatcaaacggtaattgtcaaagtgaatagttctaaggataatatgaaatcgtctagacatgtgaaaagacgattgaagtctgtcaggaaattgagaaactccggagttataacatttgattacatccaaacagctagaaagctggcagatcccttcacgaagggactatcacgaaatgtgatagacaatgtatcgaaggagatgggtttgagacccatgaaaattcggatttgttttgttttggaaacactccgaaaaatccgggtttgcctcctactctatactgcgccgtcgctcatagactactccatcccgctcgccggcgtgcaccggcgatcaggagagcaggtctccggaacctctgccttcgatgtcctgcaccgggagaaggcggcaataagtactagcatgcatcaatttgctgggcaggctcagccggaggaggagcagaagtgcgtccactgcggcggtggcgtcgccggagcgcaggtggaggcggcactgaaccgcaagaacgtggaggcgctcccggaggatgagacggtggagggcggcccagatgacgtgtgggtgcccgaccacgagacttgcgtcttcgtccccgccgacaaggccgccgtcttcggcactgaaaaccatgaccactgcggagcggcggcggtggccggcggctcgccgtcggtgcttgaccaggctgtgttcgtccatgaggaggacatggaggacgtcgagaggccggccgtcgacatggccgctgccaatcacaagcccaaatga

SEQ ID NO: 15726 - DNA, 3672 bp, Oryza sativa
  Clone ID: TFbOSC900250j.C1.o4.fg
atggctaaggaactcaaactccttaagtgtgtcttacccgataaatttgtggccgggtgcattattgcgaaactacctccatcatggagaagtttcggtactgcactcaaatacaagagacaggaatactccgttgaggggttgatagcgtctcttgatgttgaggagaaagctcgggaaaaagacgccgcgtataagggcgatggtgggcagtccagtgccaatgttgtgcacaaggcccagaacaagagcaaggggaaatacaaagctcaacagaccaccaatttcaagaagcagaagaagaacaacaacaatcctaaccaggataagaggacttgctttgtgtgtgggcaacctggtcatctggctaggaagtgtccacagcgcaaggggatgaaggcacctgcagggcagacttctaagtctgctaatgtgaccattggcaacactggaaatggaagcgggtatggtaatttacctactgttttttcagttaatcagtctactaattggtgggttgatactggggccaatgtacatgtttgtgctgacatctcattgttttcttcttatcaggtcgcacggggttccaccgtcctaatggggaatgggtcacatgcttctgttcatggtgttggcacggtagatctgaagtttacttcgggaaagatcgtgcagctgaagaacgtgcagcatgtcccttctatcgacaggaatcttgtcagtggctcccgtttgactagagacggatttaagttggtttttgagtctaataaagttttcgtgtctaaacatggatattttattggtaaaggttatgagtgcggaggcctgttccgcttttccctttctgatttctgcaataagtctgtgaaccatatttgtggcagtgtggatgatgaggctaatgtttggcactcacgtttatgtcatattatttttggcttgatgtctcgactttccagcatgtgtctaattcctaagttttccattgtcaaaggttctaagtgccatagttgtgtgcaatcgaagcaacctcgcaagcctcacaaggctgccgaggagagaaacttggcaccactagaactcctacattcagatctttgtgaaatgaatggggtgttgatgaagggtggaaaacgatatttcatgacgttgattgatgatgctactagattttgctatgtgtacttgttgaaaacgaaagacgaggctttagactattttaaaatttataaggcagaagttgaaaatcaacttgacagaaagataaaaaggcttaggtctgatcgtggtggagagtttttctcgaacgagtttgacttattttgtgaggaacatggcatcatacatgagaggacgcctccctattctcccgagtctaatgggattgctgaaaggaagaaccgcacactgactgacttggtgaatgccatgttggacaccgcgggactacttaaggcatggtggggggaggcattgttgacctcaaatcatgtgttaaacagagttcttaacagaaataaagacaaaacaccatatgagatatggattgggagaaaaccatcactttcttatttgcgcacatgggggtgcttggcgaaagtcaatgtaccaataacgaagaagcgcaaacttggacctaagactgtggactgtgtctttctgggatatgctcatcatagcattgcctatagatttttactagttaaatccgaggtaccggacatgcatgttggtacaattatgaagtctcgtgatgctaccttctttgagagctttttcccaatgaaggatacacatagtggttcgagtcaaccctctgaaataattcccagttcaatcacaccaccagaacaaattgaacatacacatgaacatgtctctgaggaggatgtcagtgaagctcctcgaaggagtaagagacaaaggacggctaagtcctttggtgatgatttcactgtgtacctcgtggatgacactcctaagtcaatttcagaagcatatgcatctcctgatgcagactactggaaggaggctgtccgtagtgaaatggattccattatcgctaacgggacttgggaggtgacagagcgaccctatgggtgtaaacctgtggggtgcaagtgggtgttcaagaagaagcttaggcctgacggtactattgaaaagtacaaggctcggcttgttgctaagggctatactcagaaagaaggcgaagatttctttgacacttactcacctgttgctagattgaccacaattcgtgtgctactttccctagcagcctcacatggtcttctcgttcatcaaatgaacgttaagacagcttttcttaatggagagctggatgaggagatctatatggatcaacctaatgggtttgtagttgtaggtcaaggcaaagtgtgcaaactgttgaagtctttgtatggtctgaaacaagctcctaagcaatggtataagaaatttaacaaaacattgacatctgcaggctttgcagtcaatgaggcagataaatgtgtgtactatcgccatggtgggggtgagggagttattctgtgcttgtatgttgacgacatactgatattgggacaaaccttgagaggtgagaatgggattacactcttgcagtcccattatgtggagaaaatcttgaatcgctttggctacattgatagtaagccttctccaacaccttatgatcctagcttgttgcttcgcaagaacaaaataattgctaggaatcaactggaatactcccaaatcattggctcgctgatgtacctggctagtgcaactaggcctgatatctcctttgttgtgagcaagttgagccggtttacctctaatccgggagatgatcactggcatgcgcttgagcgagtaatgcactatctgaaaggtactatggaattagggcttcactatactgggtatcgtgcggtactggagggttatagtgattctaactggatctctgatgtggatgagatcaaagctactagtggatatgtcttcacactgggtggtggtgctgtttcgtggaggtcttgcaaacagaccattttgacgaggtcaaccatggaagcaaaactgacggcactggatactgctactgttgaggcagaatggttacgtgatctattaatggatctgcctattgttaaaaaaccggtgccggctatccttatgaactgtgacaatcaaacggtaattgtcaaagtgaatagttctaaggataatatgaaatcgtctagacatgtgaaaagacgattgaagtctgtcaggaaattgagaaactccggagttataacgttggattacatccaaacagctagaaacctggcagatcccttcacgaagggactatcacgaaatgtgatagacaatgcatcgaaggagatgggtttgagacccatcgaagatgctgtcctgcagagcagtcttgaaagaactcacctttgtaagcttgactattggtcgcagtctatggagattttgggtgaatcttctaggaagcttactaaagacctaggaatgcctgcgaaaagtttcgaccgagcagccggtctttccgccacctcgggagagactggaggaagggggaacagataccccgaagaaatcgagcatgagaagaagggcgtgggaaagatcgtgcatacgtag

SEQ ID NO: 15727 - DNA, 2682 bp, Oryza sativa
  Clone ID: TFbOSC900297j.C1.o4.gm
atggggaggacggcacagacctcgacgctgtcgattgtgctcccggctccctcctctccgactatgctgccccactactccatcccgctcaccggcgtgcaccggcgatcgggagagcaggtctccggaaccattgccttcgacgtcctgcaccgggagaaggcggcaataagcgttcttggcgatcgtatggtcgaggtgtatatgcatatgaccgacgctaaggagttgtgggatgcactgaatactaaattcggtgctactgatgctagcaatgatctgtatatcatggagcagtttcatgactacaagatggctgacaaccgttctgtagtcgaacaggctcatgagatacaaaccatggctaaggaactcgaactccttaaatgtgtcttacccgacaaatttatggccggtgccaatgttgtgcacaaggcccagaacaagagtaaggggaaatacaaagctcaacagaccaccaacttcaagaagcagaagaagaacaacatcaatcctaatcaggatgagaggacttgctttgtgtgtgggcaacctggtcatctggctaggaagtgtccacaacgcaaggggatgaaggcacctacaaggcagacttctaagtctgctaatgtgaccattggcaatactagagatggaagcaggtatggtaataatactggagatggaagcaagtatggtaatttacctactgtcgcacggggttccaccgtcctaatggggaatgggtcacatgcttctattcatggtgttgacatggtagatctgaagtttacttcgggaaagatcgtgcagctgaagaacatgcagcatgtcccttctatcgacatgaatcttgatacacatagtagttcgagccaaccctctaaagtaattcccagttcaatcacaccaccagaacaaactgaacatacacatgaacatgtcactgaggaggatgtcagtgaagctcctcgaaggagtaagagacaaaggacggctaagtcctttggtgatgatttcaccatgtacctcgtggatgacactcctaagtcaatttcagaagcatatgcatctcctgatgtagactactggaaggaggctgtccatagtgaaatggattccattatcgctaacgggacttgggaggtgacagagcgaccctgtgggtgtaaacctgtggggtgcaagtgggtgttcaagaagaagcttaggcctgacgtcaatgaggcagataaatgtgtgtactatcgccatggtgggggtgagggagttattctgtgcttgtatgttgatgacatactgatatttgggacaaaccttgaggtgataaatgagtctcattatgtggagaagatcttgaatcgctttggctacattgatagtaagccttctccaacaccttatgatcctagcttgttgcttcgcaagaacaaaagaattgctaagaatcaactggaatactcccaaatcattggctcgctgatgtacctggctagtgcaactaggcctgatatctcctttgctatgagcaagttgagccggtttacctctaatccgggagatgatcactggcgtgcgcttgagcgagtaatgcgctatctgaaaggtactatgaaattggggcttcactataatgggtatcctgcggtactggagggttatagtgattctaactggatctctgatgtggatgagatcaaagccactagtggatatgtcttcacactaggtggtggtgctgtttcgtggaggttttgcaaacagaccattttgacgaggtcaaccatggaagcagaactgacggcactggatattgctactgttgaggctgaatggctgcgtgatctattaatggatctgcctattgttgaaaaaccggtgccggctatccttatgaactatgacaatcaaacgggcaggcggtgcgcgtgcacgatgtacgcgtcgaatgactactctatcccgctcgccggcgtgcaccggcgattgggagagcaggtctccggaatctctgccttcgacatcctgcaccaggagaaggcggcaataaggtttttgggaagcgcttcgcgcgactgctccctgttcgtccgcgatggctcaccttcctctccgctcgcgtgcttcgcgccttcgtcgacgctcgcaaccgcgagtagttcctgccgagcaaccggtctttccgccacctcgggtcacaagcaaaaggaggggagttcattcccggtgcctcccatgcccatcatctggaaacgaacaccggtgcaggagatcatgtgtgcatatcgtgtagcagcgccggtgagcggcgaggatgaggcggcgccggcgagtagcgagaggacggggagaaggcaaggcggccatggtatctccttccccgtcgtcaatgagctcttccgccatatcctcgcccctcctcgaccgtcctcgccggcggcggccgcggccgcgcccgctccccgcacccctctgctactgacgatgagagaggaggacggaaagagtgaagggagtggcatgattttaattttagaaattttcagtggtacccagccgataacacaaatagtagtgctgatgagcatggccgcgcggaactctaacgagccttacgatcttgttgcgaagaagtcccctctcgttgttctgctgcttacagtcgttggtgtccgagagtag

SEQ ID NO: 15728 - DNA, 1152 bp, Oryza sativa
  Clone ID: TFbOSC900312j.C1.o12.fg
atggctgacaaccgttctgtagtcgaacatgctcatgagatacaaaccatggctaaggaactcgaactccttaagtgtgtcttacccgacaaatttgtggccgagtgcattattgcaaaactacctccatcttggagaggtttcggtactgcactcaaacacaagagacaggaatactccgttgaggggttgatagcatctcttgatgttgaggagaaagctcgggaaaaagatgccgcgtctaagggcgatggtggacagtccactgccaatgttgtgcacaaggcccagaacaagagtaaggggaaatacaaagctcagcagaccaccaacttcaagaagaagaagaacaacaacaatcctaatcaggatgagaggacttgctttgtgtgtggtcaacctggtcatctggccaggaagtgtccacaacgcaaggggatgaaggcacctgcagggcagacctctaagtctgctaatgtgaccattggcaacactggagatggaagcgggtatggtaatttatctactgttttttcagttaatcagtctactaattggtgggttgatacagggggcaatgtcgcgcggggttccaccgtcctaatggggaatgggtcatatgcttctattcatggtgttggcacggtaggtcgagccgaaccaactaactgctacagccaaaaatgcaagggcaatttcacattacgaaaatgcagcctccgcctagccgccgaggatgagatccatgccctcctcgccatcatggagctcggcgcattccttcactcactcctcctccgcccggctgccagggatgagatcaatgccttcatgtcggcatggagttcggcgcgctcctccgcttactcggcccctgtctggcaaagcccacttctaataccatcgagttcgacgtgggttccgtcgagtttgatcgacgtgctcgcctccatactcacagaactcatcgtcgggccttgctgccccatcatcaccctcgaccaggcggaggtcaccgaggccttcagggcctttgactgcaagggcaacggcttcatctctgccattgagctcacacgctccatagctgacacggcgacaccgacagcctcatcatccttttatttgactgtgggtcccatcacccactga

SEQ ID NO: 15729 - DNA, 3249 bp, Oryza sativa
  Clone ID: TFbOSC900381j.C1.o18.fg
atggctggttttgccgatgcactgaggccggataaattcaccggtgtgcactttaagagatgcagaagcaattcgaggaagccactctttgtgggatgcattcttagcgttcttgacgatcgtctggtcgaggtgtatatgcatatgaccgacgctaaggagttgtgggatgcactgaatactaaattcggtgctactgatgctagcaatgatctgtatatcatggagcagtttcatgactacaagatggctgacaaccgttctgtagttgaacaggctcatgagatacaaaccatggctaaggaacttgaactccttaagtgtgtcttacccgacaaatttgtggctgggtgcattattgcgaaactacctccatcatggagaagtttcgcgtctcttgatgttgaggagaaagctcgggaaaaagacgccgcgtctaagggcgatggtgggcagtctagtgccaatgttgtgcataaggcccagaacaagagcaaggggaaatacaaagctcaacagaccaccaacttcaagaagcagaagaagaacaacaatcctaaccaggatgagaggacttgctttgtgtgtgggcaacctggtcatctggctaggaagtgtccacagtgcaaggggatgaaggcacctgcagggcagacttctaagtctgctaatgtgaccattggcaacactggagatgggagcgggtatggtaatttacctactgttttttcagttaatcagtctactaattggtgggttgatactggggccaatgtcgcacggggttccaccgtcctaatggggaatgggtcacatgcttctgttcatggtgttggcacggtagatctgaagtttacttcgggaaagatcgtgcagctgaagaacgtgcagcatgtcccttctatcgacaggaatcttgttagtggctcccgtctaactagagacaaatttaagttggtttttgagtctaataaagtagtcgtgtctaaacatggatattttaatggtaaaggttatgagtgtggaggcctgttccgcttttccctttctgatttctgcaataagtctgtgaaccatatttgtggcagtgtggatgatgaggctaatgtttggcactcacgtttatgtcatattaattttggcttgatgtctcggctttccagcatgtgtttaattcctaagttttccattgtcaaaggttctaagtgccataggtgtgtgcaatcgaagcaacctcgcaagcctcacaaggctgccgaggagagaaacttggcaccaatagaactcctacattcagatctttgtgaaatgaatggggtgttgacgaagggtgaaaaacgatatttcatgacgttgattgatgatgctactagattttgctatgtgtacttgttgaaaacgaaagacgaggctctagactattttaaaatttataaggcagaagttgaaaatcaacttgacagaaagataaaaaggcttaggtctgatcgtggtggagagtttttctcgaatgagtttgacttattttgtgaggaacatggcatcatacatgagaggacgcctccctattctcccgagtctaatgggattgctgaaaagaagaaccgcacactgactgacttggtgaatgccatgttggacaccgcgggactacctaaggcatggtggagggaggcattgttgacctcaaatcatgtgttaaacagagttcctaacagaaataaggacaaaacaccatatgagatatggattgggagaaaaccatcactttcttatttgcgtacatgggggtgcttggcgaaagtcaatgtactaataacgaagaagtgcaaacttggacctaagattgtggactgtgtctttctgggatatgctcatcatagcattgcctatagatttttaatagttaaatccgaggtaccggacatgcatgttggtacaattatggagtctcgtgatgctaccttctttgagagctttttcccaatgaaggatacacatagtggttcgaggcaaccctctgaaataattcccagttcaatcacaccaccagaacaaactgaacatacacatgaacatgtctctgaggaggatgtcagtgaagctcctcgaaggagtaagagacaaaggacggctaagtcatttggtgatgatttcactgtgtacctcgtggatgacactcctaagtcaatttcagaagcatatgcatctcctgatgcagactactcgaaggaggctgtccatagtgaaatggattccattatcgctaacgggacttgggaggtgacagagcgaccctataggtgtaaacctgtggggtgcaagtgggtgttcaagaagaagcttaggcttgacggtactattgaaaagtataaggctcggcttgttgctaagggctatactcaaaaagaaggcgaagatttctttgacacttactcacctgttgctagattgaccacaattcgtgtgctactttccctagcagcctcacatggtcttctcgttcatcaaatggacttctcgttcatcaaatggacgttaagacagcttttcttaatggagagctggatgaggagatctatatggatcaatctgatgggctttgcagtcaatgaggcagataaatgtgtgtactatcgccatggtgggggtgagggagttattttgtgcttgtatgttgacgacatactgatatttggaacaaaccttgaggtgataaatgaggttaaatcattcttgtctcaaaattttgatatgaaggatttgggagtagctgatgttatcttaaacattaagctaattagagaacttgggaggaatgtgctggtccacgtgcgcccacgtcgatcggctgggagctccccacagaacacgttgttcgcgagtgcgagaccttgcaacgacgtcatgttgaagaaactcggcgggatctctccggtgaggctgttctgcgacaaggctaacatgcggagcgccgggaggtgtgacaagccgtcggggatggaacttcccagaaggttctggtcgaactcgagctgcacgatcttcgtgaggttcgccagcgatggcgggaagtggccggagagcgagttgtggctgagctggagcaccgtgagattcggcaacgcgtcaagccaccgtggaatgccgccgacgatcgaggttgttgtttttgaggtacgcgacgtcgagggcggtgcaattgtggagcgcgtcaggtatctcgccggcgaacgcgttgtcgcatag

SEQ ID NO: 15730 - DNA, 3906 bp, Oryza sativa
  Clone ID: TFbOSC900389j.C1.o9.np
atggctggttttgccgatgcactgaggccggataaattcaccggtgtgcactttaagagatggcagatcagggtcactctgtggctgacggctatgaaatgcttctgggtgagtactggcaaacctgaaggaattcttactgttgatcagcagaagcaattcgaggaagccactactctctttgtgggatgcattcttagcgttcttggcgatcgtctggtcgaggtgtatatgcatatgaccgacgctaaggagttgtgggatgcactgaatactaaattcggtgctactaatgctagcaatgatctgtatattatggagcagtttcatgactacaagatggctgacaaccgttctgtagtcgaagaggctcatgagatacaaaccatagctaaggaactcgaactccttaagtgtgtcttacccgacaaatttgtggccgggtgcattattgcgaaactacctccatcatggagaagtttcagtactgcacttaaacacaagagacaggaatactccgttgaggggttgatagcgtctcttgatgttgaggagaaagctcgggaaaaagacgccgcgtctaagggcgatggtgggcagtccagtgccaatgttgtgcacaaggcccagaacaagagcaaggggaaatacaaagctcaacagaccaccaacttcaagaagtagaagaagaacaatatcaatcctaaccaggatgagaggacttgctttgtgtgtgggcaacctggtcatctggctaggaagtgtccacagcgcaacgggatgaaggcacctgtagggcagacttctaagtctgctaatgtgaccattggcaatactggagatggaagcgggtatggtaatttacctactgttttttcagttaatcagtctactaattggtgggttgatactggggccaatgtacatgtttgtgttgacatctcattgttttcttcttatcaggtcgcacggggttccaccgtcataatggggaatgggtcacatgcttctgttcgtggtgttggcatggtagatatgaagtttacttcgggaaagatcgtgcagctgaagaacgtgcagcatgtcccttctatcgacaggaatcttgttagtggctcccgtctgactagagacggatttaagttgggttttgagtctaataaagtagtcgtgtctaaacatggatattttattgataaaggttatgagtgcggaggcctgttccgcttttccctttctgatttctgcaatatgtctgtgaaccatatttgtggcagtgtggatgatgaggctaatgtttggcactcacgtttatgtcatattaattttggcttgatgtttcggctttccagcatgtgtttaattcctaagttttccattgtcaaaggttctaagtgccatagttgtgtgcaatcgaagcaacctcgcaagcctcacaaggctgtcgaggagagaaacttggcaccactagaactcctacattcagatctttgtgaaatgaatggggtgttgacgaagggtggaaaacgatatttcatggcattgattgatgatgctactagattttgctatgtgtacttgttgaaaacgaaagacgaggctctagactattttaaaatttataaggcagaagttgaaaatcaacttgacagaaagataaaaaggcttaggtctaatcgtggtggagagtttttctcaaacgagtttgacttattctgtgaggaacatggcatcatacatgagaggacgccttcctattctcccgagtctaatgggattgctgaaaggaagaatcgcacactgactgacttggtgaatgccatgttggacaccgcgggacaacctaaggcatggtgggggaggcattgttgacctcgaatcatgtgttaaacagagttcctaacagaaataaggacaaaacaccatatgagatatggattgggagaaaaccatcactttcttatttgcgcacatgggggtgcttggcgaaagtcaatgtaccaataacgaagaagcacaaacttggacctaagactgtggactgtgtctttctgggatatgctcatcacagcattgcctacagatttttaatagttaaatccgaggtacctgacatgcatgttggtacaattatggagtctcgtgatgctaccttctttgagagctttttcccaatgaaggatacacatagtagttcgagttaaccctctgaagtaattcccagttcaatcacaccaccagaacaaactgaacatacacatgaacatgtcactgaggaggatgtcagtgaagctcctcgaaggagtaagagacaaaggacggctaagtcctttggtgatgatttcactgtgtacctcgtgaatgacactcctaagtcaatttcagaagcatatgcatctcctgatgcagactaatggaaggaggctgtccgtagtgaaatggattccattatcgctaacgggacttgggaggtgacagagcgaccctatgggtgtaaacctgtggggtgcaaatgggtgttcaagaagaagcttaggcctgacggtactattgaaaaaagtacaaggctcggcttgttgctaagggctatactcagaaagaaggcgaagatttctttgacacttactcacctgttgctagattgaccacaattcgtgtgctactttccctagcagcctcacatggtcttctcgttcatcaaatggacgttaagacagcttttttaatggagagctggatgaggagatctatatggatcaacctgatgggtttgtagttgaaggtcaagaaggcaaagtgtgcaaattgttgaagtctttgtatggtctgaaacaagctcctaagcaatggcatgagaaatttgacaaaacattgacatctgcaggctttgcagtcaatgaggcagataaatgtgtgtactatcgccatggtgggggtgagggagttattctgtgcttgtatgttgacgacatactgatatttgggacaaaccttgaggtgataaatgaggttaaatcattcttgtctcaaaattttgatatgaaggatttgggagtagctgatgttatcttaaacattaagctaattagaggtgagaatgggattacactcttgcagtcctattatgtggagaagatcttgaatcgctttggctatattgatagtaagccttctccaacaccttatgatcctagcttgttgctttgcaagaacaaaagaattgctaagaatcaactggaatactcccaaatcattggctcgctgatgtacctggctagtgcaactaggcctgatatctcctttgctgtgagcaagttgagccggtttacctctaatccgggagatgatcactggcgtgcgctcgagcgagtaatgcgctatctgaaaggtattatggaattggggcttcactatactgggtatcctgcggtactggagggttatagtgattctaactagatctctgatgtggatgagatcaaagccactagtggatatgtctttacactgggtggtggtgctgtttcgtgcaggtcttgcaaacagaccattttgatgaggtcaaccatggaagcagaactgacagcactggatactactactgttgaggcagaatggctgcgtgatctattaatggatctgcctattgttgaaaaaccggtgccggctatccttatgaactgtgacaatcaaacggtaattgtcaaagtgaatagttctaaggataatatgaaatcgtctagacatgtgaaaagacgattgaagtctgtcaggaaattgagaaactccggagttataacgttgaattacatccaaacagctagaaacctagcagatcccttcacgaaaggactatcacgaaatgtgatagataatgcattgaaggagatgggtttgagacccatg

SEQ ID NO: 15731 - DNA, 1965 bp, Oryza sativa
  Clone ID: TFbOSC900404j.C1.o25.gm
atggggaggacggcacagacctcgacgctgtcgattgtgctcccggctccctcctctccgactatgctgccccactactccatcccgctcaccggcgtgcaccggcgatcgggagagcaggtctccggaaccattgccttcgacgtcctgcaccgggagaaggcggcaataagcgttcttggcgatcgtatggtcgaggtgtatatgcatatgaccgacgctaaggagttgtgggatgcactgaatactaaattcggtgctactgatgctagcaatgatctgtatatcatggagcagtttcatgactacaagatggctgacaaccgttctgtagtcgaacaggctcatgagatacaaaccatggctaaggaactcgaactccttaaatgtgtcttacccgacaaatttatggccggtgccaatgttgtgcacaaggcccagaacaagagtaaggggaaatacaaagctcaacagaccaccaacttcaagaagcagaagaagaacaacatcaatcctaatcaggatgagaggacttgctttgtgtgtgggcaacctggtcatctggctaggaagtgtccacaacgcaaggggatgaaggcacctacaaggcagacttctaagtctgctaatgtgaccattggcaatactagagatggaagcaggtatggtaataatactggagatggaagcaagtatggtaatttacctactgtcgcacggggttccaccgtcctaatggggaatgggtcacatgcttctattcatggtgttgacatggtagatctgaagtttacttcgggaaagatcgtgcagctgaagaacatgcagcatgtcccttctatcgacatgaatcttgatacacatagtagttcgagccaaccctctaaagtaattcccagttcaatcacaccaccagaacaaactgaacatacacatgaacatgtcactgaggaggatgtcagtgaagctcctcgaaggagtaagagacaaaggacggctaagtcctttggtgatgatttcaccatgtacctcgtggatgacactcctaagtcaatttcagaagcatatgcatctcctgatgtagactactggaaggaggctgtccatagtgaaatggattccattatcgctaacgggacttgggaggtgacagagcgaccctgtgggtgtaaacctgtggggtgcaagtgggtgttcaagaagaagcttaggcctgacgtcaatgaggcagataaatgtgtgtactatcgccatggtgggggtgagggagttattctgtgcttgtatgttgatgacatactgatatttgggacaaaccttgaggtgataaatgagtctcattatgtggagaagatcttgaatcgctttggctacattgatagtaagccttctccaacaccttatgatcctagcttgttgcttcgcaagaacaaaagaattgctaagaatcaactggaatactcccaaatcattggctcgctgatgtacctggctagtgcaactaggcctgatatctcctttgctatgagcaagttgagccggtttacctctaatccgggagatgatcactggcgtgcgcttgagcgagtaatgcgctatctgaaaggtactatgaaattggggcttcactataatgggtatcctgcggtactggagggttatagtgattctaactggatctctgatgtggatgagatcaaagccactagtggatatgtcttcacactaggtggtggtgctgtttcgtggaggttttgcaaacagaccattttgacgaggtcaaccatggaagcagaactgacggcactggatattgctactgttgaggctgaatggctgcgtgatctattaatggatctgcctattgttgaaaaaccggtgccggctatccttatgaactatgacaatcaaacggaaattgagaaactccggagttataacgttggattacatccaaacagctag

SEQ ID NO: 15732 - DNA, 645 bp, Oryza sativa
  Clone ID: TFbOSC16941j.C1.o1.fg
atggccaaccaacatgcccgttctaatggagagaagcatcaaggcaacacaaatcctcgccaagattacagtttcagcctaactccagtgccaggacagaggaatcaaaatgagaaaagaaaatgccgagtccggaaagatatctgttgcttcagttgtcaagaaatgggtcatttcgctgacaagtgcccaaaaccgagaaacatggctgccagcacgtcagtccacgcaactccccgcaatcagaagcttgctcctcagcgaattgtcatccatgcatcccgaagcagtcctatagcacgcgttgcaacagctccaactccaacgagtgcactaccacaaggtgtcaatgcaccatttcagtcccatccacctgctgacgagacagaggccagtatctgcgttgtacctttggatgttccaatacagcagctgataaatcaagtacaagatgaagaacccgagtgtaagaaagttattgtttgttacaactgtagtgaagaagggcattactcgagggactgtcctcaaccaaggcaaaatcggcccccacattttcgccaatttacaggaagcaaacatgccaatcgccaagtggtcactggagcaaatgcagtacctgttaagcctagtgctagtcaatag

SEQ ID NO: 15733 - DNA, 403 bp, Oryza sativa
  Clone ID: TFbOSC423269j.C1.o2.gp
tactaataagatagaactgatcacccgctgctcggtgattcagtgagggagggggagcaaaacgcatcatgggagggagctggatctgacgccgcgagcagcgcctagtaggtcttgctggggcactcgcgagcgatgtggccggtctcgccgcagttgtagcacccgccgccgccgccgccaccaccaccgccgcggtagccgccgccaccaccaccgtagccaccaccgccgcctcctccctgggagcagtccctggccatgtggccctcctcgccgcacttgtagcacgcgcggctgcctccgccgccgccgccgccgtactccgacgccatctcgacctcgccctcgccctctcgccgccgccgccgccgcaacccaaaaccctagaaaccctagatcg

SEQ ID NO: 15734 - DNA, 4705 bp, Oryza sativa
  Clone ID: TFbOSC900284j.C1.o10.np
atggctagccgcccccgccgtgcagctcgtgcgccagcccgctttggttttgaagaaggtagagttgagccagaagaaaatcatgagtcagctaatgagcagtctcaccacagcaaccgttcgcaccgtactgcttcccgcaacgcagaagttgagcaaccacgccgcagcaaccgctcgcatcacacagctccccgtaatgcagagatggaacagtctcaccgcactgctagtcacaattctggagaagaacgccttccttccccacctcatgtggaaaacaacatgcagcacttaatggcagttcagacacaaatcttgcaaggattagccgcagccgtagccggttttcagcataatgcgcatggaaatggccaccctcatatgagcaacaatagatccaagctgacagattttctgaggtctcgtccgccagagttctctcagaccgtcgagcccgtcgaggctgacgattggctgaaagatgttgatagaaaactcaacttagtgcaatgtactccggttgagaagacgctctacgcctctcaccagctaagaggacctgctgcagattggtgggagaattactgcaacgcacaccctgaacccactaacattgcttgggatgagtttgctacggctttccgtgcagctcatgtgcctgaaagcactattgacatgaagaaagaagaattcaacagacttaagcaaggcaacagcagtgtcaatgagaacctaagtatgttcaacaagttggctcggtacgcccctgaggaagtggacacagacaagaagaagatcaggaaattcttgaaagggatcgcagttggaatgagactccagttgcttgctcatgacttccccacttttcaacatatgatcaacaaggcacttctacttgaggatgccagaaaagaggctaccgaagaatacaagaaacgcaagtctaaccatcaggaaattcttcccgaggcgcgcctcgccctcgctacggacaacccatgcaataccaccagtcagtcactcaggctaaccgccagccaggctacgcccctcgtcctcagatgaaccgtccggcccctcagccacagcagcgtgcccctagtggcaatactgcgccaaacagtgttacctctttcaagtcaccacagggaccgtcagcagttcagtgtttccggtgcaaccagataggtcactatgccagacagtgccctcagaaccctaccaacaccaactcagggcatgctaatggcagcactgccagagctcctactccagcggcagctcagtctcgtcctagctctcaggcaagtggacaaggttcacgtgcatccaacaactttggtcgaggccgggtgaatcacattcaagctgaaaccgctcaggatgctccagacgttgtgatgggtatgttctctgtcaactccgtacccgcaatagttctgtttgattcaggagcttcccattctttcatatcacaagcttttgtgaaaagaaatggttggaaaacccaaaatttacgtgtaccaatgatagtacattcccctggaagaaatataagggcaactcaaatatgcccggaagttaaccttagaattgaggaagttgacttcctagccaaaccgatagtcctagactcgcaaagcttggacatcatcctagggatggattggttggctaagcacaaaggacagatagattgtgccgaaaagtccatcactttgcaaggacctggaggaaagcaagtccgctttacctctaacacccctaccgcaagtcggtctatcctaacctgtttacaagtcaccaccttggagtcggtgcccatagtctgtgaatatcccgacgtatttccggaagaattaacgagtatgccactagaccgagagattgagttcgccatagaactggcgccaggcactgcaccaattgcaaaaagaccctaccgaatggcagctaatgagttagcagaagttaaaagacaaatcgaagaattggagggtaaaggttatgtgcgacctagctcatccccttggggagccccagtgcttctggttaagaaaaaggatggctctgagagaatggtaatcgactatagagccctgaatgaagtaactataaagaacaagtacccgttgccacggattgatgatttattcgatcaacttaatggagcaagagttttctcaaaaattgacttgaggtcaggttaccaccaactgaaaatcagatctgaagatatcccgaagaccgctttctcaacgcgttatggtctatatgagttcacagtaatgtccttcggactcaccaatgctccagcattcttcatgaacttaatgaacaaaatctttatggaatacctggaccagtttgtcgtggtgttcatcgatgacatcctgatatactccaagaacgaggaagacatgccgaacacctgaggctgataatggaaaagctcagagatcatcaactattcgctaaattctcgaaatgcgaattctggttagaccgagtagcatttcttggacacgtgatctcctccaacggtgtcgaagtagatcccagcaaagttgaggctgtacttgcttggaacccgcccaagaatgtgttagagattcgcagcttccttggcttagctggatattatcgaagattcattgaaggattctctaagctagccagacctatgaccgagctgttaaagaaggaaaagaaatttcaatggtctgcagcctgtgaagacagctttcaagaaatgaagaaaaggttgaccactgccccagttctcaccttgccagatattcgaaaagatttcgagatcttctgtgatgcatcaagacaaggcttaggatgtgtcctaatgcaagaacgaaaggttgtggcctatgcatccaggcagctcaggcctcatgaagtcaattatcccacccacgatctcgagttggcagccgtggttcatgctcttaagatctggaggcactatctaatcgggaacagatgtgaagtatacaccgatcacaaaagtcttaagtacatcttcactcagaccgagttaaatatgaggcagagaagatggctggaactaatcaaggattacgatcttggaattcattaccaccccggtaaagctaacgtggtcgctgatgcgctaagtcgcaaggcctattgcaatatagctcaaatacggcctgaccaagatcgcctgtgcagagaattggagaagttaaggctgaccgtggtacagtcaggtgtccctgccagcttgacagtacagcctaccctagaatcgcaaatccgggaagctcagaaagacgacgaagggataaaagagttaataaaaagaatacaggagaagaaagacaccaatttctccatagacaatcaaggcacagtttggtgcggtccacgcatctgtgtaccggccaagaaggagttaagagatctcatcctaaaggaagctcatcagtccgcctactccattcatccaggaagtacgaagatgtaccaagatatcaaggcatacttctggtgggctggaatgaagcgagacgtcgcagaatacgtagccttgtgtgacatttgccaaagagtcaaggcagagcatcagaggccagctggtctgctgcaacccctaccgattcccgagtggaaatgggaagagatcggaatggatttcatcaccggtttgccaagaacccctagcaggtacgactccatctgggtaatcgtggaccgactcacaaaatcagctcatttcgtgccagtgaaaaccacctttgatggaaagaaactagcagaactctacatgacccatgtcgtatgtagatttggctgtcccaagaaaattgtgtcagaccgaggcactcagttcacctcaaggttctggaaacagttgcatgaagccctcggaaccgatctaaattttagtacggcctaccatccgcagaccgatggtcagacagaaagggtaaaccaaatcctagaagacatgctacgtgcgtgtgccctggatttcgaaggcacttgggatcgttgtttgccgtatgcggagttctcatacaacaacagctatcaggccagcattcagatgtcgccgaatgaggcaatgttcggaagaaagtgccgcactcccttgtgctggaatgaggtgggcgaagcactggtattcggtcctgacatactcaagtcagcagaagaacaagttaagctgatccgagaacgtttaaagacagcgcagaaccgccagaagaattacgctgacaatcggaggcgtgaccttgagttcgaaaaaggagatcatgtgtacctgcgggtatcacccctccatggtatgaggaggtttgggatgtccggcaagttagcaccccgctacatcggcccctacctcataaccgccagacatggcgaagtggcttatcagcttgagttacctgaaggtctcgcagatgtgcacaacgtgttccacgtatcccagctaaagaaatgtcttcgagttccaaaagagcaagtccccctgggtaatatcgaactggaaaagaatctgacctacaaggaaagaccgatcaaggttcttgaagaggcagaacgtcagactcgaaggaagaccatcaagttctacaaagtccaatggagcaatcattctgaagatgaggcaacttgggagcgagaagatcttctccgcgccgagttcccggagctgctccct

SEQ ID NO: 15735 - DNA, 4272 bp, Oryza sativa
  Clone ID: TFbOSC14746j.C1.o4.fg
atgaagaatggaatcgatgagattttcagagataccaagaaagatgctattgtgatgtcttcaactaagtctgaattacaaaacgaacgtatttttgtgcctattgttttggacactaatattttgcaggcatctgagaataaccaaggtaatgagaaagagaagaaatacgaagtggaaaaagatctatctatagctccatgcatgctggaagaatgttccattgaccaagcacctataatttctaaagaggagaaaagagatactgataatggtgttataactactcagggtatgggtggcgctcaaaatcagcgataccaacaaggtaacaataatcgcgtgcccgatgatccttatgctaaggttaagtttaaaataccatctttttcgggttattatgatgctgagaaatactctgattgggagatgatagtagagcaaaagtttagtgcccaccttgtgcctgaccaacatagagttcgacaagccagtagtgagttcaaagattttgctatcatgtggtgggctaggttagctgatgatggaattttacctactacttggaaagaacttaaggtagctatgcgtgatatatttgttcctccatcttatcttagagatttaagcaagaaactgatgcgtttagagcaaagggataaatctgtacaggattactatggtgagctacaaaagggattgatgcgatgtagcatagtgaagggaactgaggattccatttgtcgcttttacatgggattgaggcgcaagattcaggacatagtagataataaggaatttaacactgtcaaccagttgtttcagtttgctatgcttgcagtgaaggaattgcaggggcgtgatcaacaggtcaagaataaggcgagcacatacataccgcgagcaaagccatctttggggcttcccaagcccatctctttctggacgaccccactagcgagcaagcgaccagttgcgtccggagtttctgcagcgccaaaaccaccttccccacgacctgcagtttcaggtaaaggttcttcgcaggtatccaccaagagtgcctcatctatcgcttcgacgggacgcacgtccagaattcggtgccaccactgccatggatttggccatgtgcagaagatttgccctagtcaacgggcatacgttgctacggtagattgctacatctgcacctccgacgttgaagatgttgaggtggaagagaagaaagacggagagcaaaaagacttatccatagctccatgcatgcttgaggaatgtctaattgaccaagcgcctataatttctgaagatgagaaaaaaggtaatgataatggtgctacaactaatcaagggattagccttctcgacgaggtcaacctggtttcggcacggttgataaccagaggagacgtggtgctgcgattgcggggctcagtagcgtgttcgttcagaagccagatcgagttgtgtcgcgactccgcccaaatcgattgtttatcaatacctattggaagatcgggacctaacatcctcatcatacggggtaaacgaagtgaaccacctctctctcctgaggaagaggttaagtttgaggcttcggattgcctgttccgtggagcattgatcagtgtactcgctgacaacatagtggacgtgtatatgcagatgccttcaaggaaggacatgtgggatgcacttgaggccaagttcggagtttccgacgctggtagtgagctgtatgccatggagcagttctatgactacaagatggtcgatgaccgttctatagtagaacaagctcatgagattcagatgctggctaaggaacttgagaacaacaactgtgagttgccggacaagtttgtggcggatggcattattgccaaattgctaccttcttggtcggactttgccacttctctaaagcacaagagacaagagttcagtgtttctgatctcattggctctttgggtgttgaagagaaggcgagggcaaaggacaaccggggcaaaaaggttgagggaggttctagtgccaatatgttacagaagaagaaccctcatgcatcccacaacaacaagaaagtcaaggctgatgtgaaacccaaggctacaaccaattttaagaagaaaggcaagggaaaggcaaagggagactgctttgtgtgtggcaagtctgggcattgggccaaggactgtcctgagcgcaaagacaggaagtctgccaacatggtcattagtgagggcagaggaacatcggggtacggtagggagaggtttctccttgttgatgggaaatgggtcacttgtggctgttcacggtgttggatgaagcattgcgttacttttaagacctataaagctgaggtagaaaaccaacttgaaaggaaaatcaaacggttgaggtctgatagaggtggggagtatttttccaatgagtttacatccttttgcgaagagtttggaattattcatgagatgacgcctccctattcaccccaatcaaatggggtggccgaaagaaagaaccgtactctaactgagatggtgaatgccatgttagacactgcagggctttccaaggaatggtggggtgaggcagttttgactgcgtgtcatgtcctgaataaaattccaatgaagcataaggaagtaacaccattcgaggaatgggaaaggaagaaattaaatctctcatacctacgaacatgggggtgtttggccaaggtaaatgtacctatagccaaaaagcataaacttggaccgaatactgttgattgtgtgttccttggttatgctattcacagtgtgggttatagattcttaatagtaaactatggagtacccgacatgcgtgttggtacaattattgagtccagagatgctacattctttgacaatgaatttgccatgaaaaatacacctagcacttctagtcaagaaactgtcataccccataagcactttgcaccgatagaacacaatgatcaaacgcctgagggaaatcctgaggaggacaacattgtagatactcgtaagagtaagcgacaaagggttgcaaaatcctttggagatgacaacattgtatacctcgtggatggcactccaagaaccatagaagaggcatattcatctcctgacgctgaccactggaaggaagcagtacgcagtgagatggactcgattatgtctaatggtacttgggaagtcgttgagcgtccatatgggtgcaagcctgtaggatgcaaatgggttttcaagaaaaagcttaggcctgatggtacaattgaaaagtacaaggcaaggcttgtggccaaaggttatacccaaaaggaaggcgaggattttttcgacacatactcaccagttgcccgcttgaccacgattcgagtactacttgctctggcagcctctcatggtcttctcgtccatcagatggatgttaagacagctttcctaaacggagagctggaggaggagatctatatggatcaaccagacgggtatgtactagaaggtcaggagagaatggtgtgtaaactgttgaaatccttgtatggccttaagcaagcacctaagcaatggcatgagaagtttgacaccacacttacatctgttggctttgttgtgaacgaagttgacaaatgtgtgtactatcgctatggtgggggagaaggagtgatcttgtgcttatatgtcgatgacatattgatctttgggactagcctcaatgtgattgaggaggtcaagtattttctgtccaagagttttgaaatgaatgatttgggagaggttgatgttatttttaacattaagctactaagaggagatgagggtgggattacacttgtgcaatcccaccaagtggacaagattttgagtcgctttggatatagtgtctacaagccagctcctactccttatgatcccagcgtgctattaaggaaaaaccgaagaatagcaagggatcaactgagatactctcaaatcattggttcattgatgtacttggctagtgcaacgaggcctgacatctcatttgttgtaagcaagctgagccggtttgtctcgaatccgggagatgatcattggcatgctctggaaagagtaatgtgctatcaaaagggcactatgggctatggaattcactataccgggtactcaaaagtactagaagggtatagtgactcaaacttgatatctgatgctgatgagataaaagccacaagtggatatgtgttcacacttggaggtggcgctgtttcctag

SEQ ID NO: 15736 - DNA, 2250 bp, Oryza sativa
  Clone ID: TFbOSC31101j.C1.o1.np
tggcgcagctctgtactgtagcagggattggggaaaatggcgagagttccggcggggaagacgaagtgacgtgggcgatcttaagctgtcgcagctgcgcctccactgcgccctagcgccgccgccgccgcggatttcgccgcatcccgccgtccccgcgcgcattaaagacggggaaaatcacccccgtgattccctctcccgtttccccctcttttccctctctctctccctcggattcgttcgaatcgcgcccgcaatcctcgccggcgcaatcaatggcggccgagatctccgcgcccgtttcctccctctccggccgcgctctccccctctcggcgctatataatcgttccccgagctccgctcttccgtttccgccgctcgccgctcgctctcgccttcggattcgtgctcgcgacgttctcctctctctccgccgtcgccgccgaccttcggttagccgccgtcgtcgctccggtcttcctcccgactcggcgccacctccatcggcttcgccgcgttgtcgccgaccccgtccgccccttcgcttcgcccgccgaccgccggagctccgtctccttcgtcgtcccgaaccgcgccgccgcgttcctccgctccggccgtcgtttccgccgtcctcgttgtcccggggtgagccgtggaccgtccctctcgcttccctctcctctccgctctctcgggcgccgctccgccgcgccggtggtcgccggcggtgaccatcggggcgcgggcgcgcgtctcccgtcggtcgagccggcgaggccgccttcggccgcctcccgcggctgccaggtggggcccggccgtcagccgcccgcgcccgcgggtgcggctgacgcgtgggacccacggcgccggccgccgccagccgcgtgcacccggtccaccgtggaccgagaggctgacgcgtgggccccactcccgtggacccggacaaatgaaggctacacgagctgcggcccgatggctgacaatgagaaaggcaataaggtcagaagtcaggacattggtacctcaagctcccgagtgaatgaagcaccagacaacagttgtgtgacactggtccaacacctaattaaccagaaccgattgcttatagagatactacagcagcatcagacgccaattctgaacctgagtcagatacaacctcaagtgcagttggaggcagtccaatcactcacaccacaagtcagcatgccgccagcatcccaaaagacccatggtggcgtgccacatgttgactcaaaagaagcaagtatcatttgttttatgtgtgatgagcaagggcactatgcaaggaactgtccctagcagaaaagaaaaacaccaatgcgaaccgaagatgaagtccgtaagatgatcattaccagcacagaatggcctccaccaggaatgaccaaacgtcagagaagaaataccttccgaggtgcaccacagttgacagagcatcttttagctaatggaggtagagtgtctgatagtgaagattcagatcaagtctcctcagatgatgaagatgagatggaacgtaaggcatgctctcgttgtggagaaatcggtcatgttgccagctcgtgtgccactacatgcgttcattgcgaggaagaccatccacccgataggtgtccaacgagcaggatcacttgtttcttttgtgaaggaactgatcatgtaccaaaagattgtcaattcagttttctgctgacgaagaagatggccaaccaacccgccagttccaacggagagaagcatcaaggcaacacaaatcctcgccaagattacagtttcagcctaactccagtgccaggacagaggaatcaaaatgagaaaagaaaatgccgagtccgggaagatatctgttgcttcaattgtcaaggaatgggtcattttgccgacaagtgccaaaaaccgagaaacatagctgccagcacgtcagtccacgcaactccctgcaatcagaagcttgctcctcagcgaattgtcatccatgcatcccgaagcagtcctatagcccgcgttgcaacagctccaactccagcgagtgcatcaccacaaggtgtcaatgcccaatttcagccccagccatcagttgacaagaccggcaaggatttccagccaccaattccaactccaagtcagaatgatcgtccccagacggatagctcagcaaagaagacgttgatttgctacaattgcaaagaaccagggcattactcgagggac

SEQ ID NO: 15737 - DNA, 1409 bp, Oryza sativa
  Clone ID: TFbOSC400445j.C1.o12.gp
actccgcctctgcagtagcttgcgcatgcctgatggcgtccgcagcctctcccttgctgccgaggaccatcacccacatgtaacgggagaggtcgtcgacgagcagcaggaagtaacgtcgtcctcctggtgtggccgctgtcactgggccacacaagtccccgtgcacgagctcgagccgctccttggctcggaagctcgtctgctggggaaaggggagccgccgctgcttcgtcaccacgcaaacgtcgcagagctgctccacgtggtccaggcacggcatgcctcgcaccatctccttagcactgagctgcttcagggcctcgaagtggaggtgcccgaagcgctcgtgccactgccacgcctcgtcgtcccgacgagcggcgaggcaaactggttgtgcgacctgcgcgctgaggatgtagagttgattagtgcctctggttaccttggcaagaaggcgacgacggcgatcccaaatcctcatgagtccgtcctcgaccaacacgcgtgagccgttctcatccagctgtcccacgctgatgatagaattcctcaacgcggggatgtagtagactccggtgagcagcctgtgctcaccggacttggcagtgaaggtgacggagccaacacccttgatctccacgccggaggcgtccccgaacttgacggagccttggacgctggagtcgaactcggtgaagaactcccgtcagccggtcatgtgatgggtggcgccggtgtcgaggtaccacccatcagccttgtcgttgctggagccgttgcagagggagacgagtaccttcggctcatcaaggtggaggaaagccgctgcggccggtgccgctggaggtagctcgatgcttgcatgagccaggagcagagccggctcttcctcctccacccgtgcgacgtgggcctggccacgtcgtggctgtcgacagtctttggcccaatggccaagcttgccacagttgcggcaggcgttgtctcgtgccggcttgtggttgccggtggcaacgccctgggcgcctctgcgggcgccaccctcggcacgtcttcgcgcccaccgtagctggacacctccccgcgccttgcgcggcttacggccgcctgtcggggaagatgactcccccttcctcccgtcaccctgagaggcctcccactgctcccgagtgagattgagcttcccgccgatggtgatgggccccgagagaggctgtggctcatcaccatcgacgaccttgaggcgacctaacgcctcctcgatcgacatcgtggagaggtccagcagagattcgatcgagcgagcgatctgcctgtacttctcagggacacagcggaagagcttctcgacagctctctcctcgtcgtaggtgtcgtcgccgtactgcaccattttctgcaag

SEQ ID NO: 15738 - DNA, 7767 bp, Oryza sativa
  Clone ID: TFbOSC400445j.C1.o19.fg
atggcggcgcctcccaattcaccgattgggtggtggcgcgaggtgagagcgcgcttgtggctgcacacggtggaagtggaagtcaactttcttgcacatccatttgtggtttactcccatttccctctgtttgaatctggctctcctcctagtttctctctgaaagcagccttgcatttgatcagcaagaagaaagatcaagggcctcttcttctaggagtgagctgcagttctgatcttactactagtcagattgcaaccaagaagctctactttgccaaaatgaaagattctgcctatgatgccgacgacgtcatggatgaatttgattacctgattctgaaggcaaatgctcagcagaagagcaagctaagtagcttggcctccagttctcttgccataggaaagcgtttggttggccaagacaagttcagatccaagttaaggagggtcctcaatagcctgattagagtaaaagaatgtgctgacatgctcatcaaagtgattggggctgaaaactctaattcatatatgcctcctcagccacttcaatggcgtgtcaccagctcaatttctcctggccaaattatcattggccgacaaaatgagcaggatgatctagtgcaccgacttctgagagaagctgatggaccagagccaagcagaggactaacaatatcaccaacaccatctataattaccatagttggcagtggtggcattgggaaaactgcattagctcagcttatttacaatgacagaagaatagtcagtggttttgatctgaggacatggatatatgtttcaaatatcttcaataaggtcaaaatcaccaaagagattttgaaatcaattgatagaaacagtgatataacaaatttcagttttaacatgctccaggaagatcttaagaacaagttaacagcaaagaagtttctacttgtgctagatgatgtgtggtatgatgaaaagattggtgagcttacaaatgctgatagatggagagaattgtttgctcctctatgctatggagctaaaggaagcaaaattcttgttactgctcgaacaaatattgtttcaaggattttgggttgcccagcaccattccatttggagggtctgaagggtgaagatagttggaacctcttcaggatctgcgcatttggcgctgaagatccaggaaattatccagaactagagtctatcggtgaatgtattgtccaaaagttgaatggctcagcattagtcataaaggttgttggtgcacatttgaatgctaacctcaacgttgaagagtggacacgagttatgaaaagtagttcatcaaacaaggaagacattatgcaaattttgcgtctgagctatgaatgcttgccaggtcacctccagcaatgttttactttttgcagcctgttccccaaaggctattctcttgagcctgacttgttggtgaatatgtggatagcccataaatttgttcatggtcatataggcacatatgaaagtatgagagaaactggtagaagttatttcaatgaactattatctagatcattttttcaggaacttcagtatggccatacaatacgttatgttatgcatgacctcatgaatgaccttgcttctcacatttccagagcagccccccggaggtgcgccatgtccgacgctcggtctcggcgtttggtcgcctcgagcacttggcgtcagcaggacgccgagctcgccgcagcagaagagcgcaggcgagcaacggctcagaccgctgcagcagcagcagcgagggtggccaaactggcggcagtggagttggcagcagccagggcggaggcggaggcggaggcggcggaagatgcggcacgtgcggcggaggtagaggttgagaccttgcgcagcagcatcaacggctccatcgccggcgacatcaccgccgacagggagcttgaggagttggcaagaggaagggcatgggagcgggcagagcggtgggcagcagcccacctccacggcggcggcggcggcccaagggaccgcgcgcccgccgacgggaacccagacgggcgctggcgtgccggcggcagcccggagcccgcacgcggccctcgcaggcagcgcggctctctctcccctgactggcgccatggtcaccacggcgtccagacggtggtcagggactttggtcccggcggtgggtggcctaccctcaccaaaaccaactacatcgagtgggccgcggtgatgaggtccggtacgggcgacgtcgactacgacgaggatcggcgggcactggatgccctcatcgctgcagtcccgcccgagatgcagttctcgctttcccagaagcggactgccaaggaggcctgggacgccatcgctgcggcacgcatcggcagcgaccgcgcccgcaagtccacactgcaggcactccgcaaggagtgggagaacctgcccttcaagccaggtgaggatgttgatgactttgctctccgtctcaacactctcttgcagaaaatggtgcagtacggcgacgacacctacgacgaggagagagctgtcgagaagctcttccgctgtgtccctgagaagtacaggcagatcgctcgctcgatcgaatctctgctggacctctccacgatgtcgatcgaggaggcgttaggtcgcctcaaggtcgtcgatggtgatgagccacagcctctctcggggcccatcaccatcggcgggaagctcaatctcactcgggagcagtgggaggcctctcagggtgacgggaggaagggggagtcatcttccccgacaggcggccgtaagccgcgcaaggcgcggggaggtgtccagctacggtgggcgcgaagacgtgccgagggtggcgcccgcagaggcgcccagggcgttgccaccggcaaccacaagccggcacgagacaacgcctgccgcaactgtggcaagcttggccattgggccaaagactgtcgacagccacgacgtggccaggcccacgtcgcacgggtggaggaggaagagccggctctgctcctggctcatgcaagcatcgagctacctccagcggcaccggccgcagcggctttcctccaccttgatgagccgaaggtactcgtctccctctgcaacggctccagcaacgacaaggctgatgggtgcgtccaaggctccgtcaagttcggggacgcctccggcgtggagatcaagggtgttggctccgtcaccttcactgccaagtccggtgagcacaggctgctcaccggagtctactacatccccgcgttgaggaattctatcatcagcgtgggacagctggatgagaacggctcacgcgtgttggtcgaggacggactcatgaggatttgggatcgccgtcgtcgccttcttgccaaggtaaccagaggcactaatcaactctacatcctcagcgcgcaggtcgcacaaccagtttgcctcgccgctcgtcgggacgacgaggcgtggcagtggcacgagcgcttcgggcacctccacttcgaggccctgaagcagctcagtgctaaggagatggtgcgaggcatgccgtgcctggaccacgtggagcagctctgcgacgtttgcgtggtgacgaagcagcggcggctcccctttccccagcagacgagcttccgagccaaggagcggctcgagctcgtgcacggggacttgtgtggcccagtgacagcggccacaccaggaggacgacgttacttcctgctgctcgtcgacgacctctcccgttacatgtgggtgatggtcctcggcagcaagggagaggctgcggacgccatcaggcatgcgcaagctactgcagaggcggagtgcgaccgcaagctgcgcagggggatgccggccatcttttggggggaggcggtggtgacggccgcctacatcctcaaccgctcgcctaccaaggccctcgatggcaggacaccgtacgaggcttggcatgggcgcaagccggcggtctcccacctatgggtcttcggctgcctcgcgttcgccaaggagcttggccacatcggcaagctcgacgacaggagcaccccaggggtgttcatcggctacgcggagggctcgaaggcctaccgcatcctcgacctggagacacagcgtgtgcgcactgcgcgcgacgttgtgttcgacgaagggcgagggtgggtatgggacaaggcggtggacgatggttcgactccgatgtacgacgacttcaccgtcgagtacgtccacttcgagggagctgggggagtaggcagctcttcttcatcgagcgtgtctaccccagcccccgaatctccaccgactccgacaccaacacaccctcgggccacgacttcgactacgacgagctcttcgtcgacaccaccccagccagtgactccacatgctccagcaccaacagtcactcctccaagcacgtctacttcgacgccagctcgtgttgagcgcagcccggtggagttcgctactccgctctcccacgacggggagcgcatcgcataccacgacggtgagcagctacggtaccgtacgatggaggatcttctcggcgaccagccggtgccgggactggtgcctcgcgacctagaggcgcagttgcaccttgcgtgcgacgacggtgagcctcggtcttttgcagaggccgagaaacacgcggcatggcgtgccgcgatgcagtcggagatggacgcggttcaggagaaccgcacctgggagcttgctgacctccctcgtggtcaccgcgcgatcacccttaagtgggtgttcaagctgaagagggatgaagccggagccatcgtcaagcacaaggctcgcttggtggcacgcggtttcgtgcagcaggaggggatcgactacgacgatgccttcgctcccgtggcacggatggagtccgtgcgactccttcatgcgctggctgctcaggaaggctggggcgtccatcacatggacgtcaagtcggcgtttctgaacggcgacttgaaggaggaggtctacgtgcaccagccgccgggatttgtgatccccggcaaggagggcaaggtgctacgcctgcacaaggccctctacggcttgcggcaggcaccgagggcgtggaatgccaagttggattccacgctcaaggggatgggcttcgagcaaagcccacacgaggcggccatctaccggcggggcaatggaggaaatgccttgctggtgggtgtctacgtcgacgacttggtgatcaccggcaccaaggatgcggaggacgactccgggatcacgcttcgacagaccgcctacgccaagcgcgtcgttgagctggctgggctcaccgattgcaacccagctctcactccgatggaggagagactgaagctgagccgcgacagcacggcggaggaggtggatgctacacagtaccggcgtcttgtggggagccttcgctacctcacccacacacggccggacttggccttctccgtcggctacgtcagtcggttcatgcagcgaccgacgacggagcaccagcaggctgtgaagaggatcatccgctacgttgcggggactctcgaccacggtctctactacccaaggtgtcctggcaaggcacacttcgtcggctgcgaggccgagtacatggcggcctccgccgcttcgacccaggcgctctggcttgctcgactgcttagtgatctcctcggcagagacactggaacggtggagctcagggtggatagcaagtccgctctggccctgacaaagaaccccgtttttcacgaacggagcaagcacatccgggtgaggtaccacttcatccgaagctacttggaagaagggagcatcaaggcgagctacatcaacaccaaggaccagcttgcggacttgctcaccaagcctcttgggaggatcaagcgacttgttacttttcctaagtgcttgggcaccttgagcagcattttgtgtattgatgttcatcgtatgtgcactgttgatttagctgccagcagccatatgccatgtcttcgagcggctggggaattctgtgttgataagagtaaagtgcagggactagaggtgctgaagcagatgaatgaacttcaggggtcgcttgctattacatctcttgagaatgtgaaaagcagggatgaggcaactgatgctcaactattcagaaagagtcaaatctttaaactgaaactgcaatggggttcttctaatgcttctagcaagtctgacaaagcgaatgatgtgttcgatgctttaagacctcactcgggccttgaggaattgattgttcagggatatccagggtgtgtgtccccatcttggttggagtcagagtggctctctagactgagacacattagcatttctgattgcaagtgttggaagttgcttccatctttaggccaaatacaatctctcaggacacttcgtattgctagactgaatgcagtggtttgtataggccccgagttttatgggactgctggctttccctcactggagattctggaaatgatagagttgccagaattggcagaatggtcttctgtggactgtttttttcctgctcttcttgaggtgtgcatcagaggatgccccaagctgaaacaattgccaccagttgttctcccacctgtaagaatgagtatatatgtatctaccgaagtttgcaggctgcgaaatcataatcgcctggagacatgttttactcaggaggtgagcttaagcacactcttggatatgttgcatcttcgtcgtctggaacctgtgaaatgtgtaaatatcatctttgaaggagcaaacactctggaagatggacttaaagatgtaacaacaaatctgccatcccttgaagagttggttatcaggggatgttctgatctgcagcatgcttttgcagctagtaaacagcgggaagaggatgggaatgtcttttcttcggcatctattcaatgtctcaaaatgattggctgcaacctgacagtggacatttttcttagtgtgtttcagaacattagtttcctttcattgtggataaacgattgcaacatcacttattcaactcctgaacgtgtgttggccatgccaaagtcagtgactggagtacttgagaagctgtgtattttaagctgtgatgggttgacagctttcatgggcctagaaacattcttaaggttaagcacaatagaaattgcaagttgccccaagttaacgtcagtgccagactttaggtgtcttccagccctccagaacttgatcataaagaattgccctgagctcaaggaactacctgaaaatggtaacctaacaacattaactgcactggttgtggaacactgcaacgcgctaatatcactgaggaacctgcgagacctttctttcctctcaaaactggtggtcagaaattgtatgaagttaatggctttgcctcagatgattagtttctcttccctcagagtcttgatcataaaaaactgccctgaagtagtttctttaccagaagatggtcttcctgtgtcccttaattgtttgtatttggctggatgccatccagtgctggaggaacagtttgaccagaaaaatggtagtgaatgggagaagtatgaagtgttgccgttttgtttctttgctgataaatcaatagaagatatcgaagagatagccaaagaagtacttatggcggatgatcttaccaggatttccattcagggcaatcgagttcatgcaactgattctgcagcaagctcgtccagtttcccttag

SEQ ID NO: 15739 - DNA, 3943 bp, Oryza sativa
  Clone ID: TFbOSC419088j.C1.o1.np
atgcgagtgaacctgcaggctcagggtctgtgggaagctgttgacaccggcgacgtgccctttcatgaagatcgtcaggctctttcggccatcctgcgagccgtgccggctgagatgctccggccgctcgcggagaaggacaatgccaaggacgcctgggatgcgctcaagtccatgcgagtgggcacggatcgcgtgagagaatcctgtgcgcagaagctacgccaagcgtttgagtccatgcaattcaagcccgacgaatcggtcgaggatttcagtcttcatcttcagtgggttgtcagcgacctccgtcttcttggtgacgacatcaccgaggaaaaaatcatgtgcaagtttctgcgtgttgtgccccgcaggtatcgtcagatggctctttcaattgaaaccttgattgacctcacaactctctccattgaggacctcactggccggcttctcaccgttgatgatcaccctgattccgacagtgaggacgcgggtcaggcactgttcggcaagaaggaggagcaggcgcgggccaacaaggggttaggccagtcctcatcccgtggcagcggtaccgggactggctcatcggagcggcgacaacgcggccgtggtgggtgcggtcgtgacggtgctggcggcaagcacaaacctggcgccaatcagggtggaggccgtgacgtgtccaaggacaagtgtcgctactgcggcgaattgggccattgggccaaagactgccgcaaggctaaacgcgaccgcgacaagcttgcgcatgcccatttgcttggggatgacgagcccacactgctgatggcccaggtgtgcgagctcgttcccactacggagcctgagcttatcaacggcgaggtgaatttgaataaggagcgcgcgcttgtctctctccgcgaagaaggggagccggtcgaccccgactggatcctggacatggccgcctccaaccacatgactgggcttgacaccaccatgcgtggtacggtcaagttcggcgacacctctgcggatcgagggacgcggcactatgctgttcgcctgcaagaacggtgactactgcgggcttattggtgtctacttcatccccaagcttcgcagcaacatggtcagcctcgggcagctcaacaaggtcgggtgcaagacggtgatcgaggatggcgctctaaccctgcgtgacccacggtggcgcttgttgtgccgtgttcgccgtgggagagagcgcctgtatgtgcttcaggtggagctggcccagctggtgtctctcgcagcaaggagctccgaagacgcgtggctctagcatgccaggtttgggcatctcaacttcgactccctgcgcacactctacgcccatggcttggcgcatgggttgccgaagctggagcgtgtcaggcaagtctgcgacgggtgtctcatcagcaagcagcgtcgagtgccgttccccacagcggcgacgttccgagccacgagtcggctcgaccttgttcatggcaacatctgcgttcccatctcgcctcccacgcacggtggtaaaaagtattttttgttgctgattgatgacatgtctcgctatatgtggctatttctgctgacatccaaaagtgaggctccggcaaccatcaagcggttcaaagcgggagtggaggtggagactgcctgcaagctgcgcgttctccgcactaatcgtgggggggagttcacctccattgagttcggcttgtattgcgcgaacgagggcgtggctcggcaactaacggcgccgtactcgcctcaacaaaatggcgtcatcaagcgccgcaaccaaacggttgtgtccatggcaagatgcatgatgaaggcgaagcacatgcccaggaagttctggggagaagcggtgaggaccgccgtcttcatcctcaaccggtcgcccacgaaagctgtccccaacaagaccccttacaaggcgtggcacggacgaacgcctgccgtgccattacttcaagacctttggctgcgtcgttcacatcaaggaggtgaagcctcatctcaagaagcttgaagaccgcagcaagatgatggtttttctcggctatgagccgggaaccaagggctaccgtgtctatgacccggatgccaaccgtgtcgtcatcacacgcgacgccgtctttgatgaagtaacgtcgtggccatggggggaacccgttgaacatggagaggcatccacagacgactcgttcaccgtctactatgaggtggcctcaagcatcgtggcggcaagtcggcctcctagcgtcgaggccatgtcacccacaccctccgcgcagctcgcaacgcctccagacacaccctctgtggaattcatgtcgctgccgaactcgatgctagatgtcgacgacgactagggcgcgccgcgtcgctaccggagcatggcaaacatcctcgacacgacagcgccagtggagcttgattagaatgagatttacctggcagctgcagaggagctggcgaacctctctgaagcagagcaggatgaacactggcgacaagcgatgcttgatgaaatcaaatccattgaggagaacaacacttggatactcactgagctcctgaccggcaagcgtccaattggcgtcaagcgggtgttcaagttgaaaaagaaggagactagcgctgtgatccggcacaaggcgcggctcgtggcaaagggctacgtccagcgtcatggaattgactttgatgaagtcttcgctccggttgcgcgaatggaatccgtgcgacttctcctcgccgtcgcagcttatctcgggtggactgtgcatcacatggacatcaaatcggcgttccttaacagagagctggaggaggaggtatacgtctcgcagccgccgggcttcattgacgacaagcatccaagtcaggtcttgcacctgaaccgagctctgtatggccttcgtcaagcccgacgaacctggaacgcgtagctggacactcgccttcatgaactaggcttcaagcggagcgccaccgagcacgcggtgtacacacgtggcgagggatccaagcggctaatcattggcgtcgatctcggattgctcagctactacctcaggatcgaggtgcgtcaaggcagtgacgacatcaccatcaactagtcagcatacgcacagaagctactcaagatcggtgggctggtggactgcaactcaacttgtgtccccatggagcctagactgaagctgatgaagaacagcgataggccggccatcgacgccactctgtatcgcagcctcgtgggtagcctgcgttaccttgtgcacacgtggcctgactttgcctttgccgtcggctctgtgagccgattcatggaatcgccacgcgatgatcatctgttggtggtgaagcacatcctgcggtatgtagctggtactcagaactttggatgttgtttggcaagatcaggggaaacgggaatttgtctgctgggtttttcagacagtgatttggggggagacattgatgatcggaagagcacctcaggggctttgttctttctcggctccagtccaattgcttggcaatctcagaagcagaaggtggtggccctttcctcttgtgaagcagaatacattgccgccacaggagcggcttgcctcggcatttggctagcgcgtttgctggctgaagtgctgggcactgaaccagagatggccatcctcaaggtcgacaacaagtcggtgatctcactgtgcaagaatcctgtgttccacgatagaagcaaacatatcgacactcgatatcacttatcaggcagtgcatagaggagaagaaagatgatgttgagttcatccccacggacgaacaggtggcggacattctgaccaagccactcgtgtgcatcaagttccaagaatttcgcaacaaggcgggcgtggtccagattgtcacttgg

SEQ ID NO: 15740 - DNA, 6255 bp, Oryza sativa
  Clone ID: TFbOSC12503j.C1.o1.fg
atgttggacttagggggaaagaatggggaaaatggaaatgaagatgaagcaagcagcaagggaactccaccacccaagggagctactataccttttgattacagcaaacttactattccctctcactacttcgtctccatgccttccgggcatactcctcaatttgatgggacatattatgacgcttggaagcacaaggtgaagttgcatctaatctctttgcatccaagtatttggaaagttgtttgtacaggtattgatataccccatgatgacatggagctcacttcggggcaagaacaattcatccaccgcaatgctcaagcttctaatgcaattctctccgccttgagtccggaggagttcaacaaggttgatggactagaggaggctaaggagatatgggatactttgcaattggctcatgagggatcacccgccgttcgtgaggccaagattgaattattggaaggaaggcttggaagatttgtgatggatgtcaaggagacaccacaagaaatgtatgataggatgatgattcttgtcaacaagattaaaggacttgggaagacttctgcgtgcatttggtccaagaaatcccactcttttttatcaatgatacgggaaaggaaacacttcaagagactcaccccaagtgacattcttggaagaattgtgtctcatgagatgcaagaagaggaagctcgtgaagtgagacaaatggtgaataatgccgccatgataaaaaatcaagaagttgctttgaaggcaaaacaagaagaagagtcaagttgtgaagaaagtgaagatgaagaaatggcttttattgtcaagagattcaagcactttcttcgcaagagtggctatgacaaagggaggaaggatgatgacaagggaaagaggcaatcaaagagagcgtgcttcaattgtggcgaatatggccacttcattgccgattgtcccaagtcaaatgaagctaaggctaagggaggcaagaagaagccggagcgtgctcatgtggcggaggcacacatggcggaagtgtggcactccggagatgaagaagatcccgaggtcaagcccaagcccaagtcaaaagacaaggttgaaggagaaggtggtgttgctaccgtcgccttcaagtcatcctcttcaagcaaggagtgtctcttcaacaacttgagtgatgatgacgacgactcctaccactactcttgcttcatggcccaaggccgcaagagctttagcaaacccgctatgcaacatttggctaagttaatgagagctttggatagtaaagaacaatcactcgaaaggcaagaagaattgcttattcttgagaagaaaagaaatcttgccttagaggagagcttagctaaagaatgtgctaaaaataaacaacttgctaatgagcttaatttggctaatggttctttagctagccttagggatgtcaatgaaactcttcaagaaaaatttgctaatttagacaaaagtcataaagatcttgaagttcaatttgacactctttggaatagcacctctcaaccaaatgtggtttctaattcttctaacccttttactagcaatggttgtgctaggtgttacgatattgatttgaactcttatgctactaatattgacgctatgcaagctcttaagaaagagaatgaaaggttgagcactttggtgaaatatggatgcatgaagacataccattcaaaagatgtcctttacaagaccatcaccgctcatcctaacaaggatggacacgagctcgggttttcgggtggaagtcctgtgcctaagcgtgtgatggtaaatgggaaagaatgcttgatgtttgtgcgagaaggtaaagctccacaagcaagtgaggtgactggtcttgtgagctgccagggacccggaacatccggacaaaccgggcgaaacctctgggtgggagtctctgtctctcaaaaattcccaccgggaagttccggccggtttgccaggaagtttcgggccaatggccgtgcacaagacatgaccggaagttccgggcataatgccaggaggttccagccagatggtctttactatgattcatatgtaatttccaaaaattcagagggcaaagtggttgcttattttaatgtgaattacaatgatgagtaccgcacttgtgtgtgggtgccaaaggctttggtaactaacatcaagggacccaaacttagacaggcatactcctccggtggttcaagttgggttgtggacagtggttgcaccaatcatatgactggagagaggagtatgtttacaagtcttgataaggagaacggaactcgtgagaatattgtgtttggagatgatggtaaaggaaagttgggttacaattgcttgtttaccgatgaggatgtgaccgtctttagaagggatgactcctccgtagcattcaaaggcaagttaaagggtgatctctatcttgtcgatttcgatgtggatagagtgaatccggaaacttgtttgattgctaaatcctccatgggttggctatggcatcgtagactagcccatgttggaatgcggaatttggcaactcttctaaagggggaacacatcctcgggctcactaatgtcacatttgagaaagatcgtagtgaggctcaagatgtcttcaagcgcttcgccaagcaagcccaaaacctctatgatctcaccatcaagagggtacgaagtgacaatggaggagaattcaagaacacacaagtggaggaattccttgatgaagtgggaatcaagcacgagttctccgccccttatgatcctcctaaaaatggcattgttgagaggaagaaccgaactcttattgaagccgcaagagcaatgcttgataagtacaagacttcggatatcttttgggcggaggccgtgagcaccgcatgccatgccatcaattgcctgtacctccacaaaattctaaagaaaacttcatatgagctcttgagtggtaagaaaccaaatgtttcctattttcgtgtctttgggagtagatgctttattttgagtaagaggcctcgttcatctaagttctcacctaaggtggacgagggattcttacttggctatgagtcaaatgcacatgcctaccgtgtcttcaataaaaccttcggtattgttgaagttataagggatgtgacatttgacgaatctaatggctcccaaggagagcaagttgttgtacatgttgtaggtgatgtggatccaagtcaagctataggtactaaggctattggagacatacgaccagtcgagacgcaggatgaccaagaagatagggatcaaccttcgtcatcgacatccaatagccctacatcgagtcaagagtcagttgacccggaagttccgggaccagatgatcggatcctccggacctccccaagccaggaagttccgggtccatctgccaggaagttccgggcagaggacagtcaaggcgtgcctgtggatgggattgatgccgagggcactgtagagcatcctgatcaggctcaggtcccctcggtgcaccatccaagaatacatcacactgtccaaagagatcatcccgtcgacaacatacttggtgacataagaaaggggataactactcgttctcgtgtcgctaacttttgtcaacactattcgtttgtctcttctttggaaccaaccagggttgaagatgcacttggtgatacggattgggtgatggctatgcaagaggagttgaataacttcactcgcaaccaagtatggacgttgttggagagacctgaccaaaatatcatcggcaccaagtggatcttccgcaacaagcaagatgaacatagagtggttgtaaggaacaaagtccggttagttgcgcaagggttcacccaagtcgagggtctcgattttggtgaaaccttcgcacctgttgctcgccttgagtcaatccgaatccttttagcctatgccgctcaccatgatttcaggttattccaaatggatgtcaagagtgcctttctcaatagacctatctcggagttggtctatgtggagcaaccaccggggttcgaggatccaaagttgccaaaccatgtgtacaagctccacaaggcgctctacgggctcaaacaagcccctagagcttgtagtatcatgactaaaaggttcgagatgtctatgatgggtgagttgaccttcttcctcgggctacaagtgaagcaagcacaagagggcactttcatctctcaaaccaagtacgtgaaggacattctcaagaagtttgggatggaagatgccaaacccatcaagactcctatgcctactaatggccacctagacctcgacgacaatggtaaatgtgtggaccaaaaggtatatcgctccaaaagtgtttgcatgtgtgctcactttcaagcggagcctaaagagtgccatttgattgccgtcaagagaattctaagatatttagttcatactcctaatattggcttgtggtatcctaagggttgtgactttgagcttttgggctattccgattcggattatgccgagtgtaaggttgatagaaaaagcacaaccgggacttgtcaattccttgggcggtcccttgtttcttggtcctccaagaagcaaaattccattgccctatccaccgccgaagccgaatatgtcgccgccggttcttgttgtgcccaactcctttggatgaaacaaaccctaaaagattttggctacaacttcaccaagatcccactcctatgtgataatgagagtaccatcaaaatagccaacaatcccgttcaacactcaagaaccaagcacatagatattcgccaccacttcttgagagatcatgaaaccaaaggagacatatgccttacccatgtgagaaccgagagccaattagccgacattttcaccaaacctttagatgagaaaagattttgcgagcttaggataagcactatgcctcgtgagaaaagacagaaagcctctcaggatgtgtccggtgataagagtcctcctattcgttttcctcgtggtcgtttgggtaaagagaaagtggttgatgcggcagtggtagcagtactcgtacttgtcctaggtttaccagtgattatggctagagaaaatccagtggttgagatgaagtggattgattgggcttacatgaggaagaagaacaatgaagtgttcaaccaagtgatgcaagtgtgccacaacaagaatcttggagatattcttgccttggagtatgattggaatgaggaggtcattgcacagttctatgcgacagcattctttggtactacaaggaagggaaccccttatgtgaagtggttgactgaggatgatgaggatctcaataggcccaacattcatagtgaagcatctctccccatgatcaagaccaagttcatgtatgcaaaggatgctcctaggacttgcatgggatctactcatggattgcatcccaactacaaggtgttgtactccatctttcattggtctttgcttccaaaggttggagatgctactgctttgccatccaagcatgctcatcttctcagtcgcatgcgctacaatcagcctcccttcaatgtgatgaaattgatttggtatgagatcgccaacaccattcttgagcctaagcggggttgcatctatgctcctttcattatgaagatgattgagacagtcaccggggtattctacatcaaagatgggcaccataatccttttcgccctcgtgctccacctttctcttctccagtggtccctcgatctgttccttctacttcagctggtccttctactagtggcccaccaagttcctcgagtttttctcccatcaagaaggcacttcaggcaattttctgtatgtgtgctaagactgccaagaaagtgaagaagatcgaaaggcgtcagaaggaagatagaagagaggctaggaaagaagtgtcagatgattctgaggatgaggtctatgttgatccatttgaggcttatgaggcagcccgcaacgttgccggtgaaggtccatccaccttcttcaatgaagaatcttcccattctgatgatgatgatgatgatgatgatgatgatgatgatggtgatgagggtgacaccgaggcagctgctgaggatgcccccattgatgttgatgagggtgacaccgctgctcagtccgatgagtctcatctctccggcgataccgagattgttccctctgatggagatgagtga

SEQ ID NO: 15741 - DNA, 1713 bp, Oryza sativa
  Clone ID: TFbOSC13789j.C1.o4.fg
atgtcgcatctagagggagacgaatatttggaggagaagggagacgcttctagcaccaaggagactggatcaaagggagctactattcactttgattacatcaaacttaatgttcctcctcataactttgtctccgtgccttccgggcgtgcacctcattttgatgggacacattatgccgcttggaagcacaagatgaagttgcatctaatctctttgcatccaagtatttggaaagttgtttgtacaggtattgatgtacccaatgatgacatggagctcacttcggagcaagagcaactcatccaccgcaatgctcaagcttccaatacaattctctccgccttgagtccgaaggagttcaataagtttgatggtcttgaggaggccaaagagatatgggatactttgcaattggctcatgagggatcacccgccgttcgtgaggacaagattgaattgttggaaggaaggcttggaagatttgtgatggatgacaaggagacacctcaagagatgtatgataggatgatgatccttgtcaacaagattaaaggatttgggagtgaggacatgacaaatcactttgtggtcaagagacttctccgtgcatttggtccaagaaatcccactcttgtatcaatgatacgtgagaggaaagacttcaagaggctcaccccaagtgacattcttggaagaattgtgtctcatgagatgcaagaagaggaagctcgtgaagtgaggcaaatggtgaagaatgccgccatgatcaaaaatcaagaagtggctttgaacgcaaaacaagaagaagagtcaagttgtgaagaaagtgaagatgaagagatggctcttattgtcaagagattcaagcactttcttctcaagagtggctatggcaaaggaaggaaggatgatgacaagggaaagaggcaatcagagagagcttgcttcaattgtggcgaatatggccacttcattgccgattgccccaaaacaaatgaagctaaggctaaaggagacaagaagaagccggagcgtgctcatgtggtgaaggcacacatggtggaggtgtggtactccgaagatgaagaagcttccgaggacaagcccaaacccaagccaaaagacaagattgaaggagagggtggtattgctaccgtcgccttcaagtcatcctcttcaagcaaagagtgtctcttcaacaacttgagtgatgacgacgacgactcctaccactactcatgcttcatggcccaaggccgcaaggtgatgactcaaaagccttctcacacttctcttgatgatgattctagtgatgaagaaactagccttagggatgtcaatgaaactcttcaagaaaaatttgctattttagacaaaagtcataaagatcttgaagttcaattagacactctttggagtagcacctctcaaccaaatgtggtttctaattcttccaatccatctactagtaatggttgtgctaggtgttacaatattgatttgacctcttatgctactaatgttgatgctatgcaagctcttaagaaagagaatgaaaggttgggtacattggtgaaatatggatgcatgaagacttaccattcaaaagatgccctttacaagaccatcaccgctcatcctaacaaggatggacacgggctcgggttttcgggtggaatgtcacgtcctgataaattcatcccaaaataa

SEQ ID NO: 15742 - DNA, 1974 bp, Oryza sativa
  Clone ID: TFbOSC30721j.C1.o1.fg
atggagctcacttcggagcaagaacaactcatctaccgcaatgctcaagcttccaatgcaattctctccgccttgaatccggaggagttcaacaaggttgatggactagaggaggccaaggagatatgggatactttgcaattggctcatgagggatgtcccgccgttcgtgaggccaagattgaattattggaaggaaggcttggaagatttgtaatggatgacaaggagacagcacaagagatgaaagacttcaagagactcaccccaagtgacattcttggaagaatagtgtctcatgagatgcaagaagaggaagctcgtgaagtgagacaaatgatgaagaatgccgccatgatcaaaaatcaagaagttgctttgaaggcaaaacaagaagaagagtcaagttgtgaagaaagtgaagatgaagaaatggcttttattgtcaagaggttcaagcactttctttacaagagtggctatggcaaagggaggaaggacgatgacaagggaaagaggcaatcaaagagagcgtgcttcaattgtggcgaatatggccacttcattgccgattgtcccaagtcaaatgaagctaacgctaagggaggcaagaagaagccggagcgtgctcatgtggcggaggcacacatggcggaagtgtggtacttcggagatgaagaagatcccgaggtcaagcccaagcccaagtcaaaagacaaggttgaaggagaaggtggtgttgctaccgtcgccttcaaatcatcctcttcaagcaaggagcgtctcttcaacaacttgagtgatgacgacgacgactcctaccactactcttgcttcatggcccaaggccgcaaggtgatgactcaaaagccctctcaaacttctcttgatgttgattctagtgatgaggaaagtgataatgaattagatgatgtgcttaagagctttagcaaacccgctatgcaacatttggttaagttaatgagagctttggatagtaaagaacaatcactcgaaaggcaagaagaattgcttattcttgagaagaaaagaaaccttgtcttagaggagagcttagctaaagaatgtgctaaaaataaacaacttgctaatgagcttaatttggctaatggttctttagctagccttagggatgttaatgaaactcttcaagaaaaatttgctaatttagacaaaagtcataaagatcttgaagttcaatttgacactctttggaatagcacctctcaaccaaatgtggtttctaattcttctaacccttctactagcaatgctcttaagaaagagaatgaaaagttgtgcactttggtgaaatatggatgcatcaagacataccattcaaaagatgccctttacaagaccatcaccgctcatcctaacaaggatggacacgggttcgggttttcgggtagaagtcctgtgtctaagcgtgtgatggtaaatgggaaagaatgcttgatgtttgtgcgagaaggtaaagctccacaagcaagtgaggtgactggtcttgtgagctgccagggacccggaacatccggacaaaccgggcgaaacctccgggtgggagtctctgtctctcaaaaattcccaccagaaagttccggccggtttgccaagaagttccgggccaatggccgtgcacaagacatgaccggaagttccgggcataatgccaggaggttccggccagatggtctttactatgattcatatgtaatttccaaaaatttagagggaaaagtgggtgcttattttaatgggaattacaatgatgagtaccgcacttgtgtgtgggtgccaaaggctttggcatactcctccggtggttcaagttgggttgtggacagtggttgcaccaatcatatgactggagagaggagtatgtttacaagtcttgatgaggagaacggaactcgtgagaatattgtatttggagatgatggtaaaggaaag

SEQ ID NO: 15743 - DNA, 1350 bp, Oryza sativa
  Clone ID: TFbOSC400044j.C1.o46.fg
atgtcgcatcaagagggaaacggagagatagatgaaggggacaagggagacgcttccagcaccgaggagattgcatcaaagggggctactattcactttgattacagcaaacttaatgttccttctcataacttcgtctccgtgccttccgggcgtgcacctcattttgatgggacacactatgccgcttggaagcacaagatgaagtggcatttaatctctttgcatccaagtatttggaaagttgtttgtacaggtattgatgtaccccatgatggcatggagctcacttcggagcaagagcaactcatccaccgcaatgctcaagcttccaatgcaattctctccgccttgagtccggaggagttcaacaaagtggatggacttgaggaggccaaggagatatgggacactttgcaattggctcatgagggatcacccgccgttcgtgaggccaagattgaattgttggaagaaaggctaggaagatttgtgatggatgacaaggagacaccacaagagatgtatgataggatgatgattcttgtcaacaagattaaaggacttagaagtgaggatatgacaaatcactttgtggtcaagagacttctccgtgcttttggtccaaggaaccccactcttgtatcaatgatacatgagaggaaagacttcaagaggctcacctctagtgacattcttggaagaattgtgtctcatgagatgcaagaagaggaagctcgtgaagtgaggcaaatggtgaagaatgccgccatgatcaaaaatcaagaagtggctttgaaggcaaaacaagaagaagagtcaagttgtgaagaaagtgaagatgaagagatggctcttattgtcaagagattcaagcactttcttcgcaagagtggctatgggaaaggaaggaaggatgatgacaagggaaagaggcaatcaaagagagcttgcttcaattgtggcgaatatggccacttcattgccgattgccccaagtcaaatgaagctaaggctaagggaggcaagaagaagccggagcgtgctcatgtggcggaggcacacatggcggaggtgtggtactccgaagatgaagaagcttccgaggccaagcctaagcccaagcccaagccaaaagacaaagttgaaggagagggtagtgttgctaccatcgccttcaagtcatcctcttcaagcaaggagcgtctcttcaacaacttgagtgatgacgatgacgactcctaccactactcatgtttcatggcccaaggccgcaaggtgatgactcaaagccctctcacacttctcttgatgatgattctagtgatgaagaaagtgataattaattag

SEQ ID NO: 15744 - DNA, 5385 bp, Oryza sativa
  Clone ID: TFbOSC400116j.C1.o1.fg
atgtcgcatctagagggaaccgaagggttggatgacaagggagacgcttctagcaccaaggatactggacccaagggagctactattcactttgattacaacaaacttaatgttcctcctcacaactttgtctccgtgccttccgggcgtgctcctcaatttgatgggacacattacgccgcttggaagcacaagatgaagttgcatttaatctcgttgcatccaagtatttggaaagttgtttgtacaggtattgatgtaccccatgatgacatggagctcacctcggagcaagagcaactcatccactgcaatgctcaagcttccaatgcaattctctctgccttgagtctggaggagttcaacaaggttgatggacttgaggaggccaaggagatatgggatattttgcaattggctcatgagggatcacccgccgttcgtgaggccaagattgaattgttggaaggaaggcttggaagatttgtgatggatgacaagaagacacctcaagagatgtatgatagaatgatgatccttgtcaacaagatcaaaggacttgggagtaaggacatgacaaatcactttgtggtcaagagacttctccgtgcttttgatccaagaaatcccactcttgtatcaatgatacgggaaaagaaaaactttaagaggctcaccccaagtgatattcttggaagaattgtgtctcatgagatgcaagaagaggaagctcgtgaagtaaggcaaatggtgaagaatgccgccatgatcaaaaatcaagaagtggctttgaaggcaaaacaagaagaagagtcaagttgtgaagaaagtgaagatgaagagatggcttttattgtcaagagattcaagcactttcttcgcaagagtggctatggcaaagggaggaaggatgatgacaagggaaagaggcaatcaaagagagcttgcttcaattgtggcgaatatggccacttcattgccgattgtcctaagtcaaatgaagctaaggctaagggaggcaagaagaagccggagcgtgctcatgtgacagaggtaaacatggcggaggtgtggtactccagagatgaagaagatcccgaggtcaagcccaagcccaagctaaaagacaaggttgaaggagaaggccgcaaggagatgactcaaaagccctctcacacttctcttgatgttgattctagtgatgaggaaagtgataatgaattagatgatgtgcttaagagctttagcaaacccgctatgcaacatttggctaagttaatgagagctttggatagtaaagaacaatcactcgaaaggcaagaagaattgcttattcttgagaagaaaagaaaccttgccttagaggagagcttagctaaagaatgtgctaaaaatgaacaactagctaatgagcttaatttggctaatggttctctagctagccttagggatgtcaatgaaactcttcaagagaaatttgctaatttagacaaaagtcataaagatcttgacgttcaatttgacactctttggaatagcacttctcaaccaaatgtggtttctaattcttccaacccatctactagcaatggttgtgctaggtgctacaacattgatttgaactcttgtactactaatgttgatgctatgcaagctcttaagaaagagaatgagaggttgggcacattggtgaaatatggatgcataaagacgtaccattcaaaagatgccctttacaagaccatcaccgctcatcctaacaaggatggacacggactcgggttttcaggtggaagtcctgtgtctaagcgtgtgatggtaaatgggaaagaatgcttgatgtttgtgagagaaggtaaaactccacaagcaagtgaggagactcgtcccttcagtggtcaacacccggaagttccggacaaaatgatcggaagttcctgccctgcatactcctccgatggctcaaattgggttgtggacagcggctgcaccaatcatatgacgggagagaggagtatgtttaccagtcttgatgaggagggtggaagtcgtgaaaatattgtctttggagatgatggtaagggaaagctacaatttattatccgtatctcaattgtgcgagatgactcatccatagcattcaagggtgtgttaaagggtgatctctatctcgttgatttcaacgtggatagagtgaatccggaggcatgcttgattgctaaatcctctatgggttggctatgtcaccgtaggctagcccatgttggaatgaggaatttggcatctcttctaaaaggagaacacattcttggtttatctaatgtttcttttgagaaggatcgtgtgtgtagtgcttgccaagtcgggaagcaagttgggagtccgcatcctatcaaaaacatcatgactacaacaagaccactcgagcttcttcatatggacttatttgggcccgtggcctacataatcattggaggtaacaagtatggttttgtcattgttaatgatttttctcgcttcacttgggtgtactttctccatgacaaaagcaaagctcaagatgtcttcaagcgtttcgcaaagcaagcccaaaacctctatgatctcactatcaagagggtgcaaagcgacagtggaggagaattcaagaacactcaagtggaggaatttcttgatgaagaaggaatcaagtacgagttctccaccccctatgatcctctccaaaaaggcattgttgaaaggaagaaccgaaccctcattgaagccgcaagggcaatgcttgatgagtacaagacttcggatgtcttttgggcgaaggccgtgagtaccgcatgtcatgccatcaaccgcttgtatctccacaagatcctaaagaaaacttcatatgagctcttgagttgtaagaagcctaatgtttcatattttcgtgtctttgggagcaaatgctttattttgagtaagaggcctcgctcatctaagttctcatctaaggtggatgagggattcttacttggctatgaatcaaatgcacatgcctatcgtgtcttcaacaaaacctccggtattgttgaagtcactagggatgtgacatttgatgaatctaatggctcccaaggagagcaagttgttgtacatgttgtaagtgatgtggatccaagtcaagctataagtattaaggctattggagacatacgaccagtcgagacgcaggatgaccaagaagatagggatcaacctccgtcatcaacatccaatagccctacaagtgttgtgtctgctgagccggaagttccgggtcctattgactggaacatccggacatctccaggcccggaagttccgggttctctagtccagaacctccggaccagtggcagtgaagacgtgccaacggcgcaagtccatgattatgtccaaagagatcatcccgtcgacaacatacttggtgacataagaaaaggggtggaagatgcgcttggtgatccggattgggtgatggctatgcaagaggagttcaataacttcactcgcaaccaagtatggactttgatggagagacccaagaaaaatgtcatcggcaccaagtggatctttcgcaacaagcaagatgaacatggggtgattgtaaggaacaaagcccggttatttcaaatggatgtcaatagtgcctttctcaatggacctatctcggagttggtctatgtggagcaaccaccggggttcgaggatctaaagttgccaaaccatgtgtacaagctccacaaggcgctctacgggctcaaacaagcccctagagcttgtgtttccatgtgtgcccgttttcaagcggagcctaaagagtgccatttgattgccgtcaagagaattctaagatatttagttcatactcctaatcttggcttgtggtatcctaagggttgtgactttaagcttttgggctattccgattcggattatgccggatgtaaggttgatagaaaaagcacaaccgggacttgtcaattccttgggtggtcccttgtttcttggtcctccaagaagcaaaattctattgcattatccaccgccgaagccgaatatgttgccgccggttcttgttgtgcccaattccattggatgaaacaaaccctaaaagattttggctacaacttctccaagattccactcctatgtgacaatgagagtgccatcaaaatagccaacaatcccgttcaacactcaagaaccaagcacatagatattcaccaccacttcttgagagatcatgaaactaaaagagacatatgccttacccatgtgagaaccgagagccaattagccgacattttcaccaagcctttagatgagaaaagattttgcgagcttaggatggtcagtatgcctcgtgagaagagacagaagctgtcacaggatgttccctctgactcgagtcccctggttcgtggtcctagggggagattgggcaaagaaaaagtgggagatttttacagtgggagtcagattctgattcattccaggagggctggtagcattgtcattcgtgatgctccccgctctccctctccagttgcatctgagtcagacaatggtggaaatgaggatgagcctggttctgagagcaatcctttaaggctttacaagacgagggctgttgatcctgatcctagacatccaagggtgaactatctgaagaatttgctaaggtgtgcaaaggatagaatggtgagtcctgatacaatgactgctgactctcaggatgacagattcaggaccttggtgcagattgattggtacaactctatgatcatgcgaagatcttatccagtggtagagatgaagtggctagactggcagtacatgtcctcaaagaacaacttggttttcaatgaggtgcgcaaggatgctcccaaggattgtttggggactactcgtgggttgcatccatactatagagtgctttattctatcttcaggtggtctttgctccccaaagtgaatgatgctacagctcttccaagtcggcatgcgctccttctcagtcgcatgcgctacaacaagccagatttcagcatcatgaagcttatctggacaggcaaggaggtctctgatatttctgatgatgaggagttcgttgatccttttgctgcttatgaggctgctcgagacattgctaatggtgagggtccctctggcactactcatttcttcaatgaggagtcctcctactccgaggagaacagcgatgatgaggagtccgatgcacctactgagaatgtgcctacagatctagatgaggcagtggacgccgctgggcaagacattgactctcctgactccggcgacaccgagatcatttcttctgatggagatgatgatgaggcttga

SEQ ID NO: 15745 - DNA, 5337 bp, Oryza sativa
  Clone ID: TFbOSC400685j.C1.o36.fg
atgtcggacttagggggaaagaacggggaaaatggaaatgaagatgaagcaagcagcaagggaactccaccacccaagggagctactataccttttgattatagcaaacttaccattccttctcacaacttcgtctccgtgccttccgggcgtgctcctcaatttgatgggacatattatgccgcttggaagcacaagatgaagttgcatctaatctctttgcatccaaatatttggaaagttgtttgtacaggtattgatataccccatgatgacatggagctcacttcggagcaagaacaacttatccaccgcaatgctcaagcttctaatgcaattctcttcgccttgagtccggaggagttcaacaagattgatggactagtggaggccaaggagatatgggataccttgcaattggctcatgagggatcacccgccgttcgtgaggccaagattgaattattggaagaaaggcttggaagatttgtgatggatgacaaggagacaccacaagagatatatgataggatgatgattcttgtcaacaagattaaaggacttgggagtgaggacatgacaaatcactttgtggtcaagaaacttctccgtgcatttggtccaagaaatcccactcttgtatcaatgatacgggaaaggaaagacttcaagagactcaccccaagtgacattcttggaagaattgtgtctcatgagatgcaagaagaggaagctcgtgaagtgagacaaatggtgaagaatgccgccatgattaaaaatcaagaagttgctttgaaggcaaaacaagaagaaatggcttttattgtcaagatattcaagcactttcttcgcaagagtggctatggcaaagggaggaaggatgatgacaagggaaagaggcaatcaaggagagcgtgcttcaattgtggcgaatatggccacttcattgccgattgtcccaagtcaaatgaagctaaggctaagggaggcaagaagaagccggagcatgctcatgtggcggaggcacacatggcggaagtgtggtactctggagatgaagaagatcccgaggtcaagcccaagcccaggtcaaaagacaaggttgaaggagaaggtggtgttgctaccgttgccttcaagtcatcctcttcaagcaaggagcgtctcttcaacaacttgagtgatgacgacgacgactcctaccactactcttgcttcatggcccaaggctgtaaggtgatgacacaaaagccctctcaaacttctcttgatgttgattctagtgatgaggaaagtgataatgaattagatgatgtgcttaagagctttagcaaacccgctatgcaacatttggctaagttaatgagagctttggatagtaaagaacaatcactcgaaaggcaagaagaattgcttattcttgagaagaaaagaaaccttaccttagaggagagcttagctaaaaaatgtgctaaaaatgaacaacttgctaatgagcttaatttggctaatggttcttcagctagccttagggatgtcaatgaaactcttcaagaaaaatttgctaatttagacaaaagtcataaagatcttgaagttcgatttgacactcgttggaatagcacctctcaaccaaatgtggtttctaattcttctaacccttctactagcaatggttgtgctaggtgtttcaatattgatttgaactcttatgctactaatattgatgctatgcaagctcttaagaaagagaatgaaaggttgggcacattggtgaaatatggatgtatgaagacataccattcaaaagatgccctttacaaaaccatcaccgctcatcctaacaaggatggacacgggctcgggttttcgggtggaagtcctgtgtctaagcgtgtgatggtaaatgggaaagaatgcttgatgtttgtgagagaaggtaaagcaccacaagcaagtgaggtgactagtcttgtgagctgccagggacccggaacatccggacaaaccgggagaaacttccgggtgggagtctctgtctctcaaaaattcccaccaggaagttccggccagtttgccaagaagttccgggccaatggccgtgcacaagacatgaccggaagttccgggcacaatgccaggaggttccggccagagggtctttactatgattcatatgcatactcctccggtggttcaagttgggttgtggacagtggttgcaccaatcatatgactggagagatgagtatatttaccagtcttgatgaggaaaacggaactcgtgagaatattgtgtttggagatgatggtaaaggaaagataattggtctagccttcataagtattggaggtaacaagtatggttttgtcattgttgataatttttcccgcttcacttgggtgtattttctccatgacaagagtgaggctcaagatgtcttcaagcgcttcgccaagcaagcccaaaacctctatgatctcaccatcaagagggtacgaagtgacaatggaggagaattcaagaacacgcaagtggaggaattccttgatgaagagggaatcaagcatgagttctccgccccctatgatcctcctcaaaatggcattgttgagaagaagaaccgaactcttattgaagccgcaagagaaatgcttgatgagtacaagacttcggatagcttttggacggaggccgtgagcaccacatgccatgccatcaatcgcctctacctccataagattctaaagaaaacttcatatgagctcttgagtggtaagaaacctaatgtttcatattttcatgtctttgcgagcaaatgctttattttgagtaagaggcctcgctcatctaagttctcacctaaggtggatgagggattcttacttggctatgagtcaaatgcacatgcctaccgtgtcttcaacaaaacctccggtattgttgaagttacaagggatgtgacatttgacgaatctaatggctcccaaggagagcaagttgttgtacatgttatagatgatgcggatcctagagaagcaattggttctaaggctattggagacatacgaccagtcgagacgcaggatgaccaagaagatagggatcaaccttcgtcatcgacatccaatagccctacaacaagtcaagagtcagttgacccggaagttccgggaccagatgatcggaacctccagacctccccaggccaggaagttccgggtccatctgccaggaagtttcgggcagaggacagtcaaggcttgcctacgacacaagtggatgggattgatgccgtgggcactgtagagcatcctgatcaggctcaggtctcctcagtgcaccatccaagaatacatcacactgtccaaagagatcatcccgtcgacaacatacttggtgacataagaaagggggtaactactcgttctcgtgtcgctaacttttgtcaacactattcgttcgtttcttctttggaaccaaccagggttgaagatgcacttggtgatccggattgggtgatggctatgcaagaggagttgaataacttcactcgcaaccaagtatggacattggtggagagacccgaccaaaatgtcatcggcaccaagtggatcttccgcaacaagcaagatgaacatggagtggttgtaaggaacaaagcccggttaattgtgcaagggttcacccaagtcgagggtctcgattttggtgaaaccttcgcagccgttgcttgtcttgagtcaatccgaatgcttttagcctatgccgctcaccatgatttcaggttatatcaaatggatgtcaagagcgcctttcttaatggacccatctcggagttggtctatgtggagcaaccaccggggttcgaggatccaaagttgccaaaccatgtgtacaagctccacaaagcgctctacgggctcaaacaagcccctagagtttggtatgaatgtctccgagattttcttttgaaaaatggttttgaaattgggaatacgtacactactctcttcaccaaaaagtttgaaaatgatttattcatttgccaaatttatgtcgatgacataatatttggttctactaatgcctctttttgtgaagaatttagtagcatcatggctaaaaggttcgagatgtctataatgggtgagctaaccttcttcctcgggctacaagtcaagcaagcacaagaaggtactttcatctctcaaaccaagtacgtgaaggacattctcaagaagtttgaaatggaagatgccaaacccatcaagactcccatgcctaccaatggtcaccttgatcttgatgaaaatggtaaatgtgtggaccaaaagggttgtgactttgagcttttgggctattccgattcggattacgccgggtgtaaggttgatagaaaaagcacaaccgggacttgccaatttcttgggcggtcccttgtttcttggtcctccaagaagcaaaattccattgcgttatccaccaccgaagccgaatatgtcgccgccggttcttgttgtgcccaactcctttggatgaaacaaactctaaaagactttggctacaacttcaccaagatcccactcctatgtgacaatgagagtgccatcaaaatagccaataatcccgttcaacactctcgaaccaaacacatagatattcgccaccactttttgagagatcatgaaaccaaaggagacatattccttacccataaaagacagaaagcctctcaggatgtgtccggtgatgagagtccccctattcggtttcctcgtggtcgtttgggtaaagagaaagtgattgagggtggcagtggcagcggcactcgtacttctcctaggtttaccaggcaatccagcaatcgtccagttcagattcgggatgttgacagtggtcaaggaagtgatgctcctaatacaagaggtcgtgggagaggtggtggtcgcagttctggggctggaagggcatctcatgatttccctattggatctcgtgagaatcccgttcagctctacaagactcttggatttgacaccactcctatgcaccacattggaagacccaagtccaactaccttcatcagcttgccaagtgcagaagggacctgattacggctagagaaaatccaatggttaagatgaagtggattgattggacttacatgaggaagaagaacaatgaagtgttcaaccaagtgatgcaagtgtgccacaacaagaatcttggagatattcttgccttggagtatgattggaatgaggaggtcattgcacagttctatgcgacagcattctttggtactacaaggaagggaattgtcacgccctga

SEQ ID NO: 15746 - DNA, 5292 bp, Oryza sativa
  Clone ID: TFbOSC400735j.C1.o3.np
atgtcgtacttagggggaaagaacggggaaaatggaaatgaagatgaagcaagcagcaagggaactccaccacccaagggagctactataccttttgattacagcaaacttaccattccttctcacaacttcgtctccgtgccttccgggcgtgctcctcaatttgatgggacatattatgccgcttggaagcacatgatgaaggtgcatctaatctctttgcatccaagtatttggaatgttgtctgtacaggtattgatataccccatgatgacatggagctcacttcagagcaagaacaactcatccaccgcaatgctcaagcttccaatgcaattctctccgccttgagtccggaggagttcaacaaggttgatggactagaggaggccaaggagatatgggatactttgcaattgacacatgagggatcacccgccgttcgtgaggccaagattgaattattggaaggaaggcttggaagatttgtgatggatgacaaggagacaccacaagagatgtatgataggatgatgattcttgtcaacaagattaaaggacttgggagtgaggacatgacaaatcactttgtggtcaagagactttttggtccaagaaatcccactcttgtatcaatgatacgggaaaggaaagacttcaagagactcaccccaagtgacattcttggaagaattgtgtctcatgagatgcaagaagaggaaggtcgtgaagtgagacaaatggtgaagaagtttctttgaaggcaaaacaagaagaagagtcaagttgtgaagaaagtgaagatgaagaaatgacttttattgtcaagagattcaagcactttcttcgcaagagtggctatggcaaagggaggaaggatgatgacaagggaaagaggcaatcaaagagagcatgcttcaattgtggcgaatatggccacttcattgccgattgtcccaagtcaaataaagctaaggcgaagggaggcaagaagaagccggagcgtgctcatgtggcggaggcgcacatggcggaagtgtggtactccagagatgaagaagatcccgaggtcaagcccaagcccaagtcaaaagacaaggttgaaggagaaggtggtgttgctaccgtcgccttcaagtcatcctcttcaagcaaggagcgtctcttcaacaacttgagtgatgacgacgacgactcctatcactactcttgcttcatggcacaaggccgcaaggtgatgactcaaaagccctctgaaacttctcttgatgttgattctagtgatgaggaaagtgataatgaattagatgatgtgcttaagagctttagcaaacccgctatgcaacatttggctaagttaatgagagctttggatagtaaagaacagtcactcgaaaggcaagaagaattgcttattcttgagaagaaaagaaaccttgccttagaggagagcttagctaaagaatgtgctaaaaatgaacaacttgctaatgagcttaatttggctaatggttctttagctagccttagggatgtcaatgaaactcttcaagaaaaatttgctaatttagacaaaagtcataaagatcttgaagttcaatttgacactctttggaatagcacctctcaaccaaatgtggtttctaattcttctaacccttctactagcaatggttgtgctaggtggtacaatattgatttgaactcttatgctactaatattgatgatatgcaagctcttaagaaagagaatgaaaggttgggcacattggtgaaatatggatgcatgaaggcataccattcattagatgccctttacaagaccatcaccgctcatcctaacaaggatggatacaggctcgggttttcgggtggaagtcctgtgtctaagtgtgtaatggtaaatgggaaagaatgcttgatgtttgtgagagaaggtaaagcaccacaagcaagtgaggtgactagtcttgtgagctgccagggacccggaacatccggacaaaccgggagaaacatccgggtgggagtctctgtctctcaaaaattcccaccaggaagttccggccagtttgccaggaagttccgggccaatgaccatgcacaagacatgaccggaagttccgggcacaatgcctggaggttccggaaagagggtctttactatgattcatatgcatactcctccgatggttcaagttgggttgtggacagtggttgcaccaatcatatgactggagagaggagtatgtttacaagtcttgatgagtagaacggaactcgtgagaatattgtgtttggagatgatggtaaaggaaaggtaattggtctagcctacataagtattggaggtaacaagtatggttttgtcattgttgatgatttttcccgcttcacttgggtgtattttctccatgacaagagtgaggctcaagatgtcttcaagcgtttcgccaagcaagcccaaaacctctatgatctcactatcaagagggtacgaagtgacaatggaggagaattcaagaacacgcaagtggaggaattccttgatgaagagggaatcaagcatgagttctccaccccctatgatcctcctcaaaatagcattgttgagaggaagaaccgaactcttattgaagccgcaagagcaatgcttgatgagtacaagacttcggatatcttttgggtggaggccgtgagcactgcatgccatgccatcaatcggctctacctccataagattctaaagtttcatattttcgtgtctttgggagcaaatgctttattttgagtaagaggccttgctcatctaagttttcacctaaggtggatgagggattcttacttggctataagtcaaatgcacatgcctaccgtgtcttcaacaaaacctccggtattgttgaagttacaagagatgtgacatttgacgaatctaatggctcccaagaagagcaagttgttgtacatgttgtagatgatgcggatcctagacaagcaattggttctaaggctattggagacatacgaccagtcgagacgcaggatgaccaagaagatagggatcaaccttcgtcatcgacatccaatagccctacaacaagtcaagagtcagttgacccggaagttccgggaccagatgatcggaacctccggacctccctaggctaggaagttccgggtccatctcccaggaagttcggggcagaggacagtcaaggcgtgcctacggcacaagtggatgggattgatgccgagggcactgtagagcatcctgatcaggctcaggtcccctcggtgcaccatccaagaatacatcacactgtccaaagagatcatcccgtcgacaacatacttggtgacataagaaagggggtaactactcgttctcgtgtcgctaacttttgtcaacactattcgtttgtttcttctttggaaccaaccagggttgaagatgcacttggtgatccggattgggtgatggctatgcaagaggagttgaataacttcacttgcaacctagtatggacatcggtggagagacccgaccaaaatgtcatcggcaccaagtgaattttctgcaacaagcaagatgaacatggagtggttgtaaggaacaaagcccggttagttgcgcaagggttcacgcaagtcgagggtctcgattttggtgaaacattcgcacccgttgctcgtcttgagtcaatccaaatgcttttagactatgccgcttaccatgatttcaggttatatcaaatggatgtcaagagcgcctttctcaatggacccatcttggagttggtctatgtggagcaaccaccggggttcgaggatccaaagttgccaaaccatgtgtacaagctccacaaagcgcaaaacgggctcaaacaagccctagagcttggtatgaatgtctccgagattttcttttgaaaaatagttttgaaattgggaaggcggacactactctcttcactaaaaagtttgaaaatgatttattcatttgccaaacttatgtcgatgacataatatttggttctactaatgcctctttttgtgaagaatttagtagtatcatgactaaaaggttcgagatgtctatgatgggtgagctaaccttcttcctcgcgctacaagtcaagcaagcacaagaaggtactttcatctctcaaaccaagtacatgaaggacattctcaagaagtttgggatggaagatgccaaaaccatcaagactcccatgcctaccaatggtcaccgtgatcttgatgaaaatggtaaatgtgtggaccaaaagggttgtgactttgagcttttgggctattccgattcggattacgccgggtgtaaggttgatagaaaaagcacaaccgggacttgccaatttcttaggcagtcccttgtttcttggtcctccaagaagcaaaattccattgcattatccaccgccgaagccgaatatgtcgccgccgattcttgttgtgcccaactcctttggatgaaacaaactctaaaagactttggctacaacttcaccaagatcccactcctatgtgacaatgagagtgccaccaaaatagccaataatcccgttcaacactctcgaaccaaacacatagatattcgtcaccactttttgagagatcatgaaaccaaaggagacatatgccttacccataaaagacagaaagcctctcaggatgtgtccggtgatgagagtcctcctattcggttccctcgtggtcgtttgggtaaagagaaagttgttgagggcggcagtggcagtggcactcgtacttctcccaggtttacaaggcaatcaagcaaccgtcctgttcagattagggatgttgacagtggtcaaggaagtgatgcacctaatacaagaggacgggggagaggtggttgtcgcagttctagggctggaagggcatctcatgatttccctgtaggatctcgtgagaatcccgttcggctctacaaaactcttggttttgacaccactcctttgcaccacattggaagacccaagtccaactaccttcatcaacttgccaagtgtagaagagatctgattatggctagagaaaatccagtggttgagatgaagtggattgattgggcttacatgaggaagaagaacaatgaagtgttcaaccaagtgatgcaagtgtgccacaacaagaatcttggagatattcttgccttggagtatgattggaatgaggaggtcattgcacagttctatgcgacagcattctttggtactacaaggaagggaaccccttatgtg

SEQ ID NO: 15747 - DNA, 5976 bp, Oryza sativa
  Clone ID: TFbOSC401074j.C1.o9.fg
atggtgaagaatgctgccatgatcaaaaatcaaaaagttgctttgaaggcaaaacaagaagaagagtcaagttgtgaagaaagtgaagatgaagaaatggcttttattgtcaagagattcaagcacttttttcacaagagtggctatggcaaagggaggaaggatgatgacaagggaaataagcaatcaaagagagcgtgcttcaattgtggcgaatatggccacttcattgccgattgtcccaagtcaaatgaagctaacgctaagggaggcaagaagaagccggagcgtgctcatgtggtggaggcacacatggcggaagtgtggtactccggagatgaagaagatcccgaggtcaagcccaagcccaagtcaaaagacaaggttgaaggagaaggtggtgttgctaccgtcgccttcaagtcatcctcttcaagcaaggagcatctcttcaacaacttgagtgatgacgacgacgactcctaccactactcttgctttatggcccaaggccgcaaggtgatgactcagaagccctctcaaacttctcttgatgttgattctagtgatgaggaaagtgataatgaattagatgatgtgcttaagagctttagcaaacccgatatgcaacatttggctaagttaatgagagctttggatagtaaagaacaatcactcgaaaggcaaaaagaattgcttattcttgagaagaaaagaaaccttgccttagaggagagcttagctaaagaatgtgctaaaaatgaacaacttgctaatgagcttaatttggctaatggttctttagctagccttaggaatgtcaatgaaactcttcaagaaaaatttgctaatttagacaaaagtcataaagatcttgaagttcaatttgacactctttggaatagcacctctcaaccaaatgtggtttctaattcttctaacccttctactagcaatggttgtgctaggtgttacaatattgatttgaactcttatgctactaatattgatgctatgcaagctcttaagaaagagaatgaaaggttgggtactttggtgaaatatggatgcatgaagacataccattcaaaagatgccctttacaagaccatcaccgctcatccttacaaggatggacacgggctcgggttttcgggtggaagtcctgtgtctaagcgtgtgatggtaaatgggaaagaatgcttgatgtttgtgcgagaaggtaaagctccacaagtaagtgaggtgactggtcttgtgagctgccaggaacccggaacatccggacaaaccgggcgaaacctccgggtgggagtctctgtctctcaaaaattcccaccaggaagttccggccggtttgccaggaagttctgggccaatggccgtgcaaaagacatgaccggaagttccgggcataatgccaggaggttccggccagatggtctttactatgattcatatgtaatttccaaaaatttagagggcaaagtggttgcttattttaatgggaattacaatgatgagtaccacacttatgtgtgggtgccaaatgctttggcatactcctccggtggtacaagttgggttgtggatagtggttgcaccaatcatatgactggagagaggattatgtttacaagtcttgatgaggagaacgaaactcgtgagaatattgtgtttggagatgatggtaaaggaaagttgggttacaattgcttgtttactgatgaggatgtgaccgtctttagaagggatgactcctccgtagcattcaaaggcaagttaaagggtgatctctatcttgtcgatttcgatgtggatagagtgaatccggaagcttgtttgattgctaaatcctccatgggttggctatggcatcgtagattagcccaagttggaatgcggaatttggcaactcttctaaagggggaacacatcctcgggctcactaatgtcacatttgagaaagatcgtgtgtgtagtgcttgccaagccggaaaacaagttgggaatccacatcctatcaagaacatcatgactacaacacgccctcttgagcttctacatatggatttatttgggcccgtggcttacataagtattggaggtaacaagtatggttttgtcattgttgatgatttttcccgcttcacttgggtgtattttctctatgacaagagtgaggctcaagatgtcttcaagcgcttcgccaagcaagcccaaaacctctatgatctcaccatcaagagggtacgaagtgacaatggaggagaattcaagaacacacaagtggaggtattccttgatgaagtgggaatcaagcacgagttcttcgccccctatgatcctcctcaaaatggcattgttgagaggaagaaccgaactcttattgaagccacaagagcaatgcttgatgagtacaagacttcggatatcttttgggcggaggccgtgagcaccgcatgccatgccatcaatcgcctatacctccacaaaattctaaagaaaacttcatatgagctcttgagtggtaagaaaccaaatgtttcctattttcgtgtctttgggagtagatgctttattttgagtaagaggccttgttcatctaagttctcacctaaggtggacgaggattcttacttggctatgagtcaaatgcacatgcctaccgtgtcttcaacaaaacctctagtattgttgaagttacaagggagccctacatcgagtcaagagtcagttgacccggaagttccgggaccagatgatcggaacctccggacctccccaggccaggaagtttcgggtccatttgccaggaagttccgggcagaggacagtcaaggcgtgcctacggcacaagtggatgggattgatgccgagggcactatagagcatcctgatcaggctcaggtcccctcggtgcaccatccaagaatacatcacactgtccaaagagatcatcccgtcgacaacatacttggtgacataagaaagggggtaactactcgttctcgtgtcgctaacttttgtcaacactattcgtttgtctcttctttggaaccaaccagggttgaagatgcacttggtgatccggattgggtgatggctatgcaagaggagttgaataacttcactcgcaaccaagtatggacgttggtggagagacccgaccaaaatgtcatcggcaccaagtggatcttccgcaacaagcaagatgaacatggagtggttgtaaggaacaaagcccggctagttgcgcaagggttcatcaaagtcgagggtctcaattttggtgaaaccttcgcacccattgctcgccttgagtcaatccgaatccttttagcctatgccgctcaccatgatttcaggttattccaaatggatgtcacgagtgcctttctcaatggacctatctcggagttggtctatgtggagcaaccaccagggttcgaggatccaaagttgccaaaccatgtgtacaagctccacaaggcgctctacgggctcaaacaagcccctagagcttgtagtatcatgactaaaaggttcgagatgtatatgatgggcgagttgaccttcttcctcgggctacaagtgaagcaagcacaagagggcactttcatctctcaaaccaagtacgtgaaggacattctcaagaagtttgggatagaagatgccaaacccatcaagactcctatgcctactaatggccacctaaacatcaacgacaatggtaaatgtgtggaccaaaaggtatatcgctccatgctaggatccttgctttacttatgtgcatctcgtcatgatatcatgcttagtgtttgcatgtgtgctcgctttcaagcggagcctaaagagtgtcatttgattgccgtcaagagaattctaagatatttagttcatactcctaatcttggcttgtggtatcctaagggttgtgactttgagcttttgggctattccgattcggattatgccgggtgtaaggttgatagaaaaagcacaaccgggacttgtcaattccttggacggtcccttgtttcttggtcctccaagaagcaaaattccattgtcttatccaccgccgaagccgaatatgtcgccgccggttcttgttgtgcccaactcctttggatgaaacaaaccctaaaagattttggctacaacttcaccaagatcccactcctatgtgataatgagagtgccatcaaaatagccaacaatcccgttcaacactcaagaaccaagcacatagatattcgccaccacttcttgagagatcatgaaaccaaaggagacatatgccttacccatgtgagaactgagagccaattagccgacattttcaccaagcctttagatgagcaaagattttgcgagcttaggataagcactatgcctcgtgagaaaagacagaaagcctctcaggatgtgtccggtgatgagagtcctcctattcggtttcctcatggttgtttgggtaaagagaaagtggttgagggcggcagtggcagcggcactcgtacttcttctaggtttaccaggcaatccagcaaccgtctagttcagattcgggatgttgacagtggtcaaggatgtgatgctcctaatacaagaggtcgtgggagaggtggtggtcgcagttctggggctggaagggcatctcatgatttccctgttggatctcgtgagaatcctgttcggctctacaagactcttggatttgacaccactcctatgcaccacattggaagacccaagtccaactaccttcatcagcttgccaagtgcagaagggaccgtttgattgatccagagactcggcctgaggagtcacatgatcctcgtttcaggactttcactcaattggattggtataattcaatgattatggctagagaaaatccagtggttgagatgaagtggattgattgggcttacatgaggaagaagaacaatgaagtgttcaaccaagtgatgcaagtgtgccacaacaagaatcttggagatattcttgccttggagtatgattggaatgaggaggtcattgcacagttctatgcgacagcattctttggtactacaaggaagggaaccccttatgtgaagtggttgactgagggtgttaggcacaagatttccatggcacagtttgctgagatgttggggttagatgatgaggatctcaataggcccaacattcatagtgaagcacccctccccatgatcaagaccaagttcatgtatgcaaaggatgctcctaggacttgcatgggatctactcatggattgcatcccaactataaggtgttgtactccatcttttgttggtctttgcttccaaaggttggagatgctactgctttgccatccaagcatgctcatcttcttagtcgcatgcgctacaatcaacctcccttcagtgtgatgaaattgatttggtatgagatcgccaacaccattcttgagcctaagcggggttgcatctatgctcctttcattatgaagatgattgagacaatcaccggggtattctacatcaaagatgggcaccataatccttttcgccctcgtgctccaccttcctcttctccagtggtccctcgatctattccttctacttcagctggtccttctactagtgccccaccaagttcctcgagttcttctcccatcaagaaggcacttcaggcaattttctatatgtgtgctaagactgccaagaaagcttatgaggcagcccgcaacgttgtcggtgaaggtccatccaccttcttcaatgaagaatcttcccattctgatgatgatgatgatgatgatgatgatgatgatgatgatgatggtgatcagggtgacactgaggcagctgctgaggatgcccccactgatgttaatgagggtgacaccgctgctcagtccgatgagtctcatctctccggcgatatcgagattgttccctctgatggagatgagtga

SEQ ID NO: 15748 - DNA, 4296 bp, Oryza sativa
  Clone ID: TFbOSC401693j.C1.o19.fg
atgtcgtccgcgtccatggcaggcgcctgctccttcctggtggcagcagcggggaagccgccgcgccggagctccctccagcggtgcttcatgacgcgcgaggggagcaagcgaagtgggggcgtcaacgggcgagcgcagtggcggaacgacagcgtgggtgggcaatcttcgcgcgcgtacaacggcctcaatggcagcgttgtccttccagcagaggaggtggacgtggaggccggtggcggcaaagaagagctcgagctgggggctcccgagctccgcggcggcggaggcaccagcggacagcacggagagcgcggaggcggcgtccccatctatgatgagtgcggaggtgagctgcgtttggaagttgcaggtccaaaggagggccaggccacgggcgagaaggcccgatgcggaggcggagacgaggagccccaacctgtggcggagcacgttcttctacaaggggacagcaccgaggacgccataggtggtggtgaggagggagtgggcaaggagcttgagccacgggagagctggggccagcgaggggggcggggagaccggcgtcgagtggcggagagggagaagataggtttggtgagggggtcaggaagactggcgagctcgccctcgccccacctccaacgccacaacacctgcctccgcgccttcacgaccttgtgtgtcacgtcggcgagattatctacagtgtcgcgtgcgttgtgttcatccggtgttcgttctcgcccgctcgctgattcgttgggatttcctgacaagatcgggaggaggagcagcaggggcgggcaagggcgcaacggcagcggaggtggcgacagcgctggcccggctcgcaagaccgacaagtgccacaactgcggcaaactcggccactgggccaaggactgcaggagcaagcccaagcaggagcaggcacatgtggtccaggaggaggatgagcccacgctcatgctcatgacgggtggctgcattgatgtggtggaggagacgggcgcgccgtgcgtgacaccggcgccgcccgcgccgcggcctcgcctagacgttgtcgagcttgtggagcagaaggtgtttgccgcgctggacgacgccaccgaccacgacaacaagcgctggatcctcgacaccggcgcgtcgaaccacatgactggctcgagggcggcgttctctgacatcgacaccaacgtcaccggcaatgtccggctaggggatggctcgctcgttcgcatcggagggcgccgcaccatcctgttcgcctgcaagaatggtgagcaccacatgcttcacaaggcctactacctcccgtgcctcgccgccaacatcatcagcgtcggccagctggacgaaaccggcttcaaggtgctggttgaagacggcgtgatgcgtgtgtgggacgagcaacaccgactgctcgcccgcataacgcgcaccccaggccggctctacgtgctcgacatcaatctcgcacggccggtctatctgatggctcgcgcgggagaggacgcttggcgctggcacgcgcgtttcgggcacgtcaacttcaccgcgctgcgcaagatgggcagagaagcactggtacgtgggttgcccgttctgtcgcaggttgagcaagtgtgcgaggcttgccttgctgggaagcagcggcgagctcctttcccgcagcaggcacttcaccgcgctaccgaacccctcgccctgctgcacggcgacctttgtgggccggtcatgccggcgacaccgagcggaaatcgctatttcccgctgttggtggatgactacagccgctatatgtggctcgtgctcctcgccaccaaggatgccgcgccggacgccatgaagcgtgttcaggcagccgccgagcgcaagagtggccgcaaactccgggcgctccggactgatcgtggaggcgagttcacggtcgggcacttcaccgagtactgcgcggagctcgggctgcgacgcgagttgacagctccatactcgccgcagcagaacggcgtcgtcgaacgccggaatcagtcggtggtgagcacggcgcgaagcatgctgaaagctaaggggctcccaggtatgttctggggggaggcagtgaatactgctgtttatctgctcaacaggtgctcgtccaagagcattgatggcaagacgccgtatgagctctggaatggagtcacgccggctgtccatcacttgcgcacatttgggtgtgtcgcacacgtgaaggtaaccgccccgacgaagaagcttgacgacaggagtcggccgatgatttttgtcggctacgagctcggctcaaaggcgtaccgtgtctacgacccggcgacgcggcgcgtccacgtctcgcgggacgtggtgttcgacgaggaggcgcagtggaattgggatggcgaggcagctaccaacgttgactccgacttcaccatcgagtacaccacggtgtaccacccagcgacggcgactccgacgcaaaccggcacggagcacgggggagctccagcctcgccgcgctcacctgcatcaggctcgactccgacaacaccgcctgtggcagaagtgtcgccggtggaatttgtctctcctccgcctgacgtggaggatgatcttgacgcggaccacgatgacgcgccactccgtttccgtcgcattgacgacgtgcttgggccggcgacgccgccgggccaggccgttcgcgagctgagcgaggagctgttcgcggtaacagcggaggagccggcgtcgttcgccgaagcagagcagctaagctgctggcgacaagcgatgatcgaggagatgcgttctattgaggcgaacaagacttggcggctcgttgatccgctagcgcgccaacgtccgattggactcaagtgggtctacaaggccaagaaggacgccgccggcaacatcaccaagtacaaagcacgcctggtcgcgaaggggtatgtgcagcggcaaggcatcgacttcgacgaggtgttcgcaccagtggcgcggctcgagtccgttcgcttgttgttggcgcatgcggcgtgcgagggctgggccgtgcatcacatggacgtcaaatcggcgtttttgaacggcgagcttctggaggaggtctacgtcgcgcagccgccgggattcgtcgtcgacggccaggaacacaaggtgttgcgccttgacaaggcgctctatgggctccgtcaggcaccgcgtgcttggtactccaagctggacgcgtcgctgctatcgcttggttttcaccgaagtgattccgagcatgccgtgtacatgcgcggcacgggggagcaacggctggtggtcggcgtgtatgtcgacgatctcatcatcactggcggcaaccccggcgagctgaaacagttcaaggaggagatgaaaggaacattccaaatgagcgacctcggcttgttgcagtactacctcggcctggaagtgaaccagacagaggacggcatcacggtgaaccagcgcgcctacgcggagaagattctgcagactgccggcatggtggccagcaatcccagccttaccccaatggagacgcgcctcaagctcagcaagatgagcaacgccccctccgtcgacgccactgattaccggtggatcgttggctccctgcgctatctggtgaactcgagaccggatttggcgtactcggtgggctacgtgagcaggtttatggagaaacccaccaccgaacacctggcggccgtgaagcgagtgctgcgctatgtcgctggctccatcggctacggctgccactacaagaggaagaaagatgcaagtttagtcggctacagcgacagcgatctcgccggtgacgtcgacactcgcaagagcacctccggcgtcttcttcttcctcggcgacaacttgatcacctggcagtcgcagaagcagaaagttgtggccttgtcgtcctgcgaggctgaatacatagcggcgacaacggcggcttgccaaggtgtgtggctggcgcgtctccttgctgaactccagggagaggaggccgacgccgtcacattgaggattgacaaccaatctgccatcatgcttagcaaaaaccctgtcttccacgatcgcagcaagcacatcgacacgagatatcactacatcagagaatgcattgaggagggcagggtgaaggtcgagttcatcggcaccaacgagcagttggcggatattctgacgaagtcactcggacgggacaggttcatggagctgcgttcccagattggcctcgtcgaagttcaaacaccgcgcaaggtttag

SEQ ID NO: 15749 - DNA, 6297 bp, Oryza sativa
  Clone ID: TFbOSC403369j.C1.o1.fg
atgacaagggagacgcttctagcaccaaggataaagggagctactattcactttgattacagcaaacttaatgttcctcctcataactttgtctccgtgccttccgagcgtgctcctcaatttgatgggacacattacgccgcttggaagcacaagatgaagttgcatctaatctctttgcatccaagtatttggaaagttgtttgtacaggtattgatgtacccaatgatgacatggagctcacctcggagcaagagcaactcatccaccgcaatgctcaagcttccaatgcaattctctccaccttgagtccggaggagttcaacaagatgtatgataggataatgatccttgtcaacaagatcaaaggacttgggaatgaggacatgacaaatcactttgtggtcaagagacttctccgtgcttttggtccaagaaatcccactcttgtatcaatgatacgggaaaggaaagacttcaagaggctcaccccaagtgacattcttggaataattgtgtctcatgcgatgcaagaagaggaagctcgtgaagtgaggcaaatggtgaagaatgccgccatgatcaaaaatcaagaagtagctttgaaggcaaaacaagaagaagtgtcaagttgtgaagaaattgaagatgaagagatggcttttattgtcaagagattcaagcactttcttcgcaagagtggctatggaaaagggaggaaggatgatgacaagggaaagaggcaatcaaagagagcttgcttcaattgtggcgaatatggccacttcattgccgattgtcccaagtcaaatgaagctaaggctaagggaggcaagaagaagctagagcgtgctcatgtggcagaggtgtggtactccggagatgaagaagatcccgaggtcaagcccaagcccaagccaaaagacaaggttgaaggagaaggtggtgttgctaccgtcgccttcatgtcatcctcttcaagcaaggagcgtctcttcaacaacttgagtgatgacgacgacgactcctaccactactcttgtttcatggcccaaggccgcaagttaatgagagctttggatagtaaagaacaatcactcgaaaggcaagaagaattgcttattcttgagaagaaaagaaaccttgccttagaggagagcctagctacaaaatgtgctaaaaatgaacaactagctaatgagcttaatttggctaatggttctctagctatccttagggatgtcaatgaaactcttcaagacaaatttgctaatttagacaaaagtcataaagatcttgaagttcaatttgacactctttggaatagcacctctcaaccaaatgtggtttctaatccttccaacccatctactagcaatgattgtgctaggtgttacaatattgatttgaactcttgtgctactaatgttgatgctatgcaagctcttaagaaagagaatgaaaggttgggcacattggtaaaatatggatacatgaagacataccattcaaaagatgccctttataagaccatcaccgctcatcctaacaaggatggacacgggctcgggttttctagtggaagtcctgtgtctaagcgtgtgatggtaaatgggaaagaatgcttgatgtttttgagagaaggtaaagctccacaagcaagtgaggtgacttgtcccttcactggtcagacactcggaagttccgggcaaaatgacgggaagttcctgccctgtaagacaggaagttccgaacattttgtcaggaagttccggacttctgatgagtcgaaggggctgaccggaagttcctggtataatgccaggaagttccggccagaaggtctttactatgatttatatgtaatttccaaaaattcagagggcaaagtggttgcttattttaatgggaattacaatgatgagtaccgcacttgtgtgtgggtgccaaaggctttggtaactaacatcaagggacccaaacttatgacgggagagaggtgtatgtttacaagtcttgatgagcagggtggaagtcgtgaaaatattttctttggagatgatggtaaaggaaaggattgtgtgtgtagcgcttgccaagccgggaagcaagttgggagtccgcatcctatcaaaaacatcatgactacaacaagaccactcgagcttcttcatatggacttatttgggcccgtggcctacataagcattggaggtaacaagtatggttttgtcattgttgatgatttttcacgcttcacttgggtgtactttctccatgacaaaagcaaagctcaagatgtcttcaagcgtttcgcaaagcaagcccaaaacctctatgacctcactatcaagagggtgcgaagtgacaatggaggagaattcaagaacactcaagtggagaaatttcttgatgaagaaggaatcaagcacgagttctccgccccctatgatcctccccaaaatggcattgttgaaaggaagaaccgaaccctcattgaagccgcaagggcaatgcttgatgagtacaagacttcggatgtcttttgggcggaggccatgagtgatgtggatccaagtcaagctataggtactaaggctattggagacatacgactagtcgagacgcaggatgaccaagaagatagggatcaacctccgtcatcaacatccaatagccctacaagtgctgtgtctgctgagccggaagttccggatcctattgaccagaacctccggacatctccaggcccgatccccccagtgcaccatccaaggatacataacactgtccaaagagatcatcccgtcgacaacatacttggtgacataagaaaaggggtaactactcgctctcgtgtcgcatgtttttgtcaacactactcgtttgtctcttctttggaaccaaccagggtggaagatgcgcttggtgatccggattgggtgatggctatgcaagaggagttgaataacttcactcgcaaccaagtatggactttggcggagagacccaagcaaaatgttgtcggcaccaagtggatctttcgcaacaagcaagacgaacatggggtggttgtaaggaacaaagcccagatagttgcgcaaggattcacccaagtcgagggtctcgattttggtgaaaccttcgcacctgtcgctcaccttgagtcaattagaattcttttagcctatgccgctcaccatgatttcaggttattccaaatggatgtcaagagagcctttcttaatggacctatctcagagttggtctatgtggagcaaccaccggggttcgaggatccaaagttgccaaaccatgtgtacaagctccacaaggcgctctacgggctccaacaagcccctagagcttggtatgaatgtctccaagattttcttttgaaaaatggttttgaaattggaaaggcggatactactctcttcactaaaaaatttaagagtgatttattcatatgccaaatttatgtcgatgacataatatttggttctactaatgcctctttttgtgaagaatttagtagtatcacgactaaaagtttcgagatgtctatgatgggcgagttgaccttcttcctcgggatacaagtgaagcaagcacaagaggggaccttcatctctcaaactaagtacgtgaaagacatactcaagaagtttgggatggaggataccaaacctatcaagacgcccatgcctactaatggccacctagacctcgacaataatggtaaatgtgtggaccaaaaggtatatcgctccatgataggatctttgctttacttatgtgcatctcgtcccgacatcatgcttagtgtttgcatgtgtgcccgttttcaagcggaacctaaagagtgccatttgattgccgtcaagagaattctaagatatttagttcatactcctaatcttggcttatggtatcctaaggattgtgactttgagcttttgggctattccgattcggattatgccgggtgtaaggttgatagaaaaagcacaaccgggacttgtcaattccttgggcggtcccttgtttcttggtcatacaagaagcaaaattccattgcattatccaccaccgaagccgaatatgtcgccgccggttcttgttgtgcccaactcctttggatgaaacaaaccctacaagattttggctataacttcaccaagatcacactcctatgtgacaatgagagtgccatcaaaatagccaataatcccgttcaacattcaagaaccaagtacatagatatttgccatcactttttgagagatcatgagactaaaagagacatatgccttacccatgtgagaaccgagacccaattagctgacattttcactaagcctttagatgagaaaagattgtgcgagcttaggagtgaactcaatatcttagactctcgtaacattaggtttctatttctaatcgttgaattctcgtctattcctttgaacttgggcctgactgccctctgttctgtcaggccggaagttccggtcaccctagtccggaacatccgggggtcggggttttgcaggccggaagttccagtgttcttggtccggaacttccggtctctatccagccagccagcaaaccttgattcctccaatttttattttaaccattgcacttcaaccttgttgattcttgttgcagtggtcagtatgcctcatgagaagagacagaagctttcacaggatgttcctgctgactcgagtcccccggttcatggtcctaggaggagattgggcaaagaaaaagttggaaatttttacagtgggagtcaaattcctattcattctaggagggctggtagcattgtcattggtgatgctccccgctctccctctccagttgcatctaagtcagatgatggtggcaatgaggatgagcctagttctgagagcaatcctttgaggctttacaagacaagggttgttgatcctgatcctagacgtccaagtgtgaactatttgaagaatctgctcaagtgtggaatggacagaatggtgagtcctgacacaatgcctgctgactctcaggatgacagattcaggaccgtggtgcaagttgattggtataattctgtgatcatgggaagatctcatccagtggtagagatgaagtggctagactggcagtacatgtccttaaagaacaacttagttttcagtgaggtacgcaaggtgtgtgagcgcaagcacgtggcagatctgttggccttgcagtattcctggaatgaggaagtcattggtcagttatactccaccgctttctttggcaccaccaagaagggcattgaatttgtgaagtggaccattcaggggcagcagtatagggtctctatggcacagtttgctgcagctctggagttagatgatgatgacctgagtcgtcctcatatctttgtagaaaatgctttgtcaccgaccagcactactttcctgtatgagaaggatgctcccaaggattgtttggggactactcgtgggttgcgtccatactatagagtgctttattctatcttcaggtggtcattgctccccaaagtgggagatactacagcacttccagataggcatgcgctcctcctcagtcgcatacgctacaacaagccagatttcagcatcatgaagcttatctggagtgagatatatgagatagtgtgtgaactaaagaggggttgtatctatgctccttatataatgaagatgattgaggcaaaaattgggattagttatttcaaggacaaccagcacaagccttttcgtcctcatgttccctcctcttcagctcctccttctaccagggcgactcgtgcttctacttcagctgctcgttcttcctctgcagctccacagcgctctgagtcttcttcccccataaagaaggctctccgggctatcttttgcatgtgtgctaagacagctaagaaagtgaagaagatagagaggcgtcaaaaggaagattggattgcagcaggcaaggatgtctctaatatttctgatgaagaggagtttgttgatccttttgctgcttatgagactgctcaagacattgctagtggtgagggtccctctggcacttctcatttcttcaatgaggagtcctcccactccaaggagagcagcgatgatgaggagtccgatgcacctacagagaatgtgcctacagatccagatgaggcagtagacatcgccgggcaagacattgactcacctcactccggcgacaccgagatcattccttctgatggcgatgatgatgaggcttga

SEQ ID NO: 15750 - DNA, 501 bp, Oryza sativa
  Clone ID: TFbOSC4135j.C1.o1.fg
atgatacgggaaaggaaacacttcaagagactcaccccaagtgacattcttggaagaattgtgtctcatgagatgcaagaagaggaagctcgtgaagtgagacaaatggtgaataatgccgccatgataaaaaatcaagaagttgctttgaaggcaaaacaagaagaagagtcaagttgtgaagaaagtgaagatgaagaaatggcttttattgtcaagagattcaagcactttcttcgcaagagtggctatgacaaagggaggaaggatgatgacaagggaaagaggcaatcaaagagagcgtgcttcaattgtggcgaatatggccacttcattgccgattgtcccaagtcaaatgaagctaaggctaagggaggcaagaagaagccggagcgtgctcatgtggcggaggcacacatggcggaagtgtggcactccggagatgaagagatcccgaggtcaagcccaagcccaagtcaaaagacaaggttgaaggagaag

SEQ ID NO: 15751 - DNA, 4068 bp, Oryza sativa
  Clone ID: TFbOSC414619j.C1.o7.fg
atggaactcacctcggagcaagagcaactcatccaccgcaatgctcaagcttccaatgcgattctctccgccttgagtccggaggagttcaacaaggttgatggacttgaggaggccaaggagatatgggatactttgcaattggctcatgagggatcaccagtcgttcgtgaggccaagattaaattgttggaaggaaggcttgaaagatttgtgatggatgacaaggagacacctcaagagatgtatgataggatgatgatccttgtcaacaagatcaaaggacttgggagtgaggacatgacaaatcactttgtggtcaagagacttctccgtgcttttggtccaagaaatcccactcttgtatcaattatacgggaaaggaaagacttcaagaggctcaccccaagtgacattcttagaagaattgtgtctcatgagatgcaagaagaggaagctcgtgaagtgaggcaaatggagaagaatgccgccatgatcaaaaatcaagaagtggctttgaaggcaaaacaagaagaagagttaagttgtaaagaaagtgaagatgaagagatggcttttattgtcaagagattcaagcactttcttcgcaagagtggctatggcaaagggaggaaggatggtgacaagggaaagtggaaatcaaagagagcttgcttcaattgtggcgaatatggccacttcattgccgattgtcccaagtcaaatgaagctaaggctaagggaggcaagaagaagccagagcgtgctcattactccggagatgaagaagatcccgaggtcaagcccaagcccaagccaaaagagaaggttgaaggagaaggtggtgttgctaccgttgccttcaagtcatcctcttcaagcaagaagcgtctcttcaacaacttgagtgatgacgatgacgactcctaccactactcttgtttcatggcccaagccctcaaggtgatgactcaaaagccctctcacatctctcttgatgttggttctaatgatgaggaaagtgataatgaattagatgatgtgcttaagagctttagcaaacccactatgcaacatttggctaagttaatgagagctttggatagtaaagaacaatcactcgaaaggcaagaagaattgcttattcttgagaagaaaaaaaaccttgccttagaggagagcttagctaaagaatgtgctaaaaatgaacaactagctaatgagcttattttggctaatggttctttagctagccttagagatgtcaatggaactcttcaagaaaaatttgttaatttagacataagtcataaagatcttgaagttcaatttgtcactctttggaatagcacctctcaaccaaatgtggtttctaatccttccaacccatctactagcaatggttgtgctaggtgttacaatattgatttgaactcttatgctactaatgttgatgctatgcaagctcttaagaaagagaatgagaggttgggcacattggtgaaatatggatgcatgaaaacataccattcaaaagatgccctttacaagaccatcatcgctcatcctaacaaggatggacacaggctcgggttttcgggtggaagtcctgtgtctaagcgtgtgatggacccaaatttatttgggtccgtggcctacataagcattggaggtaacaagtatggttttgtcattgttgatgatttttctcgcttcacttgggtgtactttctccatgacaaaagcgaagctcaagatgtcttcaagcatttcgcaaagcaagcccaaaacctctatgatctcactatcaagagggtgcgaagcgacaatggaggagaattcaagaacactcaagtggaggaatttcttgatgaagaaggaatcaagcacgagttctccgccccctatgatcctccccaaaatagcattgttgaaaggaagaaccgaaccctcattgaagctgtaagggcaatgcttgatgagtacaagacttcggatgtcttttgggcggaggccgtgagtaccgcatgtcatgccatcaaccgcttgtacctccacaagatcctaaagaaaacttcatatgagctcttgagtgtcactagggatgtgacatttgatgaatctaatggctcccaaggagagcaagttgttgtacatgttataggagatgtggatccaagtcaagctataggtactaaggctattggagacatacgaccagtcgagacgcaggatgaccaagaagacagggatcaacctccatcatcgacatccaatagccctacaagtgctgtgtctgctgagccggaagttccgggtcctattgaccagaacctccagacatctccaggcccggaagttctgggttctccagtccggaaccttcggaccaatggcagtgaagacgtgccaacattgcaagtccccctagtgcaccatccaaggatacatcacactatccaaagagatcatcccgtcgacaacatacttggtgacataagaaaaggggtaactactcgctctcgtgtcgcaagtttttgtcaacactactcgtttgtctcttctttggaaccaaccagggtggaagatgtgcttggtgatccggattgggtgatggctatgcaagaggagttgaataacttcactcacaatcaagtatggactttggtggagagacccaagcaaaatgtcatcggcaccaagtggatctttcgcaacaagcaagatgaacatgtggtggttgtaaggaacaaagcccggttagttgcgcaagggttcatccaagtcgagggtctcgattttggtgaaaccttcacacctgtcgctcgccttgagtcaattaaaattcttctagcctatgccgctcaccatgattttaggttgttccaaatagatgtcaggagtgcctttctcaatggacctatctcagagttggtctatgtggagcaaccatcagggttcgaggttccaaagttgccaaaccatgtgtacaagctccacaaggcgctctacgggctcaaacaagcccctagagcttggtatgaatgtctccgagattttcttttgaaaaatggttttgaaattggaaaggcggatactactctcttcactaaaaaatttaagagtgatttattcatatgccaaatttatgtcgatgacataatatttggttttactaatgcctctttttgtgaagaatttagtactgtcatgactaaaaggttcgagatgtctatgatgggcgagttgaccttcttcctcgggctacaagtgaagcaagcacaagagggcaccttcatctctcaaaccaagtacgtgaaagacatactcaagaagtttgggatggaggatgccaaacctatcaagacacccatgcctactaatggccacctagacctcaacgataatggtaaatgtgtggaccaaaaggtatatcgctccatgataggatctttgctttacttatgtgcatctcgtcccgacatcatgcttagtgtttgtatgtgtgcccgttttcaagcggagcctaaagagtgccatttgattgccgtcaagagaattctaagatatttagttcatactcctaatcttggcttgtggtatcctaagggttgtgactttgagcttttgggctattctgattcggattatgccgggtgtaaggttgatacaaaaagcacaaccgggacttgtcaattccttgggcggtcccttgtttcttggtcctccaagaagcaaaattccattgtattgtccaccgccgaagccgaatatgtcgtagccggttcttgttgtgcccaactcctttggatgaaaccaaccctaaaagattttggctacaacttcaccaagattccactcctatgtgacaatgagagtgccatcaaaatagccaataatcccattgaacattcaagaaccaagcacatagatattcgccatcactttttgagagatcatgagactaaaggagacatatgccttacccatgtgagaaccgagacccaattagccgacattttcaccaagcctttagatgagaaaagattttgcgagcttaggagttag

SEQ ID NO: 15752 - DNA, 600 bp, Oryza sativa
  Clone ID: TFbOSC415728j.C1.o4.fg
atggcttttattgtcaagagattcaagcactttcttcgcaagagtggctatggcaaagggaggaaggatgataacaagggaaagaggcaatcaaagagagcttgtttcaattgtggcgaatatggccacttcattgccgattgtcccaagtcaaatgaagctaaggctatgggaggcaagaagaagccggagcatgatcatgtggcggaggcacacatgacggaggtgtggtactccggagatgaagaagatcccgaggtcaagcccaagcccaagccgaaagacaaggttgaaggagaaggtggtgttgctaccgtcgccttcaagtcatcttcttcaagcaaggagcgtctcttcaacaacttgagtgatgacgacgatgactcctaccactactcttgtttcatggcccaaggccacaaggtgatgactcaaaagccctctcacacctctcttgatgttgattctagtgatgaggaaagtgataatgaattagatgatgtgcttaagagctttagcaaacccgctatgcaacaattggctaagttaatgagagctttggacaacttgaatgtccattgtttgataagaattgactga

SEQ ID NO: 15753 - DNA, 3588 bp, Oryza sativa
  Clone ID: TFbOSC420031j.C1.o1.np
actattcactttgattacaacaaacttaatgttcctcctcataactttgtctccgtaccttccgggcgtgcaggaaagaggcaatcaaagagagcttgcttcaattgtggggaatatggccacttcattgccgattgccccaagacaaataaagctaaggctaagggaggcaagaagaagccggagcgtggccgcaaggtgatgactcaaaagccctctcacacttctcttgatgatgattctagtgatgaagaaagtgataatgaattagatgatgtgcttaagagctttagcagaattccttgatgaagagggaatcaagcatgagttctccgccccctatgatcctcctcaaaatggcattgttgagaggaagaactgaactgaactcttatcaccacccctggaggggttatgacagcaaagtattatagccctgccgttcctatagaaattcagggaattccttttccctcggatctgattcttctagacaccaagaacttggatgtgatccttgggatgaattggttggctcaattccaaggagtagtggattgtgcaagacgcactgtcactctgtaccgagggccggaacaaccggttgttttctttgctcccccaacctctgtcggtagttcagaacttcatcagataggactgtcagaaatccccatcgtcagagagttcggagacgtgtttccggaagaactacccggtatgccgccaaagcgagagattgagttctggatagatcttgctccaggaaccactcccctgtacaagtgaccctaccgtatggcatcaaatgaactggccgaagtcaagaaacagttggaagagttgaaagaaaaggggtatatacggccgagtacttccccctggggtgctcctgtgatttttgtggaaaagaaggacaagacaaagaggatgtgtgttgactacagagctctcaatgaagttactataaaaaacaagtaccctcttccccggatcgatgatctgttcgatcagcttaaaggtgccactgtattctccaagattgatcttcgttccggatatcaccaattacgtattcgtgaagaagatatccctaagaccgcattcaccacgcgatacggactgtatgaattcacggtgatgtctttcggtttaaccaatgctcctgccttcttcatgaacttaatgaacaaagtgttcatggaatacttggataagtttgttgtggttttcattgacgacattctggtgtactcacaatcagaggaagaccatcagcaccatctccgtctggtgttgggaaagttgcgggaacatcaattgtatgccaagcttagcaagtgtgagttctggttgtccaaagtcaaattcttagggcacgtgatatctgctaaaggagtcgctgtggactccgaaacagtgaccgccgtcactgattggaagcaacccaagacagtcactcaaattcgcagcttcttgggtttggcaggatactaccggaggttcatcgagaacttctccaaaatcgctcgacccatgacacagttgttgaagaaggaagagaaatttgtgtggagcccgcaatgcgagaaggcgttccaaactctcaaggaaaggctggtttcctcgccggttttaatcttaccggatactcgcaaggacttcatggtgtattgtgacgcttcgcgccaaggattggggtgcgtgctcatgcaggaaggtcatgtcgtagcctatgcctcacgccagctatggccccatgaaggcaactaccctacccgtgatttggagttagccgctgtggttcatgctctaaagatctggcggcactatctcattgggaatcgctgtgaaatatatactgatcataagagtttgaaatacatcttcactcagtcggatctgaatcttcggcagaggagatggttagaactcatcaaggattatgatgtgggaattcactatcatcctggtaaggccaacgtggtcgccgacgctctaagtcgaaaaagccattgcaacactcttgacgtccgtggcattccacccgaacttaatcaacagatggaagccctgaacctaagcatagttggtcgtggattcttggctacgctggaagccaagcctaccttgctcgatcaaatccgcgaggctcagaagaatgatccggatatgcgtggactcctcaagaatatgaaacagggtaaagccgctagtttcacagaggatgaacacggaaccctatggaacggaaatcgggtatgcgttccagacgacagagaacttaaacagttgatacttcaggaagctcacgaaagcctttattccatccaccctggcagtacgaagatgtacttagacttgaaagagaaatactggtgggttagtatgaagcgggaaattgcagagttcgtggccctttgtgatgtgtgccagcgtgtcaaggcagagcaccaacgaccggccggacttctccaacctctccaagtaccagaatggaaatgggatgaaattgggatggatttcatcaccggacttccaaaaacccaaggcggatatgattctatatgggtagttgtggaccgactaaccaaggtagctcggtttattcctgtgaagaccacctatggagggaacaaactagccgagctctacttcgctaggatcgtgagtctccatggcgttcctaagaaaattgtatctgataggggaagccaattcacctctcacttttggaagaagctccaagaagagctaggtacccgattaaattttagcaccgtgtatcacccgcagacagatggacagaccgagcgtctaaatcagatcctagaagatatgcttcgcgcatgtgtcctagatttcgggaagacctgggataagagtctcccctatgccgagttctcctacaataacagctaccaagccagcatacaaatggcaccctatgaagcgttgtatggacgcaaatgccggacaccgctattgtgggaccaagttggggaaagccaagtgttcgggactgatatcctgagagaagctgaagctaaagtcagaactattcgggataatctaaaggtggcacagtcccggcagaagagttatgcagataaccgacgccgtaatctggaattcgcagtggacgattttgtgtaccttcgggtcacgccattgcgaggtgtacacaggtttcagacgaaagggaagctcgcacctcggtttgtgggtcctttccatatcattgctcgacgcggggaagtcgcttaccagttggagctgcccgcctccttgggcaacgtgcatgatgtgttccatgtgtcgcaactcaagaaatgtcttcgagtgccatccgagcaggccgattcagagcaaattgaagttcgcgaagacttgacctacgtggagaggccagtgaaaatcctggacaccatggagtgcaggaccaggaaccgggtaatccgtttttgcaaggtccaatggagcaaccacgctgaggaagaagctacttgggagcgtgaagacgagatgaaagcagcccatcccgatctcttcgccagttcttccgaatctcggggtcgagattccgtt

SEQ ID NO: 15754 - DNA, 6891 bp, Oryza sativa
  Clone ID: TFbOSC420074j.C1.o1.fg
atgaaggcacctgcagggcagacttctaagtctgctaatgtgaccatttgcaacactggagatggaagcgggtatggtaatttacctactgttttttcagttaatcagtctactaattggtgggttgatactgggaccaatgtcgcacggggttccaccgtcctaatggggaatgggtcacatgcttctgttcatggtgttgacacggtatatctgaagtttacttcgggaaagatcgtgcagctgaagaacgtgcagcatgtcccttctatcgacaggaatcttgttagtggctcccgtctgagtagagacagatttaagttggtttttgagtctaataaaggtggaaaacgatatttcatgacgttgattgatgatgctactatattttgctatgtgtacttgttgaaaacgaaagacgagactctagactattttaaaatttataaggcagaagttgaaaatcaacttgacagaaagataaaaaggcttatgtctgatcgtggtggagagtttttctcaaatgagtttgacttattctttgaggaacatggcatcatacatgagaggacacctccctattctcctgagtctaatgggattgctgaaagtaagaaccgcacaatgactgacttggtgaatgccatgttggacaccgcgggactacctaaggcatggtggggggaggcattgttgacctcgaatcatgtgttaaacagagttcctaacagaaataaggacaaaacaccatatgagatatggattgggagaaaaccatcactttcttatttgcgcacatgggggtgcttggcgaaagtcaatgtaccaataaggaagaagcgcaaactgggacctaagactgtggactgtgtctttctaggatatgctcatcacagcattgcctatagatttttaatagttaaatctgaggtgcttgacatgcatgttggtacaattatggagtctcgtgatgctaccttctttgagagctttttcccaatgaaggatacacatagtagttcgagccaaccctctgaagtaattcccagttcaatcacaccaccagaacaaactaaacatacacatgaacatgtcactgaggaggatgtcagtgaagctcctcgaaggagtaagagacaaaggacggctaagtcctttggtgatgatttcactgtgtaccttgtggatgacactcctaagtcaatttcagaagcatatgcatctcctaatgcagattactggaaggtggctgtccgtagtgaaatggattcgattatcgctaacgggacttgggaggtgacagagcgaccctatgggtgtaaatctgtggggtgcaagtgggtgttcaagaagaagtttaggcctgacggtactattgaaaagtacaaggcttggcttgttactatgggctatactcagaaagaaggcgaagatttctttgaaacttactcacctattgttagattgaccacaattcgtgtgctactttccctagcagcctcacatggtcttctcgttcatcagatggacgttaagataacttttcttaatggagagctggacgaggagatctatatggatcaacctgatgggtttgtagttgaaggtcaagaaggcaaagtgtgcaaattgttgaagtctttgtatggtctgaaacaagctcctaagcaatggcatgagaaatttgacaaaacattgacatctgcaggctttgcagtcaatgaggcagataaatgtgtgtactatcgccatggtgggggtgagggagttattctgtgtttgtatgttgatgacatactgatatttgggacaaaccttgaggtgataaacgaggttaaattattcttgtctcaaaattttgatatgaaggatttgggagtagctgatgttatcttaaacattaagctaattagaggtgagaatgtgattacactcttgcagtcccattatgtggagaagatcttgaatcgctttggctacattgatagtagtatggaattgtggcttcactattctgggtatcctgtggtactcgagggatatagtgattctaactggatctctgatgtggatgagatcaaagccactagtggatatgtcttcacactgggtggtggtgctgtttcgtggaggtcttgcaaacagaccattttgacgaggtcaaccatggaagcagagttgacagcactggatactgctactgttgaggcagaatggctgcgtgatctattaatggatctgcctattgttgaaaaaccggtgccggctatccttatgaactgtgacaatcaaacggtaattgtcaaagtgaatagttctaaggataatatgaaatcgtctagacatgtgaaaagacgattgaagtctgtcaggaaattgagaaactccggagttataacgttggattacatccaaacagctagaaacctggcggatcccttcacgaagggactatcacgaaatgtgatagacaatgcatcgaaggagatgggtttgagacccatagagggctacccggaggttctggccggaacttccgggcgccgtttcattgcaaaaaatttcctaagtgctgcctggaagttcctggcatttttgcccggaacctcctggcagcttcaccgctttgaagatgaagacttagggggaaagaacggggaaaatagaaatgaagatgaagcaagcagcaagggaactccaccacacaagggagctactataccttttgattacagcaaacttaccattccctctcacaactttgtctccgtgccttccgggcgtgctcctcaatttgatgggacatactatgccgcttggaagcacaagatgaagttgcatttaatctctttgcatccaagtatttggaaagttgtttgtacaggtattgatataccccatgatgacatggagctcacttcggagcaagagcaactcatccaccgcaatgcccaagcttccaatgcaattctctccgccttgagttcggatgagttcaacaaggttgatggacttgagaaggccaaggagatgtgggataatttgcaattggctcatgagggatctcccgccgttcgtgaggccaagattgaattattggaaggaaggcttggaagatttgtgatggatgataaggagacatcacaacagatgtatgataggatgatgatccttgtcaacaagattaaaggacttgggagtgtggacatgacaaatcactttgtggtcaagagacttctctgtgcatttggtccaagaaatcccactcttgtatcaatgatacaggaaatgaaagacttcaagagactcaccccaagtgatattcttggaagaattgtgtctcatgagatgcaagaagaggaagctcgtgaagtgagacaaatggtgaagaatgccaccatgataaaaaatcaagaagttgctttgaaggtaaaaaaagaagaagattcaagttgtaaagaaagtgaagatgaagagatggcttttattgtcaaaagattcaagcactttctttgcaagagtggctatggcaaagggaggaaggatgatgacaagggaaatatgcaatcaaagagagcttgcttcaattgtggcgaatatggccacttcattgccgattgtcccaagtcaaatgaagctaaggctaagggaggcaagaagaagccggagcgtactcatgtggcggaggcacacatggcagaagtgtggtactccggagatgaagaagatcctgaggtcaagcccaagcccaagtcaaaagacaaggttgaaggagaagctagccttagggatgtcaatgaaactcttcaagaaaaatttgttaatttagacaaaagtcataaagatcttgaagttcaatttgacactctttggaatagcacctctcaaccaaatgtggtttctaattcttctaacccttctactagcaatggttatgctaggtgttacaatattgatttgaactcttgtggtactaatattgatgctatgcaagctcttaagaaagagaatgaaaggttgggcacattggtgaaatatggatgcatgaagacataccattcaaaagatgccctttacaagaccatcaccgctcatcctaacaaggatggacacgggctcgggttttcgggtggaagtcctgtgtctaagcgcgtgatggtaaatgggaaagaatgcttgatgtttgtgagagaaggtaaagcaccacaagaaagtgaggtgactagtcttgtgaactgccagggacccggaacatccggacagaccgggagaaacctccgggtgggaatctctgtctctcaaaaattcccactaggaagttccggccgttttgccaggaagttccgggccaatggccatgcacaagacatgaccggaagttccgggcacaaagccaggaggttccggccagagggtctttactatgattcatatgtaatttccaaaaattcagagggcaaagtggttgcctattttaatggaaattacaatgatgagtaccgcacttgtgtgtgggtgccaaaggctttggcatactcctccggtggttcaagttgggttgtggacagtggttgcactaatcatatgactggagagagaagtatgtttacaagtcttgatgaggagagcggaactcgtgagaatattgtgtttggagatgatggtaaaggaaagttgggttataattgcttgtttaccgatgaggatgtgaccgtctttagaagggatgactcctccgttgcattcaaaggcaagttgaagggtgatctctatctggtcgatttcgatgtggatagagtgaatccggaagcttgtttgattgctaaatcttccatgggttggctatggcatcatagactagcccatgttggaatgcggaatttggcaactcttctaaagggggaacacatcctcgggctcactaatgtcacatttgagaaagattatgtgtgtagtgcttgccaagcctggaaacaagttgggaatccacatcctatcaagaacatcatgactacaacacgccctcttgagcttctacatatggatttattcgggcccgtggcctacataagtattggaggtaacaagtatggttttgtcattgttgataatttttcccgctttacttgggtgtattttctccatgacaagagtgaggctcaagatgtcttcaagcgcttcgccaagcaaggccaaaacctctataatctcaccatcaagaggagggaatcaagcacgagttctccacccccctatgatcctcctcaaaatggcattgttgagaggaagaaccaaactcttattgaagccgcaagagcaatgcttgatgagtacaagacttcggatatcttttgggcggagaccgtgagcaccgcatgccatgccatcaatcgcctctacctccacaaaatcctaaagaaaacttcatatgagctcttgagtggtaagaagccaaatgtttcatattttcgtgtctttgggagtaaatgcttcattttgagtaagaggcctcgttcatctaagttctcacgtaaggtggacgagggattcttacttggctatgagtcaaatgcacatgcctaccatgtcttcaacaaaacctccagtattgttgaagttacaagggatgtgacatttgacgaatctaatggctcccaaggagagcaagttgttgtacatgttgtagatgatgcggatcctagacaagcaattgattctaaggctattggagacatacgaccagtcaagacgcaggatgacgaagaagatagggatcaaccttcgtcatcgacatccaatagccctacaacaagtcaagagtcagttgacccggaagttccgggaccagatgattggaacctccggacctccccaggcccggaagttctgggtccatctgctaggaagttccaggcaaaggatagtcaaggcgtgcctacggcacaagtggatgggattgatgccgagggcactgtagagcatcctgatcgggctcatgtcccctcggtgcaccatccaagaatacatcacattgtccaaagagatcatcccgtcgacaacatacttggtgatataagaaagggggtgatggctatgcaagaggagtttaataacttcactcgcaaccaagtatggacattggtggagagacccgaccaaaatgtcattggcaccaagttatatcaaatggatgttaagagcgcctttctcaatggacccctcttggagttagtctatgtggagcaaccaccggggttcgaggatccaaagttgccaaaccatatgtacaagctccacaaggcgctcaacgggctcaaacaagcccctagagcgctgggagggccccaacgtgttcctctacttcctccccatctgcagcgcgggaacgccatcatctccatgtcgcggttcgacatcaactccctgatggaggctgtgcagaggcaccgcgtcacgcacctgttctgcgtgccgccggtcattatcgcgctcaccaagcacgggagggcagctgccattgacacggtgggagaatgggacaccggtgtcgaggctggcgaggagcagctccgcgacgtcacaactctccaccatcgcccactatgtactatgactcgtgagaaaagacagaaagcctctcaggatgtgtccggtgatgagagtcctcctattcggtatactcgtggtcgtttgggtaaagagaaagtggttgagggcggcagtggcagtggcactcgtacttctcctagatttacaaggcaatccagtaaccgtcctgttcagattagggatgttgacagtggtcaagtgatgcccctaatacaagaggtcgcgggagaggtggtggtcgcagttctggggctggaagggcatctcatgatttccctgtga

SEQ ID NO: 15755 - DNA, 1680 bp, Oryza sativa
  Clone ID: TFbOSC422195j.C1.o16.fg
atgtcgcatctagagggagacgaatatttggaggagaagggagacgcttctagcaccaaggagactggatcaaagggagctactattcactttgattacatcaaacttaatgttcctcctcataactttgtctccgtgccttccgggcgtgcacctcattttgatgggacacattatgccgcttggaagcacaagatgaagttgcatctaatctctttgcatccaagtatttggaaagttgtttgtacaggtattgatgtacccaatgatgacatggagctcacttcggagcaagagcaactcatccaccgcaatgctcaagcttccaatacaattctctccgccttgagtccgaaggagttcaataagtttgatggtcttgaggaggccaaagagatatgggatactttgcaattggctcatgagggatcacccgccgttcgtgaggacaagattgaattgttggaaggaaggcttggaagatttgtgatggatgacaaggagacacctcaagagatgtatgataggatgatgatccttgtcaacaagattaaaggatttgggagtgaggacatgacaaatcactttgtggtcaagagacttctccgtgcatttggtccaagaaatcccactcttgtatcaatgatacgtgagaggaaagacttcaagaggctcaccccaagtgacattcttggaagaattgtgtctcatgagatgcaagaagaggaagctcgtgaagtgaggcaaatggtgaagaatgccgccatgatcaaaaatcaagaagtggctttgaacgcaaaacaagaagaagagtcaagttgtgaagaaaagattcaagcactttcttctcaagagtggctatggcaaggaaggaaggatgatgacaagggaaagaggcaatcagagagagcttgcttcaattgtggcgaatatggccacttcattgccgattgccccaaaacaaatgaagctaaggctaaaggagacaagaagaagccggagcgtgctcatgtggtgaaggcacacatggtggaggtgtggtactccgaagatgaagaagcttccgaggacaagcccaaacccaagccaaaagacaagattgaaggagagggtggtattgctaccgtcgccttcaagtcatcctcttcaagcaaagagtgtctcttcaacaacttgagtgatgacgacgacgactcctaccactactcatgcttcatggcccaaggccgcaaggtgatgactcaaaagccttctcacacttctcttgatgatgattctagtgatgaagaaactagccttagggatgtcaatgaaactcttcaagaaaaatttgctattttagacaaaagtcataaagatcttgaagttcaattagacactctttggagtagcacctctcaaccaaatgtggtttctaattcttccaatccatctactagtaatggttgtgctaggtgttacaatattgatttgacctcttatgctactaatgttgatgctatgcaagctcttaagaaagagaatgaaaggttgggtacattggtgaaatatggatgcatgaagacttaccattcaaaagatgccctttacaagaccatcaccgctcatcctaacaaggatggacacgggctcgggttttcgggtggaatgtcacgtcctgataaattcatcccaaaataa

SEQ ID NO: 15756 - DNA, 6336 bp, Oryza sativa
  Clone ID: TFbOSC900024j.C1.o13.fg
atgtcggacttagggggaaagaacggggaaaatagaaatgaagatggagcaagaagcaagggaactccatcacccaagggagttactatacattttgattacagcaaacttaccattccccctcacaactttgtctccgtaccttccgggcgtgctcctcaatttgatgggacacattacgccgcttggaagcacaagatgaagttgcatctaatatctttgcatccaagtatttggaaagttgtttgtacaggtgttgatgtaccccatgatgacatggagctcacttcggagcaagagcaactcatccaccgcaatgctcaagcttccaatgcaattctctccgccttgagtccggaggagttcaacaaggttgatgggcttgaggaggccaaggagatatgggatactttgcaattggctcatgagggatcacccgccgttcgtgaggccaagattgaattattggaaggaaggcttggaagatttatgatggatgacaaggagacaccacaagagatgtatgataggatgatgatccttgtcaacaagattaaaggacttgggagtgaggacatgacaaatcattttgtggtcaagagacttctccgtgcatttggtccaagatatcccactcttgtatcaatgatacgggaaaggaaagacttcaagagactcaccccaagtgacattcttggaagaattgtgtctcatgagatgcaagaagaggaagctcgtgaagtgaggcaaatggtgaagaatgccgccatgatcaaaaatcaagaagttgctttgaaggcaaaacaagaagaagagtcaagttgtgaagaaagtgaagatgaagagatggcttttattgtcaagagattcaagcactttcttcgcaagagtggctatggcaaaaggaggaaggatgatgacaagggaaagaggcaatcaaagagggcttgcttcaattgtggcgaatatggccacttcatagccgattgtcccaagtcaaatgaagctaaggctaagggaggcaagaagaagccggagcgtgctcatgtggcagaggcacacatggcggaggtgtggtactccagagatgaagaagatccagaggtcaagcccaagcccaagccgaaagacaaggttgaaggagaaggtggtgttgctaccgtcgccttcaagtcatcttcttcaagcaataagcgtctcttcaacaacttgagtgatgacgacgatgacttctaccactactcttgtttcatggcccaaggccgcaaggtgatgactcaaaagccctctcacacctctcttgatattgattctagtgatgaggaaagtgataatgaattagatgatgtgcttaagagctttagcaaacccgctatgcaacatttggctaagttaatgagagctttggatagtaaagaacaatctctcgaaaggcaagaagaattacttattcttgagaagaaaagaaaccttgccttagaggagatcctagctaaagaatctagccttaggaatgtcaatgaaactcttcaagagaagtttgctagtttagacaaaagtcataaagatcttgaagttcaatttgacactctttggaatagcacttctcaaccaaatgtggtttctaattcttccaacccatctactagcaatggttgtgctaggtgttacaatattgatttgaactctcatgctactaatgttgatgctatgcaagctcttaagaaagagaatgaaaggttgggcacattggtgaaatatggatgcatgaaaacataccattcaaaagatgccctttacaagaccatcaccgctcatcctaacaaggatggacacgggctcgggttttctggtggaagtcctgtgtctaagcgtgtgatggcatacttctccggtggctcaagttgggttgtggacaatgggtgcaccaatcatatgacgggagagaggagtatgtttacaagtcttgaggaggagggtggaagtcgtgaaaatattgtctttggagatgatggtaaaggaaagctacaatttattatccgtgtctcaattgtgcgagatgactcttccatagaatttaagggtgtgttaaagggtgatctctatctcgttgatttcgacgtagatagagtgaatccggaggcatgcttgattgctaaatcctctatgggttggctatggcaccgtaggctagcccatgttgtaatgaggaatttggcatctcttctaaaaggggaacacattcttggtctatctaatgtttcttttgagaaagatcgtgtgtgtagtgcttgccaagccgggaagcaagttgggagtccacatcctataaaaaacatcatgactacaacaagaccactcgagcttcttcatatggatttatttgggctcgtggcctacataagcattggaggtaacaagtatggtttcatcattgttgatgatttttcacgcttcacttgggtgtactttctccatgacaaaagcgaagctcaagatgtcttcaagcgcttcgcaaagcaagcccaaaacctctatgatctcactatcaagagggtgcgaagcgacaatggaggagaattcaagaacactcaagtggagaaatttcttgatgaagaaggaattaagcacgagttctccgccccctataatcctccccaaaacggcattgttgagaggaagaaccgaaccctcattgaagccgcaagggcaatgcttgatgagtacaagacttcggatgtcttttgggcggaagccatgagtactgcatgtcatgccatcaaccgcttgtacctccacaagatcctaaagaaaacctcatatgagctcttgagtggtaagaagcctaatgtttcatattttcatgtctttgggagcaaatgttttattttaagtaagaggcctcgctcatctaagttctcacctaaggtggatgagggattcttacttggctatgaatcaaatgcatatgcctatcgtgtcttcaacaaaacctccggtattgttgaagtcactagggatgtgacatttgatgaatctaatggctcccaaggagagcaagttgttgtacatattgtaggagatgtggatccaaatcaagctataggtactaaggctattggagacatacgaccagtcgagacgcaggatgaccaagaagatagggatcaacctccgcgtcatcgacatccaatagccctacaagtgctgtgtctgctgagccggaagttccgggtcctattgactggaacctccggacatctccaggcccggaagttccgggttctacagtccggaacctccggatcagtggcagtgaagacgtgccaatggcacaaggtggaagatgcgcttggtgatccggattgggtgatggctatgcaagaggagttgaataacttcactcgcaatcaagtatggactttggtggagagacccaagcaaaatgtcatcggcaccaagtggatctttcgcaacaagcaagatgaacatggggtggttgtaaggaacaaagcccggttattccaaatggatgtcaagagtgcctttctcaatggacctatctcggagttagtctatgtggagcaaccaccggggttcgaggatccaaagttgccaaaccatgtgtacaagctccacaaggcgctctacgggctcaaacaagcccctagagcttgttttgaaattggaaaggtggatactactctcttcactaaaaaatttaagagtgatttattcatatgccaaatttatgtcgatgacataatatttggttctactaatgcctctttttgtgaagaatttagtagtatcatgactaaaaggttcgagatgtctatgatgggcgagttgaccttcttcctcgggctacaagtgaagcaagcactagtgggcatcttcatctctcaaaccaagtacgtgaaagacatactcaagaagtttgggatggaggatgccaaacctatcaagacgcccatgcctactaatggatacctagacctcgacgataatggtaaatgtgtggaccaaaaggtatatcgctccatgataggatctttgctttacttatgtgcatctcgtcccgacatcatgcttagtgtttgcatgtgtgcccgttttcaagcggagcctaaagagtgccatttgattgccgtcaagagaattctaagatatttagttcacactcctaatcttggcttgtggtatcctaagggttgtggctttgagcttttaggctattccgattcggattatgccgggtgtaaggttgatagaaaaagtacaactgggacttgtcaattccttgggcggtcccttgtttcttggtcctctaagaaacaaaattccattgccttatccacggccgaagccgaatatgttgccgctggttcttgttgtgctcaactcctttggatgagacaaaccctaaaagactttggctacaacttcaccaagatcccactcctatgtgataatgagagtgccatcaaaatagccaacaatcccatccaacactcaagaaccaagcacatagacattcgccaccacttcttgagagatcatgagactaaaggagacatatgccttacccatgtgagaaccgaaagccaattagccgacattttcaccaagcctttagatgagaaaagattttgcgagcttaggagttttcatttccaaatctttgaattctcatctattccattgaacttgggcctgactgccctctgttctgtcaggccggaagttccggtcaccccagtccggaacttccgggggtcgggggccggaaattccggtgttcttggcccggaacttccggtctctgtccagccagccagtaaccttgattttgctactgtttcatttaaccattgcactccaaccttgttgattcttgttgcagtggtcattatgcctcgtgagaagagacagaagctttctcaagatgttcctgctgactcaagccccccggttcgtggtcctagggggagattgggcaaagaaaaagttggagatttttacagtgggagtcagattccgatccattccaggagggctagtagcattgtcattcgtgatgcaccccgctctccctctccagctgcatctgactcagatgatggtggcaatgaggatgagcctggttctgaaagcaatcctttgaggctatacaagacaagggctgttgatcctgatcctaaacgcccaagagtgaactatctgaagaatctactcaagtgtggaagggacagaatggttgattggtataactctgtgatcatgggaagatctcatccagtggtagagatgaagtggctagactggcagtacatgtcctcaaagaacaacatagtcttcaatgaggtacgcaaggtgtgtgagcgcaagcacgtggcagatttgttggccttgcagtattcctggaatgaggaagtgattggacagttctactccactgctttctttggcaccactaagaaggggcttgattttgtgaagtggaccattcaagggcagcagtatagggtttctatggcacagtttgctgcagctttggggttagatgatgatgacctgagtcgtccacatatctttgtagaggatgctctgtcaccgaccagcactacctttatgtatgagaaggatgctcccaaggattgtttggggactactcgagggttgcgtccatattatagagtgctgtactctatcttcaggtggtctttgctccccaaagtgggagatgctacagctcttccaggtaggcatgcactcctccttagtcgcatgcgctataacaagcccgatttcagcatcatgaagcttatctggagtgagatctatgagacagtgtgtgagccaaagagaggcttcatctatgctccttatatcatgaagatgattgaggccaagactgggatttgttatttcaaagacaatcaacacaagcctttccgtcctcatgctcccactacttcagctactcctaccaccagagtgactcgtgcttccacctcagctgctccttctttctctgctgcacctcagcgttctgagtcttcttctcccataaagaaggctctcagggctatcttttgcatgtgtgccaagacagctaagagtgatgagggtccctctggcacttctcgtttctttaatgaggagtcctctcactccgaggagagcagtgatgatgaggagtcagatgcccctactgagaatgctcctacagatcccaatgaggcagtggatgccgccgggcaagacatcgactctcctcactctggcgacactgagatcattccttctgatggcgataatgatgaggcttga

SEQ ID NO: 15757 - DNA, 4353 bp, Oryza sativa
  Clone ID: TFbOSC900028j.C1.o16.fg
atggagctcacttcggagcaagaacaactcatctaccgcaatgctcaagcttccaatgcaattctctccgccttgaatccggaggagttcaacaaggttgatggactagaggaggccaaggagatatgggatactttgcaattggctcatgagggatgtcccgccgttcgtgaggccaagattgaattattggaaggaaggcttggaagatttgtaatggatgacaaggagacagcacaagagatgaaagacttcaagagactcaccccaagtgacattcttggaagaatagtgtctcatgagatgcaagaagaggaagctcgtgaagtgagacaaatgatgaagaatgccgccatgatcaaaaatcaagaagttgctttgaaggcaaaacaagaagaagagtcaagttgtgaagaaagtgaagatgaagaaatggcttttattgtcaagaggttcaagcactttctttacaagagtggctatggcaaagggaggaaggacgatgacaagggaaagaggcaatcaaagagagcgtgcttcaattgtggcgaatatggccacttcattgccgattgtcccaagtcaaatgaagctaacgctaagggaggcaagaagaagccggagcgtgctcatgtggcggaggcacacatggcggaagtgtggtacttcggagatgaagaagatcccgaggtcaagcccaagcccaagtcaaaagacaaggttgaaggagaaggtggtgttgctaccgtcgccttcaaatcatcctcttcaagcaaggagcgtctcttcaacaacttgagtgatgacgacgacgactcctaccactactcttgcttcatggcccaaggccgcaaggtgatgactcaaaagccctctcaaacttctcttgatgttgattctagtgatgaggaaagtgataatgaattagatgatgtgcttaagagctttagcaaacccgctatgcaacatttggctaagttaatgagagctttggatagtaaagaacaatcactcgaaaggcaagaagaattgcttattcttgagaagaaaagaaaccttgtcttagaggagagcttagctaaagaatgtgctaaaaataaacaacttgctaatgagcttaatttggctaatggttctttagctagccttagggatgttaatgaaactcttcaagaaaaatttgctaatttagacaaaagtcataaagatcttgaagttcaatttgacactctttggaatagcacctctcaaccaaatgtggtttctaattcttctaacccttctactagcaatgctcttaagaaagagaatgaaaagttgtgcactttggtgaaatatggatgcatcaagacataccattcaaaagatgccctttacaagaccatcaccgctcatcctaacaaggatggacacgggttcgggttttcgggtagaagtcctgtgtctaagcgtgtgatggtaaatgggaaagaatgcttgatgtttgtgcgagaaggtaaagctccacaagcaagtgaggtgactggtcttgtgagctgccagggacccggaacatccggacaaaccgggcgaaacctccgggtgggagtctctgtctctcaaaaattcccaccagaaagttccggccggtttgccaagaagttccgggccaatggccgtgcacaagacatgaccggaagttccgggcataatgccaggaggttccggccagatggtctttactatgattcatatgtaatttccaaaaatttagagggaaaagtggttgcttattttaatgggaattacaatgatgagtaccgcacttgtgtgtgggtgccaaaggctttggcatactcctccggtggttcaagttgggttgtggacagtggttgcaccaatcatatgactggagagaggagtatgtttacaagtcttgatgaggagaacggaactcgtgagaatattgtatttggagatgatggtaaaggaaagctacaatttattatccgtttctcaattatggatgactcctctgtagcattcaaaggcaagttaaagggtgatctctatcttgtcgatttcgatgtggatagagtgaatccagaagcttgtttgattgctaaatcctccatgggttggctatggcatcatagactagcccatgttggaatgcagaatttggcaactcttctaaagggggaacacatcctcgggctcactaatgtcacatttgagaaagatcgtgtgtgtagtgcttgccaagcagggaaacaagttgggaatccacatcctatcaagaacatcatgactacaacacgccctcttgagcttctacatatggatttatttgggcccgtggcttacataagtattggaggtaacaagtatgtttttgtcattgttgatgatttttcacgcttcacttgggtgtactttctccatgacaaaagcaaagctcaagatgtcttcaagcgctttgcaaagcaagcccaaaacctctatgatctcactatcaagagggtgcgaagcgacaatggaggagaattcaagaacactcaagtggaggaatttcttgatgaagaaggaatcaagcacgagttctccgccccctatgatcctccccaaaatggcattgttgagaggaagaaccgaaccctcattgaagccgcaagggcaatgcttgatgagtacaagacttcggatgtcttttgggcggaggccgtgagtaccgcatgtcatgccatcaaccgcttgtacctccacaagatcctaaagaaaacttcatatgaactcttgagtggtaagaagcctaatgtttcatattttcgtgtctttgggagcaaatgttttattttaagtaagaggccttgctcatctaaattctcacctaaggtggatgagggattcttacttggctatgaatcaaatgcacatgcctatcgtgtcttcaacaaaacctccggtattgttgaagtcactagggatgtgatatttgatgaatctaatggctcccaaggagagcaagttgttgtacatgttgtaggtgatgtggatccaagtcaagctataggcactaaggctattggagacatacgaccagtcgagacgcaggatgaccaagaggatagggatcaacctccgtcatcgacatccaatagccctacaagtgttgtgtctgctgagccagaagttccgggtcctattgaccggaacctccggacatctccaggcccggaagttccgggttctacagtccggaacctccggaccagtggcagtgaagacgtgccaacggcacaagtggatgggatcgatgctgcgggcactttagaggttgaagatgaacttggtgatccggattgggtgatggctatgcaagaggagttgaataacttcattcgcaaccaagtatggacgttggtggagagacccgaccaaaatgtcatcggcaccaagtggatcttccgcaacaagcaagatgaacatggagtggttgtaaggaacaaagcccggttatatcaaatggatgtcaaaagcgcctttctcaatggacccatctcggagttagtctttgtggagcaaccaccggggttcgaggatccaaagttgccaaaccatgtgtacaagctccacaaggcgctctacgggctcaaacaagcccctagagcttggtatgaatgtctccgagattttcttttgaaaaatggttttgaaattgggaaggcggacactactctcttcactaaaaagtttgaaaataatttattcatttgccaaatttatgtcgatgacataatatttggttctactaatgcctctttttgtgaagaatttagtagtatcatgactaaaaggttcgagatgtctatgatgggtgagctaaccttctttctcgggctacaagtcaagcaagcacaagaaggtaccttcatctctcaaaccaagtacgtgaaggacattgttaagaagtttgggatggaagatgccaaacccatcaagactcccatgcctaccaatggtcaccttgatcttgatgaaaatggtaaatgtgtggaccaaaaggtatatcgctccataataggatccttgctttacttatgtgcatctcgtcccgatatcatgcttagtgtttgcatgtgtgctcgctttcaagcggagcctaaagagtgccatttgattgccgtcaagagaattctaagatatttagttcatactcctaatcttggcttgtggtatcctaagggttgtgactttgagcttttgggctattccgattcggattacgccgggtgtaaggttgatagaaaaagcacaaccgggacttgccaatttcttgggcggtcccttgtttcctggtcctccaagaagtaa

SEQ ID NO: 15758 - DNA, 5549 bp, Oryza sativa
  Clone ID: TFbOSC900207j.C1.o1.fg
atgacaagggagacgcttctagcaccaaggataaagggagctactattcactttgattacagcaaacttaatgttcctcctcataactttgtctccgtgccttccgagcgtgctcctcaatttgatgggacacattacgccgcttggaagcacaagatgaagttgcatctaatctctttgcatccaagtatttggaaagttgtttgtacaggtattgatgtacccaatgatgacatggagctcacctcggagcaagagcaactcatccaccgcaatgctcaagcttccaatgcaattctctccaccttgagtccggaggagttcaacaagatgtatgataggataatgatccttgtcaacaagatcaaaggacttgggaatgaggacatgacaaatcactttgtggtcaagagacttctccgtgcttttggtccaagaaatcccactcttgtatcaatgatacgggaaaggaaagacttcaagaggctcaccccaagtgacattcttggaataattgtgtctcatgcgatgcaagaagaggaagctcgtgaagtgaggcaaatggtgaagaatgccgccatgatcaaaaatcaagaagtagctttgaaggcaaaacaagaagaagtgtcaagttgtgaagaaattgaagatgaagagatggcttttattgtcaagagattcaagcactttcttcgcaagagtggctatggaaaagggaggaaggatgatgacaagggaaagaggcaatcaaagagagcttgcttcaattgtggcgaatatggccacttcattgccgattgtcccaagtcaaatgaagctaaggctaagggaggcaagaagaagctagagcgtgctcatgtggcagaggtgtggtactccggagatgaagaagatcccgaggtcaagcccaagcccaagccaaaagacaaggttgaaggagaaggtggtgttgctaccgtcgccttcatgtcatcctcttcaagcaaggagcgtctcttcaacaacttgagtgatgacgacgacgactcctaccactactcttgtttcatggcccaaggccgcaaggtgatgactcaaaagccctctcacatctctcttgatgttgattctagtgatgaggaaagtgataatgaattagatgatgtgcttgagagctttagcaaacccgctatgcaacatttggctaagttaatgagagctttggatagtaaagaacaatcactcgaaaggcaagaagaattgcttattcttgagaagaaaagaaaccttgccttagaggagagcctagctacaaaatgtgctaaaaatgaacaactagctaatgagcttaatttggctaatggttctctagctatccttagggatgtcaatgaaactcttcaagacaaatttgctaatttagacaaaagtcataaagatcttgaagttcaatttgacactctttggaatagcacctctcaaccaaatgtggtttttaatccttccaacccatctactagcaatgattgtgctaggtgttacaatattgatttgaactcttgtgctactaatgttgatgctatgcaagctcttaagaaagagaatgaaaggttgggcacattggtaaaatatggatacatgaagacataccattcaaaagatgccctttataagaccatcaccgctcatcctaacaaggatggacacgggctcgggttttctagtggaagtcctgtgtctaagcgtgtgatggtaaatgggaaagaatgcttgatgtttttgagagaaggtaaagctccacaagcaagtgaggtgacttgtcccttcactggtcagacactcggaagttccgggcaaaatgacgggaagttcctgccctgtaagacaggaagttccgaacattttgtcaggaagttccggacttctgatgagtcgaaggggctgaccggaagttcctggtataatgccaggaagttccggccagaaggtctttactatgatttatatgtaatttccaaaaattcagagggcaaagtggttgcttattttaatgggaattacaatgatgagtaccgcacttgtgtgtgggtgccaaaggctttggtaactaacatcaagggacccaaacttatgacgggagagaggtgtatgtttacaagtcttgatgagcagggtggaagtcgtgaaaatattttctttggagatgatggtaaaggaaaggattgtgtgtgtagcgcttgccaagccgggaagcaagttgggagtccgcatcctatcaaaaacatcatgactacaacaagaccactcgagcttcttcatatggacttatttgggcccgtggcctacataagcattggaggtaacaagtatggttttgtcattgttgatgatttttcacgcttcacttgggtgtactttctccatgacaaaagcaaagctcaagatgtcttcaagcgtttcgcaaagcaagcccaaaacctctatgacctcactatcaagagggtgcgaagtgacaatggaggagaattcaagaacactcaagtggagaaatttcttgatgaagaaggaatcaagcacgagttctccgccccctatgatcctccccaaaatggcattgttgaaaggaagaaccgaaccctcattgaagccgcaagggcaatgcttgatgagtacaagacttcggatgtcttttgggcggaggccatgagtgatgtggatccaagtcaagctataggtactaaggctattggagacatacgactagtcgagacgcaggatgaccaagaagatagggatcaacctccgtcatcaacatccaatagccctacaagtgctgtgtctgctgagccggaagttccggatcctattgaccagaacctccggacatctccaggcccgatccccccagtgcaccatccaaggatacataacactgtccaaagagatcatcccgtcgacaacatacttggtgacataagaaaaggggtaactactcgctctcgtgtcgcatgtttttgtcaacactactcgtttgtctcttctttggaaccaaccagggtggaagatgcgcttggtgatccggattgggtgatggctatgcaagaggagttgaataacttcactcgcaaccaagtatggactttggcggagagacccaagcaaaatgttgtcggcaccaagtggatctttcgcaacaagcaagacgaacatggggtggttgtaaggaacaaagcccagatagttgcgcaaggattcacccaagtcgagggtctcgattttggtgaaaccttcgcacctgtcgctcaccttgagtcaattagaattcttttagcctatgccgctcaccatgatttcaggttattccaaatggatgtcaagagagcctttcttaatggacctatctcagagttggtctatgtggagcaaccaccggggttcgaggatccaaagttgccaaaccatgtgtacaagctccacaaggcgctctacgggctccaacaagcccctagagcttggtatgaatgtctccaagattttcttttgaaaaatggttttgaaattggaaaggcggatactactctcttcactaaaaaatttaagagtgatttattcatatgccaaatttatgtcgatgacataatatttggttctactaatgcctctttttgtgaagaatttagtagtatcacgactaaaagtttcgagatgtctatgatgggcgagttgaccttcttcctcgggatacaagtgaagcaagcacaagaggggaccttcatctctcaaactaagtacgtgaaagacatactcaagaagtttgggatggaggataccaaacctatcaagacgcccatgcctactaatggccacctagacctcgacaataatggtaaatgtgtggaccaaaaggtatatcgctccatgataggatctttgctttacttatgtgcatctcgtcccgacatcatgcttagtgtttgcatgtgtgcccgttttcaagcggaacctaaagagtgccatttgattgccgtcaagagaattctaagatatttagttcatactcctaatcttggcttatggtatcctaaggattgtgactttgagcttttgggctattccgattcggattatgccgggtgtaaggttgatagaaaaagcacaaccgggacttgtcaattccttgggcggtcccttgtttcttggtcatacaagaagcaaaattccattgcattatccaccaccgaagccgaatatgtcgccgccggttcttgttgtgcccaactcctttggatgaaacaaaccctacaagattttggctataacttcaccaagatcacactcctatgtgacaatgagagtgccatcaaaatagccaataatcccgttcaacattcaagaaccaagtacatagatatttgccatcactttttgagagatcatgagactaaaagagacatatgccttacccatgtgagaaccgagacccaattagctgacattttcactaagcctttagatgagaaaagattgtgcgagcttaggagtgaactcaatatcttagactctcgtaacattaggccggaagttccagtgttcttggtccggaacttccggtctctatccagccagccagcaaaccttgattcctccaatttttattttaaccattgcacttcaaccttgttgattcttgttgcagtggtcagtatgcctcatgagaagagacagaagctttcacaggatgttcctgctgactcgagtcccccggttcatggtcctaggaggagattgggcaaagaaaaagttggaaatttttacagtgggagtcaaattcctattcattctaggagggctggtagcattgtcattggtgatgctccccgctctccctctccagttgcatctaagtcagatgatggtggcaatgaggatgagcctagttctgagagcaatcctttgaggctttacaagacaagggttgttgatcctgatcctagacgtccaagtgtgaactatttgaagaatctgctcaagtgtggaatggacagaatggtgagtcctgacacaatgcctgctgactctcaggatgacagattcaggaccgtggtgcaagttgattggtataattctgtgatcatgggaagatctcatccagtggtagagatgaagtggctagactggcagtacatgtccttaaagaacaacttagttttcagtgaggtacgcaaggtgtgtgagcgcaagcacgtggcagatctgttggccttgcagtattcctggaatgaggaagtcattggtcagttatactccaccgctttctttggcaccaccaagaagggcattgaatttgtgaagtggaccattcaggggcagcagtatagggtctctatggcacagtttgctgcagctctggagttagatgatgatgacctgagtcgtcctcatatctttgtagaaaatgctttgtcaccgaccagcactactttcctgtatgagaaggatgctcccaaggattgtttggggactactcgtgggttgcgtccatactatagagtgctttattctatcttcag

SEQ ID NO: 15759 - DNA, 1653 bp, Oryza sativa
  Clone ID: TFbOSC900226j.C1.o2.gm
atgtcggacttaggggaaaagaatggggaaaatggaaatgaagatggagcgagcagcaagggaactccatcaaccaagggagctactataccttttgattacagcaaacttaccattccctctcacaactttgtctccgtgccttccgggcatgctcctcaatttgatgggacacattacgccgcttggaagcacaagatgaagttgaatctaatctctctgcatccaagtatttggaaagttgtttgtacaggtgttgatgtaccccatgatgatatggagctcacttcggagcaagagcaactcatccaccgcaatgctcaagcttccaatgcaattctctccgccttgagtccggaggagttcaacaaggttgatgggtctgaggaggccaaggagatatgggatactttgcaattggctcatgagggttcacccgccgtttgtgaggccaaaattgaattattggaaggaaggcttggaagatttgtgatggatgacaaggagacaccacaagagatgtatgataggatgatgattcttgtcaacaagatcaaaggacttgggagtgaggacatgacaaatcactttgttgtcaagagacttctccgtgcttttggtccaagaaatcccactcttgtatctatgatatgggaaagaaaagacttcaagaggctcaccccaagtgacattcttggaagaattgtgtctcatgagatgcaagaagaggaagctcatgaagtgaggcaaatggtgaagaatgccgccatgatcaaaaatcaagaagttgcttggaaggcaaaacaagaagaagagtcaagttgtgaagaaagtgaagatgaagagatggcttttgttgtcaagagattcaagcactttcttcgcaagagtggctatggcaaagggaggaaggatgatgacaagggaaagcggcaatcaaagagagcttgcttcaattgtggtgaatatggccacttcattgccgattgtcccaagtcaaatgaagctaaggctaagggaggcaagaagaagccggagcgtgctcatgtggcggaggcacacatggcggaggtgtggtactccagagatgaggaagatcccgaggtcaagcccatgcccaagccaaaagacaaggttgaaggagaaggtggtgttgctaccgtcgccttcaagtcatcatcttcaagcaaggcgcgtctcttcaacaacttgagtgatgacgacgacgactcctaccactactcttgtttcatggcccaaggccgcaagggttcgcggtggaccgggtgcacggcggcggctcacggaaacgaacgtccgagatcgatcctatccaaaacggacggccaagatccatcggtccacgaccgggccacggggaacgacgacgatgacgtcggtggtgacgtcaccaccggcggcggctcgggcgtgcatgctcgccggcgaatgacggcgcggcggcgcaaacgaagagcacctacgggtagcggacggcacggcgaactcaccggtgaccaaagtagcggcggaggagcaacggacggcgacggcgtcgaggaagaagcggcggcaaccttcggcttgatgacgacggcggtgctccggcgacctacggcgacggcggaggggcggacgaggacggcgacgtga

SEQ ID NO: 15760 - DNA, 6711 bp, Oryza sativa
  Clone ID: TFbOSC900330j.C1.o8.fg
atgtcggacttagggggaaagaacggggaaaatggaaatgaagatggagcgagcagcaagggaactccatcacccaagggagctactataccttttgattacagcaaacttaccattccctctcacaactttgtctccatgccttccgggcgtgctcctcaatttgatgggacacattacgccgcttggaagcacaagatgaagttgcatctaatctctttgcatccatgtatttggaaagttgtttgtacaggtgttgatgtaccccatgatgacatggagctcacttcggagcaagagcaactcatccaccgcaatgctcaagcttccaatgcaattctctccgccttgagtccagaggagttcaacaaggttgatgggcttgaggaggccaaggagatatgggatactttgcaattggctcatgagggttcacccgctgttcgtgaggccaagattgaattattggaaggaaggcttggaagatttgtgatggatgacaaggagataccacaagagatgtatgataggatgatgattcttgtcaacaagatcaaaggacttgggagtgaggacatgacaaatcactttgttgtcaagagacttctccgtgcttttggtccaagaaatcccactcttgtatcaatgataagggaaagaaaagacttcaagaggctcaccccaagcgacattcttggaagaattgtgtctcatgagatgcaagaagaggaagctcgtgaagtgaggcaaatggtgaagaatgccgccatgatcaaaaatcaagaagttgttttgaaggcaaaacaagaagaagagtcaagttgtgaagaaagtgaagatgaagagatggcttttattgtcaagagattcaagcactttcttcgcaagagtggctatggcaaagggaggaagaatgatgacaagggaaagcggcaatcaaagagagcttgcttcaattgtggtgaatatggccacttcattgccgattgtcctaagtcaaatgaagctaaggctaagggaggcaagaagaagccggagcgtgctcatgtggcggaggcacacatggcggaggtgtggtactccggagatgaggaagatcccgaggtcaagcccaagcccaagccaaaagacaaggttgaaggagaaggtggtgttgctaccgtcgccttgaagtcatcttcttcaagcaaggagcgtctcttcaacaacttgagtgatgacgacgatgactcctaccactactcttgtttcatggcccaaggccgcaaggtgatgactcaaaagccctctcacacctctcttgatgttgattctagtgatgaggaaagtgataatgaattagatgatgtgcttaagagctttagcaaacccgctatgcaacatttggctaagttaatgagagctttggatagtaaagaacaatctctcgaaagacaagaagaattacttattcttgagaagaaaagaaaccttgccttagaggagagcctagctaaaaaatgtgctaaaaatgaacaactagctaatgagcttaatttggctaatggttctctagctagccttagggatgtcagtgaaactcttcaagagaagtttgctagtttagacaaaagtcataaagatcttgaagttcaatttgacactctttggaatagcacttctcaaccaaatgtggtttctaattcttccaacccatctactagcaatggttgtgctaggtgttacaatattgatttgaactctcatgctactaatattgatgctatgcaagctcttaagaaagagaatgaaaggttaggcacattggtgaaatatggatgcataaagacataccattcaaaagatgccctttacaagaccatcaccgctcatcctaacaaggatggacacgggctcgggttttctggtggaagtcctgtgtttaagcgtgtgatggtaaatgggaaagaatgcttgatgtttgtaagagaaggaaaagctccacaagcaagtgagatgacttgtcccctcactggtcagacacccggaagttccgggcaaaatgaccggatgttcctgccctgtaagactggaagttccggacattttgtcaggaagttccgggcttctgataggccgaaggggctgaccggaagttccgggtataatgctaggaagtttcagccagagggtctttactatgattcatatgtaatttccaaaaattcagagggcaaagtggttgcttattttaatgggaattacaatgatgagtaccgcacttgtgtgtgggtgccaaaggctttggcatactcctccggtggctcaagttgggttgtggacagtggctgcaccaatcatatgacgggagagaggagtatgtttacaagtcttgatgaggagggtggaagtcgtgaaaatattgtctttggagatgatggtaaaggaaaggtaatgggtctcggtaagattgccatttccaagaatcaatctctttctaatgtcctccttgtcaattctttaagctacaatttattatccgtgtctcaattgtgtaagttaggatttaattgcttgtttaccgatgtggatgtgaccgtttttaggcgagatgactcttccatagcattcaagggtgtgttaaagggtgatctctatctcgttgatttcgacgtagatagagtgaatccggaggcatgcttgattgctaaatcctctatgggttggctatggcaccgtaggctagcccatgttggaatgaggaatttggcatctcttctaaaaggggaacacattcttggtctatctaatgtttcttttgagaaagatcgtgtgtgtagtgcttgccaagctgggaagcaagttgggagtccacatcctataaaaaacatcatgactacaacaagaccactcgagcttcttcatatggatttatttgggcccgtggcctacataagcattggaggtaacaagtatggtttcgtcattgttgatgatttttcacgtttcacttgggtgtactttctccatgacaaaagcgaagctcaagatgtcttcaagcgcttcgcaaagcaagcccaaaacctctatgatctcactatcaagagggaagaaggaatcaagcacgagttctccgccccctatgatcctccccaaaacggcattgttgagaggaagaaccaaaccctcattgaagccgcaagggcaatgcttgatgagtacaagacttcggatgtattttgggcggaggccgtgagtaccgcatgtcatgccatcaatcacttgtacctccacaagatcctaaagaaaacctcatatgagctcttgagtggtaagaagcctaatgtttcatattttcttgtctttgggagcaaatgttttattttaagtaagaggcctcgctcatctaagttctcacctaagatggatgagggattcttatttggctatgaatcaaatgcacatgcctatcgtgtcttcaacaaaacctccggtattgttgaagtcactagggatgtgacatttgatgaatctaatggctcccaaggagagcaagttgttgtacatgttgtaggggatgtggatccaagtcaagctataggtactaaggctattagagacatacgaccagtcgagacgcaggatgaccaagaagatagggatcaacctccgtcatcgacatccaatagccctacaagtgctgtgtctgttgagccggaagttctgggtcctattgaccggaacctctggacatctccaggcccggaagttccgggttctatagtccggaatctccggaccagtggcagtgaagatgcacaaatggatcgtagatggatgtactatgcgcatcgttcgtctaccgagtataaagagggggtcactgaatttgtcacatttgcggataatgacagaaaaagtaggatgagcatgcacatgttgtgtccatgtagggactgtaagaatgaccagatgatcgaagacaaggatgaagtgcatgttcatttgataatgaatggattcatgaagaaatatacctgctggaccaagcatggagagcaagaggtgcctgatgtcgcagctgaagaagtgttggatcaggatgtagagaacaccgccgcagctcgagatggcatgttcgtaccttctcctttaggtggagagaccatagatttggacactcaatgtctattacaatgttgcatgacattgaagacgcagaggacaacgacagagattttgagaagtttagaatacgctgacttggatgtctgccctatctatggggcatcaagatacaaacgagcaaagagtgaaggtgaaggaagtaagtcaaagaggggaggcccagcaaaggtggtgtggtatctcccaattgcggagcgcatgaagagaatgtttgcgaataaggaacaagctaagcttgtgcgctggcatgccgaagaacggaaagtcgatagtatgctgacgcacccagcagatttagtacagtggaggacaatcgataggatttaccaggaattctcaaatgacccaagaaacatgcgtttcgcaatgtgtacggacggcattaatccttttggtgatttgagcagtcgtcacagtacatggccagttctgcttgttaactataaccttcctccctggttgtgtttcaaaagaaagtatattatgcttgccatgctcattcaaggaccgagacaacctggcaacgatatcgatgtgttccttgaaccgataatcgatgacttcgaaaggctatggaatgagggtacacgaacatgggacgcatatgcacaagagtatttcaacctccatgcgatgctgttttgtaccatcaacgattatccggcccttggcaacctttctggccaaactgtgaaagggaaatgggcatgttcggagtgtatggaggaaacaagaagcaaatggttgaagcattcacacaagacggtctacatgggtcacagaagatttctcccaaggtatcacccatataggaatatgataaagaatttcaatggacacagagatacagccggaccaccggcagagctaacagggacagaggtgcacaacttagtgatgggaataaccaacgagtttggaaaaaagaggaaagttggaaagcgaaaagagaagagcacatcgaaggaaaaaacagaggagcatgtggaaaaacaaaagataaaagagaggagcatgtggaaaaagaagtcaatattttggagactaccatactggaaggatcttgaagttcgccactgcatagatttgatgcatgtcgagaagaatgtatgcgagagtttaatgggattactgcttaacccaggtactacaaaggatggtctcaacgcccgacgagatctggaagatatgggggttcgctcggagctacatcccataaccacggaatccggcagggtttaccttcctccagcctgctacactctctcgaaagaagagaagattgatttgctaacatgtttgagtggtataaaggttccatctggttactcatcaagaattagtaggctcgtttcactgcaagatcttaagttggtaggaatgaagtcgcatgattgccacgttcttatcacacagctgttgcccgttgcaataaggaatattttgcctcctaaggtgcgacacacgatccagcggttgtgttccttcttccatgcaatcggccagaagatcattgatcccgagggactagatgaactacagacagaacttgtgagaaccctatgtcatcttgagatgtactttcctccaactttctttgacataatggaacatcttccggtgcaccttgtgaggcaaacaaagtgctgtggtccagcatttatgacgcagatgtatccttgcgaaaggtacctggggatctttaagggttatgtacggaaccgttcacaccctgaggggagtatcatcgagagttacaccaccgaagaggtcatcgatttttgtgtggactacatgtcagaaacatcttcaattggattaccacgatctcatcacgaagggaggcttgatggtgttggtactgttggaagaaagactattaggttggatcggaaggtgtacgataaagctcatttcacggtactacagcatatgactgaggtggtgccgtacgttgacgaacaccttgcagttatccgacaagagaacccaggccgatcaaagagttgggtcaggaataagcacatgtcttctttcaacgagtggctgaagaaccgaattgccaggttgcagaacttgtctagtgaaacacttcagtggttgtcacagggtcctgaatggagtgccaccacctggcaaggatatgacataaatggatacacctttcacacggtaaagcaagacagcaaatgcacagtgcagaacagtgggttacgcatcgaagctgctagtgacggtggtcgtcgtgatcaatactacggtttcaccactgtcaacttggctaacaacgcgtacaaggatgaaccgttcattctcgccaaacaagttgttcaagtgttcaacatagttgacccgtgtaacaagaaactacatgttgttcgtgaagggaaaaggagaattgttggattggaaaatattgtagacgaggatgattacaaccagcacgtccacggcataggtcaagaaatacctctagaagaggaggaagaagaagatgaagttcaatatgcatgtgtcgaccatgaggaaggattatttttgtaa

SEQ ID NO: 15761 - DNA, 3312 bp, Oryza sativa
  Clone ID: TFbOSC900406j.C1.o18.gm
atggagctcacttcggagcaagaacaactcatccaccgcaatgctcaagcttccaatgcaattctctccgccttgagtccggaggagttcaacaaggttgatggacttgaggaggccaaggagatatgggatactttgcaattggctcatgagggatcacccgccgttcgtgaggccaagattgaactattggaaggaaggcttggaagatttgtgatggatgacaaggagacaccacaagagatgtatgataggatgatgattctggtcaacaagattaaaggacttgggagtgaggacatgacaaatcactttgtggtcaagagacttctccgtgcatttggtccaagaaatcccactcttgtatcaatgatatgggaaaggaaagacttcaagagactcaccccaagggacattcttggaagaattgtgtctcatgagatgcaagaagaggaagctcgtgaagtgagacaaatagtgaagaatgccgctatgatcaaaaatcaagaagttgctttgaagggaaaacaagaagaagagtcaagttgtgaagaaagtaaagatgaagagatggcttttattgtcaagagattcaagtactttcttcgcaagagtggctatggcaaagggaggaaggatgatgataagggaaagaggcaatcaaagagagcatgcttcaattgtggcgaatatggccacttcattgccgattgtcccaagtcaaatgaagctaaggctaagggaggcaagaagaagccgaagcgtgctcatgtggcggaggcacacatggcggaagtgtggtactccggagatgaagaagatcccgatcacgaggtcaagctcaagcccaagtcaaaagacaaggttgaaggagaaggtggtgttgctaccgtcgccttcaagtcatcctcttcaagcaaggagcatcttttcaacaacttaagtgatgacgacgacgactcctaccactactcttgcttcatggcccaaggccgcaaggtgatgactcaaaagccctctcaaacttctcttgatgttgattccagtgatgaggaaagtgataatgaattagatgatacataccattcaaaagatgccctttacaagaccatcaccgctcatcctaacaagaatggacacggctcgggttttcgggtggaagtcatggacccggaacatccggacaaaccgggagaaacttccgggtgggagtctctgtctctcaaaaattcccaccaggaagttccgggccaatggccgtgcacacgatatgaccggaagttccggtcacaatgccaggaggttccggccagagggaaacaagttgggaatccacatcctatcaagaacatcatgactacaacacgccctcttgagcttctacatatggatttattcgggtccatggcctacataagtattggaggtaacaagtatggttttgtcattgttgatgatttttcccgcttcacttgggtgtattttctccatgacaagagtgaggctcaaaatgtcttcaagcgcttcaccaagcaagcccaaaacctctatgatctcaccatcaagaaggtgcgaagtgacaatggagaattcaagaacactcaagtggaggaattccttgatgaagagggaatcaagcacgagttctccaccccctatgatcctcctcaaaatggcattgttgagaggaagaaccgaactcttattgaagccgcaagagcaatgcttgatgagtacaagacttcggatatcttttgggcggaggctgtgagcaccgcatgccatgccatcaatctcctctacctccataagatcctaaagaaaacttcatatgagctcttgagcggtgatgtggatccaagtcaagctataggtactaaggctattggagatatacgactagtcgagacgcaggatgaccaagaagatagggatcaacctccgtcatcgacatccaatagccctacaagtgctgtgtctgctgagccggaagttccaggtcctattgaccggaacctccggacatctccaggcccagaagttccgggttctacagtccggaacctccggaccagcggtagtgaagacgtgccaacggcgcaagtggatgggatcgatgttccgggcactttagagcatactgatcaggctcaggtccccccagtgcaccatccaaggatacatcacattgtccaaagagatcatcccgtcgacaacatacttgaattggtctatgtggagcaaccaccggggttcgaggatccaaagttgccaaaccatgtgtacaagctccacaagacgctctacgggctcaaacaagcccctagagcttgtatcatgactaaaagtttcaagatgtctatgatgggcgagttgaccttcttcctcgggctacaagtgaaacaagcacaagagggcaccttcatctctcaaaccaagtacgtgaaagacatactcaagaagtttgggatggaggatgccaaacctatcaagacacccatgcctaccaatggccacctagacctcgacgataatggtaaatgtgtggaccaaaagcgggaacaccactccacaggcatcctcgacggcacggacgaagcctactcctcggagaacccgccatcggacacatactcgagctctgaggaccagccggggtacacaaacgacaatgttgacatacagatccaccgggaacaccactccacaggcatcctcgacggcacggacgaagcctactcctcggagaacctgccatcggacacatactcgagctctgaggttggggggaaaaggctgacgtcagcgagggggcgcggcgccgacaggcggggcccaccggtcagcgaccgggagagagagaaagggggtggcggcgcgcgggcccacgggtcagcggcacgggggaaaggaggggcggcggcgccacgtggcggccgaaccgacggccccgatctacccaagggtagatcggacggcggcgggacctcgcggccggggcgcgcgggcgcggcgcgagacggcggcaaccatggcgccggcggcgcggcgctcacacggcggcggcgcgcatgcggcagcggcgcaaggcggcgaccgaaggcgaccgaccggcggcggggagcggcggctagaggaggagcggcggctacgcggctaagcggcgcgcacgcggctacccggtacggggaaaaggagaaagaggagggggaagcctcaccgacaacggtcgacgacggcggccgacggaggacgacgacgacggcgggacgagctccggaacctcctaacgaacaaaaggagagggattag

SEQ ID NO: 15762 - DNA, 3540 bp, Oryza sativa
  Clone ID: TFbOSC900415j.C1.o4.fg
atgtcggacttaggtggaaaggacggggaaattggtaatgaagatggagcgagcagcaagggaacaccatcacccaagggagccactacaccttttgattacagcaaacttaccattccctctcacaacttcgtctccgtgccttccgggcgtgctcctcaatttgatgggacacattacgccgcttggaagcacaagataaagttgtatctaatctctttgcatccaagtatttggaaagttgtttgtacaggtattgacgtaactcatgaagacatggagctcactttggagcaagagcaactcatccatcgcaatgctcaagcttccaatgcaattctctccgccttgagtcctgaggagttcaacaaggttgatagacttgaggaggccaaggagatatgggatactttgcaattggctcatgagggatttcccgccgttcgtgaggccaagattgaattattggaaggaaggcttggaagatttgtgatggatgataaggagacaccacaagagatgtatgataagatgatgattctcgtcaacaagattaaaggacttgggagtgaggacatgacaaatcactttgttgtcaagagacttcttcgtgcttttggtccaagaaatcccactcttgtatcaatgatacgggaaaggaaagacttcaaaaggctcaccccaagtgacattcttggaagaattgtgtctcatgagatgcaagtagaggaagctcgtgaaagtggctatggcaaagggaggaaggacgatggcaagggaaagaggcaatcaaagagagcttgcttcaattgtggtgaatatggccacttcattgccgattgtcccaagtcaaatgaagccaaggctaagagaggcaagaagaagccggagcgtgctcatgtggcggaggcacacatggcggaagtgtggtactccgaagatgaagaagcctccgaggccaagcccaagcccaagccaaaagacaaggttgaaggagagggtggtgttgctaccgtcgccttcaagtcatcttcttcaagcaaggagcgtctcttcaacaacttgagtgatgacaacgacgactcctaccaatactcttgcttcatggctcaaggccgcaaggcatactcctccggtggttcaagttgggttgtggatagtggttgcaccaatcatatgactggagagaggagtatgtttacaagtcttgatgaggagaacaaaactcatgagaatattgtatttggagatgatggtaaaggaaagttgggttacaattgcttgtttaccgatgaggatgtgacggtctttagaagggatgactcctccgtagcattcaaaggcaagttagagggtgatctctatcttgtcaatttcgatgtggatagagtgaatccggaagcttgtttgattgctaaatcctccatgggttggctatggcatcgtagactagcccatgttggaatgcggaatttggcaattcttctaaagggggaacacatcctcgggctcactaatgtcacatttgagaaagatcgtgtgtgtagtgctttccaagccgggaaacaagttgggaatctacatcctatcaagaacatcatgactacaacacgccctcttgagcttctacatatggatttattcgggcccgtggcttacataagtattggaggtgaggctcaagatgtcttcaagcgcttcgccaagcaagcccaaaacctctatgatctcaccatcaagagggtgcgaagtgacaatggaagagaattcaagaacactcaagtggaggaattccttgatgaagagggaatcaagcacgagttctccgccccctatgatcctcctcaaaatggcatcgttgagaggaagaaccaaactcttattgaagccgcaagagcaatgcttgatgagtacaagacttcggatatcttttgggcggaggccgtgagtaccgcatgtcatgccatcaaccgcttgtacctccacaagatcctaaagaaaacttcatatgagctcttgagtggtaagaaacctaatgtttcatattttcgtatctttgggagcaaatgctttattttgagtaagaggcctcgctcatctaagttctcacctaaggtggatgagggattcttacttggttatgaatcaaatgcacatgcctattgtgtcttcaacaaaacctccggtattgttgaagtcactagggatgtgacatttgatgaatctaatggctcccaaggagagcaagttgttgtacatgttgtaggtgatgtggatccaagtcaagctatatgtactaaggctattggagacatacgaccagtcgagacggttgaagatgcacttggtgatccggattgggtgatggctatgcaagaggagttgaataacttcactcgcaaccaagtatggacattggtggagagacccgaccaaaatgtcatcggcatcaagtggatcttccgcaacaagcaagacgaacatggagtggttgtaaggaacaaagcccggttagttgcgcaaggattcacccaagtcgagggtcttgattttggtgaaaccttcgcgcccgttgctcgccttgagtcaatccaaatccttttagcctatgccgctcaccatgattttaggttattccaaatagatgtcaagagtgcctttctcaatggacctatctcggagttggtctatgtggagcaaccaccggggttcgaggatccaaagttgccaaaccatgtgtacaagctccacaaggcactctacgggctcaaacaagcccctagagcttgtagtatcatgactaaaaggtttgagatgtctatgatgggcgagttgaccttcttccttgggctacaagtgaagcaagcacaagagggcactttcatctctcaaaccaagtacgtgaaggacattctcaagaagtttatgatggaagatgccaaacccatcaagactcctatgcctactaatagccacctagacctcgacgataatggtaaatgtgtggaccaaaaggtataccgctccatgataggatccttgctttacttatgtgcatctcgtcccgatatcatgcttagtatatgcatgtgtgcttgctttcaagcggagcctaaagagtgccatttgattgccatcaagagaattctaagatatgtagttcatactcctaatcttggcttgtggtatcctaaaggttgtgactttgagcttttgggctattccgattcggattatgccgggtgtaaggttgatagaaaaagcacaaccgggacttgtcaattccttgggcggtcccttgtttcttggttctccaagaagcaaaattccattgccttatccaccgccgaagccgaatatgtcgccaccggttcttgttgtgcccaactcctttggatgaaacaaaccctaaaagattttggctacaacttcaccaagattccactcctatgtgacaatgagagtgctatcaaaatagccaacaatcccgttcaatactcaagaaccaagcacatagacattcgccaccacttttcttga

SEQ ID NO: 15763 - DNA, 242 bp, Oryza sativa
  Clone ID: TFbOSC422776j.C1.o6.gm
atggagatggagctagggttgggaaggtactggggggttgggaggaggcggtgcggcgcgtgcgcggtggcgccggcggcggtgcactgccggacgtgcgacggcgacggcggcggaggtgggtatctgtgcgcggggtgcgacgcggagcatgggagggcggggcacgagagggtgtgggtgtgcgaggtgtgcgagctcgcgccggcggcggtcacctgcaaggccgacgcggcggcgct

SEQ ID NO: 15764 - DNA, 169 bp, Oryza sativa
  Clone ID: TFbOSC415445j.C1.o6.gm
atggagttgcgcaagtactggggcgtcggcgggcggcggtgcggtgcgtgcgaggcgtcgccggcggccgtgcactgccgcggctgcggcggggtgtacctgtgcacggcgtgcgacgcgcgcccggaccacgcgcggacggatcacgagcggattgtggttgtgctag

SEQ ID NO: 15765 - DNA, 771 bp, Oryza sativa
  Clone ID: TFbOSC403009j.C1.o11.fg
atgaagatccagtgcgacgcgtgcgagagcgcggcggcggcggtggtgtgctgcgcggacgaggcggcgctgtgcgcggcgtgcgacgtggaggtgcacgcggcgaacaagctggccgggaagcaccagcggctgccgctggaggcgctctcggcgaggctcccgcgctgcgacgtgtgccaggagaaggcggcgttcatcttctgcgtggaggaccgcgcgctcttctgccgcgactgcgacgagcccatccacgtccccggcacgctctccggcaaccaccagcgctacctcgccaccggcatccgcgtcggcttcgcctccgcctcgccctgcgacggcggcagcgacgcccatgactccgaccaccacgccccgcccatgggctcctccgagcatcatcaccatcatcagcagccggccccgaccgtcgccgtcgacacgccctcgccgcagttcctgccgcagggctgggccctgcagaaggagtcgtcgccgccgctcgggttccaggagctggagtggttcgccgacatcgacctgttccacaaccaggcgcccaagggcggcgccgccgccggccggacgacggcggaggtccccgagctcttcgcttcgcaggcggccaacgacgtggcgtactacaggccgccgaccaggaccgccgccgccgccttcaccgcggccaccggcttccgccagagcaagaaggcccgcgtcgagctccccgacgacgaggaggattacctcatcgtccctgatcttggttga

SEQ ID NO: 15766 - DNA, 1212 bp, Oryza sativa
  Clone ID: TFbOSC23982j.C1.o10.fg
atgggtcaagatgaggtggaggtaggtgcggagaagaaggatcaagaactaccggaggtggaggtggtcgaggaggaggaggaggagggatccaagaaggcggcggcgggctgcgactactgcggcgacgcggcggcggtggtgtattgcagggccgacgcggcgaggctctgcctgccatgcgaccgccacgtgcacggcgccaacggggtgtgctcccgccacgcgcgcgcgccgctctgcgccgcgtgcgccgccgcgggggccgtcttccgccggggcgcgggcggcttcctctgctccaactgcgacttctccaggcaccgccacggcggggagcgcgacccggcggcgccgctccacgaccgctccacggtgcacccgtacaccgggtgcccctccgcgctcgacctcgccgcgctcctcgggatctcctactccgacaaggcggcggcggcgaccgcggcggcggggggcgacgacggtgggtggtgggccatctgggaggagccccaggtgctcagcctcgaggatctcatcgtcccgaccacctcctgccatggattcgagcctctcctcacgccatcttcccccaagattcagaactcgccggatgggaaggtgaatgaggaggtcatacgacagctaaccgagctcgccaattcagacggcggcggcgcgcagatttgggctcatcgcgaggcggcgcaggccggcgatcatcagttaccttcatggggaacaacaacacaacacaacactggacatggcaatttcggtactgcaaacagcaatgaggttgcaaccatgccgacgcctggttatgagaatggtggatgggataacagcgattaccctgcgctaaatgatccgtgcaaggtcgagttcacatatgagcaacctccagccagctcagctgaagcatgtatttcatcatttgttcagatgtctgaactttgccccagcatgagcaatggtagcagcatggaggaaacccaccagacaaaccctggaaatggcacgccaatgcaagttctacccaaaatgccagaatttgttccttgccccgacaggaacttggtcatttctcgctataaagagaagaggaagacaagaagattcgacaggcaggtccggtatgagtcccgcaaagctcgtgctgatagcaggctgaggattaagggccgttttgctaaagtcaatcagatttga

SEQ ID NO: 15767 - DNA, 1284 bp, Oryza sativa
  Clone ID: TFbOSC400961j.C1.o15.fg
atggcaggccgctttggaacttttctcatgtatctgcactggctacctcacaccggagctaaagctactactaccacaagcaaggctacttcgttcatgaattataattttggtggcaacgtgttcgaccaggaggttggagttggaggcgaaggaggaggaggaggagaggggagcggctgcccatgggcgcggccgtgcgacgggtgccgcgcggcgccgagcgtggtgtactgccgcgcggacgcggcgtacctgtgcgcgtcgtgcgacgcgcgggtgcacgcggccaaccgcgtggcgtcccgccacgagcgcgtgcgggtgtgcgaggcctgcgagcgcgccccggccgcgctcgcgtgccgcgccgacgccgccgcgctgtgcgtggcgtgcgacgtgcaggtgcactccgcgaacccgctcccggccatcaccatcccggccacctccgtcctcgctgaggcggtggtggccaccgccaccgtcctcggcgacaaggacgaggaggtggactcttggcttctcctctccaaagattccgacaacaacaacaacaataacaacaacaacgacaacgacaataacgacaacaacaacagcaacagcagcaacaacggcatgtattttggtgaagtcgatgagtactttgatcttgtcgggtacaattcgtactacgacaaccgcatcgaaaacaaccaagatcggcagtatgggatgcatgaacagcaagagcagcagcagcagcagcaggagatgcaaaaggagtttgcagagaaggaagggagcgagtgtgtggtaccttcacagatcacaatgctgagtgagcagcagcatagtggttatggagttgtgggagcagaccaggccgcctccatgaccgccggcgtcagtgcttacacagattccatcagcaacagcatatctttctcatcaatggaggcgggtatagtaccagacagcacggtgatagatatgccaaattccagaatcctgacacctgctggagcaatcaatctcttctcaggtccctcgcttcagatgtcccttcacttcagctccatggacagggaggccagggtgctcaggtacagggagaagaagaaggccaggaagtttgagaagacaatacgttatgaaacaagaaaggcgtatgcagaggcacgaccccggatcaagggccgtttcgccaagagatcagatgtgcagatcgaagtggaccagatgttctccactgcagctctatctgacggtagctatggtactgttccatggttctga

SEQ ID NO: 15768 - DNA, 672 bp, Oryza sativa
  Clone ID: TFbOSC900291j.C1.o4.fg
atggaaaatgaggtgggttgcgagtgccagctgtgcggtgggcggcgtggcgtggtgttctgcggcgcccacggcgggcgcctctgcctccaatgcgaccgagccctgcaccaagcccacggcggggccggcgatcacccccgcgcgccgctctgcgactcgtgcaacgccgccgccgccgagctgcgcctcaacgacggggccacgctgtgcgggccgtgcgcctacccctacgcctacgcctacccctacacatacacctacgtctacaccggctgccccaccccgctggagatgatgcgcctcctccatgccgccccgccgccgccgccagctacctgcagtttacaacaacgaggagaaggagaagagctacttccaactctcttatctgcgactgcgactcctaatactgctactgctgcgccaatggcaatgccacccccaccactacaacaccacaccaccacctccctcatcatgatgataaggaacattcacaagcgggaggagaggaacagagccaagctcaggttcagcaagcagatcaagtatgcctgccgcaaggccggagccgacgcacgaaagcgggtcaaaggccgattcgcaaaggcctcttcctcctcctcctcctcctcctcctcttcttcttccatcgatcatcgattatga

SEQ ID NO: 15769 - DNA, 903 bp, Oryza sativa
  Clone ID: TFbOSC401495j.C1.o5.fg
atgtcggtggcggcggaggggaaggagaagggggttggtggtgggggtggtggtgcgggtgcgggggcgtgcgagctgtgcggggcggcggcgagggtgtactgcggggcggacgaggcgacgctgtgctgggggtgcgacgcgcaggtgcacggggccaacttcctggtggcgcggcacgcgcgggcgctgctgtgccgcgggtgcgcgaggcccacgccgtggcgcgccgcggggcccaggctgggccccaccgcgtcgctctgcgagcgctgcgtccgccgcggcggtggtggccgtggtggtggaggaggtggaggcgctgctggtggtggaggccgtggtggtgggggagacgaggagatgggcggcgagggcgatgaggaggaggaggacgaggacgaggaggtggtcgtcgaggaggaggaggacgaggatgatgaagacgaggagggggagggggagggggagaaccaggtggtgccgtgggcggaggaggcggaggccacgccgccgcccgtcgcgagctccacgtcgagcagcagccgggaggccgccgccaacggcgcgaacgccgccgaccgcgtcaaggaggaccagccgtgctcgacgtcgcagccgagcttgtgccggtacgcgtcctcggctcaccatggcggtggtggccggagcgacgaggccacctcctcccggaacggcggtggcgtcggcggccgattccttgcctcccggcataggaagagatcgccctcggatttccgccggtcggggttggcgcagtcgttgattgatagcaaactagcttttagattccaagagcattgcaaatctacttttccttcatccagtttgagtatattgccatgtacatggcagcttttcctgaggcaactgaaacaatga

SEQ ID NO: 15770 - DNA, 1046 bp, Oryza sativa
  Clone ID: TFbOSC400901j.C1.o11.gp
ttgatcattggctcttcccattcaagctaacacgactggggggtacacactgttgttagtgctaacaatactgtccatacaagtggtaagcccagtacattgagataccaactaacaccaaacacaagacaggactagcaaagattggaaggaaaaaaatatcgagttggtagttggtactatacaatacagggagacattcttgaccacataaagtctagttgatcaaatcacctttaattaataaccaattaataacaaatcaaattgtactatcatcattgtatactaatactacacagaaaaattagagtcccatccatttggatttagacttgtgatttgatgttaaccacaagagaggccttcctaaaccacaagatttttgggtccttgatggtgattaagaatttgagattaatttaattaattagggaggaagcaaacaaacaatcattgcccacaagtttcgcatttttagtactttctatctcaggcggccggaagattcgtcgtgcggtggccggcggcggcggcggatcaggagcactcggcccagccctcctcggcggcgggcggcgtcgacgcgcgcgcccctcatccaccacctcaacccccaaccggcggcgggcggtgcctggacgcgaggaagttggcgccgtgcaccttgtcgtcacataccaagcaaagaaacgcggagtcagcggcgcagtgcaccgcggccacgcccccgcacagctcgcacccggcgccaccaccgccgcacttgccgttgccgacctccattacaggttgcaagaggctggactcttgtgtcactcggtcgaacacctggcgggggtttgcgtggctttatactacagagcaaaacagggacaccagtctccgcgcgagggcgagatggcgatggcgaccggcgggcgcaggcgcgggcgcggcgcgcttcggggaaaccggcggcgagcgggggaaaccggcggcgagcgggggaaaccgcgggcgcgcgcgcggacggcgaggggggaggtttggttgggagcgagacg

SEQ ID NO: 15771 - DNA, 407 bp, Oryza sativa
  Clone ID: TFbOSC400070j.C1.o2.np
atgaattgtaatttcagcagtaacctttttgagcaggaagctggagggagaggctttccatgggggtcgggccatgcgacggatgtcatcgctgattcaactactaggttcattctgctgatcatgtcacatctcgtcatcgccgtctgcaaagccaatgagtgcacccctcaggcctcagtgttggcatgctgtgcagatgcagttgcactgtgtactacctgtgatgcagaggttcactctgcaaatccacttgctcagaggcaccaagagtacctgtgctaccactcccagttgcctctggtttaattaggcagaagctgcccatggaagcgaggaagatgaagtgaactcttggctcctgctcagcagaggttctgatgacagaggttgtacacttgtactga

SEQ ID NO: 15772 - DNA, 1059 bp, Oryza sativa
  Clone ID: TFbOSC406117j.C1.o11.fg
atggtccgctgccttgtagaaaatgcctcgctttgccaaaattgtgattggaatgggcatagtgctgggtcttcagctgctggtcataagaggcagaccataaactgctactcagggtgcccatcatcttcagaactttcaaaaatctggacatttgtttcggatattcctaatgtagctcctgagccgaattgcgagcaagggataagcatgatgagcatcagcgacagtggtgtcagtaatcaagacaatgctgcaggggacagcagtttgttagatattgctagtgcaacccttatgagtgatcttggcactgctggcaagccaaagtctttgataggctcctcatctgaagctggcgtgaaccttcttccacttgctactgatcagatggctggatccgtggattcgacatcagctaaggtgccctatacggcagaccaagatatgttcagcaaagacagtatatatgaagatttctgtgtggacgatgttgatcttagtttcgaaaattatgaggaactatttggcacctcccatattcaaacagagcaactgtttgatgatgctgggatcgacagttactttgaatcgaaggaaataccttctggaaactctgatgagcagcccaagctgatgcagccagtgaccagcaatgcagtatctgctgattcagggatgtcgatcccaggagccaaaggtgattccagtctttgtatacctgtgaggcaagctaggtccagtatctctctttcattttctggtttgactggtgagagcagtgctggagattaccaagattgtggggtatcaccagtgctccttatgggtgagcctccttggcatcctcctggccctgaggggtcatttgctggagctaccagagacgatgctatcacacgatacaaggagaagaagaagagaagaaaatttgacaagaaaatcaggtatgcatctcgcaaggctagggcagatgtgagaaaaagagtcaagggccggtttgttaaggctggtgaagcatacgactacgatccactctgtgaaacgaggagctactga

SEQ ID NO: 15773 - DNA, 690 bp, Oryza sativa
  Clone ID: TFbOSC401841j.C1.o12.fg
atgaggatccagtgcgacgcgtgcgaggccgcggcggccacggtggtgtgctgcgcggacgaggcggcgctgtgcgcgcgctgcgacgtcgagatccacgccgccaacaagctcgccagcaagcaccagcgcctcccgctcgacgccgcgctccccgccgccctcccgcgctgcgacgtctgccaggagaaggcggcgttcatcttctgcgtggaggacagggcgctcttctgccgggactgcgacgagcccatccacgtcccggggacgctctccggcaaccaccagcgctacctcaccaccggcatccgcgtcgggttcagctccgtctgtagcgccaacgccgaccacctcccgccgccagcgcccaaggggaactccaagccgccggcaagcggcatcgctgctgctgctgctcccaagccggccgtgtccgcggcggcgcaggagaagggctctcctattgggttcaaggatctggagtggctcgatgacatcgacctgttccatgtccagtcgccggccaagggaggcagcacggcggcggaggtgcctgagctcttcgcctcgccgcagccagcgagcaacatggggctctacaaggcgagcggtgcacgccaaagcaagaagccacgggtggagatacccgatgacgacgaggacttcttcatcgttcctgatcttggatga

SEQ ID NO: 15774 - DNA, 1266 bp, Oryza sativa
  Clone ID: TFbOSC401487j.C1.o38.fg
atggcgagcgccgccgcggcgacgggcgcggcgctgggggcgcgcacggcgcgggcgtgcgacgggtgcatgcggcggcgggcgcggtggcactgccccgcggacgacgcgttcctgtgccaggcgtgcgacgcgtccgtgcactcggcgaacccgctggcgcggcggcaccaccgcgtgcgcctcccgtcggcgtcctcctcgccggcatcctcccctcgctcggcggccgctccacgtgccggatcagacgaccccgacgcgccggcgtggctgcatgggctcaagcggcggccgcgcacgccccggaccaagcccgggggaggcggcaagcacgacgcctccgccgcgacggtggccgcggcggcggcgtcggcggtcccggacctcgaggcggaggagtccgggatcgtgggcgacaccgaccacgacgtcggggaagaggacgacgaggacctgctgtaccgcgtccccgtgttcgaccccatgctcgccgagctctacaaccccgtggcggccgacgacgaggagcagcagatcgagcagaagcctgctgcacgcgtcgtgccgttctcggagccgtcgccggagttcgcctccggctcggtggaggcggacggcctctccggcttcgacgtgccggacatggagctcgccagcttcgcggcggacatggagagcctcctcatgggagtcgacgaggggttcgacgatctgggcttcttggacgacgagaagcctcacgtgaaactggacctggacatggacatggacttcgcctccatctcgccggcgccggcgccggagcgggaggagaggaagaggaagcggccggagatgatactcaagctcgactacgagggcgtcatcgactcgtgggcccgcgacggagcctcgccgtggttccacggcgagcgccctcgcttcgatcccagcgagtcatggccggacttcccggcgggaagccggggagggctcggcgcggcggtgacggcggtgaccggcggcgagagggaggcgcgggtgtcgcggtacagggagaagcggcggacgcggctgttcgccaagaagatccggtacgaggtgcgcaagctcaacgccgagaagcggccgcggatgaagggccggttcgtcaagcgcgccgccgcgctgccgccgctcccgctgcccaggcaccagcatccgccgccgccgccgccgcgcgctctgccgccggtgccgatgatgctcgcgccgcgcggcgcgcacgggcgctaccgtttttga

SEQ ID NO: 15775 - DNA, 1440 bp, Oryza sativa
  Clone ID: TFbOSC414184j.C1.o8.fg
atgaaggatggtggtggaggaggagggagggggcagcagcagcagtggccttgcgactactgcggggaggcggcggcggcgctgcactgcagggcggacgccgcgaggctgtgcgtcgcctgcgaccgccacgtgcacgccgccaacgcgctctcgcggaagcacgtccgcgccccgctctgcgccgcctgcgccgccaggccggccgccgcgcgcgtcgcctccgcctcggcgccggcgttcctgtgcgcggactgcgacaccgggtgcggcggcgacgacggcgcggccttgcgggtgcccgtcgaggggttctccgggtgccccgccgccgccgagctcgccgcgtcgtgggggctcgacctccccggcggctgcggcggcgaggaggaggaggccgacgacgcgttcttctcggcgctcgactactccatgctcgccgtcgaccccgtgctgcgcgacctctacgtgccatgcgacccgcccgaggtggtggtggccggcggcgggcggcgactcaagggggaggcgctcggccaccagctcgccgagatggcgcgccgggaggccgagacggcgcacccgcacacgcagccgcactcggatctgagcccccgcacgcctcgccggacctccgccgcggcgagcggccgcctgcaggaaaagcaagctcccccgccgttgcctcatgctgctgcgacggcggcgccgctgccgtacacttcactgctcatgatggcgccggccaactgcaccgagctcatggaaaacaaccgtgttggagacgaagatgaaaatgttctgtgggagagcaccgcgccatcagtgccaccaacccagatatgggattttaatttgggaaaatcaagggatcacaatgagaactctgcacttgaagttggatttggctcaaacaatggaggctttatgattaagagttataatgacatgctcaaggagatttcttctgggacaacgaaggatctggaagatatttatgactcaagatattttgcagctgccgaagatatcatgtcgactaatgtctgtcagctgtcatcgaaaaatccaagcaccaggagcaacaaacggaaggcgagctcatgcgcttcgacgatcgatggaccgacaacttccacaagccatgtacctgctgcttcaggggcattggggggctcttcgaacgacagaggatcggctctccccaaggagatttccttctgtgatcagaccgtcgtccctaccggagccgatcagaggccatgtaccatcaagatcgacagcgagacgctcgcgcagaacagggacagcgcgatgcagcggtatgagaagcacatcaggtacgagtcgaggaagctgagagcggacacgaggaagagggtgaaaggccggtttgtgaagtcgaacggagcacctgatgatgtcagcaatggcgggtga

SEQ ID NO: 15776 - DNA, 810 bp, Oryza sativa
  Clone ID: TFbOSC401779j.C1.o12.fg
atgaaggtgcagtgcgacgtgtgcgcggccgaggcggcgtcggtgttctgctgcgccgacgaggccgcgctgtgcgacgcgtgcgaccaccgggtgcaccgggccaacaagctcgccgggaagcaccgccggttctcgctgctcaacccctcggcgtccggccgctcgccgacatcgacgacggcgccgctctgcgacatctgccaggagaagaggggtttcctgttctgcaaggaggaccgggcgatcctgtgccgcgagtgcgacgtgccggtgcacacggcgagcgagctcaccatgcgccacagccggtacctcctcaccggcgtgcggctctcctcggagcctgccgcgtccccggcgccgccgtcggaggaggagaacagcagcagcttctgctgcagcgccgacgacgccgtgccggccccggcggcgcccgccacgagccacggcgggagcagcggcagcagcagcatctccgagtacctcaccacgctgcccgggtggcacgtcgaggacttcctcgtcgacgacgccactgccgaggccgccgccgccgccgccgccacctcttccggcatctccgcgaacgggccgtgtcagggggtaacacggatcggagggctgcaagaatccgccggctaccctgcgtggatggcgcagcagcagctgtgctgcgacggcctcgtcgccggcgacgcgtcgccggctagccgggagcggtgggtgccgcagatgtacgcggatcagcttgccgccggcagcaagagatccaggacgtccactgcttcttcctactcctactggtga

SEQ ID NO: 15777 - DNA, 531 bp, Oryza sativa
  unsure (1)..(531): unsure at all n locations
  Clone ID: TFbOSC412318j.C1.o1.fg
atgggtgcaggaggttggtcggctagatctatncgatgggtagggcagggcagaaggaggagcagggtaccggggtcaaaggggaggaggaggtggtggatggcggaggcggcgggttcgtcgtcgtcgtcgtcggcgtcggcggtggtggtggctgtggtgattgcggtggtggtggtggtgtgggttgtggtccgacggaaggtgaggcgcgccgcggcgcggagggaggaggtgctgcggctcacgcggctggcgcaggaggagtcggagatggcggaggtggagtgcgcgcgcgcctactactcggagctgttcccgagcgtcgtgcacgcgacggagatggtggatgaggcggcgtggggggcgccgccggccgtggttccggctcaggcggaggcagaggcggagatggaggcccgggcccagccgcagccgcagccgccggtgggtgccaagggggtctgcgcggtgtgcttccggccgacgacgttcaggtgcaagcagtgcaaggctgtcaagtactggtga

SEQ ID NO: 15778 - DNA, 532 bp, Oryza sativa
  Clone ID: TFbOSC18513j.C1.o1.fg
ttgtatgcagattatcatgaaatcttgccgggatactcactgccactattgctttagtgaagctccagcagatgtcgtagtctgcccttcatgtacaatacccatttactgttcaaacaggtgccaggagaaggctataggacaaatgtcttgtaatcaaaatactcatctagaatctaacaataatgtggtggatattgcaaaattgagtgtaacttctacaaagagcaagactccagactctaaacaaattgctgaacataggcatgaatgtggaggtgcctgttgggcagctgttttgccagctgatatagttttagctgggcggataatggcacagtacatagagaaacaattgctggtcggaaagagatctaccatctctggtccaaatctggatctcgttcaccactatgatcaagattcttctgctagcaaatttgagtcacatatatatgcaactgtcctgttcttatgcctccagagctattataaatcaggtgtctcgtgggcagaggattctttatcacag

SEQ ID NO: 15779 - DNA, 1140 bp, Oryza sativa
  Clone ID: TFbOSC410441j.C1.o2.fg
atggtggcgaagcgcggcgccggcgcttgtgccctctcctgggatgaggagggcgaggtgtcccgcggcgagaagaggaggagggcggatggggatggctcgtcggacgttggcggcggcggcggcataggggcgttcgacgcgctgcacgacgagctggtcgtgtccatcctcgccgacgtggccgcctccgccggctcgccggctgacctcgccgccgccatgctcacgtgcaggagattcagggagctggggaagcacgggctggtgctcgcccgggcctcgccgtcggccgtcgccgtgcgcgccgcggcatggtgcgacgacgcgcaccgcttcctcgtccgttgcgcggaagccggaaacgtcgaagcctcctaccttctcggcatgatcatgttctactgcttcgagaatcgcaagctgggggcggagctgctcggcgcggcggcgcggcgcgggcacggcgaggcgctctactcgatggcgatcatccagttcaacggcagcggcctccccaaggacgggcgcaacctccaggctggtgcccagctgtgcgcgcgcgccgcgtcgcgcggccacaccgacgcgctccgcgagctcggccactgcgtctcggacggctacggcgtccgccgctccctctccggcgggcggcgcctcctcatccaggccaacttccgcgagctgtgcgccgcggtggcgaacggcggggccaggttcgccgcggcgctggggcgcagcggcgagtgcaagccgccgggcccgcacatgtgcctcctgagcgactacgggtgccacgtcgccggcgcggcggggcggcgcgcgcacgcggcgaacgcgttcctggccgggtggtacgcgtcgcggccgctggcgtccggcgccggcgccgcggcgctccggatgtgctcgcagcccacctgcgggcggccggagacgcggaagcacgagttccggcggtgctccgtgtgcagcggggtgatctactgctcccgcgcgtgccaggcgatgcactggaaggtggcgcacaagagcgcgtgcgtgccgatggcgcactggctcgtcgccgccaacgccggcgccggcaatgcggtcggggccgcggcggcggcggcggcgcagatggcgatgccgtga

SEQ ID NO: 15780 - DNA, 1260 bp, Oryza sativa
  Clone ID: TFbOSC400421j.C1.o12.fg
atggagtccaacgccgagaagcttcgtggtctcaccatcacctcgctggatgaggaagacgacgagcccgaactgccccaccgatccccacccgccagcggcggcggcggaggcggcggcgcgggctacgaggacgacgatgaggaggaggaggaagaggcggaggtgacgcttggttttctggagaagccgaagcacccgggcctcctcctccgccacctgttccctagcaaggccggaggcatcccggcgtggttggatcctgtgaacttgccatcggggaactcgcgttgctgcggcttctgcggcgagcccctgcagttcgtcctccagatatatgcaccgattgaggacaatgcggcatcatttcaccgcactttgttcatgttcatgtgcccgtcaatggcatgcttactccgagaccagcacgaccagtggaaacatagacaaggcaatccgtgtagaagcgtgaaggttttccggtgccagcttccccgtagtaatgccttctactcaagtgaaccaccaaagcacaatgattctgacaagccactatgtccaggagctcctgtctgccattggtgcggtacatggaaaggtgataaactctgtagtagctgcaagaaagcacgctactgctctgagaagcatcagacactgcactggcgctctggccataagagtgattgcctacagttaatcagttcttctgaagcttcaagctctatttttcctgctgtaggaaaagttcctgctagcaaatcttggccagaatatgagattgcaatcgactatgagggtgctttcaattctgacagttgtgatgagagtaactcaaagtccttggtgatgcaaagacctggtaaaccagatgatatgatgcagtcatggatggatcaatttgaggctgatgctgacaacaaatgctgggcgtcttttcaagagcgggtctcaagagcaccaaagcaagtattgagatactgtcgagaagagaatgccaaacctctatgggcgttatcggctggttgtccatcaaatgccgatatcccatcatgtagctactgtagaggtccactatgctatgaatttcagataatgccacagctgctttattactttggtgtgaaaaatgagccagactctcttgattgggcaacaattgttgtgtacacatgtaaaggatcatgcgatcaaaatgtcagctacaaggaggaatttgcatgggttcagttataccctacaacaaccacaaggtcatga

SEQ ID NO: 15781 - DNA, 1205 bp, Oryza sativa
  Clone ID: TFbOSC7547j.C1.o3.fg
gaagacgacgagcccgaactgccccaccgatccccacccgcagcggcggaggcggaggcggcggcgcgggctacgaggacgacgatgaggaggaggaggaagagccggaggtgacgcttggttttctggagaagccgaagcacccgggcctcctcctccgccacctgttccctagcaaggccggaggcatcccggcgtggttggatcctgtgaacttgccatcggggaactcgcgttgctgcggcttttgcggcgagcccctgcagttcgtcctccagatatatgcaccgattgaggacaatgcggcatcatttcaccgcactttgttcatgttcatgtgcccgtcaatggcatgcttactccgagaccagcacgaccagtggaaacatagacaaggcaatccgtgtagaagcgtgaaggttttccggtgccagcttccccgtagtaatgccttctactcaagtgaaccaccaaagcacaatgattctgacaagccactatgtccaggagctcctgtctgccattggtgcggtacatggaaaggtgataaactctgtagtagctgcaagaaagcacgctactgctctgagaagcatcagacactgcactggcgctctggccataagagtgattgcctacagttaatcagttcttctgaagcttcaagctctatttttcctgctgtaggaaaagttcctgctagcaaatcttggccagaatatgagattgcaatcgactatgagggtgctttcaattctgacagttgtgatgagagtaactcaaagtccttggtgatgcaaagacctggtaaaccagatgatatgatgcagtcatggatggatcaatttgaggctgatgctgacaacaaatgctgggcgtcttttcaagagcgggtctcaagagcaccaaagcaagtattgagatactgtcgagaagagaatgccaaacctctatgggcgttatcggctggttgtccatcaaatgccgatatcccatcatgtagctactgtagaggtccactatgctatgaatttcagataatgccacagctgctttattactttggtgtgaaaaatgagccagactctcttgattgggcaacaattgttgtgtacacatgtaaaggatcatgcgatcaaaatgtcagctacaaggaggaatttgcatgggttcagttataccctacaacaaccacaaggtcatga

SEQ ID NO: 15782 - DNA, 535 bp, Oryza sativa
  Clone ID: TFbOSC400080j.C1.o23.gp
cagacttgctttaccttttttacctcagtgttcgttcgctcgtttcaaggtcccatgtacagaagagtagaagaccacccgggtgaaaaaaaagaacgcacagtaattttcctcttttttttttaaccgtctaaagtaaaagtactaattaaacagtcactaataactatccgttcgtttccaacttgcgagttcacgcctagttcgccaaccgttcgtccggtgcatttactgctgcgcctgcgtgcgcgtgtcgcggcgaggcggtcatggggcgggcgcggccatggcggcggcattggggttggcggcgccggcggcggcgttgtcgagccaccggtccatgggcgtgcactccgccttgtgcgccgtcttccagtgcagcgcctggcacgcccgggagcagtagttcaccacgccgcacaccgagcagcgccggaactcgtggcgccgcgtctccggccgcccgcacagcgcgtgcgagcacaggcgcagcccggccgcctcgtcctccgcggcgctccctggcgttggc

SEQ ID NO: 15783 - DNA, 962 bp, Oryza sativa
  Clone ID: TFbOSC419993j.C1.o16.fg
atggcgtcgtgggaggagcagctgcgggacgagctcgccggccgagacctcgccgtcgcctccgtccccgggaagggccgcggcctcttcgccgcacgcagcttcttcccaggagaagtcgttatttcgcaagagccttacgcttctacaccaaacaagatttctgtgggctccaactgcgacaattgtttcgcctccagaaacctgaggaagtgctccgtttgtcgagttgcttggtactgtgggagtgcgtgtcagagagaagaatggaagcttcatcaacttgaatgtcgagcaatcgccgcgcttacagaggatagaaagaagatgcttactcccacaattcgtttgatggtgcggcttgtacttagaagaaaactgcaggatgacaagatggccaatcttgtccaactgattcttccttcattcgagcttgatcttaaggaaattacacataccttttccaagtttgcctgcaacgctcataccatatgtgatcctgaactgaggccccttgggactggactataccctgttttatctattattaaccacagttgtgtaccaaatgcagttttgatatttgaaggtcggacagcatatgttcgtgcattgcaacctataagtaaaaatgaggaggattctgaggaagatgcgctccttgagggatacagatgcaatgaccaaaagtgtgatggatttcttctgcctaatgcagtagataacagtgaggtaggttctatgtacaagaccattgaagagctagagcggaagctttaccatcctttgtcaatcactttgcttcacacacgggaaacactcttgaagatatatatggagttacaagattggcagactgcattgatgtattgcagattgacaattccagtttatgaaagaatttacccaccttttcacccaatgattggattacagttctatacttgcggaaagcttgaatg

SEQ ID NO: 15784 - DNA, 801 bp, Oryza sativa
  Clone ID: TFbOSC400648j.C1.o12.fg
atgaaaaaattccccactctagggaacgccgagactgagaacgccccctttcctttccccctcctctcgttggaggcggccggggaagctggtgggcatatggagtgcgcggcgaaggggctggtggcggagccgtgtgccggcgaggcccgccggcgctgcggcggttgcggcgccgtcgcctactgctcgcgcgcccaccagactgtgcattggggatttcataaagaagaatgcgcaaggctcgcagagcagatgagccgcatcgatatgctgaaacaatttccattcacgttctctgtggaatctcctgctccgaatcatacattccctagtctaagatgtttccttttggaatcattcaaacttcaccaaaaaggactctggaaatcagaatgcatatgtgatccagaggttacttcagtcaaggacttaagcaaaacaactgactggagtatgggaagcgccctctgcccatgcacagagcctgaacataatgtatccacacccctgacaagctggaaagactactataggtggagatcgcttcctttgcaatcacctgttgctgttttacttcactgggattcaaagcctcatctcattgttgccccaaatgctggtatagctgcatatcctagttggattccaactattgaaataattaggaaagttgggattcctgcaattttcacggacttctgtgaagaagctgcacatctagcttcgtcctgcattacctccataactggtcaacccctcagagtcccaattcagaattgcaagtttgtatcaccatga

SEQ ID NO: 15785 - DNA, 2937 bp, Oryza sativa
  Clone ID: TFbOSC401717j.C1.o3.fg
atggcggaggcggcgggttcgtcgtcgtcgtcgtcggcgtcggcggtggtggtggctgtggtgattgcggtggtggtggtggtgtgggttgtggtgcggcggaaggtgaggcgcgccgcggcgcggagggaggaggtgctgcggctcacgcggctggcgcaggaggagtcggagatggcggaggtggagtgcgcgcgcgcctactactcggagctgttcccgagcgtcgtgcacgcgacggagatggtggatgaggcggcgtggggggcgccgccggccgtggttccggctcaggcggaggcagaggcggagatggaggcccgggcccagccgcagccgcagccgccggtgggtgccaagggggtctgcgcggtgtgcttccggccgacgacgttcaggtgcaagcagtgcaaggctgtcaagtactgttccttcaaatgccagatagcccactggagacagggtcataaaaatgaatgccgcccaccaagcactgatgctaatcatgatgatgtggctgaactttctgttgcaaaggaaaggaaaattgagcagacaagtgcttctgaagaaaacatagctgaaaccaacacggcagccaccgtgaagaatttaaatgataaaacaaaagatatgccctcagaagtacttgcttcggtggaggttcctgatgatgaccattctgtcagtgcggtcaaactccctcaaagttcttcacaagtagcttctcttggcagtagaaagacagaatcaaatatgaaacctacaactcctgttgaaaatggttcttacacaaaggacttagatgaggcgttggtgtgtagatttcaaccttctccaccaaagattagtggctctggaagtcttatcaacaaagagtccttaattgattccaagaagcaccaggattgctctcaaactagtaacagcaaaaaatatgcagataacaacaatgctcaagctgctctacctgttgcagtagaacctaaaacttccaggactgctcttcatgtggaagttggacactccaagacaaaagctgctggctcagacaacattggtgtgtcaaaaatggtgccatctgttttgactgttgataaagtttctcctgttcccggtggacgttctgttacacctaattcatcaaaaagggctgataatattgctgaaaggaattctaaaccatcagagaaatcaatttcaacagcaaatagcctggcaacatctctgaaaaaaattgtcaggcagcaaacagcaccaaaagttgtgaggcattatccatcagagccaacacattttccatatgagcttttcattaagctctatgaaaaggttgaattgcaaccgtttggtcttcataaccttggcaatagttgctatgcaaatgctgttcttcagtgcttaatgtttacccgaccacttacatcatatcttttgggagggcttcattcaaaaaattgttccaaaaaggaatggtgcttcatgtgtgaatttgaaaaactcgttggggagggcagacaaggcaagattgctttgtcaccaactgggatactctctcatttgcctgacattggaagtagctttggtcctggtaaacaagaagatgctcatgaattccttaggtacgccattgatgctatgcaatctgtatgcatgaaggaagccaggaaaagcggcactcatcggttacacgaagaaacaacacttatgcaattaatatttgggggctatctgcgatctaagataagatgcacaagatgtgatgctacttccgagcaacatgagcgtattttggatcttactgttgaaatagatggcgacatcagttcactggaaggagcacttgagcgatttacatctacagaagtcttggatggagataataaatataaatgcagcagatgcaaatcgcatgagcgcgctaaaaagaagctgacaatatcggaagcaccaaatgtcctgactattgcgctgaaaagatatcagtctggaaagtttggaaagatcaacaaagccatcagatttccagagaccttgaacttgcagcgctatatgagcccaaaagctgatgacacttcccctgtttacagcctgtatgcagtggttgtccatcatgatattatgaatgccgccttttctggtcattatgtatgctatgtgaaggacacgcatgggaagtggtacaaaacagatgacagtcaggtcaaacctgtatctctggaaaatgtcatgtcgaagtgcgcatacatgctgctctatgcaaggtgttcaccaagagctccaagctctgtaaggccagcgctgatggctcaagatccagcacgtgtaaagaaggacaaggcaagggtaaattcaggacggtggcatggaggaggtcccatacaccaaggtggtcagatgtacgcagatcacatgacagatgatttgccccatacatatgacgagtttggacatggaccatattcgccagcagaatctcctagtccaagtgagagttcatcaattttcaccagttccgacacagggtcacatagcaccgacagcagtgaaagcactagaaactctaccagtgaggatatggaacgcctcatatttggtgatcaagtttcatactttgatggctctatgttcggacatggggaaaacggccgtatgacttattcccgatcaaagtctagcttgggtaccagttcatcgggtcaagaggtggatcagtataggcctgacgagcacaggcttcagggtgccagggagggttggaatcagggcgatgaaagttcttccttgtatactaaccaaagtaaacatcaatttagtagtaagttaacagaacaatataggaggaggttagatgggactgagcatgatcctggagaagccaatagtgttttattgaggagatcggctagggaaaggacggcccaaacattttattga

SEQ ID NO: 15786 - DNA, 1131 bp, Oryza sativa
  Clone ID: TFbOSC400036j.C1.o67.fg
atggaacctgacactgacaagcttcagagccttcagatcaaccccaataaggaaacaaaccttgtcgctgtattcaagaatgactacgtagatgacgaggatgatgaggacatggatcctcaagtaaccttagggttcatagaggagccagagggaccagaggactggcatcttcttctccctcaacacttccccaataaagctggcggtgttccggcctggcttgatcctgttaatttgccatctggcaagtccaggtgctgtgacttctgtggcgaaccactacgttttgttctccaggttgtctttcatttatatgacaaactgcaggtttatgcaccaattcagtgcaaggagacagcctatcaccgcacattatttgtgttcatgtgcccatccatggcatgcttactactagatcagcatgagcaggggaaggatagggcaggggaaaaagtttgtagtcgttgtaggaaatccagttactgttcaaagaagcatcaggaattgcattggcgtgcaaagcacaagaatgagtgccatcaaatatctggctcacataatgcttctgctattatgccagatgcaggaaaagtatttgctggcaatatatggcctgaatacatggtggttgatgaaaccgaaaaggtttcttgttttgctagttgtgagaatagatcagaattgttgatggaacaaggccaaagtgaagaggatgacatgacggcatcattgatggatcagtttgaggttgatgatgacaatagatgctgggcatcttttctagaacgcatctcaagagaacaggatcaagttttgagatactgcagggaatcaactgcaaaaccactttgggtagtatattctgggtctctaaccaatgcagctaagccatcttgtatatactgtaatggtccactttgctatgaatttcagataatgccacaactgctccattacttccatgttgaaaatgaaccagactcacttgattgggcaacaataattgtttacacatgtaaagggtcctgtgatcaaaatgtcagctacatggaagaatttgtttgggttcagttatctccagcaacaactagaaccaaccaaagtacttgcccccctgctggcttgtaa

SEQ ID NO: 15787 - DNA, 2652 bp, Oryza sativa
  Clone ID: TFbOSC402150j.C1.o11.fg
atggcgactccagacgttatattgccaggaccttctttaagacccatgccttatatgagatctgcaccttctgcaagacccgaataccatgagtgtgctacttgccacgggcctgctaagactcgctgctccagatgcaagtctgttagatactgctctggaaagtgtcaaataattcactggaggcaaggtcataagcaaacatgtcagcaatggaatggttttggtactagcagctctggtggactacctcctactgagaatactgaacagatgccattcttaagtaacctgaactcacctcttcgagggagcgatgttcatctgcatgacatggatttcgataccatgtcagagccatcctttgtgacaacagatagctataatcttgataccagcccatttctgtcagaccgaagcaacatgaataaaccaaaccaatttctacatacaagtgaaaatggtgctgccattggatcttatgagaagaacgactatagtattgatggagaagtcccttcttctgagattctgtcaggaaataagggtttaaataacagttctggttcaggtgaaaactgcggaaaccgtgatgtaatttatcctctcaatagtgtggtacatcaacccaataattatgcccctgaaataagaaagcggcccaaagcaagcatcacggtttatgaatctgataaaggcgtgtatttaacttctgatatgatcagttctggtgaggggccatatgcttctgctgcagagtcactacaaagaagtaactcgtctggaaatgttaccggaaaaggaaacatgatacataagaaaccaccatacccatctggatctaccaaaacagctgtttcaacaaacagcagtttgcaaggatgcaatggcatctcaaaagcaggagcatcaaaggttgaagccctgaagaagccttcaaaatttctcaaaaccagtctggtgggtttgatcaatgataacaagaggagtaaggtactgttcccatatgaagatcttgttaagttttttcagtatgaagtacggggcatctcacctagaggtcttttcaattgtggaaatagttgctatgcaaatgctgttctacaatgtctcatgtgcacaaaacccctgatgatctatctgcttctgagactgcattccaaagactgtaataccaaaactcaagcccccaccctccttggtgtagttgtgaaatctctcaccatctctgatttctttgacattgattgctttattcttttaggttgctcaaagaattggtgcctcatgtgtgaacttgagcaatatgcttcaactttgcgtgaaagtggtggccctgtttctccaagtagaatcctttctaatctgaggaatattggatgtcgcttgggtggtggaagtcaagaagatgctcatgaatttttaaggcatcttgtgatgtctatgcaaggggcatgcctggatggacttggtggtgagaagcaggtagaagcaagcttgcaggaaactacactgatacagcagatgtttggtggccgtcttaaatcgaaggttaagtgcctcagatgctaccatgaatctgaaagatacgagaatataatggatcttactttggagattcatggttgggtcgagtccttgcaagatgctttgacacaattcactgctcctgaagatttggatggagaaaatatgtataaatgtggaaggtgttctgcctatgtcaaagctaggaaacaattaagcgtgcatgaggtgccaaatatattaactgtagttcttaaaagattccagacagggaaatatgggaagatcaacaaatgtgttacttttcctgatatgttggacatggttccgtttgtgactggagctggtgataatcctcctctttacttcttgtatgccgtggttgtacacgtggatacagaaaatgcatcattctctggacattacatatcatatgtcaaagatatgcagggcacatggttgagaattgatgattcagaggtccaggctgtttcactgaatcaagttatgtcagaaggtgcatatatgctgttctacatgagatcttttcctcgcccaccgaagatttacattgagaagggcctatcatcagttcctacatgttcaaagcgccattcatcaaaatcctccaagggttctaagcaagacctgaatcatactgagtcactctttgcttccagtgatcaaacctatggaatatacgatttcagaccagacaacggctatatacaagatcagcatgctgctttgagaaccagaaatttctatcataccgatgatgcttttgcagattcaattagcacagacttctcagatgctacatcaagcgaatggtcactgtttaccagctctgatgaatcctcatttacgactgaaagcactagagattcattcagtgttgtggactatggtgacaatgctggccttgatccaatttcctctatatttgggccttattatgctcaagaccatcctcctggcagttttgcctcgtgtacaaggttgtcaccttccaatccacaaacaagatttctaacccacggaactctgaaaggagggattccagcactagaacttcaggggaatatctgcaattctcctaaaatttcagcaaaagcagaatga

SEQ ID NO: 15788 - DNA, 1274 bp, Oryza sativa
  Clone ID: TFbOSC400964j.C1.o156.gm
gcggcaaccactctcccaacgccaacaccaacgccaccgccaacgccaacgccgccccgcatcatctatcaaccgccggccgaggtggagcgggagcttggactgagatgaggacgaggagtggatctctctaccgcagcggcggcggcggcggggagacggccatggttgggcagaagaggaagaggtcgtcgttgccgccgcagtacgccaccgccggtgactgctgcggcggaggaggccgccggaagaggctggccggtggtggcccggattacctcgacgagctccccgacgacctcgtcctcgccgtgctctccaagctcgccgcctccgcctcctccccttccgacctcctctccgttcacctcacgtgcaagaggctgaatgggctggggcgccatgacatggtcttcgcaaaggcctcgccggcgtcgctcgccgtcaaggcggcgtcgtggtcggagcccgtgcagcgattcctcaagctctgcgccgacgccggcaacctcgaggcctgctacattctcggcatgattcggttctactgtcttggcaaccggagcggcggcgcggcgctgctggcgagggcggcggtcggcgggcacgcggcggcgctctactcgctggcggttatccagttcaacgggagcggcggcgccaagtcggaccgcgacctccgcgccggggcggcgctgtgcgcgcgcgccgccgcgctggggcacgtcgacgcgctccgcgagctcgggcactgcctccaggacggctacggcgtgcgccgcgaccccgccgagggccgccgcttcctcgtcgccgccaacgcgcgggagctcacgctcgcgctcgccgccgcggcgtcgcaccgccccttcgccgccctccccctcgccggcggcgccgccgccggcgccatcggctgcccgctcctctccgacttcgggtggagcctcccggaggcggagccccacccggccaacctcttcatggccgactggtgggcgtcccgcggcgtgcaggcgacggccaagaaacccggcctcgaggctcccgctgccgccaccggcgacagcgacggcggcggcgagctccgcctctgctcccacgtgcggtgcggccggagggagacccgccgccacgagttccggcggtgctccgtctgcggcgcggccaactactgctcccgcgcgtgccaggcgctggactggaagcgcgcgcacaaggcgcagtgcgtgcccatggaccggtggctcctcgccgccggcgaggcccagtga

SEQ ID NO: 15789 - DNA, 564 bp, Oryza sativa
  Clone ID: TFbOSC400964j.C1.o176.gp
aaaccccctgtgtcttttaaaggggttggaattataattataattataatttaatttaatttagagtttagtttactcggaatgagaaaaaaaaaaggaataatgcgagtaaaaagcatccgtagcatctctaccctcttcttccctagtggaatacgtacatctgacaagacgacatcgatggaaacggtaaaaaagaaaaaaaaagaaaaaaaaagcttcctcaattttttctctctgccacttgccttggctacacccggtccagcgttaaaccggtggaccgattggtctaagggagtagttggcggcggcggcgagtcactgggcctcgccggcggcgaggagccaccggtccatgggcacgcactgcgccttgtgcgcgcgcttccagtccagcgcctggcacgcgcgggagcagtagttggccgcgccgcagacggagcaccgccggaactcgtggcggcgggtctccctccggccgcaccgcacgtgggagcagaggcggagctcgccgccgccgtcgctgtcgccggtggcggcagcgggagcctcgaggccggg

SEQ ID NO: 15790 - DNA, 2577 bp, Oryza sativa
  Clone ID: TFbOSC415384j.C1.o5.gm
cagcagcaacgtcgcccgcgccggaggaatcatgggggtggcggccagcgccgcggcccgccgcaggagaggccttccgctgcgccgcccccgccgccgccgcagcagcagcagcggcagcagcatgcggcgcccgctccgacccgtgccgccgcgcctgcgcctgcgcgtgtggcggcgacgaaggcggcggcggggggagatggggcggtgccgcagctggtgcaggagatccaggacaagctggcgaggggggcggtggagtgcatgatctgctacgacatggtgcggcggtcggcgccggtgtggtcctgcggcagctgcttctccatcttccacctcccctgcatccgcaagtgggcgcgctccccggcgtccgccgccgacgcgtccgacccggactcctcctggcgctgccccgggtgccagtccgtgcacgccgtccccgcgcgcgagctcgcctacacctgcttctgcgggcgccgccgcgagccacccaacgatctcttcctcacgccgcactcctgcggcgagccctgctccaagcccctcgagaaggctgaccctgccgtgaaggccgacgacgctgcagccaccaggtgcccccatgtgtgcgtcctgcagtgccacccagggccctgcccgccttgcaaagcgttcgcgccggaccggctgtgcccatgcggcaagcagaccattgtgcggcggtgtgcggaccggacaacgcctgtgacgtgcgggcagcggtgtgatcggctgctcccctgccggaggcaccgctgcgagaaggtctgccacactggaccatgcggggactgtaatgttctcatttctgcccggtgtttctgtgggaagaagacagagacattgctgtgtggagagatggaactgaaagggaatttatctgagaaggatggagtgttctcatgcagtgaggcctgcagccatatgctgtcgtgcggaaatcatgcctgccaagacatttgccacccagggccatgcggggagtgcgaacttatgccagggaaggtcacagcatgccattgtgggaagacaaggctgctggagaagagagcaagctgcttggacccgatcccaacctgtgacaaggtgtgcgacaagaagctgccttgtggtgtgcataggtgcaaggtcacatgccatgagggagactgcccaccttgtgtggttcgtgtggaacagaggtgccgctgtggttcatcaggccagatggtggagtgctacaaggtcttggaggaagaattccgttgcaacaagccttatgcaaccaaccttgtggaaagaaccggcaatgtggaatgcacgcttgcaacaggtcttgccatccttccccttgtgatccaccacctgcaaatggagatgctagctcaagtactggtggtagagcttcatgtggacagtgctgggggaaccgccaatggcgataatatgtttgaagtatccatcatacagaagctgccaatgccactccagccggtggaatctgatgggaggagggtaccacttgggcagaggaagctctcttgtgatgaggactgtgccaagatggagaggaagagggtccttgctgaagcatttgacatcactccacccaatttggatgcattgcattttggtgagaactcaaatgcatcggatttgctttctgaccttttccgccgtgagccaaaatgggtgatggccatagaggagaggtgcaagttccttgtacttgggaagacaagaggcaattcttcaggcaacctcaaggtccatgtcttctgtcacatgacaaaggataagagagatgctatcagggtcattgccgacaggtggaagctttctgttcaggctgctggttgggaacccaaacgtttcattactatccatcccacaccgaagtcaaaggcgcctgctcgcatcctgggttccaagccaggtgtatttgttgctgcttcccatcctttctttgatcccttggtggacatggacccaaggcttgttgttgcaatgctggacctgccccgggatgctgatgttagcgctctggttttaaggtttggcggggagtgtgaattggtttggctgaatgacaagaatgctgtggctgtcttcaatgatccagctagagcagcgacagctctgaggcggctggattatggttctgcttaccagggtgctgctgtgtttttgccaagcagcagcgctcagccaggcaatgtctgggttgcagggcagaaagatggagtggcggctaccaagagcagtgccaatccatggaagaaggccactgcctctgagcctgatccatcctcaggagactggacaggtgtgcttggtcaagctccaggatcagtatggaggcgtggcggtgacactgtcgcccaagtcatggggacatcgaaccgctggaacgccctggagtccgatgcggccacaagctccaggccagtcgaggagagtaagcctgctcctcgcaccgatgctgtatccagcgcagggccaagtactgcgccaccggttagtaagatgcagcctgaagtcgaagtggatgattgggaagaagcttgtgaatga

SEQ ID NO: 15791 - DNA, 2484 bp, Oryza sativa
  Clone ID: TFbOSC401685j.C1.o89.fg
atgccattctcctacgccgccgcggcctctggctccgcgtcctcttctcgcaagccggttcccgtcgccgcggccgccgcccgccgacccgcgccctcgccggcagcggcggcggcacccgcgccctcgccgtcaaaccctagcgcggtctccgattccgacccctcctcgtactcctcctccggggaggagaccgacctcaccgcctccgatccggcggccgcctccgtcatctcctcctacctctccgttgcgggggatggcgccgacctctccaaggtcgggatcttcctcagctccgcggcgcgccgccgatcgccgccgtgcctgatatgcttcgatcccatccgcccctccgaccccgtctggtcctgctccgcctcctgcttcgccctcctccacctccactgcatccagtcatgggcacatcagtcatcctctgccgcgccttctcccacctggggttgccccaaatgccgcttcccctatcccaaatcccagactcccacctcctacctctgcttctgctccaagacggtagacccagctccggacccctggatcctcccccactcctgcggcgacgtctgtggccgacgtctcaatgcagaccgtgactctggctgtgagcacaactgcctcctgctttgccaccctgggccatgtccaccgtgcccggcaattgttccaaatgctatgtgcttttgcggctcacatcgtgagacgcgtcgatgctcacatcagcgttattcttgctcggggaaatgcaataaacgcctcggctgtggaatccaccggtgtcctgtggattgccatgatgggccttgcccgccttgtgcggtgcgaggaaagcacaaatgtgagtgtggagaaacaatggaggagaggctatgctctgaaagggtgttccagtgcaagagggagtgtggtgggatgttgcagtgtgggaagcatagttgtgagaggggttgccatgctggaaagtgtggaggatgcccactccaagggcgacgaacttgcccatgtgggaagaaagattatccaagtttggactgtgatgcagaggctgccacatgtggatcaacttgcgagaaggtgcttgggtgcgggcggcacaaatgcccagagcggtgtcatcgtggttcatgcgttgagacatgtcggcttgtgatcacaaaatcgtgccgctgtgggggtctcaagaaggaggtgccttgctaccaagaattgacatgcgaaaggaagtgtcagcgtttgcgaaactgtggccgccatgcttgtagacgacgttgctgcgagggtgattgtgcaccctgcccagaggtttgtgacaagaggctcagatgtggcaaccataaatgcctatctccatgccacaggtgtcatggccccattgctcctccaaatcctgagttcacactgaaaccaataaaaaggaaaaagggaaagcatatagactctacacctggaacaccatgcccgccatgccaagaagttgttttggtgccatgctttggacatcatcttggccaagaacgtgcaatactttgctccaaaaggaggcagtttccatgtcagaatttatgtggtaaccctctcaactgtggcaatcattattgtacgaaggcttgccatgtgttacagattccattgagtcagcctgaaggagatcaatcggctatactgtctcttgctagtgcaagtgcattcgctgagccttgcgaagaatgtaacctgccttgtcaaagggtcagggagcctccatgttcacatccctgccctttgccatgccatcttaacgattgtccaccttgcaaagcccttgttaaaagaccatgtcattgtggtgctatggtacacgcttttgagtgcatgtattataacaacttaaatgctacaaaacagcagaaagtaaggtcctgtggtggcccatgtcatagaaaattaccgaattgtccccatctgtgctcagaaatatgtcaccctggtcagtgcccatcagttgatcagtgcatgaaaaaggtcaatgtccgttgtgcatgcaacaaccttaaaaaagagtggatatgtcaagatgttctgaaggaataccgtcagtctggtcgtgacccaaaacaaatacctaaaaatcaatatgcagttggcctacttgcctgtggtgaagattgtgttaaaaaggttaaagctgcagattctgagttgcatctccggaaaattcaggagatcaagacccctgctgtggaagttgaaaatgtgcccaagcgcaggaagaggcgtaaccgtggccaagaaagtgttgaaagctcaaaattccaggaaatcaaagctgttgcgttgaaatttctcctggttatttttctgtgcataatcgttgtagctggattgtaccttttgtggaaaggtgtttaccggctttctgattggatgaatgacatggaggagcagagggccaggcagaggcatttgaagcctggaagattgtaa

SEQ ID NO: 15792 - DNA, 2547 bp, Oryza sativa
  Clone ID: TFbOSC101038j.C1.o1.fg
atggcgctgtccgcgtcggcggcggcgtcggccgggcggggggcgcgggcggagaaggtggggaggatcttcgagcggttcgatgccaacggggacggggggctggaccgcgacgagatggcggcgctcgtcgtcgccgtcaacccgcgggtgaagttcagcgaggaccagatctccgccatcctcgacgaggtgttccgcacctacgccgagttcatactccccggggggcggggcctctccctgccggggctgctacgcacctacgacgacggcgccggggacgtcgaccgcgacttcctcgcgctgtcccttcccccgctcgagtccggggagtcctccccggagatcgccgcgggggacccggccgccgcctcgtccccgccctccggcgccgccgccgccgcgtcgctcctggacgaccacatcaagccgcttggagcagccggtggggcgccctcgtccagctcacgcgccgcggcggccgcgccggcgtgggcgacgtcgcccagccacgggattgcgttcgactcctcctgggcgctcctcgacgacctggagatactagtgaagcgcctccgctccaagcagctgcggagaacatcctccatcgacacgatcaacggcagcggcggcgcggggaacaacaatttcgactccttctccgaggccgggtggtcaagggagatctccggccaagcggattcggcttcgaccgccgcgccatgggacgagacgagccgcgactacctcaccttcgtcaaggagctcgccgtgctccgcacgcgcgcggacgcctcccgctcacgggaggaggccttcgacaatcacatggtcatcggcagggcgctctccgagcaccgcctcttccgggacgcgcttagcagcttccgccgcgcctgcgagctgcagcccactgacgtgcgcccccacttccgcgcggggaactgcctctacgcccttggccgccactcggaggccaaggaagagtatctcctggcgcttgaggcagcggaggcaggtggctcccagtctgcggacatcctcccacagatccatgtcaaccttggcattgccatggaggctgaggggatggtgctcggtgcctgtgagcactaccgagaggctgccatactgtgtccttctcatgcccgggcgctgaagctcctcggtagcgcgctctttggtgttggtgagtaccgtgcagccgagaaggcactagaggaggccatcttcttgaagccagactatgctgatgcacactgtgatcttgggtcagccctgcatgcgatcggggatgatgaccgtgcggttcaggagtttcagaaggcaattgatctcaaacctgggcatgttgatgccttgtacaatcttggtggattgaatatggatgcagggcgctttgtgcgggctgcggagatgtatactcgtgtgttgagcatccgaccgaaccattggcgtgctcagctaaacaaggctgttgctttgcttggccagggggagtctgaggaggccaagaaggcactcaaggaggcatttaagatgacacaaagggtagaggtgtatgatgccatatctcatctgaagacactgcagaagaagaaaccaaagcctcccaaaggaaaagatgatagtcaaggagaggaggccttcgttgtagtggagccatccaagttcaagagggttggaagaaagactaccttgcggcaggaccttgctaatgcccttgatataagagcctttgagaaaacgacaaagcttggccgctgtgacgcggagcttctgaggaaagagatgaacgagactgatgtccccatatcctactcaggcgctggcaacccagagaagtcaatacggaaagcagctctcgaggttattctccacaggctcctatctttcctcaagccagatacctttcagggttctgtgaaggcgattaacgaaagaatcctctccgtccttgatgcctctggttctggccgtgttgaccttgggatgttctttgctattatcgccccaatttgttctggtcctgtggataagcgcaagcgggttgtctttgatgcacttctttggcgtccggcaagtgaaggaagcaggggtcagattaggaggagcgatgcactgtcctacatcaaacttcttcgtgctgtttatatacccacccatggggctagcgacatgcttgaaatgcatggggagtctgaccccactatggtatcatacacggagttcctcgaaatgttcaatgatcccgattggggatttggaatcctaagcacattggtgaagcttgaggacagcgatcacattcgtcacggccgccacacctgctcaatttgccgatatcctatcattggttcccgattcaaggagacaaagcactcctttagcttgtgcaatcgatgctacagtgaagggaaggttccatcagcattcaagttggatgagtacaggttcaaagaatatggtaacgagtctgaggctcttatcgataagtgcatgtgctttaatttacattctaagaagctcgaagctgatacttga

SEQ ID NO: 15793 - DNA, 2871 bp, Oryza sativa
  Clone ID: TFbOSC100588j.C1.o12.fg
atgctcccctccggcctcgcagtcgctccgcctcccataagcctccacgccgccgcctcccgcacgggccgacagcggtgcctcattgtacttgataatgtgtggactgtatcaacatggaatgttgttagacatgctttacaagaggattgctgtagtagaatagtagtaacaacagaaattaacgatgtggctcaggcatggagtttttacaagtctcaacataatgcatctcacgtgatcaagaagcatattttgaagatggaaccgcttaatgacgatttctcaagagatttacttgttagtagagtttttggtgataaagacaaatgtcctgaagaactcaatgaagtttcatatgagatagcacgaaaatgtggcggtttgccactagcaactatcgctgcagccagtcttttattgagtcggccagacaaaccagatgaatggatctatgtacagaagtcgttgattccagatttgaggatacaacctacttccgaaggaatggcacaactactgaacaatagcttcaacaatcttcctcatcatttgaaagcatgcatgctgtatctgagtatatataaagaggatcacataatcaatccggacgatctggttaagcaatgggtagctgaagattttgtaagtgcgacggaagggaaaagtttggatgaagctgcaaggaatcatttttatgagcttgtccataggggaatacttgaaactgaacatatcagctgtagtgatgaggttgtatcttgcacagtgcatgacatggttcttaactttatcaaacgcaaggcaatggaagagaattttgtcactgcaattgatcattctcagtctggtataagactagcagacaaagttcgacgactctctctccatttcggatattcaaaagatgcaaaggcaccagcatgtattagattgtcacaactacgatcacttgtgttttctggattttggaagtgcgggccttccatttcggagtttcatcttcttcgagttctattccttcatggtaaacatggcgaatttcttgacctcactagaattcgtgaactgtttctactgacttatttgcagattgaaggtaatgtttgcatagacttaccatcagagctccaaggactgaagtatctcaggactctgcatattggtgcaatggtgacctttttgagatcagaagttgttcatcttccgccgttgctgcacttcagacttccacccaatctagggtactttgttgacgcagggagtgtacagagtattgaagaactgaccaatttgcaggatcttcaactcgcatgtcctcagatagccacttctgaccatattaagcacaacatgaaactgttgggttcaattattgggatacttaagagcctcaaatctctaacagttgttcctgtctgcttctctgaagattctaatgataacgaaaattcaagcattgccattttcttggatttcttagataaagttccccccccttgtagccttctgcagaggcttgagttgtttccacgtgtttgcgtcttccatagacttcccagttggatcataactattgagaaactctgtattttgaaagtagcagtcatggaactcctgaggaaagacattgagactctctcaatgctgaatgccctcactgttttctcactgtatgtccggacaacccctgcagaacctatcatatttgacaagtcaggattccatgttttgaagtacttcaaattcaagtgtagtactgtatcaagtctgagatttgatgaaggagctatgcccaacctccaaaggttaaagatggaattcaatggtagcacagtggagcaatacaaccttgaaaatgtgggcttcaagcacttgtcaggtgtcaaggtcagcgcaaaaatttgcattgccggtactagtgaagctaacagaatggctatagcctctgtactgaacaatgccatcaggcaaaatacaagaatatcaagtgtaatcatacggttcatcaacagggttataaaagatcttccgattgtccccacccctcacacggatcatatgcatgaaaatctgaggctggataagagtgtcaggtcctggcctacccagtgcgatggctgcaaggagcttggtgccggccacaggttcaagtgcgagcaatgcaactccaaggtgtactatgatatgtgctgcgcaacagcgcctcacaccctgaaacaccctctgttcccaggctccgtttttcggttcctccgaaagcctctggcctctgaatgcggtagggcctgtgatgcatgtggtgacctcatgcacggcttcgtctaccactgctttgagcgtggcctcgacctccacccacgctgtgcgaggctgcctgttcgcactgcaaacgtaaagggctatgtcatggagcttcgcagggtgtcggcttgcagcagatgttgcatttgcatgtgtggcaaggagggttatcgcaacaagttttggtcctaccgctccagtcaggaaggccaggacattaacgtgcatatggcgtgtttaaaagacttggcatcaaaatcacatgaaaccctaactaaactgtatgagatcctaatgggtgaatcacagtggacgccaacagaggttttaggcgaagatacatccgaccaattagttgtcagcagtgcggaggatggtgatcgtacgccactgagacaagatgaaattacagaggagtttcagcacaaggatgaagtatgtaatgttctagagcatggacgggaggaactccggaagaaagaaaccgataccagagtaaagatcgccaagacaaactcaatgtggttctcttatcatacagttgacaatttgacatgtgcattttga

SEQ ID NO: 15794 - DNA, 2424 bp, Oryza sativa
  Clone ID: TFbOSC102172j.C1.o5.fg
atgctcccctccggcctcgcagtcgctccgcctcccataagcctccacgccgccgcctcccgcacgggccgacagcggtgcctcattgtacttgataatgtgtggactgtatcaacatggaatgttgttagacatgctttacaagaggattgctgtagtagaatagtagtaacaacagaaattaacgatgtggctcaggcatggagtttttacaagtctcaacataatgcatctcacgtgatcaagaagcatattttgaagatggaaccgcttaatgacgatttctcaagagatttacttgttagtagagtttttggtgataaagacaaatgtcctgaagaactcaatgaagtttcatatgagatagcacgaaaatgtggcggtttgccactagcaactatcgctgcagccagtcttttattgagtcggccagacaaaccagatgaatggatctatgtacagaagtcgttgattccagatttgaggatacaacctacttccgaaggaatggcacaactactgaacaatagcttcaacaatcttcctcatcatttgaaagcatgcatgctgtatctgagtatatataaagaggatcacataatcaatccggacgatctggttaagcaatgggtagctgaagattttattgaaggtaatgtttgcatagacttaccatcagagctccaaggactgaagtatctcaggactctgcatattggtgcaatggtgacctttttgagatcagaagttgttcatcttccgccgttgctgcacttcagacttccacccaatctagggtactttgttgacgcagggagtgtacagagtattgaagaactgaccaatttgcaggatcttcaactcgcatgtcctcagatagccacttctgaccatattaagcacaacatgaaactgttgggttcaattattgggatacttaagagcctcaaatctctaacagttgttcctgtctgcttctctgaagattctaatgataacgaaaattcaagcattgccattttcttggatttcttagataaagttccccccccttgtagccttctgcagaggcttgagttgtttccacgtgtttgcgtcttccatagacttcccagttggatcataactattgagaaactctgtattttgaaagtagcagtcatggaactcctgaggaaagacattgagactctctcaatgctgaatgccctcactgttttctcactgtatgtccggacaacccctgcagaacctatcatatttgacaagtcaggattccatgttttgaagtacttcaaattcaagtgtagtactgtatcaagtctgagatttgatgaaggagctatgcccaacctccaaaggttaaagatggaattcaatggtagcacagtggagcaatacaaccttgaaaatgtgggcttcaagcacttgtcaggtgtcaaggtcagcgcaaaaatttgcattgccggtactagtgaagctaacagaatggctatagcctctgtactgaacaatgccatcaggcaaaatacaagaatatcaagtgtaatcatacggttcatcaacagggttataaaagatcttccgattgtccccacccctcacacggatcatatgcatgaaaatctgaggctggataagagtgtcaggtcctggcctacccagtgcgatggctgcaaggagcttggtgccggccacaggttcaagtgcgagcaatgcaactccaaggtgtactatgatatgtgctgcgcaacagcgcctcacaccctgaaacaccctctgttcccaggctccgtttttcggttcctccgaaagcctctggcctctgaatgcggtagggcctgtgatgcatgtggtgacctcatgcacggcttcgtctaccactgctttgagcgtggcctcgacctccacccacgctgtgcgaggctgcctgttcgcactgcaaacgtaaagggctatgtcatggagcttcgcagggtgtcggcttgcagcagatgttgcatttgcatgtgtggcaaggagggttatcgcaacaagttttggtcctaccgctccagtcaggaaggccaggacattaacgtgcatatggcgtgtttaaaagacttggcatcaaaatcacatgaaaccctaactaaactgtatgagatcctaatgggtgaatcacagtggacgccaacagaggttttaggcgaagatacatccgaccaattagttgtcagcagtgcggaggatggtgatcgtacgccactgagacaagatgaaattacagaggagtttcagcacaaggatgaagtatgtaatgttctagagcatggacgggaggaactccggaagaaagaaaccgataccagagtaaagatcgccaagacaaactcaatgtggttctcttatcatacagttgacaatttgacatgtgcattttga

SEQ ID NO: 15795 - DNA, 1731 bp, Oryza sativa
  Clone ID: TFbOSC100588j.C1.o17.fg
atgttacgcacgccggatttgggtgatcctccggtggcggagatcactcacccgtttcaccctcacaagctgaggctggccgacaacgtcaccgacggtcactggcctttccggtgcggcggctgcaaggagctcgccgccggccgccgcaggtacaggtgcgagccctgcgacctcaccctctacacgtgctgcgccaccgcgccgctcaccctagagcacccgctgctcccgggccggcacttccgcctcctcgagcggcctccgccgccgccgccatggctcgccgccgacgaccgtggcggcggcggctggaggccggcgtgcgacgcgtgcggcgacctcctgcgcggcgacggcttcgcctaccactgcgccgatgggcacggcctcgtcggcctgaacctccacccgcgctgcgcgaggctgaggctgccagtggcggcagctcgcggcgccgccgccgtcaagctctgccgcagggcggctccccgccgacggtgcggcgtctgcatgtccggcgaggatgggtaccgtcacgggttctggacctgccgcttccgccgcagcggcggcgacgagctcgtcgacgtgcacctgtcgtgcttgaaggagttgatgtcacactcacacgagactctgactaatttgtatgagattctaatggaggacgggacgccgacaaatgattgtggtgaaggtgcatctgcacaagataatagcagttacagtggggaaagtaacggtgatgcggaggagttcgagaaccagaatggaacaaacaacggtatggtgccggagatgaagacgatcacccaccccagccacccggagcacaagcttagaatggtgaccaccaccggcgaagcgccgttcaagtgcgacgcctgcaaggagcccggagacgggccgaggtaccactgcctcacctgcgaggacctcaacatgcacaagttctgtgcccatgcgccgagcacgctctaccaccatctcttcggccgcacgttcgagcttctcgccaagccaccgcaaggacgaccggagaaaccgcaccccgccgccaccggtggtggcagaggcgaaagcggcggcaggtggtgcgacacctgcggcgaccatgtgttcggtctcgtctaccactgctcaggcgccaacctcgacctccacccatgctgtgcgagcctgcaggaactcccggtccaaaaccgggagacgttggaccaaccgaaagaaagtcttgctacgcctcaaaagctagttaaagagggactagccaagatcactatcgacggggtcgccttcgacatcgcggcgttcagcaagtgcagcctatgcagcagacaggaggaggagggcccggatcactgctgccgccgcctccgccgccaggagcaatggtgctactacaactccgacgtcgtcgacggcggcggcgaggccgtgtccctgcacgtgtcctgcatcaagcagatcgcacggaggagatggcaggcagctcgggacatgaaatgtggagggcagatcatgctggcgatcagcgaggagatgatcggtgaaggtggtcctctccatggcattccgtcggagcgagatcggaacatcgtcggcgcggtggtgcgcgtcatcatcgcggtgatatttggagataggacagccatggagggagacatcagctcttgggtagctttaggtctcccatggctgacaaatttatttaccgttcaaagataa

SEQ ID NO: 15796 - DNA, 258 bp, Oryza sativa
  Clone ID: TFbOSC100588j.C1.o21.gm
atggcctcgccggggcgccactgcttcgccgggccgcatcagcacgactgcgtggccgccgtctgccgcctccccctcgtgcgccgctgcgtgccgccttccctcccagcggacgggagggcgccgccgcccgccgtcgttttcatcgcagctgtcatcggcttcgcagagagggaggggaggagggggatcaagaggagagggaggacgacggcgaagaagatatggagagggtacgatgatagtgatctactgtag

SEQ ID NO: 15797 - DNA, 2538 bp, Oryza sativa
  Clone ID: TFbOSC101306j.C1.o1.fg
atgtccggccggagctcgccgatgtacgaggggctcgcgtcgcgtcccgacgagtgggacgtcgtcctcaaggtgaagtatggtgaaactcttaagaggttcggtgggtatgtgcaaggaccacaattcagcctgaacttatccgctctccggtccaagattgcatctgcttttaagtttggttcggatgtcgacttcattctgacttacactgatgaggatggggatattgtcatgctggatgatgatgatgatctgcatgatgctgctattcatcagaaactgaaccccctcaggattaatgttcagttaaacaacagccacactgcagcacctcaggccaaacagcaggattcagataatatacctctcaggtccaccaccactgaagacccactagctcatattaaatcagttatcgatgaggttttgaagccgatatctatgaagtccatccaggagccagttcctgagacacttgcgaagctgtcccatgaagtacttgaagccgcatcaccacaattagctgagctaataaaaccttttgttaaactggttacaccaagcaacaacaacccatctaatgggcatgctgatggttcctgcagctcctcaactggtttgccccaaacacaggttgatcccaaaactaatgacgagcccaaaatagacacaagtttggggtcgcaacccttggacacgcagaactccaaatcatctggtgctagaggtcttaagactctgtcagttgaggctcctgctacatcgggtgttaaatcttctcaaggtcaacaggcatcattatacccttccattgaggagttgctgttctccccctttttaccgaactcaggtgatgacaaatctgccagcaagggaattagtgatgctcaaagcaagggaaaatctgttatgacctctgctacaccacctacccctcctgctgctcctgctttccgtccagctcctccaattccatctctgaatgattggtctcagccaccagcacgtggatcgacattttacccatctatttggcagtctgaagctgatccaaaagccaatagtgattccagatggcgtgttccattgtgcagagctggccatccattccaaccccatgctcccctgagccgtccacccccaccaatgcctgcaccaatgagctatggaccttctccacattttccttaccctggccgcctcttgtcctctggccatctgcatggagaccttggtaataacattgagaactcaccagcacgcacattccatagatggattcagtgtgatggttgtggagtgcaaccaattgttgggcctcgatacaagtctaaaacaaaagaagattatgatttgtgtgatgcctgctttcatcgcatgggcaatgaggtcgagtacaccaggattgacaagccactcttaccccagagattactgagagaccctacattgtgtcgcaagatccattcacgggctgcgatgaagtcaaagcgggagaaacttgaaagtcgcttcattttggatgtaactgtcctggatggaacattgatggcaccttcaactccgtttactaagatttggcgtatgcataacaatgggtctatcatgtggcccttgggcacacagcttatatgggttggtggcgaccagtttgcactgcagacctatgttccattagagattccagtggacgggtttcctgttgatcaggagattgatgttgctgttgattttgtggcacctgcaaggcctgggaggtatatatcttactggaggttagcatcaccttctggccagaaatttggtcagcgtgtttgggttcacatccaggtggaggatccttcttttgtcagtaacaacaggactgccgctataaacttgaatttgcccccagaaagcaatatcacaaacacaagtaatttgattgatgtcaatattgagcctgtggatcaagtcttcaaccaacatgtcaatagcacaaacaaggagttacttgaacatttgatacaccaccagattgacgagcccaagaatcctgagcctgctccattacctgtgcccattgtttcttccacaacatctcttcaccccatcattgatgttgatgttccctccagttcaactgctgctgcttttgtgcctgtctttgatgagcctgcgcctgaacctgctgtgactcctgtgcctccaactgttaatgtgcctgctggtaatgcacctgcgtctgttggtgcatcatcatctgatcatcatggcattgacaatctcacagaagagaaactgctgaaggaacttgaggaaatgggttttaggcaggtcgatctgaacaaggagatactcaggcagaacaagtacaacctggagcagtctgtcgatgatctctgtggcgtcagcgaatgggaccctctcctggaggagttgcaggaaatgggctttgaggacactgagataaacaaggagatgctcgagaagaacggaggaagcatcaagcgggctgtgatggacctcatcgctagggagaagaaagaccagtga

SEQ ID NO: 15798 - DNA, 15102 bp, Oryza sativa
  Clone ID: TFbOSC900328j.C1.o15.fg
atgcgcaaaaacaatcaattaccagtttccacttctgatccatccattccatttggtttcgaaaataatatgaaatgtgaagtcagcactgtagttgagttgagtgtaccaccatcctttattgaggggcgttacacttttgttttagtggagcaagtggagtcaacggttgtggagattgtggagaggtctttggaattctgtctattgtatctcgaaaaatcatcatatgcatgtgaagactatgggttactgaacgaggttgcctatttcatggaatgcgtgctgcttagagggactcccagcaaggtttactcgttggaacccagtgtcgtaaatgatgttattgagcagtggtcgtctgtccaagttgattctgagcgtatcagcccacaagagaagtatttctgctatttaaaaggtttatggaatgttggtgctttatttgctgattgttttttgatggcacaaccaggcttcaattgctcaaatagtggagatgatctgcaacggtttcgtttgacgttatcacctgaatgtttacagcaagattatgttattgcagagaatactgaatcatcacacacagcatccccaaacggcatggtgtcaatagcacagcattttgcagttgttcacctacattgcataccagtccttcttacattggttcagaagctttgccagtctccagctttggatgtgatagaagataccaactttaatatgaggttgtcttttggccaaagaattttgaagttagtacatggtttggctatggaatttccttgtgatgcttctgatgcgatgatgctttgttcagtagcaagatgtactgatagtctgccagtcttgtttaaacttaagttcaagttcgctaaccatgacagagtgttttctggagatggtgttggaactgtgttgctgcaaatacttgacgaatttctgcagctaattcatattatcttctgcaacagtgatatttgttgtacagtacaagtatgcatacttgcttccctgttggaaattttcagcccagaaaaatggaaatatgacagatctgctgcttgcttgatgccccctttagtttactcaccccacattgttcaatatgtgcttaaacttctcaatgataccaaacgttggacaagtcgtgttgacagggacagacctggcaaagatgttctaggttattcatgcaattccgagacagatggtttgtcttgccatgctcgttcaaagaaagtgccattgctgaagaaatacacatctgaggagtatctgcaattaatcttcccttcagaagagcaatggttggatgatttggtacatctcatctttttcctccatgaagagggagtaaaatcaatgcctctacttgagaagccgcagatgagttgcacaaagcaagttactctttcagagttggagtctgtggctagtcatgaggaagaagcactttttggtaatctatttgctgaagcccgctctacaggagtagctgacagtgttgaacagccaatttctctagggagtggcccttcgagcagccagcatggccctattcaattagctgctgatttgatatgctttatgaagatgtccatcttctcccctgaatggtgcactgctatatatgtggatgcttgcaggaagttccacagcaatcatttggaacagtttctgtcaatacttcaatgtccagccttttgctctgatgaaagcattgctacaacatctctttctgaggttaactcattgcatatcaacacagcctgttttgaacttctacagatgttccttatttcccatgaatgcccggcatctttaagagaggatcttgtggataaagtgtttaatgctgagaatgggatgtatacttacaacaattatacgcttgctctagtggcacgtgctatcatctctggggcaagctcaatatataatcttggaagaaaagtttttgttcagtatgttggttatcttttggagaaagcaaatgataaatcatccagctcattagatttgaataatttctgcagaattcttccttgtgccttccatctagaaattcttttggtggcattccattcaaccactgggccagaaaaggctgatttgatcaatattgtactttcctccctagagaaaatgagacagcctccacttggagtaaatgcatctggactcacaagatgggctttactcctgtcaagactcctgcttgtcttgcggcatatgttgttgtatccggtaacacatccgtcatggttgcttatgaggttaagatccagaatgagggatattttgttgaaagaaggtcagtcacgctccatgaatgattacttgccatccttcacagctgaagttgtggagggcatttttgctgatactgtcaaggagtatgcttcaactagtagtttgttccctcaattgattgacgtgactccagctcatgctgaaatctactttgacaagtctgctctagaagctttgggtttgaacttcgctaatttgggctcaaacatttctgaaattcttggtgtttggaagggcaggaaagctgaagtggctgaggatctcattgcggagagatatttatttttgatttgctggagcactctctctggtataggttacagcggtggatatgaaggtctgttgaatcctgacttcgctgatgtaaactttttcatttcgtttgctctcagtgtaagtgatgatgcttcatcacttttggacgccaatctgccttctgtaatttttggattcctgaagttgttgcagtctgagattctctgtggtccaagtgttctagaaagttgggatttcctcaggaaaggagcatggctttctcttattctgtctctaattaatactggtttttgggggcaccaaacaagtgggaaacctgatgttgatttgcagggaaagcaggtggtccaagatgcagagatatttgggaagagtttgcttacattcataagtgaaaatagtggacattgtttacatgttttgtcatcactgttggagacttatcttcatgcttttaaggaagcatttatctcatttgttgttgagaaagggagggtttgtgaggatcattgttatccttcctggctgcttaaacattctgcatttgacaaatccaagcatcctcttctctttgagaaagttggttcaaacattggaatgctggagcctatatgtgacctttcatcaaggatagatcgagttgctacgaaattgggtgatgggcggaaagaatactttctcttgaagtgtttgttacatggatttccagtgaactctgcctccaataacagtgctatcctttcttgtgttctggtgataaatgagatcatttacatgctcaatggatgtataaagatcatgcagcccaatgacagagatctagttgatgtgggtgttatttctaaactacttagtatgataatgactataaagtcagatggaatgttcacatccattcacaagctgtgtgattctatatttatgtctctaattgaccagaaggatgatctggctggatatagcgacttgtttgttcttaagcagttagaagggtacctggcagacatcaactcgaaagaaatcatggataatgaggtgaaagaaattatagtttttaccattgttgatctagtggaagacctccgatctaaaacaaatgtgttcaaattctttcttggtgaagcagaaggagcacctgaaagagcaaacagtctttttgctcttgagcaggctgatatgtccgtttttattgatgtactggacaaatgccagtctgagcaggttaatttgaagattcttaacttgtttactgatattctaggtgatggtctttgtcccgatcttaagcagaaattgcaacacaaatttattggaatggacgtgtcctgcttttcttcttggctagaatttcgaacattgggtcattctatgaagattgaaagcaccaatagtactacatcaggtcctacagccctaagagaattgacaatggattttcttatgcgccttacctgcccttcatctgagacacttgccaaagagcttcagcatcacctctttgactcaatgcttttattacttgataaagcattcatgtcatgtgaccttcagattgttaaagcacatttccattttattgctcaactctcaactgatgaatcacatttcaaagagctctttgaaaaaacgctgaaactgatggagaacatggttggtaatgagggtttgcttcatactttgaagtttctgtttacttgcgtggagtcagtgtttggtgatgctggatcaaacagaagtgcacttaagaggctttcttctaaaagttctgggaacagttttggttcaggatctcttatcccaaagcaactgaagaattcagacagtcttgttcttcgcaccaatcaagaaagtaattccactgttgattgtgatgctagctccggcgaggaagatgaagatgatggaacatctgatggggaattggtcagtattgatagagatgaggaagaggatggaaacagtgaaagagctcttgcaaccaaagtgtgcacatttacatccagtggtagcaatttcatggaacagcattggtacttctgctatacatgtgatttgactgtttccaagggttgctgttctgtctgtgccaaggtgtgccatcaagggcatcgtgttgtttattctcggtcaagccgtttcttctgtgattgtggagctggtggtgtgaggggaagcagctgtcagtgcttgaaacctcggaaatttactggtacctctagtgtatctcctcctgtcacgagcagtttccagccaatattgccttatcatgaggatgtggagcctgttgcagacagtggttctgattttgaagatgacatctcaactgaagctgagaattgtatcaagctatctgtgccgaaaggcttcagtgatgagcttcctgtatttcttaaaaatcttgatgttgaagttcgaatgcttgaactctgcaagaagttgcttccaatgatacttagccaaagagagctgaatcttttgaaggacaggaaagtatttttaggaggtgaaatgcccatgtcacaagcttctgatatttttcaactgaagaaagctttcaaaagtggatcgctggacctgaagataaaagcagactatccaaattcaagggaacttaagtcgcatcttgcaaatgggtctcttactaaatccttgctaagtatcagcattcgaggtaagcttgctgttggagaaggggataaagtagctatatttgatgtgggacaaattattggacagcctactgcagctcctattacagcagacaaaacaaatgtgaagcctctctccaggaacatagttcgctttgaaattgttcatttgattttcaatccattggtggaacattacctatctgttgccgggtatgaggattgtcaagtactaacattaaatagccgtggtgaggtaactgatcggcttgcaattgaacttgctctgcaaggagcatatattcgttgcgtggagtgggttccaggttctcaggtacaactcatggtagtaacaaacaagtttgtgaagatatatgatctctcgcaggacaacattagcccgttgcattattttactgtggctgatgatataattgttgatgccacgcttgttccctcctcaatgggaaagttggtgcttcttgttctttctgaaggaggccttttgtataggttgaatgttgccttggcgggtgatgttggtgcgaaaacattgactgatacagtcttggtgaaagatgcagtatctatgcacaaaggtctctcattgtacttctcatcaacttacaggcttctatttgtgtctcatcaagatggcacaacttacatggggcgcttggatggcgattcctcgtcaattactgaattgtcctacatatgtgagaatgatcaagacggtaaatcgaaaccagcaggcctgtaccgttggagagagctaatagctggcagtggggcccttgcttgcctatcaaaatttaaatcaaactctcctcttgctgtatctttgggtcctcacgagttgtttgcacataacatgagacatgcaagtggttcaaatgctccagttgttggtattgctgcatataagcctttatccaaagataaagctcattgtcttcttttgtatgatgatggaagccttaacatttattcacatacacctaatggaagtgatagttcaacaacccttactgcagaacagacaaagaagttgggcagcagtatccttagtagtagagcttatgctggcaccaaaccagaatttccacttgatttttttgagaagacgacatgtatcacatgtgatgtgaaattcaatagtgacacaaccaaaagtagtgattctgaaagcatcaagcaaagattaagctcagatgatggttatttagaaagtttgacatccgctggtttcaaggtgactatttcaaacccaaaccctgatattgtcatggttggttgccgaatccatgtgggtaacacatctgcgagcaatatcccttcagaaatcacaatttttcatagagtcattaagctggatgaaggcatgagatcttggtatgatattccgttcactactgctgaatcacttctggctgacgaagaattcacaattgttgttggtcggacattcgatggttcatctattcctcggatagattctattgaagtgtatggtcgtgccaaagatgaatttggatggaaagaaaaaatggatgctgcacttgatatggaagcgcatgtcctaggtggtagttctgctagtggaaagtctggaaaaaaggctcaaacgatgcaagctgctcctatccaggagcaggttctggcagatgctctcaggatcctctcacggatatacctgctttgccaaccaggtttctgtacggacacaatcgatgcagacatggaacttaacaatctaaaatgcagatctttgctggaaacaatctttcagagtgacagggagcctctgttacattctgctgcatgccgtgtccttcaggctgtgttcccgaagaaggaaatatactatcatgttaaggatactatgcgccttctaggggtaataaaatcacttccatcaattacttcaagaataggagttggaggtgctgcatccagttgggttacaaaagaattcatagcccagatccacacagtgtcaaaagttgctgtgcacaggaaatcaaacttggcttcttttcttgagacccacgctgttgctatccttaatgtcacaagaaagctaggctatgctgaatgcttggccttacattcaaatgaaaaatctggagtctcagtagcacctgcagttgctttattgaagaagttactatttgcgccatatgaagcagtccagacttcaagcagtttggctatttcatcacgatttctccaagtccctttcccaaagcagacaatgattgctaatgatgatgctcctgacaatcatgcaaaagcaagtgctgcttcaaattcaaccactggaaatgctcaggtcatgattgaagaagatcctgccacatcctcagtgcaatattgttgtgatggttgttccactgttccaatacttaggcgaaggtggcactgcaacatatgtccagactttgacttgtgtgaaacatgctatgagatacttgatgcagatcgtctacctgcaccacattcaagagatcatcccatgtcagcaataccaattgagcttgatacatttgggggagaaggaaatgaaattcatttctctgttgatgaactaacagattccagtgtccttcaagctcctgctgatagaactatccagacctcaccatcgtcaattcatgtactggatgcaagtgagtctgtagatttccatggttccatgaccgaacaaaggacagtatcaatttctgcatcaaaacgggccattaactctttgctacttagtcgtttaattgaagagcttagtggctggatggagaccactgctggcactcgagctatacctataatgcagctgttttacagactttcatctgcagttggcggacctttcatggatagcacaaaacctgaaaatttggatttagaaaagtttgtgaagtggcttatagatgaaatcaatataagtaaaccatttcctgcgaaaacacgttgttctttcggagaagtatctatccttgttttcatgtttttcacacttatgttccgtaactggcatcagcctgggactgatggctctcattcgaagtcaggtgggagctctgatttgacagaaaaaggtcctgttcatgtccaagtatcaaccacgactcttcaatcctccaatgatgaccatgataaaaatgagtttgcttcccagttaattcgtgcttgttctgccctcaggcagcaatcctttctgaactatttgatggatatactgcaacaacttgttcatgttttcaagtcatcatccataaatggtgaaggtggctcttctagttcaggctgtggatccctattgacagtacggagagagttaccagcgggaaacttctctccctttttctcagattcatatgccaagtcccatcccactgatcttttcatggactactacaaattgttgttggagaatacattcaggcttgtatatagcatggttcgaccagaaaaggaaaaatcagctgataaggataaaagttgcaaggttcccaacaccaaggatctaaagttagatggataccaagatgttctttgtagttatatcagcaatgctcatacaacgtttgttcggaggtatgcaaggaggctatttcttcatctgtgtggcagcaagactcattattacagtgtcagggattcatggcaatattcacatgaagtcaagaaacttcataaaatcattaataagtctggaggttttcgaaatcctgtgccctatgagagaagtgttaagcttataaaatgtttgtctactctttgtgatgtggctgcatcaaggccaagaaattggcaaaaattttgcttgaagcacacagatcttcttccttttttaatggataacttctactatttcagtgaagaatgtatcgttcagactctcaagcttttaaatctagcattctattcaggaaaagatgctaaccataatgcacagaaaacagagagtggagatattggaagttccacaaggactggttcacagtcatcagattcaaaaaagaagcggaaaggtgacgatagctctgaaggctcctcagaaaaatcctgcatggacatggagcaggctgtggtagtgtttactggtaaggatggtgatgtcttgaaacgttttgttgatacattcttgttggaatggaactcaacgagtgtgcgccatgaggccaaaagtgttctatttggactgtggtaccatgcaaagagctcatttaaggagaacatgttaacaactctactgcagaaggtcaagtatctacccatgtatggacagaacatcattgagtacactgatctcatgacatgtttactaggaaaagctaatgattctactgcaaagcaaagtgacactgaacttctgaataaatgtttaacatctgatgtagtaagctgcattttcgacacacttcattctcaaaatgagctattggcaaatcatccgaattcccgtatatacaatacactgagttgcttagtggagtttgatggctattacttggaaagtgagccttgtgttacctgcagctgcccagatgttccatattcgagaatgaagcttgaaagtttgaagtctgagaccaaattcactgacaataggataatagtgaaatgtactggaagctttactatacagtcggtgacaatgaatgtttatgatgctcgcaagtcaaagtcagtgaaagtacttaacctatattacaacaacaggccggtaacagatttgtcagaactgaagaataattggtctctctggaagcgtgctaaaagctgccatcttacatttaatcagacagaattgaaggttgagttccccattccaatcacagcatgcaatttcatgattgagcttgattcattttatgaaaatcttcaagcatcttcccttgagtcattgcagtgtcctcggtgtagcaggtctgtaactgataagcatggcatctgtagcaattgtcatgaaaatgcataccaatgtagacaatgcagaaatattaactatgaaaaccttgattctttcctctgcaatgagtgtggatacagtaaatatggtcgttttgaattccatttcatggcaaaaccaagtttctcattcgataacatggaaaacgatgatgatatgaggaaaggattgacagcaattgagtcagaatcagaaaatgctcacaggcgatatcagcagctgatgggatttaagaagcctctcattaaacttgtatcaagcataggtgagcaggagattgattcacaacagaaagatgctgtccagcagatgatggtgtctctccctgggcctacaggcaaagtaaatcgcaaaattgcacttcttggtgttttgtatggtgaaaagtgcaaagcagcttttgattcagtgagcaagagtgttcagacattacaaggactgcgccgtgttctaatgacatatctgcaccagaagaattctaatgatacagatgcattaccggcttgttcaataccaaggtctccaagtagttgctatggctgtagtaccacgtttgtaactcaatgcttggagttattacaagttctgtccaagcatgcaaccagcaggaagcaacttgttagtgctggcattctgtcagaattatttgaaaacaacattcatcagggccctagaactgcacgcactcttgcaagagctgtgctttcttccttctctgaaggtgatgcagatgcagtgcaggaactgaataacctgattcagaagaaggtgatgtattgtcttgagcaccatcgctccatggatatttcacaatctacacgagaagagttacttctactttcagagacatgtgcccttgtggatgagttttgggaggcaaggcttcgtgttgcttttcagttgttgttttcttctattaaagttggagcaaagcatcctgcaatttcagagcatattattctcccttgtttgagaatcatttctcaggcttgtactcctccaaaatctgattctggggaaaaagagcctggtatgggaaaatctagcttgatgcaggcaaagaatgatgatacagttggccattcagtaactaatctttccacttccaagactcagtctgagttatcaggaaagattccagatggaagtcgaagacgacaggatatttcacttctcagctattcagaatgggagagcggtgcatcatatcttgattttgtgaggaggcagtataaagtatcacaagctgtgaaaggactgcaaaaaacacggcatgattcacaaaaatctgactacctggttctaaaatatggactgaggtggaagcgtcgtgcatgtcgaaagtcatctaaaggtgacttctcaaaatttgccttgggctcctgggtctcagacttgatcttaagttcttgttctcagtcaataagatctgaaatatgcactctcataagcttgttatgcccatcaaactcatccagacagtttcaactattgaacttgcttatgtcgttactccctagaacactgtcagctggtgaaagtgccgcagagtactttgagttacttgggacaatgattgatacagaagcttcacgtcttttcttaactgttcgtggttgtttgaccacattatgttctttgataacaaaagaagtgtccaatgttgaatcacaggagagaagccttagcattgacatttcacaaggattcattcttcacaagcttgttgagcttctcaacaaatttcttgaaattcccaatattagagcaagatttatgagtgataatttattatctgatgtgctggaggcttttctggttatccgtgggctagttgtgcaaaagacaaagttaattaatgactgcaataggcttttgaaggaccttcttgatagcttgcttgtagagagtactgcaaacaaacgtcaatttattcgtgcttgcatctctggattgcaaaagcatgtgaaggaaaagaagagacggacatctctgttcattttggagcaactctgcaatttaatttgcccagtaaagccagaacctgtttatctcttaattctaaacaaagcacatactcaagaagagttcattaggggctctatgacaaggaatccatactccagtgctgagattggcccactgatgagagatgtgaaaaataaaatatgccatcaacttgatttgattggtcttttagaagatgactatggtatggagttactggtcgctgggaatataatttcacttgaccttagcatctcccaagtctatgagcaagtatggagaaagcaccatggtcaaactcaacattctttgtccaatgctagccaactgtctgctgctgcttcatctgtcagagattgtccgccaatgacagtcacttacagattgcagggattagatggtgaagctactgaacctatgattaaagagttagaagatgaaagggaggaatcacaagatcctgaagttgagtttgctatagcaggtgctgtaagggaatgtggaggccttgaaattatattaagcatgattcagagcctacgcgaagatgagttaagatcaaaccaggaagaattgggttcagtccttaaccttctgaagtattgttgcaaaattcgtgaaaatagatgtgctttattacgcctgggtgcattgggtttgctacttgagacagccagacgtgcattctcagtagatgcgatggagccagctgagggtattctattaattgtagaaagtcttacaatggaagctaatgagagtgacataagtattgcccaaagtgtttttacaactactactgaggagactggtgctggtgaggaggcaaagaaaattgttctcatgtttcttgagaggctgtgccctcctgatggtgccaaaaaatcaaacaagcaacaaagaaacgaggagatggtggcaaggatcttacctaacttgacgtatggggagccagcagccatggaggcccttgttttgcattttgagccctaccttatgaactggagtgagtttgaccagttgcagaaacaacacgaggaaaatccaaaagatgaaactttaagcaaaaacgcatcaatgcagaggtctgctgttgaaaactttgttcgagtctcagagtcactcaagacaagttcttgcggtgaaaggctgaaggagattattctagagaagggcattacaaaagcagctgtaggtcatctgagggaaagctttgcttctgcagggcaggctagctttaggactagtgcagaatggacagttgggttaaaactgccttccattccactcatcctctcaatgttgaaggggctcgccaagggtgatctgcctacacaaaagtgtgtcgatgaagaagatattctgccattgctgcatgctttagaaggagtgcctggtgaaaatgaaattggtgcaagagcagaaaatcttttggatacccttgccaacaaagaaaataatggtgatggcttcttggcagagaagattcaagagctccgacatgctacaagggatgaaatgcgacgccgtgctctcaagaaaagagaaatgctactccaggggctaggaatgcgacaagaatttgcttctgatggaggtagacgtattgttgtgtctcagcctataattgaaggcttggatgatgtggaagaagaagaggatgggttagcatgcatggtttgtagagaagggtatactttgaggccgactgacatgttaggagtctatgcatttagtaaacgggtgaacttgggtgccactagttcaggcagtggccgtggggactgtgtttacactactgttagccacttcaacatcatacactaccaatgtcatcaggaggctaaaagagctgatgctgcactgaagaatcctaaaaaggaatgggatggtgctaccctgagaaataatgagacactgtgtaattgtatctttcccttgagggggccatctgttcctcctgggcagtacacacgatgtctcgaccagtattgggaccaattgaattctctaggacgagcagatggaagtcgccttcgcttgttaacatatgacattgttctgatgttggccaggtttgcaacaggcgcttctttcagcactgactgcaaaggtgggggtagggagagcaactcgcggtttcttcctttcatgatccaaatggcttctcatcttgtagatggaagtgccaaccagcagcgtcatgtcatggccaaggctgttacctcgtacttgtcctcttcgccttcaactccagaatctcctgttcgactttcagctctatctggagctcgtggtggttcaggttcctcggaggagactgtacagttcatgatggtcaattctctgctgtctgagtcctatgagagttggctgcagcaccgccccgctttcctgcagaggggcatctaccatgcttacatgcaacacaagcatggacgatccaccctcaagctttctgccgacacgtcttcctctgcagtccgatcagatgaaggttcatccgccgattcaaacgacagcaagaggctctttgccattgtccagccgatgctggtgtacactggtttgattgagcagctgcagcaatttttcaagaaaggcaaatcgtctggcacgcaaaaggtcggtgagaaggacggatcaagtggtggtaacctcgaagcttgggagattatgatgaaagaaaagctggggaacatgaaggagatgctaggattctccaaagacgtgctctcatggctcgaagacatgacctcatctgaggacttgcaggaggccttcgatgtcatgggtgcgttgccagatgtgttctccggtggccacactacatgtgaagactttgtccgggcgatcatacacggtgcaaagagctga

SEQ ID NO: 15799 - DNA, 2646 bp, Oryza sativa
  Clone ID: TFbOSC401213j.C1.o57.fg
atgtctcgccgccgggacgctgcgccgacggcgcgcgagggcgagagggatctcgtcgtgaaggtaaaattcggtggcactcttaagcggttcactgcttttgtgaatggtccgcactttgatcttaatctggctgctcttcggtcaaagattgcgagtgcttttaagttcaatccagatactgagtttgtactcacctatactgatgaggatggggatgttgtcatactggatgatgatagtgatttatgtgatgctgccattagtcagagactgaaccctcttaggattaatgttgagttgaagagcagcagtgatggggtacatcagacaaaacagcaggtattggattccatatctgtaatgtccactgctctggaagatcaattggctcaggtgaaattagctatcgatgaagctttaaaatttgtaccagaacaagttcccactgtccttgcaaaaatatcacatgacttgcgttctaaagctgcatcatcagcgccatcattggctgatttgctggaccggcttgctaaactgatggcaccaaagagcaaaatgcagtcttccagtggttctgctgatggttcatctggctcctctagtggtaggggacaaactttgggaagtttgaatattaaaaatgacactgagctcatggctgtttcagcttcgaaccctctggatatgcataactctggatcaactaaatcacttggtcttaagggtgtgcttcttgatgacatcaaagctcaagctgaacatgtatcgggatatccttattatgtggataccctttcaggctgggtaaaagttgataacaagggaagtaccaatgcccaaagtaagggcaagtctgttacatcctctgctgtgccacaagttactagcattggtcatggtgcacctactgttcattctgctcctgcttcagattgcggtgaagggttaagaagtgatcttttctggacacaactaggcctttcttctgagtcctttgggcctaatggccagattggtggtgatttgaactcgacatgccctcctccaccactgtttccccgttacccacttcagtctctccgagctgataaaagcagtatcaagggtggttgctcttaccctccgtgcatctgcaaaagtagcacatctaagcctgagaatctctcccattacccagttcagtccctccaagctgacagaagcctaaagggtggtcactatttccctccatgcacctgcaaaagtaacacatccaagccagataatctctcaccagtcggtctttatggaccttattctgaaggcagcagctgtaataggtgcccatacagggatctaagtgataagcacgagagcatggcgcagcacacactgcatagatggatacagtgcgatggctgtggggtcactcctatcgctggttctcgctacaagtcaaatattaaagatgattatgatttatgcaatacctgtttttctcgaatgggcaatgtgaatgaatataccagaatagacagaccatcttttgggagtagacgatgtagagacctcaatcagaaccagatgctctttccacatcttcgacagctacatgattgccgcttcattaaggatgttactgtccctgatggaacagtaatggcaccatcaaccccatttacaaagatttggcgcatacataacaatggatcttccatgtggccatatgggacatgtcttacctgggttggtggacatctatttgcacgcaacagctcagttaaattagggatctcggtggatggtttccctattgatcaagagatcgatgttggtgttgattttgtcacacctgcaaagcctggtgggtacgtgtcgtactggagattggcatcacccactggccagatgtttggtcagcgagtttgggtttttattcaggtggagcacccggtcaaaaccagtagcaacaagcagagtgctgctataaacttgaacatgcccccagaaggaagcaacacagaatggaagcattctgttgatgcaaatattcagtctgcagatattgtgggtaaatactctggaagcaccataactgatcctcttgcacatgcactataccatgaagccaccaaaccgatggaacctgagcttgtttcaagtgccgtaccttctgtacctagagcatttgaatcagtgctagtgccagctactgatctcctcacttcatctgctggagctgaaaaggcttcgaagcctgctgccacgcctggacctgcacctcaagccgttcccctgccaaaacctgttagcattcctgcatctggacctgcgcctgctcctgttagtgcgactaccgctgcacctgtcggagctgctgctgctcctatcagtgagcccactgcacctgctgctgccattggaatgccctctgcaactgctcgcgctgcttcttgcctgcctaccgagccttcatctgatcacatcagtgccgtggaggacaacatgctgagagagctggggcagatgggcttcgggcaagtcgacctgaacaaggaaataattaggcggaacgagtacaacctggagcagtccattgatgaactctgtggcatcctcgaatgggatgcactccatgatgaactgcacgaactgggcatctga

SEQ ID NO: 15800 - DNA, 285 bp, Oryza sativa
  Clone ID: TFbOSC100588j.C1.o14.gm
atggtgcacggtggattggtgcggcacgaggaaggaggaggcgacggcgctggcgccgacgtggggagcgagcaggaggcagcggcggtgcaaggaggaggcgcggtgacggcgacggcgccggcgtgcggagggaggcgatgggcagatcagacggcagcgcaaggaggaggcgcggtgacggcgacggcgccggcgtgcggagggaggcgatgggcagatcagacggcgacggcgacggtgcacggagggagcgacgacaatgaggacacatggagggagtga

SEQ ID NO: 15801 - protein, 108 aa, Oryza sativa
  Clone ID: TF_OSC11543j.C1.p1.fg
KGDYYRYLAEFSTGTEKKAATDQSLMAYQAWPCAQLFSLLEIMNSPERASQVAKQALDEATAEINSAGVEGYKDSMLMMQLLKENLALWTSELTGGETSKDDDVVMEG

SEQ ID NO: 15802 - protein, 278 aa, Oryza sativa
  Clone ID: TF_OSC401367j.C1.p84.fg
MVEAMNSVAKLDEGLTKEERNLLSVGYKNLIGAKRAAMRIIGSIELKEETKGKESHVRQTAEYRRKVEAEMDKICCDVINIIDKKGDYYRYLAEFKTGTEKIEVSELSLNAYEACDPFFIFNLFLFSQVTCFIEFTIYQVLVVYTASKTAQTDLTPTDPIRLGLALNISVFYCEIMNSPDKACQLAKNAFDEAVAELPSLSEENYKDSTLIMQLLRDNLALWNSDMADDADDIRERTDTTGAKGDPAACQVRIDTCCHLTYESSPARYVCDHVGFLAL

SEQ ID NO: 15803 - protein, 134 aa, Oryza sativa
  Clone ID: TF_OSC11544j.C1.p1.fg
MKEREKVVRLAKLAEQAERYDDMVEFMKTLARMDVDMSAEERLLFSVGFKKTIGARRASWRILESLEQKVTAGDQPGVTINGYKKKVEDELRAVCNEVLSIIAIHCLPLANSGENVVFFYKMYVQVLPNDAKVS

SEQ ID NO: 15804 - protein, 39 aa, Oryza sativa
  Clone ID: TF_OSC412316j.C1.p1.gp
MAAAAGGGTREEMVYMAKLAEQAERYEEMVEFMEKVVTA

SEQ ID NO: 15805 - protein, 308 aa, Oryza sativa
  Clone ID: TF_OSC410930j.C1.p5.fg
MSQPAELSREENVYMAKLAEQAERYEEMVEFMEKVAKTVDSEELTVEERNLLSVAYKNVIGARRASWRIISSIEQKEESRGNEDRCTLIKEYRGKIETELSKICDGILKLLDSHLVPSSTAPESKVFYLKMKGDYYRYLAEFKTGAERKDAAENTMVAYKAAQDIALAELPPTHPIRLGLALNFSVFYYEILNSPDRACNLAKQAFDEAISELDTLSEESYKDSTLIMQLLRDNLTLWTSDISEALPIYVVLGNLAADSLLGWWILELHFLWGEPQGGTFMSLIGSIVFGMSVVSLISRVHSPAKCPA

SEQ ID NO: 15806 - protein, 1563 aa, Oryza sativa
  Clone ID: TF_OSC900048j.C1.p23.gm
MVVSPTVCNVKLGRVLIDGGAALNILSPAAFDAIKAPGMVLRPSQPIIGVTPGHTWPLGHIDLPVTFGGSANFRTERVNFDVADLSLPYNAVLGRPALVKFMAAVHYAYLQMTMPGPGGPITIHGDLKVALACMEQRADHLAAASKPAGGDERLSTSVPAAPRAGDDHEDALVSFLRANADVFAWRPADMPGVPREVIEHRLAVRPGARPVQQKVRRQAPERQAFIREEVARLLEAGFIREDIHPEWLANPVIVPKANGKLRMCIDYTDLNKACPKDPYPLPRIDQIVDSTAGCDLLCFLDAYSGPTFQRTTRISLGSQIGRNVEAYVDDLVVKTRNQETLLSDLAETFESLRSARIKLNPDKCVFGVPAGKLLGFLVSARGIEANPEKIRAIERMRPPSKLRDAQCVTGCMAALSRFISRLGEKALPLFKLLKRSGPFTWTEEAERAFTQLKAYLSSPPVLVAPEPDEPLLLYLAATPQVVSAALVVERDEDNPHSAHPHPVSTRPGREQGGEAPEPNGGPRPPTVRAGPLPACPTVPGAPDPQDGPGATAGRPRLSPSDPEVVGTEVECAPGGLSDEERPGDAAPGEEDRPRRKVQRPVYFVSEALRDAKTRYPQAQKMLYAILMASRKLRHYFLAHRVSVVTSYPLGQILHNREGTGQVVKWAIKLSEFDLHFEPRHAIKSQALADFVAEWTPAPEPVSVLEASSGPSQLPHTAYWVMQFDGSLSLQGAGAGVTLTSLNGDVLRYLVRLDFRATNNMAEYEGLLAGLRVAAGLGIRRLLVLGDSQLVVNQVCKEYRPPPGAFEERLAQPSARPDPLGETDAPERPPRPVGVQASGPDGSVPSSLRLIAWIAEIQAYLADKTLPEDREGSERVQRISKRYVLALQTIPLSWLFAVWGLDILGPFRRAPGGFEYLYVAVDKFTKWPEAYPVIKIDKHSALKFIRGITARFGVPNRIITDNGTQFTSELFGDYCEDMGIKLCFTSPAHPRSNGQVERANAEILKGLKTKTFNILKKHGDSWIEELPAVLWANRTTPSRATGETPFFLVYGAEAVLPSELTLRSPRATMYCEADQDQLRRDDLDYLEERRRRAALRAARYQQSLRRYHQRHVRARSLCVDDLVLRRVQTRAGLSKLSPMWEGPYRVIGVPRPGSVRLAMGDGTELPNPWNIEHLRRFYPYGTMNRVPTSWGFVYSRVNKVTTLAPAFMLWVLCGYRVPTGSVWAQGSPRGEGSRSLFGAQRAGTRLHWRNGPVAVDRQRVRASGHAGHQPVQQRRFVVVVKRFPTFPVPTKAAFASATTTATRRRRRRRGEEEREGEREAERYEEMVEYMERVARAAGGASGGEELTVEERNLLSVAYKNVIGARRASWRIISSIEQKEEGRGNDAHAATIRSYRGKIEAELARICDGILALLDSHLVPSAGAAESKVFYLKMKGDYHRYLAEFKSGDERKQAAESTMNAYKAAQDIALADLAPTHPIRLGLALNFSVFYYEILNSPDRACNLAKQAFDEAISELDSLGEESYKDSTLIMQLLRDNLTLWTSDANDDGGDEIKEAAAPKEPGDQ

SEQ ID NO: 15807 - protein, 60 aa, Oryza sativa
  Clone ID: TF_OSC34756j.C1.p1.fg
ASQVAKQALDEATAEINSAGVEGYKDSMLMMQLLKENLALWTSELTGGETSKDDDVVMEG

SEQ ID NO: 15808 - protein, 255 aa, Oryza sativa
  Clone ID: TF_OSC401803j.C1.p29.fg
MNMETRRYTSLSHRKARSMECFPSTQCPVKRGKAIATLLNISEPPLELTRTLLEADADSAFQPDRRGSFPIHIAASAAGRLSAVIALLTIFPGSAGLRDSDGRTFVHVAARKKRYSVVAHACQTPALSGILNKQDNEGNTALHLAVEAGDWWIFACLFVNKQVDLNLPNSSGHTPLELSINTIPTGLYCLLNSRILIQETLIAANATRGISRMDAAGTEEHGPQSEAENEEKGSEIVLPLYYILMYDAIDFLFNV

SEQ ID NO: 15809 - protein, 258 aa, Oryza sativa
  Clone ID: TF_OSC401247j.C1.p12.fg
MTVQAGADVNYAYPNTPLVVSTTAGLTDCIKYLLEVHADPNIPDKQSGLTPIEIAASVGRRDHVEILFPFTSPVRAVTNWTVEGIIAHGKSRRLIPKFQILKIKRSLDSSGHDHLNPHYFLQGESCSKVSDRKAELKSQGEKAVKRKDYLAASKIYTKALELDYFDATLYSNRSLCYLQIGKAQKALLDAKKCVKLRPKWMKGHYREGAALMLLKEHKKAFEAFLNALKLDPANAEIEKVMWEAVEAMKKDDAAEDKT

SEQ ID NO: 15810 - protein, 274 aa, Oryza sativa
  Clone ID: TF_OSC406054j.C1.p2.gm
MHDAALQALPMVLEWLKNKKLKTANVDMQQLTSQRDNDNGSTPLHLAASMAGLPSLGSMLLLDANVSTAYQPDNQGQYPIHAAASADSLEAVKALLEKCPDCATLRDARGRTFLHAAVEKKSFDDDNGVRLDMRNKEGMMPADVSWSMMPLKTYYAWNSSIRIRKLLLKLGAPLGESRGDLFDEKHNRIIGEKSKWDMEKMSENVTAAAQVLALFSVLITTVTFASAFTLPGGYRSAGDDGGAAGTPRQAQGLPTFHKSKSMRMSARRVRTENG

SEQ ID NO: 15811 - protein, 412 aa, Oryza sativa
  Clone ID: TF_OSC408633j.C1.p3.fg
MSESIPDKQIVVRFPNHVLPASLRENMGKEGATVDNMDPSCPFLVLEKYDRKKSYEWLNLRAAWVAKSMPNDIIIPDPTPERVRDAFSEISRSLSNVMAEDSVQCFLNMFLESPSTFAYRFTITSETLTFMIRYNALRCMKAVLEGKAPGLGSMHANPNCMSPYGCFPLHEAAERCSPRMIRLLFRHGASANYREDCVYRLVHLLCLPDMIVSLEVIRLLAQKTDNVVDELWNYMKNGKLAQATVLFLAAQKHFRKGKPNGFSIIAQRIFGDYDSLTSDKGNGEAHKQLEERKALLNCQCLLYNIISQAGEALYDYVQTHSEVSHVEVLAHVSSILKEFGFCPKEEYIDTMNLSPYNLDNFYSVVFQEGQTKPVEQTSSPNAAEKKGFAAPFLLLEMSIILQSFVQITTAKD

SEQ ID NO: 15812 - protein, 94 aa, Oryza sativa
  Clone ID: TF_OSC28352j.C1.p1.fg
MGKQEQEKMLLQAAYDDNLRLLRKMARGLDTGQGEAAVVAAVAGRADGNRALHLAAARGSMDVLRYLVEDLHLSVNQFNAKGLALPLFRSIFSV

SEQ ID NO: 15813 - protein, 462 aa, Oryza sativa
  Clone ID: TF_OSC900150j.C1.p15.fg
MSRANSRQTKAQSCEGLNAEGIAGGPAWGELAEAPWRAQGDGGGLAETAAALSVLLEKCKNVEVNVQQEDQQRSIPLLLYLTSQSDKNGSTPLHFAASLKTSIEGFTSRLCEHFRPKQSPTTLLLGLNESAIYQPDNRGSYPILVAASNGILKVVITLLKRYPDCATLRDIQGRTFFHVAVEKKRRNIVAYVCERPGFSPILNMQDSHGDTALHLAVKAGYHMLIFQNPRYMISQLLALSGGTVGYSRQDHFFEKYSKKRDEVIDSNDMTSAAQVLGISSALIATVTFAAAFTLPGGYRADDHTDGGTPTLAGSYPFDAFIISNSLAFICSLLATVSLLYSGIQSRDISIRRRYYAFSMLLMQSSTTSFTVAFAMGMYLVLAPVTLNAAVSVCIIAFVSLLPGNMEIGVSLAIANTLRIRLGIWAAMSQARPVLLFTWKRVWSCIIIFGLPGLMKIHRTKMA

SEQ ID NO: 15814 - protein, 633 aa, Oryza sativa
  Clone ID: TF_OSC400095j.C1.p16.fg
MEDASKYAHSPAHLAVVRRDHASLRRLVAGLPRLPRAGEVATEEESIAGEAVADAVSAAIDRRDVPRRETPLHLAVRLRDPVAADILMSAGADWSLQNADGWSALQEAVCTREDAIATIIARHYQPLAWAKWCRRLPRVLASINRIRDFYMEISFHFESSVIPFIGRIAPSDTYRIWKRGAALRADMTLAGFDGFRIQRSDQTFLFLGDGARPEDAGGKELHPGSLIVLAHKDKEITDALEGAGVQPTEAEVAHEVALMSKTNMYRPGIDVTQAELVPHLNWRRQERTEAVGHWKAKVYDMLNVLVTVKSRRVPGAMTDEELFAMEGEEKNGRGTELDAELDEVLTAEERKQLDSALRMGNQEEEFEERCEEGDGGADHLDANGVAKDKKGWFGWGGKKGTKNDEKPSKANQGSKDESGDLGKGKEKNSSKKKKGASSGDSTKHESEYKKGLRPVLWLTPDFPLKTDELIPLLDVLANKVKAVRRLRELLTTKLPPGTFPVKIAIPIVPTIRVIVTFTKFEELQPLDEFATPPSSPTQFQDAKGKESEGSGSWYSWVRGGRGAQSSDSGDSRNWKDEVDPFQIPSDYTWVDANEKKRRMKAKKAKNRRGSTRKQSSKSTSSEGGHPMMDGFEE

SEQ ID NO: 15815 - protein, 391 aa, Oryza sativa
  Clone ID: TF_OSC101172j.C1.p1.gp
MCSGPRKPSTPPLPQQQKEATVMAASLLLELAAADDVAAVRRVVEEEKVSLGVAGLWYGPSASGVARLGMERRTAAMVAALYGSTGVLGYVVAAAPAEAARASETDGATPLHMAAAGGAANAVAATRLLLAAGASVDALSASGLRAGDLLPRATAAEKAIRLLLKSPAVSPSSSPKKSASPPSPPPPQEAKKEYPPDLTLPDLKSGLFSTDEFRMYSFKVKPCSRAYSHDWTECPFVHPGENARRRDPRRYSYSCVPCPEFRKGGSCRKGDACEYAHGVFECWLHPAQYRTRLCKDEVGCARRICFFAHKPDELRAVNPSAVSVGMQPTVSSPRSSPPNGLDMAAAAAAMMSPAWPSSPASRLKTALGARELDFDLEMLALDQYQQKLFDK

SEQ ID NO: 15816 - protein, 579 aa, Oryza sativa
  Clone ID: TF_OSC900232j.C1.p15.fg
MAASLLLELAAADDVAAVRRVVEEEKVSLGVAGLWYGPSASGVARLGMERRTAAMVAALYGSTGVLGYVVAAAPAEAARASETDGATPLHMAAAGGAANAVAATRLLLAAGASVDALSASGLRAGDLLPRATAAEKAIRLLLKSPAVSPSSSPKKSASPPSPPPPQEAKKEYPPDLTLPDLKSGLFSTDEFRMYSFKVKPCSRAYSHDWTECPFVHPGENARRRDPRRYSYSCVPCPEFRKGGSCRKGDACEYAHGVFECWLHPAQYRTRLCKDEVGCARRICFFAHKPDELRAVNPSAVSVGMQPTVSSPRSSPPNGLDMAAAAAAMMSPAWPSSPASRLKTALGARELDFDLEMLALDQYQQKLFDKVSGAPSPRASWGAAANGLATASPARAVPDYTDLLGSVDPAMLSQLHALSLKQAGDMPAYSSMADTTQMHMPTSPMVGGANTAFGLDHSMAKAIMSSRASAFAKRSQSFIDRGGRAPAARSLMSPATTGAPSILSDWGSPDGKLDWGVQGDELHKLRKSASFAFRGQSAMPVATHAAAAEPDVSWVNSLVKDGHAAGDIFAQWPEQEQMVA

SEQ ID NO: 15817 - protein, 893 aa, Oryza sativa
  Clone ID: TF_OSC400269j.C1.p25.fg
MDEPSIVKLPEYELPDAFRGEIDGKGLEEGATIDNMDPSRPFLVLNVFDWDKVDEWIALKTAWIAKRLKNDIIIPDPVPQIGRDAFFDITPRLTTVLEKDSVRCFLPLFVQCESIMTYQCAITSETLTHMVRHNALRCAKVVLEGKAAELRCKHANPNCMNPYGYFALHEAAERFSADMTKLLFRHGASANVRTASDAGIQGLLPLDVAVENACMHKYLEDNLSPTPMQYHEDYIYKLIHLLCLPEMKVFLDTIRLLAEKTDNLVDELWNYMKNGKLVQTAVLLLAAQKHIRKIKPDGFCIITHHLFKEYANSLRCAKGDTGEAQKQLEEREALLSCKSELFSIILLAGEALDNYIQAHSEVSHAEVLARVSSILKEFGFCPKEKCIDNIKLYCSFCIQNHNFLSPYMYGTSYCDIFHKGAYWHVAVDNHVSANCYAVHVSLRFGRMAGPHGPCRVFGSLNLIDVRYLDTCHRMSRSRKNSEIKRAWSAAISGWVTDQKILLGCEACLVCSNFGMGDRPENSSRSFILERPRYTSRLQLKVEVMEKQSIDFGKVLEEIQESLVVLNLKQGAARGSVRSASTNGAHEQGFKFVCGESFPNSSSVDGRGEEGSATPYAAYATCGCARRRGQMASWPLRCNRSPGKGFGDGYHPDPDSGQEYDFPTNPLIISSNLNLGVEKLDLETALAIASLQEEVILESSAVSVSNPKKIDNGLQIRPNLAYKGALPLPLPPNRGVTTGSVSRMEDRKTLDNGKLVNGTDKISALKAQRRAHGLCYICAEKWSPTHKYANTVQLHAVQELLTTLGSEILYDQEFTEECEGSDSQGLMAISVQSMHGSETMGCMRLLGFIQGREVLILVDSGSTAGFLSSQVAQTISMRHAILLDLMFHIDQKLC

SEQ ID NO: 15818 - protein, 267 aa, Oryza sativa
  Clone ID: TF_OSC900390j.C1.p18.fg
MVSLLLQWKPTLATKVDSNICDNQGQSFLHAAAMKGHSSIISYAVKNSMLKHLLNAQDKEGNTPLHLAVVVEECKVVSKLLSSGEVSLVVKLHESGAQFQPQRQDLIEKWNAQDIMKWRDNTSKNLAVVSTLIATIAFAAAFNVPGSYGDDGKANLAGDPMYNAFLILDTISMVTSVVATILLVYGRASRSHRSWLSFVISMYFLWLSINCMVFGFFTAIAAVSKKGIKIAMSQLIYHGMYILTMQLTFLAMPGSFISTMKFLVFYG

SEQ ID NO: 15819 - protein, 405 aa, Oryza sativa
  Clone ID: TF_OSC21353j.C1.p1.fg
MDRPRQQHEPEHLGGGGIDVEVELDPEDLQPSVPLKKVPAGDLFEAARAGDCARLALLLGGGANVNERDRWDSVALYYACLAGHADAARMLLEAGAVCAERTFDGDRCHYAALNLRLRRLLKAFEARPPPLPPLPAALRATFLACPANRAAFLEMLQWTAGSEAAALAAAAGFGPTDNPSSTSLFPPDITFYVDGKPIEAHRVILCARSSFFRRKFNTDWKDRKEVRFSSQKLSFGALYSLVHFFYSDRLEVDVDDMENLARACKVCKCEGLQKILIKEATLQRYAEHKSPRDLDSSQKRFILHGQSLPEEDRLPSALRHIFEECLANSREQECYNDESNEMSRDSGVDAAADLYIKVILASRSEYFKARLSRNMDFLEVKSGLQSTQSLPFLEEHDMSTEAFEK

SEQ ID NO: 15820 - protein, 93 aa, Oryza sativa
  Clone ID: TF_OSC28359j.C1.p1.fg
MEEKGMGKQRWEKMLLQAAFDGNLRLLRKMARGLVTTGRGRGEADVLAAVADGGSGSRALHLAATEGRMDVLTYLVEDLRLDVNQTNDRGSDL

SEQ ID NO: 15821 - protein, 1025 aa, Oryza sativa
  Clone ID: TF_OSC400945j.C1.p7.gm
MLREADERAAEGGRRVPLDGRRALLGGRRQEVSVFGLLGSSEVAGLAERPTTEILASRRPLVGFSNVIKKVDDIIDGGITPLACAAYNGSVTSMKTLLQAGANVQISKPIGKAIVADLTSSESMVQILLDSGANADAIDEDDVHTAARVTALRERMFNALENINYLLADICCKALRNDDKGKEVMCLKAALALNPQNERAESLLRHGPAAGRADTGPTPIGPGRSSEDATTATGKKMNPLPALASRLWEASIRKLKYSTILRGSVVPSGGTFDGPAAATGNAAGGDPITLTPSLSVSSSTSNTIYQYDDGDEDIDSVLDDVDTDDDDVDEASLGEPSHSDQLLPSGDFYQGDLRCDLPHGAGKYLWTDGSMYEGSWRGGRAAGRGKFSWSSGAIYEGDLAGGYMHGQGTYIGELGDTFAGLWANNLRHGRGTQAYVNGDVYDGHWRDGLQDGHGQYIWRGGHEYIGTWKAGEMHGRGTVIWADGDRYDGAWEDAKPKGQGTFRWSDGGMYIGLWCQESGETQGKGVYYPPSGGPAVPLPREPKGVITKLLEELEMSEGKTVSLLPSQKVLTWPGVEPVTKKPVWLPPEVAADQGMWRPPEVGADQGRRSSRRNNMSSDIDSLVEGEDGGEESRNDRSWVRTPSCMRAPTMPKPGKKQGETISKGHKNYELMLNLQLGIILDVPIIATHFSAERTMSLRGGGESAGSDSPCRREEAKSRTPRPQPGSAGERSAAASAEMSSRGGSKSCGGDSLQPGEAGEHGVAPSAAAVETSSEVAKVRGQAATPYSAAPFDESMLVQHSTGKAMGNREADVAAVGLGPKNSGLKICPARSLGRRRGGGREGAAGHAVDAVAEEEDAGHRAAAGSGGEGVSWRGGGRPRYTTADSLAFVAASLGKGRWRGGGGWRRWVAERSSLRRVIGAATLRDTVTPLLVPCYDLATAAPFPLLPCWSRSSSPVPTPSRGQLRLQRTTTVVVVVVAIPNLLTGRHYPERRSKNRVESKSATIKDQINWHAHTPKGKLLDLHWS

SEQ ID NO: 15822 - protein, 72 aa, Oryza sativa
  Clone ID: TF_OSC28352j.C1.p1.gp
RYLLDHGSDPTIDKSVLPFHAAATKGHCEIVELFLSKGVDVDLYSIAGTPLLAAAISGQHSTMKILLEHHAD

SEQ ID NO: 15823 - protein, 432 aa, Oryza sativa
  Clone ID: TF_OSC9793j.C1.p1.fg
MAFKCNITSETLSCIVRHNALRCAKTVLEGKAPQLSCMHANPNCINPYGIFPLHEAAERFSVDMIKLLFCHGASANLHTVNDAGIPGLLPLHVAVGNTCLHKYLEDNLSPVQYHEDYIYKLIHLLCLPEMKVFLDTVRLLAEKTDNLADELWNYMKNDKLVESAVLLLAARKHIREGKPDGFDIIAQRIYEDYDSLVCDKGDTAEGQKLLEERRALLKCKCLIVTIISQAGEVLDNYIQAHSEVHNNETDLMKFMLARTTIMLSTMKYDLVPNVEVLARVSYILKEFGFCPNEEYIDTMILCPYNKISYSDIVHKDVTKAVAQMSTSLPAAEKKAARKKALKGWDPTFIKRNFFPYWRSVLGAQLSVSNGAADEKSMLHRPQFRNSVNAHEGAKDMSKKVPSGMLLLITIGLQSIMLRTSFADTLRRLRIYM

SEQ ID NO: 15824 - protein, 428 aa, Oryza sativa
  Clone ID: TF_OSC400769j.C1.p1.fg
MMCEMTKLPLVPFSHVQSRGGADVCGDSFPGGNNGLRGRQRCSGGDHDALSTSAKATSDHLAASGCGDVHGHSLFFFAPPSLLPLRHRRGPSLVPGRQRCGGARGAPHRMPLLANGPTLWYQLDDDVAGLRELLAACPSLADEPAPWYSLARGTEPLTPLMVATAYGSVACLDVLLSPPYLVDPNRASASSLSTPLHLAAAGGATSTPTSVSRLLAAGTDNDNDEVEERQGEEGRARNLQKLSDNSGEFERGSVDLQMIRFEELLVFFFSFGFMGYFSLLLLKPYQILGNKPKFSTLKGGDGMRDPSLMHMGGPHCTSSISDDHEELSSISGVFSMPSSRPYNVPPLHAGASQIHLIKEKQQEQQIRRAQTPIRKTLACAETSRETPSFCLIASQGRHPTLSVHSPLRVSDDELTSDNDRPLLQATAA

SEQ ID NO: 15825 - protein, 194 aa, Oryza sativa
  Clone ID: TF_OSC421348j.C1.p4.fg
MEMEGGDNDFAKAVLAGLDKCEELGYEDVELWSDSQRACGVLSDFETINMDDRNRMECMLLRFKSTRFKRLVSVQKPREIKDWSLCEILFMVDDILIEKVHSRYLLRNLLKKWSPYLRGQSIYSITRTKLTRYIIRTKLTRDIIRHPIGAVPLHEAAERFSVDMIKLLFRQGASANIGPNSDFILLGDLVLIHT

SEQ ID NO: 15826 - protein, 432 aa, Oryza sativa
  Clone ID: TF_OSC900089j.C1.p35.fg
QLMLDRPLANSAHHYCKILCVRPIAAPFSTKVNFRVEGLNLVSDSSRLICSFEGSCIFQEDTDNIVDDVEHDDIEYLNFCCPLPSSRGRGFVEVEDGGFSNGFFPFIIAEQDICSEVCELESIFESSSHEQADDDNARNQALEFLNELGWLLHRANIISKQDKVPLASFNIWRFRNLGIFAMEREWCAVTKLLLDFLFTGLVDIGSQSPEEVVLSENLLHAAVRMKSAQMVRFLLGYKPNESLKRTAETFLFRPDAQGPSKFTPLHIAAATDDAEDVLDALTNDPGLVGINTWRNARDGAGFTPEDYARQRGNDAYLNMVEKKINKHLGKGHVVLGVPSSIHPVITDGVKPGEVSLEIGMTVPPPAPSCNACSRQALMYPNSTARTFLYRPAMLTVMGIAVICVCVGLLLHTCPKVYAAPTFRWELLERGPM

SEQ ID NO: 15827 - protein, 997 aa, Oryza sativa
  Clone ID: TF_OSC401265j.C1.p5.fg
MEAARVGAQSRHLYGGGLGEPDMDRRDKRLFGWDLNDWRWDSDRFVATPVPAAEASGLALNSSPSSSEEAGAASVRNVNARGDSDKRKRVVVIDDDDVEDDELVENGGGSLSLRIGGDAVAHGAGVGGGADEEDRNGKKIRVQGGSPSGPACQVEGCTADLTGVRDYHRRHKVCEMHAKATTAVVGNTVQRFCQQCSRKSYIVKRRDYYGSNDFGSYLLILKNNFRFHPLQEFDEGKRSCRRRLAGHNRRRRKTRPEVAVGGSAFTEDKISSYLLLGLLGVCANLNADNAEHLRGQELISGLLRNLGAVAKSLDPKELCKLLEACQSMQDGSNAGTSETANALVNTAVAEAAGPSNSKMPFVNGDQCGLASSSVVPVQSKSPTVATPDPPACKFKDFDLNDTYGGMEGFEDGYEGSPTPAFKTTDSPNCPSWMHQDSTQSPPQTSGNSDSTSAQSLSSSNGDAQCRTDKIVFKLFEKVPSDLPPVLRSQILGWLSSSPTDIESYIRPGCIILTVYLRLVESAWKELSDNMSSYLDKLLNSSTGNFWASGLVFVMVRHQIAFMHNGQLMLDRPLANSAHHYCKILCVRPIAAPFSTKVNFRVEGLNLVSDSSRLICSFEGSCIFQEDTDNIVDDVEHDDIEYLNFCCPLPSSRGRGFVEVEDGGFSNGFFPFIIAEQDICSEVCELESIFESSSHEQADDDNARNQALEFLNELGWLLHRANIISKQDKVPLASFNIWRFRNLGIFAMEREWCAVTKLLLDFLFTGLVDIGSQSPEEVVLSENLLHAAVRMKSAQMVRFLLGYKPNESLKRTAETFLFRPDAQGPSKFTPLHIAAATDDAEDVLDALTNDPGLVGINTWRNARDGAGFTPEDYARQRGNDAYLNMVEKKINKHLGKGHVVLGVPSSIHPVITDGVKPGEVSLEIGMTVPPPAPSCNACSRQALMYPNSTARTFLYRPAMLTVMGIAVICVCVGLLLHTCPKVYAAPTFRWELLERGPM

SEQ ID NO: 15828 - protein, 613 aa, Oryza sativa
  Clone ID: TF_OSC400938j.C1.p12.fg
MPVQDPSSPVPAAARPKRTSSAPIRPSDYTHSPAHHRVALRDAAGLAGVLHGLPPLAHPSRILTAADAAREARLAASVSGALDRRDVPGGDTALHLAVRLRLPSLASALAAAGADPTLQNHAGWTPLQEALCLGCKDIAACLLRAHRLAAWAKLRRRAPALSAALRRVQDFYLEVDFHFESSVVPLLSRAAPSDTYRIWKRGAELRADTTLAGFDGLRIRRADHSFLFFGEEADAGGRHLPPGSLLVLHRGKREVHDAFAAAAAAGDEDSATSDAAAYRPGLNISSARLVPRTTWLRKEKTESVGEWKARVFDVHNVVFSFRTLKAANAGRKDFTFELAGDDDDDDNNDDEEDFLPLEIRDDDEDGDFLVADIPPPPSRRSCYVPGRRSVAAPPSHMATPQRRRNSVDVPRRLPACASVGRGEGGVFGRHATTTGGARWKEEETVKTLRPTVWLTEDFPLTVDEFLPLLDILASRVRAVRRLRELLTTKFPPGTFPVKVAIPVVPTVRVVITFTKFVPLLEPEEFFTPMSSPSLLVSPGPGSIMHKPDTQKSSYLKWGLKNSRSKPVNLSQVADNTDPFTIPSDYTWVSLGSKGQDKKSSKTKKGKTKETKLS

SEQ ID NO: 15829 - protein, 267 aa, Oryza sativa
  Clone ID: TF_OSC8653j.C1.p1.fg
MSSKSSPRELTGKKKLTKHDDEALRFIELAENGTDPATIDASEAKVDDIIDGGITPLACAAYNGSVTSMKTLLQAGANVQISKPIGKAIVADLTSSESMVQILLDSGANADAIDEVMFEDPPIIAAAKRKQMNVVQLLLSSSTPIEGVDWSLNGIIAYTESVTFKAEDDVHTAARVTALRERMFNALENINYLLADICCKALRNDVSTTEWDRLRNLNLLYLSHSFHGQKPVLSSDAIVNMALVYQKQDKGKEVMCLKAALALAPPK

SEQ ID NO: 15830 - protein, 1031 aa, Oryza sativa
  Clone ID: TF_OSC414561j.C1.p1.fg
MAETRKFLMPNQPPDISQMVLEARKRWLRPTEICEILSNYRSFSLSPEPPNRPGSGSLFLFDRKTLRYFRKDGHNWRKKKDGKTVKEAHEKLKAGSIDVLHCYYAHGEENENFQRRTYWLLEEDFTHIVLVHYLEVKGVKQSFSRAKEEIMQLSGADSPSCSNSITSQNQMTPQIMDAAESPISGQISEYEGAEPAKFGAADNCPASSRYNPLIEMQQPLDGIVMDNILYPSSSAICNQVSGYHGELPPGTSNLNGHTFSHSDIARMFDDSSSGLRDISRTLFDSMPYDEHFSGYANGFMEPTLHSSFSMIEANNLEDSSLLETYTSEALYTNNLSQKEADALSFAGISSPEVNGNKYTEGSTKHPLLKQLSLDLFKIESSGLKKHDSFSRWMSKELGEVVDLGIKSSSDALWSSIEIVNAADGPSAPTNEQLDAYAVSPSLAQDQLFSILDISPSCSYIGLKTKVLVTGTFLASKENVENCKWSCMFGDVEVPAEVLADGSLRCYAPEHQSGRVPFYVTCSNRIACSEVREFEYRDSDAQYMETSHSQANGINEMHLQIRLEKLLTLGPDDNQLLVCGNEKLELINAINSLMLDEKWSDQGSPSGSKDVVTPRNQSLKKLMKEKLHCWLIYKIYDCEKGPNILGKEGQGIIHLAAALGFDWAIRPILVAGVNVNFRDAHGWTALHWAASCGRERTVGVLIANGAAAGALTDPTSEFPSGRTPADLASTNGHKGIAGFLAESALTSHLSALTLKESKDSNAEEACRLTIPEDLPEMNYGQLAVQDSHAESLKDSLSAVRKSAQAAARIFQAFRVESFHRKKVVEYGDDDCGLSDEHTFSLISLQKVKQGQHDTRLHSAAVRIQNKFRGWKGRKEFMIIRQRIVKLQAHVRGHQVRKNYKKVVWSVGIVEKVILRWRRKGRGLRGFRPEKQLEGQTQIQPAKTEDEYDYLQDGRRQAEGRLQRALDRVRSMTQYPEAREQYRRLTTCVAEMQQSRMMQDEMLSEAAGADGSDFMNGLEDLICRDDPQMSAIW

SEQ ID NO: 15831 - protein, 501 aa, Oryza sativa
  Clone ID: TF_OSC9750j.C1.p3.gm
MAETPAAAAAVEFGPHPHDMLTLDGELLRVLITGDRVRLEEILREAGSYGGDGEHPGDGGNGGSPPHEVPPLVDGHRDPRRDGPELIAINLPDHAAPAVVVEAGLSLSPRRSYGYLKSGACSATRSGLPSRSDEQREHGLHLVASRGHAELAALIRVRAPSLVATRNRCLDTPLHCAAKAGHREVVARLLDTRTGVAEAEVELAAAVAEAALRVRNCLGATVLHEAVRHGHTEVVHLLMSRAGAAELASVASDDGVSPLYLAATTGSVRMVQELLLRPADDGRRRSSASFTGREGQSTFSLCPLYPREGHVIPHNPTAVTYIVLGGFGRGTRTSIFFHFRYDVPTLKLLRCTSLPACPLLSNGGLTTTSLLLLVPLHIPFHVPLLVPLRIPLHVPFLVQVLRLARRRGDGGGGVALHAAAVLRGGEGGGVAWRRWRCARGGEGGGVACRRRRGAASSWRGVSWRARCGGGGGGGGGGEDDELETTARYGGVGAGICPRQWR

SEQ ID NO: 15832 - protein, 468 aa, Oryza sativa
  Clone ID: TF_OSC401064j.C1.p99.fg
MEPKPSTPTAAATPRFKLGKQSSMAPDRGGAGESSEEGSSEAVGVMGFQLMYMAHEGDVEGIQELLDAGADPNFRDSDGRTAMHIAACEGQAEVVELLLQRGADAVAEDQWGSTPLADALHYQNHDVIKILEKHGSKLKIAPMHVKNVREVPEYEISPNELDFTNGNGISKGTFRKATWRGILVAVKKLDDDLIMDENKVQAFRDELDVLQLIRHPNVVQFLGAVTQSSPMMIVMEFMPKGDLRKHLSRKGALEPSYAVKLALDIARGMNYLHEHKPQAIIHRDLEPSNILRDDTGHLKVADFDLCKMLKWRRKVREEKAVTSPGNACRYVAPEVLRNEEYDTKVDVFSFALILQEMIEGCLPFYDKKNNEIEKAHNSKERPPFRAPPKHYAYGLRELIEQCWSENPASRPDFRTIIEQLSYIQNEISQRNRWKVKPLKCFLSFEGMWKKDRNEGSTTRSSRSSRSYF

SEQ ID NO: 15833 - protein, 494 aa, Oryza sativa
  Clone ID: TF_OSC400896j.C1.p7.fg
MGNSLGCSASGERLVSAARDGDAVEARMLLELSPALARYSTFGGLNSPLHFAAAKGHLDIVTLLLEKGADVNVRNYCGQVFHFYSSILSLSELEHFVDIFLRLFGMVDEDCVDARMPAWPLGGGSDASALQMQCMVTRADYLSGRTALHFAAHDGLVRARLRYINKPADGGVTALHMAALNGAGSTPLHYAAGGGNAECCQLLLSKGASKLTLNCNGWLPIDVARMFGRRFLEPLLSPNSNSSIPAYQPSNYLALPFMSILNIARPDYVLCRIAIISETVKLGREFGLLHTVASVDDSDLCAVCLERSCSVAAEGCCHEFCIKCALYLCSTSNTRVEFTGPPGSIPCPLCRNGIMSFTKLPSTPTEGLKSSSALTFCNPCMLNTRSVDSPATISKAEIRRNRVAAVSSELVCPLTCSPFPSSALPTCRCSDDDPCDAIETQDGSEVQSPQPSHCASMEMDKREQQDLDRTSCSGMFWSRRSCHREEQCNAEINA

SEQ ID NO: 15834 - protein, 709 aa, Oryza sativa
  Clone ID: TF_OSC32694j.C1.p2.fg
MDHHRQMQDIQLARCSSQHHGSEAAVTARGDSAGGLEMCPALYLAASKGRAEEVMALLLQPRHGGVAQGHLDQVNGTWMVPHNGREVEGPGPGAGRAVQAPWAPPSQGPPDQRHGQCNISEVSAESNTVFHVAAEQGHDELIREVYLRFKESSLLSRRNSSQDTPLHCAARAGHAGAVTAIVQLLALDSILGCKNEAGDTALHLAARNGHGAAVEALVSAAAPELSSELNAAGVSPLYLAVMSKSVTAVKAIITTCSDASPVGPNKQNALHAAVFQISEMVDLVLKWKPALSGQCDVKGSSPLHLASSDGDRSIVSAIVRAAPPSTAFLKDSDGLSAIHVAARMGHHHVVEELISAWPDAAELRDGRGRTFLHAAAEKGHAPVISLAVKNPMLCGIVNAQDKDGNTALHLAVAAAASKGLAALLSAGDNVRVNIMNNDGYTPFDLAANSSSFLSMSSDLLLETESGKKERKKRDMRTSREDTWSKISLVVTLSAYGAQSCPQRQDHLNQWRGNDTTDWIRKTSNSLAVVAVLVATVAFSATFNVPGGYGDDGKAVLQAKTAYKFFIVFDSVAMTTSVVAVILIVYGKASGSWKSFILALHFMWVSMIGMIVAFWAALVAVMRRRTINIVIYEVIINGIYVLVLSIMILTKPASWISFVKFMFSSLLPERHHRRVARQYPFAGTYSRNYSVFVVTNILAYVGAFLALSKS

SEQ ID NO: 15835 - protein, 891 aa, Oryza sativa
  Clone ID: TF_OSC100304j.C1.p3.fg
MPTTKCAVPLVSGAAGGGGSAELTRQLSSTQASPRFSFSSGVLPSLGSRGGGERHARLRRFIVSPYDRRYELWNNYLILLVVYSAWVTPFEFGFVPEPAGALAAADNAVNAFFAVDIVLTFFVAYTDPKTFLLQDDPRKIALRYITTWFVLDVVATIPTELARRILPPDLRSYGFFGILRLWRLHRVGILFARLEKDRKFSYFWVRCVKLVCVTLFAVHCSACFYYLLADRYPDPTNTWISAYMPNFHKASIWSRYVASMYWSITTLSTVGYGDMHAENTGEMVFTTTYMLFNLGLTAYIIGNMTNLVVHGTSRTRKFRDMIQAATSFAQRHQLPARLQEQMVSHLSLKFRTNSEGLHQQETFEALPKAIKSSISHHLFFGLVQNVYLFEGVSNDLIFQLVSEMNAEYFAPREDIILQNEAPADFYIIVSGSMLAGMAKSGDVVGEIGVLCYRPQLFTARTRSLCQLLRLDRAAFLRIIQSNIADGTIVMNNLIQYLREKKEIASIVAVAKEIDDMLARGQMDFPITLCFAASKGDSFLLHQLLKRGLDPNESDHYGRTALHIAASNGNEQCVRLLLENGADSNSRDPEGRVPLWEALCRRHQTVVQLLVDAGADLSGGDAAPYARVAVEQNDAALLGEIVRHGGDVSGACSGDGTTALHRAVLDGNVQMARLLLEHGADADAEDVNGLTPRAVAEQGGHADMQLAFASATRHEPRKARPPPPASAIVPVPLRDGVDSSPSSSSRRGRTSSTSAASARSTPQRMANFRNSLFGVISSSHAFHHEGGYRGGGGGGGAAAERERSSSSPPLVRVAISCPESRGGKDHSSKLVFMPETLRGLLELGAARFGVSPTRVVTSGGADVDDARLVRDGDHLLLVTDKWVPPENRSRNQ

SEQ ID NO: 15836 - protein, 172 aa, Oryza sativa
  Clone ID: TF_OSC900166j.C1.p8.fg
MDEDDRQSLTSVRMEGYEPLFEAASSGKIDLCKYLVEELGFDVNAEANHDSGMTPLFCAVLDGQEITVKYFLDKGADPNKKDAAGFAPLHEAAKKGHVGIARLLLSKGASVDVSSSEGTPLHVAASNGKSSTVQILLEHRANIQRSQVDAKSFRNRVQVFYVPALVCYCLTF

SEQ ID NO: 15837 - protein, 496 aa, Oryza sativa
  Clone ID: TF_OSC100279j.C1.p9.fg
MGFLSLVGNSFGCSASGERLVSAARDGDLQEARALLEYNPRLARYSTFGGRNSPLHYAAAQGHHEIVSLLLESGVEINLRNYRGQTALMQACQYGHWEVVQTLMLFNANVHRTDYLNGGSALHFAALHGHARCLRLVLADYVPSMPNFWNSMKDSLSEEGPSADLDEDGLFKMVNQKADGGLTPLHMAALNGHVECVQLLLDLGASVIEATIEDGTTIDLIGAGSTPLHYAACGGNAVCCQLLIARGASLSAQNASGWTPLMVARSWHRNSLEEILSKEPESRIRTVPSPYLCLPLMSIMSIAREFGWRYLNQSPVCIDPCAVCLEGSCSVAAEGCKHEFCTRCALYLCSTSYTSVSPAGAIPCPLCRHPIIAFTALPGTSPIRELPRNSLSLSFCTTCPAVNSDSTPSIASHLYRTEFQCARMPPMGSSSFRSLSCQRLPAMKLNPSFCMGAMDTNPCLIRCSRFGPSFRRSASQGESSRRAWPLTFDPIAATGS

SEQ ID NO: 15838 - protein, 420 aa, Oryza sativa
  Clone ID: TF_OSC12218j.C1.p1.fg
PTEMILGWNSGLAKQGDEKGRTPLHFAASTNRLSMRAMVKLLLEHDRSCVYQPDDEGSYPIHVAAALGGVAGLFAVRLMIEFCPDSAGLRDGTGRSFLHVAVDNLCPSVVALARFSPGLRSAVMNMQDGNGNTALHQAVHVCDIMIFFFLLIDRRVLLDVKNNMGYTPVDLARFKNHLKGLNYPVNPQCMMSSSLTHTAGNHPSGDNPTDSLNEKRVEKEERGELSTIYKDAAQNLTIGAVLIVTVTFAATFTMPGGYVSSSDDDGERRGTPTLAGTCAFDAFVVANTLAFMLSGMATFSLMYAGYTPLDFAFRERCVKLSMGLLHSSVRSVGAAFLTATYVMLARVAPKLVIAVYAAAAVGLVYINFEVWMLGWMTLALLSRGDILAALIVGLQTVAVAFWFSWPFAVIFVLPLILKGH

SEQ ID NO: 15839 - protein, 89 aa, Oryza sativa
  Clone ID: TF_OSC28351j.C1.p1.fg
HCEIVELFLSRGVDVDLDSITGTPLLTAAMNGQYSTMKILLEHHADVGADVNFRDPNGVTCVMVAANHGSPVIMKCLLDAGANSNIPDE

SEQ ID NO: 15840 - protein, 450 aa, Oryza sativa
  Clone ID: TF_OSC401179j.C1.p5.fg
MEAAAKLKRSISRQLSSGAARVWRQLSLEPVYTPRRAGAVGGGGGGGGGGGGGGGGARPTRFGLARQSSLDPTPREGGGAAEDGSGAAAMLAVPENLDATMRLLFAACQGDVAGVEELLRDGVDVDSIDLDGRTAMHIAACEGQGEVVRLLLSWKANMNARDRWGSTPAADAKHYGHFEVYNLLRARGAKTPGHYVARWYGSKVFVKILDKDSFSDANSINEFKHELTLLEKARHPNLVQFVGAVTQNVPMMIVSEYHQKGDLASYLETKGRLQPYKAIRFSLDIARGLNYLHECKPEPIIHGNLSTKSIVRDDEGKLKVAGFGSRSLIKVSEDNPQMDQTTSKFNSVYTAPEMYRNGTFDRSVDVFAFGLILYEMIEGTHAFHPKPPEEAAKMICLEGMRPPFKNKPKYYPDDLRELIQECWDPTPSVRPTFEEIIEGKQIMKYMRNIP

SEQ ID NO: 15841 - protein, 375 aa, Oryza sativa
  Clone ID: TF_OSC409420j.C1.p3.gm
MAKRPEARWPGTQHGVLVRPKHGTARQGSGPCRPGSTTGPCLGLSTGTMGHPRLRAGPARPDGWWSFLGGRRSPWAGTARHEVPIGPCRPDGWWAVPGPGRAGRAIYIDRQLLEAAKSGDSTTLKEDMAAREADVLLRTTKNGSNCLHIACIHGHLKFCKDALEINQSSLLAAVNSYGETPLLAAVTSGHTALASELLRCCSESGLGDVILKQDGSGCNALHHAIRCGHKDLALELIAKEPALSRAVNKDNESPMFIAMMRDFADIFEKLLAIPDSSDVGCKGFNALHAAVRSGNAGFGLDGSIKNYQELKYEMHWIHYFAGSGDWRASAAGFGWMGDEEDESSSRCGAVSPPPSPVSRLGCAAAAASRVSQSVP

SEQ ID NO: 15842 - protein, 495 aa, Oryza sativa
  Clone ID: TF_OSC401887j.C1.p2.fg
MEETLKSLSMDYLNLLINGQAFSDVTFSVEGRLASSSASSSAAPPPTRPPRRRARILLDHLSPRSPSGGASASSPRGAGGSAAAAAAATPGAVIPVSSVSYEVFLLLLQFLYSGQVSLVPQKGEPRPGCGERGCWHTHCAAAVDLALDTLAAARSFGVEELALLTQKQLAGMVEKASIEDVMKVLMASRKQDLHQLWTTCSHLVAKSGLPPEVLAKHLPIDVVAKIDELRLKSMSRRSPFLSHHHHHPHAAAAGIEASSAAELDDHHKIRRMRRALDSSDVELVKLMVMGEGLNLDDALALHYAVENCSREVVKALLELGAADVNHPAGPAGKTPLHVAAEMVCPDMVAVLLDHHADPNVRTVDGVTPLDILRTLTSDFLFKGAVPGLAHIEPNKLRLCLELVQSAAMVMSREDAQTAAVNAAPIYGESPGGGGGGGVYNASGTSSSMVNLSLDNRMVYLNLGMDAQFGKMNDGGDGDDGGSRGPSSLFSPHGFP

SEQ ID NO: 15843 - protein, 1621 aa, Oryza sativa
  Clone ID: TF_OSC32692j.C1.p2.fg
MDTPLHCAARAGHAGTVTILVNLAQDCEENILGCQNAAGDTALHMAARHGHGATVEALVVARAKATVLVSMKVVESVDQFPKRSILMASSSSTAATNPFQGHPISEKLGKANHALWKVQVSAAVRGARLQGHLTGATKRPPAEIAVTKDGATKKEPNPAHEDWEATDQQVLGYLLSSLTREVLMQVATCDTAAEVWSAIEQMYSTHTRARAINTRFALTNTKKGNMSTPEYFAKMKSLGDEMATAGGRPIDEEELIQYIITGLGEGYSEVVSAVCARVEPISVSDLYSQVLNFEARQAIYRGAQEVTVNVANRGGFSHGGRGNSNGGQGGSRGGGGGGHGRGNGGGGRGRGRTPGGVDKRPICQVCFKRGHTAADCWYRYDEDYVPDAKHVAAAAVNSYGVDTNWYIDTGATDHVTGELDKLTMKEKYNGGEQIHTASGAGHIYISRDVVFDENIFPFTELHANASARLRSEIDILTPELLGPIRSVGNEQCMHPVTNPLSADVSAALSNRANEPHRDGAVHPADAEDPPATPPLDASFGPEPDRVVHHSPAATSSGRHPGPTPGSVPRGVASSLAEETAEDSVSQAVQEQESQVVQEQEQSSPAQEHAQAVTDETNTLQHADVTDTGSEAPAGPRTRLQSGVRKEKVYTDGTIKYKHSWFTASGEPTNDLEALKDKNWKLAMDSEYDALVKNKTWHLVPPQRGRNIIGCKWVYKIKRKADGTLDRYKARLVAKGFKQRYGIDYEDTFSPVVKAATIRIILSLAVSKGWSLRQLDVQNAFLHGYLEEEVYMLQPPGFEDPTKPHHVCKLDKALYGLKQAPRAWFSRLSKKLMDLGFKGSKADTSLFFLNKGDITMFVLVYVDDIIVASSSEKATAALLQNLKGEFALKDLGELHYFLGIEVSKVQNGIVLNQDKYANDLLKKVGMIDCKPANTPLSVSEKLSLHEGSLLGPEDASHYRSVVGALQYLTLTRPDIAFSVNKVCQFLHAPTTVHWIAVKRILRYLKQCTRLGLEIHKSGSTLVSGFSDADWAGCLDDRRSTGGFAIFLGSNLVSWNARKQATVSRSSTESEYKAIANATAEIMWVQTLLAELEIKSPKAAKIWCDNLGAKYLSANPVFHARTKHIEVDYHFVRERLLSRFINLGFGCSQLRRTLYRHDGGCSHHIYINTKATHRISAIVSTQTNSQTELNKAGVSPLYLAVMSRSQAQNKNVFVNSIDKFVSLAEMVHLLLQWKPELASQVDCNGSTPLHFAASDGNRKIVHAILAIVPTGTVYMKDSDGLSALHVAARLGHANVVKQLIGICPDAVELRDGHGETFLHTAVREKQSSIVSLAIKKHKQVGGLLDAQDGVGNTPLHIAVVAGSPDIVNALLHKGKVQSDVLNDDGHSPLDLASTSTNLFNMVSFVVILVAFGAQGRPQRNDHLKPWSGRDIGKGIERTTDSLAVVAVLIATVAFAAGFNMPGSYGDDGTANLKGRFSFKWFMVLDTVAVAASVVAVILLVYGKASRSAGSWKSFVAALHFIWVSLVSLILAFFAAFRATMRTSRAVSIVFMVIYVCLIVLVVNVGTWVEPVTTMRIFWRFVWRSHRTNAVKRQYPLAVATVYNCLLFSVINFIIFAGLGVVPS

SEQ ID NO: 15844 - protein, 525 aa, Oryza sativa
  Clone ID: TF_OSC401247j.C1.p14.fg
MGKKGKGRHRGRGGGGGGGGGGGGGGGGGGVGGDRGGGGSGGGGPGMGRRGSDARAQQAAAAAAAISGIATRLGFGCTVNVGGGMPPQMEFLMACTDGDVARLKGNAIVMGAVVCEASLDRVRNRLYLTMKSLTIVTALGMTPLFCAVLDGQEITVKYFLDKGADPNKKDAEGFAPLHEAAKIGNVGIARLLLSKGASVDVSSSEGTPLHVAASNGKSSIVLILLEHHANPNVMTPDCYTPLTAVLSATPEIVNESECLKCMKLLIKAGAHYKLATPDTPLEIATRNGLTECVAYLLEISTVVRLSEHDKGSDGDRKSKLKLHGGKAFEEGDYAGAIIFYTEFLCKYNFFNNPSPNYKQQRLAQKNPTPHIPHRRSMAVSASQLTSRILLSLLLSRNYCCVNKGRLSLNFQWHCHHVGDTLAMKLDPADATLYSNRSLCHLRSGAAQEALLDANDCIKLKPEWTKGYYRKGCAHMALKEYEEACTAFMAGTKLDPLSDEMQNAFWEAAKAMKNEYMAGRRVSSVD

SEQ ID NO: 15845 - protein, 391 aa, Oryza sativa
  Clone ID: TF_OSC421303j.C1.p3.fg
MASAFFNGAMYAGGWMQHMLFEAAHNGDLDLVRGMAMLLVEGRGRLGEAVQAARLRGTGPLDGMGALHIAASKGRLEVCRYLVEELRLDVDDTDQEGRTPLIIAIVFNHVSTVEYLLDRGADANKASHNGLTPIHFAICLGECGMVQLLLAKGACVDPVAYCGTPLHVAATEGRDGAMKILLDHNADFNKMVDGLTPLDTAMDSGELKCINLLIKVGAVVSEDRMLTAENSGSTECFNYLMEETGANCNISDNGEPVNKRKATDLKSLGNKAVEKKDYLSATGFYSKALYLYPDDATLFSNRSLCWHRMGDGGKALLDAHECRKLRSDWPKAYYRLGAALMLLKDYESACEALYNGFKLDPGNSEIEDAFRYPFCLFWSHYGNMAYDDSFG

SEQ ID NO: 15846 - protein, 288 aa, Oryza sativa
  unsure (1)..(288): unsure at all Xaa locations
  Clone ID: TF_OSC402924j.C1.p4.gp
ATCSHLVARSGLSADLLAKHLPIDVVAKIEEIRAKSPLAAVAAPRSPFLTHHYLPMNPASSAADRDNKIRRMRRALDAADIELVKLMVMGEGLDLDDALAVHYAVQHCNRDVVKALLELGAADVNSRAGPTGKTALHLAAEMVSPDMVSVLLDHHADPNSRTLDGVTPLDVLRSLTSEFLFKGAVPGLTHIEPNKLRLCLELVQSAVMVTTRDDGAPVTGGAEAGGSDGGNFPRSDADDSLVSLTMNSTLMYQGQEMAAAVAAGEGRKSNNGRGSPPPAMYFPNGFAX

SEQ ID NO: 15847 - protein, 287 aa, Oryza sativa
  unsure (1)..(287): unsure at all Xaa locations
  Clone ID: TF_OSC900071j.C1.p24.gp
ATCSHLVARSGLSADLLAKHLPIDVVAKIEEIRAKSPLAAAAAPRSPFLTHHYLPMNPASSAADRDNKIRRMRRALDAADIELVKLMVMGEGLDLDDALAVHYAVQHCNRDVVKALLELGAADVNSRAGPTGKTALHLAAEMVSPDMVSVLLDHHADPNSRTLDGVTPLDVLRSLTSEFLFKGAVPGLTHIEPNKLRLCLELVQSAVMVTTRDDGAPVTGGEAGGSDGGNFPRSDADDSLVSLTMNSTLMYQGQEMAAAVAAGEGRKSNNGRGSPPPAMYFPNGFAX

SEQ ID NO: 15848 - protein, 494 aa, Oryza sativa
  Clone ID: TF_OSC900071j.C1.p23.fg
MSSEDSLKSLSLDYLNLLINGQAFSDVAFSVEGRLVHAHRCVLAARSLFFRKLFCGLDPNHQPPPPPPPPLNWPTAGGGGGGSGGGGRGGAGGGGGAPATPELVIPVSSIRYEVLVLVLQFLYSGQASVAAPKSGPLPGCGARGCWHTRCGAAVDLALDTLAAARSFGVEQLALLVQKQLESMVKEASVDDVMKVLMASRKFEMQELWATCSHLVARSGLSADLLAKHLPIDVVAKIEEIRAKSPLAAAAAPRSPFLTHHYLPMNPASSAADRDNKIRRMRRALDAADIELVKLMVMGEGLDLDDALAVHYAVQHCNRDVVKALLELGAADVNSRAGPTGKTALHLAAEMVSPDMVSVLLDHHADPNSRTLDGVTPLDVLRSLTSEFLFKGAVPGLTHIEPNKLRLCLELVQSAVMVTTRDDGAPVTGGEAGGSDGGNFPRSDADDSLVSLTMNSTLMYQGQEMAAAVAAGEGRKSNNGRGSPPPAMYFPNGFA

SEQ ID NO: 15849 - protein, 494 aa, Oryza sativa
  Clone ID: TF_OSC402924j.C1.p1.fg
MSSEDSLKSLSLDYLSLLINGQAFSDVAFSVEGRLVHAHRCVLAARSLFFRKLFCGLDPNHQPPPPPPPLNWPMAGGGGGGSGGGGRGGAGGGGGAPATPELVIPVSSIRYEVLVLVLQFLYSGQASVAAPKSGPLPGCGARGCWHTRCGAAVDLALDTLAAARSFGVEQLALLVQKQLESMVKEASVDDVMKVLMASRKFEMQELWATCSHLVARSGLSADLLAKHLPIDVVAKIEEIRAKSPLAAVAAPRSPFLTHHYLPMNPASSAADRDNKIRRMRRALDAADIELVKLMVMGEGLDLDDALAVHYAVQHCNRDVVKALLELGAADVNSRAGPTGKTALHLAAEMVSPDMVSVLLDHHADPNSRTLDGVTPLDVLRSLTSEFLFKGAVPGLTHIEPNKLRLCLELVQSAVMVTTRDDGAPVTGGAEAGGSDGGNFPRSDADDSLVSLTMNSTLMYQGQEMAAAVAAGEGRKSNNGRGSPPPAMYFPNGFA

SEQ ID NO: 15850 - protein, 494 aa, Oryza sativa
  Clone ID: TF_OSC413271j.C1.p2.fg
MSSEDSLKSLSLDYLSLLINGQAFSDVAFSVEGRLVHAHRCVLAARSLFFRKLFCGLDPNHQPPPPPPPLNWPMAGGGGGGSGGEGRGGPGGGGGAHATLELVIPVSSIRYEVLVLVLQFLYSGQASVAAPKSGPLPGCGARGCWHTRCGAAVDLALDTLAAARSFGVEQLALLVQKQLESMVKEASVDDVMKVLMASRKFEMQELWATCSHLVARSGLSADLLAKHLPIDVVAKIEEIRAKSPLAAVAAPRSPFLTHHYLPMNPASSAADRDNKIRRMRRALDAADIELVKLMVMGEGLDLDDALAVHYAVQHCNRDVVKALLELGAADVNSRAGPTGKTALHLAAEMVSPDMVSVLLDHHADPNSRTLDGVTPLDVLRSLTSEFLFKGAVPGLTHIEPNKLRLCLELVQSAVMVTTRDDGAPVTGGAEAGGSDGGNFPRSDADDSLVSLTMNSTLMYQGQEMAAAVAAGEGRKSNNGRGSPPPAMYFPNGFA

SEQ ID NO: 15851 - protein, 178 aa, Oryza sativa
  Clone ID: TF_OSC3754j.C1.p1.fg
YVDKLLIAKDTNQITIDILEAVRTNDVRAAYRILVLADVSPNMIYDELNNDVHHDPSVTDGKLFDPASCDVKDDSGKPEGCLQGCSLLHIACQYGHSIMAELLLLFGADINKQDFHGRTPLHHCVRRKNDALTKHLLKRGARTTIKDGGGLTALERRMELGAITDEDLFILFVRYDQD

SEQ ID NO: 15852 - protein, 649 aa, Oryza sativa
  Clone ID: TF_OSC407383j.C1.p4.fg
MVLGVKVWRTCGLRIMPDMEHQSEGRFFAWHIQIEVDHMLSERLMQFIDVDLHGVKAREKFVSVRKGTRAEVVTGLEEDLHNAKSAFERCRFNLGYELLSQMEPFIHQVLTYAQQSKEMAINEQDKLAKRIQEYRTQEEIANLRMASNVDTSTSGDGIHVVGLQSYKKIEALMQSTANGEVQIIKQGYLFKRSENSREWKRRFFVLDSHGTLFYYGNKGQSQGAASQQTAGEGTGVFSRFRFLNQKAPTQGDNALSCHKIDLRTSTIKIDAEENDLRFCFRVISPMKAYTLQAESGADQKDWIEKVTGVIASLLNLPFPRQVSYGNLEAEHHGSANSVDSLSLEENKSPEGHDDIFNHLRNIPGNDSCAECRSPDPDWASLNLGILICIECSGAHRNLGVHISKVRSLRLDVKVWEPVIMDLFHELGNDYTNSIWEAMLPKEDQGINEFNDAILFIEKPKPTDAFSIKERYIQTKYVDKLLIAKDTNQITIDILEAVRTNDVRAAYRILVLADVSPNMIYDELNNDVHHDPSVTDGKLFDPASCDVKDDSGKPEGCLQGCSLLHIACQYGHSIMAELLLLFGADINKQDFHGRTPLHHCVRRKNDALTKHLLKRGARTTIKDGGGLTALERRMELGAITDEDLFILFVR

SEQ ID NO: 15853 - protein, 776 aa, Oryza sativa
  Clone ID: TF_OSC407404j.C1.p11.np
MAAFTKLEDSPMFRKQVNSMEQLSDELKQRCSNLHKGCKRFMGSLDEGYAGDLTFADALEAFGAGQDDPVSVAIGGPVMSKFTTAFRELGTYKELLRSQVDHMLSERLMQFIDVDLHGVKDCRQRLDRATVGYDQAREKFVSVRKGTRAEVVTGLEEDLHNAKSDLHNAKSAFERCRFNLVHAVHALSNIEAKKKYEFLESISAVMDAHLRYFKQGYELGYELLSQMEPFIHQVLTYAQQSKEMAINEQDKLAKRIQEYRTQEEIANLRMASNVDTSTSGDGIHVVGLQSYKKIEALMQSTANGEIIKQGYLFKRSENSREWKRRFFVLDSHGTLFYYGNKGQSGSKERHHSKQLEGTGVFSRFRFLNQKAPTQGDNALSCHKIDLRTSTIKIDAEENDLRFCFRVISPMKAYTLQAESGADQKDWIEKVTGVIASLLNLPFPRQSQVSYGNLEAEHHGSANSVDSLSLEENKSPEGHDDIFNHLRNIPGNDSCAECRSPDPDWASLNLGILICIECSGAHRNLGVHISKVRSLRLDVKVWEPVIMDLFHELGNDYTNSIWEAMLPKEDQGYVEEFNDAILFIEKPKPTDAFSIKERYIQTKYVDKLLIAKDTNQITIDILEAVRTNDVRAAYRILVLADVSNMIYDELNNDVHHDPSVTDKLFDPASCDVKDDSGKPEGCLQGCSLLHIACQYGHSIMAELLLLFGADINKQDFHGRTPLHHCVRRKNDALTKHLLKRGARTTIKDGGGLTALERRMELGAITDEDLFILFVRYD

SEQ ID NO: 15854 - protein, 855 aa, Oryza sativa
  Clone ID: TF_OSC900240j.C1.p3.fg
MKTSSFESASSSGGSGGGGGGGGGEGSGSFNLRNLSKLILPPLGVPAGGHAQSGHAGPNDRRVISPLDSRYRCWDTFMVVLVAYSAWVYPFEVAFMNASPKGGLEVADIVVDLFFAVDIVLTFFVAYIDSRTQLLVRDRRRIATRYLSTFFIMDVASTIPFQGLAYIVTGEVRESPAFSLLGILRLWRLRKVKQFFTRLEKDIRFNYFWIRCARLIAVTLFLVHCAGCLYYLIADRYPHREKTWIGAVIPDFQEASLWIRYTSSVYWSITTMTTVGYGDMHAQNTVEMIFNIFYMLFNLGLTAYLIGNMTNLVVEGTRRTMEFRNSIRAASNFVGRNHLPPRLKQQILAYMCLKFRAESLNQQQLMDQLPKSICKGICEYLFLPVVKDVYLFKGVSREVLLLMVTKMKPEYIPPKEDVIVQNEAPDDVYIVVSGEVEVIYSDGEAEERVVATLGTRGVFGEVSALSDRPQSFTLRTRTLCQLLRLRQAALKEAMQSKPEDSVVIIKNFLKHQIEMHDMKVEDLLGEDAAGEYDHGNIPCNLLTVAATGNSSFLEDLLKVGMDPDVGDSKGRTALHIAASKGYEDCVLVLLKQACNVNIKDAQGNTALWNAIAARHHKIFNILYHFARVSSPHHAAGDLLCLAARRGDLDTLRELLKHGLAVDSEDRDGATALRVALAEGHADVARLLVLNGASVDRAASHNEQQAAAAVSVDELRELMKTRELAHPVTIVVDSPSPAAAAVIREVGSSGDSRNGRRQSARSDGAHWPRVSIYRGHPFVRNRSSEAGKLINLPGTMEEFRIIIEEKLKVDARKTLIMNDEGAEIDSIDVIRDNDKLFIVTEEHMTAVASMDSVSGS

SEQ ID NO: 15855 - protein, 633 aa, Oryza sativa
  Clone ID: TF_OSC100264j.C1.p5.fg
MASEIEVLEDTTAAAAAPAATIGGGEVAGAGAGEEGEAAADAEALKDDVYTGAAYGDLEKLHRLVEREGRPVTEPDALGYHALQWAALNNRVAAAQYILEYVLSFSVVCFGGMTVLSLLSGQHGADVNAIDHTGQTALHWSAVRGHIQVAELLLKEGAKVDAADLYGYQTTHVAAQYGQTSYLYHIVAKWNADPDVPDNDGRSPLHWAAYKGFADSLKCFSLGCTPLHWAAIRGNLESCTVLVQAGKKEDLMVQDNTGLTPAQLAADKNHRQVAFFLGNARRVHERGCVISGQYSSNMTLLFGLFSWLGIFLATAGLVMFYKCSRKDPGYIDKNTRDAQNQRDDEPLLKRGLDNPELLAGNWSQLCITCKIVRPVRSKHCSTCDRCVEQFDHHCPWVSNCIGKKNKWEFFMFLILEVSAMIITGVTAVIRVVGDPDSPASFGGWLNYSATNHPWVVSFVVMDLFLFFGVITLTVVQASQISRNLTTNEMANAMRYSYLRGPGGRFRNPFDHGVRKNCSDFLLKGYNEDIERVEQTLQPDEELGMIQMTRSAVSQNGESMSLHANGTDHGCADPQGNSKSHRHSHGSSQCCSHSKRPDKTPLGLGLGLGRNNPSSRYTRSLPSIHSESSAYLPL

SEQ ID NO: 15856 - protein, 518 aa, Oryza sativa
  Clone ID: TF_OSC423045j.C1.p7.fg
MAGRHTSHTMEHKLLKAVATGDADLLAQALGIWPTATAEQGDVDQSCCLKGVTAEGSSVLHIAASRGHLKLVVMICTHDISLIKSRNNQLDTPLICAARAGHADVVDYLVRAASAMQEPERSVLRAWNSGGATAMHEAVRNGYAPVLQKLMSSDSGLATAVLGGCVQPARYGRQQATRGQMEKPRCTLRSTSVKGFTTPTLVFRAHAFQTAKREMSESLRRWEPTLAEKVDIDGRTALHYAVLTGETGLVELLLDNSSAAYIPDNDGLFPVHVAAIAGKASVTRMLMEMCLNCDELLDNKQRNVLHCAVEYGRLMVVWYICRNPKFTRLLNAGDCEGNTPLHLAVKHGNAIIISCLMMNTRVNLSIINHGGSTPLDVAFNKSTRYYSLSWLSSTSITMCLQACNAYTSRFLNRADKRFLEDKEESSVYTNVSQSILCISVLIAAGSFAAAFTPPGGYIADGEDAGMPLLKEYAEFSSYVAANSMSFYCSTFATCLLVHDSLTNRRVRNSQRLSLRNWN

SEQ ID NO: 15857 - protein, 281 aa, Oryza sativa
  Clone ID: TF_OSC400151j.C1.p22.fg
MENEYIYREEEESIKEDEESWPFRRNQPNVIINNGAGSPLMSSLIYRSLKCMKLLIKAGADVNGKGTVVTPLMLAASQGGYTNFIQFLLKAGANPNIPDDLGWLPIEHAALRDCREEVEMLFPLTSPIPNVPNWSVNGIIAHAKVKNTKPMDQHQKESRKVVLKAQADLVFKQKNYAAAAKIYDLAIAHGPTAVLYANRSICRLLMGDGEGALSDAYRCRMMRPNWAKACYRQGAAHMLLKEYKHACDALMDAQKLDSGNVEIERELRKARELMAKPPDEQ

SEQ ID NO: 15858 - protein, 858 aa, Oryza sativa
  unsure (1)..(858): unsure at all Xaa locations
  Clone ID: TF_OSC400177j.C1.p39.np
AGAGGWDPLVGSEIHGFLTYPDLNYEKLVAEAAARWFRPNEIYAILANHARFKIHAQPVDKPVSGTVVLYDRKVVRNFRKDGHNWKKKKDGRTVQEAHEKLKIGNEERVHVYYARGEDDPNFFRRCYWLLDKDLERIVLVHYRQTAGTSFSLLFYVLQXIIHFGCXSEDAFXISNTHDQSLNLVYLDQENAMAPPNPEPEVADVPTVNLIHYTSPLTSADSTSANHGLNQVNANHFGALKHQGDQTQSLLASDVDSQSDQFISSSVKSPMDGNTSIPNEVPARQNSLFHRASVQTNEFHRASVQTNERLLEINEISPEWAYSTETTKVVVIGNFYEQYKHLAGSAMFGVFGEQCVAGDIVQTGVYRFMVGPHTPGKVDFYLTLDGKTPISEICSFTYHVISSLEARLPPSEDDYKRTNLKMQMRLARLLFATNKKKIAPKLLVEGTKVANLMSALQKEWMDLWNILSDPEGTYVPVTESLLELVLRNRLQEWLVEMVMEGHKSTGRDDLGQGAIHLCSFLGYTWAIRLFSLSGFSLDFRDSSGWTALHWAAYHGRERMVATLLSAGANPSLVTDPTPESPAGLTAADLAARQGYDGLAAYLAEKGLTAHFEAMSLSKDTEQSPSKTRLTKLQSENLSEQELCLKESLAAYRNAADAASNIQAALRERTLKLQTKAIQLANPEIEASEIVAAMKIQHAFRNYNRKKAMRAAARIQSHFRTWKMRRNFINMRRQVIRIQAAYRGHQVRRQYRKVIWSVGIVEKAILRWRKKRKGLRGIASGMPVVMTVDAEAEPASTAEEDFFQAGRQQAEDRFNRSVVRVQALFRSYKAQQEYRRMKIAHEEAKVIFFKTFSNNCWHVP

SEQ ID NO: 15859 - protein, 391 aa, Oryza sativa
  Clone ID: TF_OSC33142j.C1.p5.fg
MDGRLFEAAKSGDCRLMKELVAAMDPSILLRTTPQGNTCLHISTINGHEEFCQEVLMLDNSLLTVANSHGETPLLTAVTNGRTALASVLLRRCCEAGLREAILKQDENGCNALHHAIRNGHRDLALELIAAEAGLSQGVNKYRESPMYIAVMRDFTDIFRKLLGIPGSAHVGCHGRNALHAAVRNGNPVIAKELVEKRPGLAREFDDEMDTPMHHAAMWGKTHVLGALLQYDWSLGYVLSNNKDSVPLLNSAAYRGYVSVARELVHHCPDAPYYDANGCTCLHQAAFKGHLEFVEFILESPYLRKLVNMRDNGGNTALHYAVQDCNPRIVAALLSHGDTDVTVLNYTGNEAVWQLGGAADYAKTLNWELNTAILRSYTTYHALHGLLLLLL

SEQ ID NO: 15860 - protein, 2278 aa, Oryza sativa
  Clone ID: TF_OSC401247j.C1.p10.fg
MADPSFNFRVGLALRRALPYYNDAGPQSEFFEAATRGNVRRLRELASGKDAEGKAWLADMGFSGIGPLQAAARLGEVESCRCMVEELGFDINAGSQLGHDEVARLLLSRGASIDIAYFHGTPLHIAAAYGKADVMKVLLEHHADPNKVSEELGTPLVATLHATSQGLAESISLKCVKLLVEAGADVNFSDRDTPLVDKQDDQNEKAQLKLCGEKAVKRKDYRGASNFYSQFQNIELAIEMDPTDATLYSNRSLCHLQMTEAEAALFDAEFCIQLRPEWIKGYYRKGAALMLLKKHEKACDAFMAGLKLEPGNAEMEKALRYDRLVNTSYTVVLPLLSSSLCETLASQQTPPLRGGKGDPRENELLNAVTEGNARRLKKMVNTMGEKDRAKFTDMNIDGNGLLQVAAHLGKIEVIRYFVEELGFDVNAGCLSDGVTALASAAMFGEAYVVRYLLEHGADPNKTDETGSVALHFAAKNGYEEVVRLLLSSGARTGIVVAHGTPLHIAVFYRRIGVVKILLDHHVDSNNTSGVWGTPILTALRSAKHGLDESDSLECVKLLVKAGADVNYACPNTPLVVATTAGLTDCIKYLLEVHADPNIPDKQSGRTPVEISASVGRRDHVEILFPFTSSISAVTNWTVEGIIAHGKSRRLTPKIVDLDSKFEIVPNMGMSRYIVKIPYFGMELAALGYAEAARTAEAARQAAAAAATLRAEEERRDLELANAACVRRDADRDRHVGRRDRDFSPHCGGSDLHRDEEWHDLWRDPWIDRALEAQRLWEQAAAIEAQLDFDREQGGRDIGARSPRRQRASPSSDRHRGRRGRSGSPPVVQTIVKDVGGAWPMLTKTNYAEWAMVMKVKLQARHMWDTVWYGDVDYGEDRRALEALLAAVPTEMQSSIVNKRTTKDAWDAIASARIGSDRARRSTLQKLRQDWENLAFKPGEDIDDFVLRLNSLQQRLAQLGDTTIDEERAVEKLLRVVPEKYTQLALSIETLLDFTELTIEEVMGRLKAVDNRKQLPPSEPITIGGKLFFTKEQWLARQQEWKKGEATGSSASGSSSSRKRRPRKWEKARSGALGDANGEHKGSRDDTCHNCGKTGYWAKDCRQAKHGGQAHVAQAQEAAAHVFLSNGSCGDKIDGWCLDTGATHHMTGRREFFSELDSSVQGSVKFGDASTVVIKGVGSILFTAKTGEHRLLTGVYYIPALRNSIISLGQLDENGSRVEIEDGVLRVWDRHRRLLVKVAQPVCLAARRDDDAWRWHERFGHLNFGALKQLGNKEMVQGMPRVEHVEQFCDTCVLTKQRRLPFPRQASFRAEEKLELVHGDLCGPVTPATPGGRRFFLLLVDDVSRYMWVVLHDSKAAAADAIKHHQVAAEKECGRKLRVLRTNNGGEFTAAEFAAYCADEGIQRHFSAPYTPQQNGVVERRNQTVVATARALLKQRGMPAIYWEEAVMTAVHLLNRLPTKALDGKTPYEAWHGRKPVVSHLRVFGCLAFAKELNHVGKLDDRSSPGVFIGYAEGVKAYRILDPATQRVRISRDVVFDEGRGWAWDKAVDDGSTSTLRDFVVDYVHFGGAGGASSSSSPSSSTSAPGSPSAPASPPPPTPPATPPSPATPCSPTPAPTPPVEFATPLSNDEDRVDAYHDDEPLRYHTVDNIFGDQPVLGLATHDFEAELHLAHEDGEPCSFAEANGDVAWRTAMQHEMDAVERNRTWVLADLPVGHRAITLKWVYKLKKDEAGAVIKHKARLVARGFVQQEGVDFDDAFAPVARMESVRLLLALAAQEGWRVHHMDVKSAFLNGDLKKEVYAHQPPGFVIPSKENKVLRLRKALYGLWQAPRAWNAKLDSTLKQMGFQQSSHEAAVYRRGKDGNALLVGVYVDDLVITGTKEAEVEAFKEEMKATFQMSDLGLLSFYLGIEVHQDSSGISLRQTAYAKRIVELGGLTGCNLAYTPMEERLKLSRDSTAEEIWHSLLAVSRFMQRPTTEHQQAVKRILRYVEGTTNYGLHYPRCPGAQHFIGYSDSDLAGDSDTSKSTSGMLFFLSKCLISWQSVKQQVVALSSCEAEYIATTTASTQALWLVRLLGDLLGRDAEAVELRVDSKSALALAKNPVFHERSKHIRIKYHFIRSCLEERSIKASYINTQDQLVDLLTKSLGRVKFQEFRARIGMDESCGKVNDRKAELKSHGEKAVKRNDYLAASKIYSEALELDYFDATLYSNRSLCNLQIGEAQKALLDADRCVELRPKWVKGHYREGAALMVLKEHKKAFEAFLNALKLDPANAEIEKVMW

SEQ ID NO: 15861 - protein, 615 aa, Oryza sativa
  Clone ID: TF_OSC400431j.C1.p45.fg
MEPPTSHVTNAFSDSDSASVEEGGADADADVEALRRLSDNLAAAFRSPEDFAFLADARIAVPGGGGGGGDLLVHRCVLSARSPFLRGVFARRAAAAAGGGGEDGGERLELRELLGGGGEEVEVGYEALRLVLDYLYSGRVGDLPKAACLCVDEDCAHVGCHPAVAFMAQVLFAASTFQVAELTNLFQRRLLDVLDKVEVDNLLLILSVANLCNKSCMKLLERCLDMVVRSNLDMITLEKSLPPDVIKQIIDARLSLGLISPENKGFPNKHVRRIHRALDSDDVELVRMLLTEGQTNLDDAFALHYAVEHCDSKITTELLDLALADVNHRNPRGYTVLHIAARRREPKIIVSLLTKGARPADVTFDGRKAVQISKRLTKQGDYFGVTEEGKPSPKDRLCIEILEQAERRDPQLGEASVSLAMAGESLRGRLLYLENRGNLHIYHNGFIMLVSLELTVFGLGNKRKFLYDVVALARIMFPMEARVAMDIAQVDGTLEFNLGSGANPPPERQRTTVDLNESPFIMKEEHLARMTALSKTVELGKRFFPRCSNVLDKIMDDETDPVSLGRDTSAEKRKRFHDLQDVLQKAFHEDKEENDRSGLSSSSSSTSIGAIRPRR

SEQ ID NO: 15862 - protein, 154 aa, Oryza sativa
  Clone ID: TF_OSC31727j.C1.p1.fg
MTERLLRWKNDLSEERDKYGSTPLHFAASVESSLHNRFSSKAIVSKVLEACPSSAFQPDNEESLPIHVAASAGVRSAIAILIEKWPGCASFRDSDGRTFLHIAVEKQRNDIVRFACKKDKEGNTALHLAVQLGNLSLVCSLLGNKRVLLNLTNK

SEQ ID NO: 15863 - protein, 597 aa, Oryza sativa
  Clone ID: TF_OSC401824j.C1.p47.fg
MDTGMRVALHRQVSSGSLKESGELRRQSSLESPRTGRAATRFLFGRQSSMDPNRRRGRSQSPVGLAEDLTVPDNLDATMQLLFLACHGDAAGVEALLRGGVDVNSINLDGRTALHIASCEGHPDVVRVLLTWKANIDARDRWGSTAVADAKCYGHTEVYNLLKARGAKIPRNRRTPMMVSNPGDVPEYELNPSELQFKKGDEVVKGVYQVAKWNGTKVHVKILDRECYCDQEVINSFRHELTVLEKVRHPNVVQFVGAVTQNIPMMIISEYLPNGDLSSCIPRKGKLHGQKVLKYGLEIARGMTYLHQCKPDPIIHCDLKPKNIFLDSGGQLKIAGFGLTRLSKISPGRVKLADHESMVDSFSHYTAPELYRNEIFDASVDAFSFGFILYEMVEGTHTVHGKSSEESGHTIRYDGMRPSLKNKLRGYPPDFKALIEECWDTQGNDTCGLSCMNAFLCTYHCEANASLSVKKKPELALTRLEEDDTTYRQICAGAAAVRAMEEGRGGDPPSSSSSAAAAAGVAIGYPFLEPQQGARLRRRRTISPFKKYFSRGFAIGMEIAFIVFGTIVHFPVWARIFLIISLSILPFSAFSITFQEY

SEQ ID NO: 15864 - protein, 232 aa, Oryza sativa
  Clone ID: TF_OSC900390j.C1.p25.fg
MDLTPAGGERDIPDDLFMCSELYIAAFEGHTDQVIGLLEGSRASAAVAGNGWSSPAAQPTAKHHGNCNIHEVTAERWTLLHIAAAQGHDDLIDELCRRDSGLLSAASSSGDTPLHCAARAGHAGAVRAIDRLARANVEEDRLREALRGRNEAGDTALHLAARHGHGEAAEAVVEAAPETAADLNGAGVSPLYLAVMSGSVRAVTAILWCRDASATGPKSQNALHAAVLQCSG

SEQ ID NO: 15865 - protein, 1592 aa, Oryza sativa
  Clone ID: TF_OSC423276j.C1.p2.fg
MASPLPFCSLSLALPSFWILSEYNVKSERRRGGAFEIGEGEGEEEEDASEETTGSMDRAKAAARKDKAAAAGKETAVSRAVALDDTALLLAAVGSFRKEGSDASRMLDQEMSTRLLHLACKHDAVQCARLLLEGGHGITASPVDARDQLTRTPLQVAAEAHSARCIELLLSKNARTDLKLVDGRPLLALEIALLSRRAQVKWSLDNSIEDLLSSLQEKKCHLVPCVGSECSEALAEKTREVGEVAYRYAMEGRVTVLAMLLLVAEEKISAPVSVVIEGVRTKKSIYYSIVDEALSIGDAPARDSNERRKALLSEIQLLNQFGAALWRDRNIDKRSLPPLLKAAKLPKWAIKDIERCCRGFLWKGQEEVSGGHCLVAWRVVCRPVECGGLGIRDIDRFGKALRLKWEFNRLEQEDRPWTMVRWKSDKDVRDIFNSVAQHIVGDGNRTDFWRGKWLPRGGSIANNWPILFSFVGRTKITVAQGLLNNRWVRDLQGSLSNRALVDYLALWDELQLVSLQSGEADSVLWRFSANGVFSASSAYEFLFSTSIKCPHGELIWKTKAPARVRFFLWLAVKGRCLTADNLSKRGWPHDPTCLLCQSAPEDCNHLLVKCPFTNRVWQQLKAWVNVTFPLPAQLGMELADWWHCARRCFQMRFRTAFDSLFMLVGDVNVTKMLLMGDVDVNEADPEGNTALHWCLSGSSSTQEPRIVWLLLKNGARVFQGNKLGLTPVHSAAAKGNYKALQSLLLHAQDCVDTPSKTKETPLFLAVKNGSLDCVKLLLRSGASTKKAKTNRCGNVPRYAFHSYLCKCGSMGGKSKSHCAPKQGSKFVPRPNHWLKHDYTRKIFVGGLPPSVGAEYLTEFFTAEFGPMEEAVVIGIRMGDRVQSRGFGFVKFKREEDVISAKETHHVYMLGKRVEVKDAVARGSLPSEIQKTSSFRHHNQEVPKVTHHLLGGELKEEHYIRKRRPLPEKCLPSWFFIFRKWLPGFLADATERLGDRYPLSSLKGDFRAICRMELDHSTLGYPKLSDFMRSLPGICRMCVVPVGSGPATHKVLLPPVSRPKYVPLLVPFSFDHDELPESVSDHQFPMSPLTTNITEDSPRNTDSQHGDTCSESNAESQQDSASTDNGSQLYTSIEPVSTRKLDVVEPLPARTPDRVEPQKIGSDPARKTISLESGLGVQIFIGNGSANLSLQVDVKKDVEYMLMLYQKRTGISSRNIYFVYRGKRLRLNRSLLSYGVQKDSTVNVRSRILGGAGTSLEEYLHKHKNSLVKKTALYDGRFFPELTPRSSILLRTWVLCFTKAFKERHCWEPKCELSHFKVINGHVKVSTPAKGNLTTHFLQENLSFLAKTLKDFFRTIGTNLVSEYPPYFEYFMKFILKIDLPCVPHLQKVIIELNLCFMDSYMRGVLTVRLKQKFDSLPPKQRATLIDKINHITWDTSRMPNLSTIPVFDKIIKKAKDDGEPYFIENSVNFEFKAFNGFRLSRDAPIHAPQHRFDKTSVPWKENFPDNTIELMTPAYLGDLLPEIIWCFILNKVDITEELSQSQTPCCTMCHPIKTDVGEYPTTQQTTVQDKQPTMEDVGSSSSMQQNVWKKIW

SEQ ID NO: 15866 - protein, 276 aa, Oryza sativa
  unsure (1)..(276): unsure at all Xaa locations
  Clone ID: TF_OSC28359j.C1.p1.np
SSRPPSTATFASSGVSTHPTLSLPPRVSPINSYFLPPSSLGVEMARGLVTTGRGRGEADVLAAVADGGSGSRALHLAATEGRMDVLTYLVEDLRLDVNQNLFLSGETPLFLSAFFGRTASTRYLLDHGADPMIVGKSGSLHAAAGKGHCEIVELLLSRGIGIVFDSLYGTPLHTAAAHGQCSTMKILLDHHADNIFFILFVPFLGVXQKTYMFLPLSKSLECVKLLIQAGADVNFRDSNGATYVMMAANYGFSGIMKCLLDAGANPNIPDQVSYTT

SEQ ID NO: 15867 - protein, 485 aa, Oryza sativa
  Clone ID: TF_OSC401247j.C1.p16.fg
MEKKDKGRHRGRDGGGGGGGGGGGGGGGVDPAGGGSGGGGPGMGRRGSDARGQQAEAAAAAISGIATRLGFGCTINVGGGMPPQMEFLMACTDGDVARLKEVVDSMDEDDRQSLTSVRMEGYEPLFEAASSGKIDLCKYLVEELGFDVNAEANHDSGMTPLFCAVLDGQEITVKYFLDKGADPNKKDAAGFAPLHEAAKKGHVGIARLLLSKGASVDVSSSEGTPLHVAASNGKSSTVQILLEHRANIQRSQVDAKSFRNRVQVFYVPALPNVILPDCYTPLTAVLSATPEIVNESECLKCMKLLVKAGAIYNLATPDTPLKIATRNGLTECVAYLLEITTVKLSEHDKGSDGDRKSKLKLHGGKAFEEGDYAGAIIFYTEAMKLDPADATLYSNRSLCHLRSGAAQEALLDANDCIKLKPEWTKGHYRKGCAHMALKEYEEACTAFMAGTKLNPLNDEMQDAFWEAAKGMMYEHMAGKRVSSVD

SEQ ID NO: 15868 - protein, 300 aa, Oryza sativa
  Clone ID: TF_OSC423046j.C1.p5.fg
MPRRARSPRLPPPPHHPSPPPPPLLSVGPGAAPRAARPSHGDVFWEEPDDGGSGSDDEDGDGAEAEAERQEATGRRSSFSSFPSPSLFSRLGAARRQEQREEEELRGEIELLLTPEEMAILDQNETPDITKISSPKWHPLHSYALALQIPLMDSLLDSGVDINLLDKDGFTPLHKAVIGKKEAVISHLLRRGANPHVRDRDGATPLHYAVQVGALQTVKLLIKNRVDVNVADNDGWTPLHLAIQSRNRDIAKILLVNGADKTRRTKDGRTALDISLCFGRDFKSYDLAKLVKLVPANRKM

SEQ ID NO: 15869 - protein, 1029 aa, Oryza sativa
  Clone ID: TF_OSC421183j.C1.p15.fg
MGSLCLERRKQPDDPLSISQQLHLCLLPLLFCAASKFSAFEGVLAQYPDFSFFFFSASARNRGFDINVLHKEARSRWLKPSEVYYILQNHERFPITPEPPKKPPSGSLFLYNRRVNRYFRRDGHAWRRKKDGRTVGEAHERLKVGNVDALSCYYAHGEQNPCFQRRCFWMLEPAYEHIVLVQYREVGAAEGRYNSASLLNGPTDSLSVLSYPNATYGNQYLGSTSGVSDGSESLHSNLSSVTEVSSYSANKDNGILQSIQELSQSTIMGAPALGQSSLEQSIEVRWVDNSNSTNKSGLNRALKQIVEQLSLGDDEDDDYIHQAQPFDFITNIEAPDRQRDASRNVSEYQPPGSLYNSDMQQISAAKRFLLETEDSIDSPSYNYVPREEGNNGTNTLSVHDYSLQSSLNPDWKKTAPLTLQSNLYGSEIPSLLLDHGQFESLSSGENTRLILGQNPRFSIREVSPEWTYCYEITKVIITGDFLCDPSSSCWAVMFGDSEVPAEIVQAGVLRCHTPLHSSGKLTICVTSGNREICSEVKDFEFRAKSTASSFLDISPSSRSLKSSEELLLLAKFVRMLLCENGSHANSNGDPQSVQCPKLKMNDEHWQRLIDELKGGCENPLNVSDWIMEELLKSKLQQWLSVKLQGYDGIACSLSKHEQGIIHLISALGYEWALSSILSADVGINFRDTNGWTALHWAAYFGREKMVAALLAAGASAPAVTDPTAQDPVGKTAAFLASERGHLGLAAYLSEVSLTSYLASLTIQESDTSKGSAAAEAERAVESISQRNAQLHGGTEDELSLKDSLAAVRNAAQAAARIQNAFRAFSFRKRQQKTARLKDEYGMTQEDIDELAAASRSYYQSLLPNGQFYDKAAVSIQKKFKGWKGRRHFLNMRRNAVKIQLYFTQAQGPYLSGPFFVQAHVRGHQVRKKYKTFVSTVSVLEKVILRWRRKGHGLRGFRAEQTAMAEAEEDDEDDDDDDFNDDEAVKVFRRQKVDESVKEAMSRVLSMVDSPEARMQYRRMLEEFRQATAE

SEQ ID NO: 15870 - protein, 165 aa, Oryza sativa
  Clone ID: TF_OSC413065j.C1.p5.fg
MAPPRFPPSSSAARLPPRSTPPEPRPSPPAAAAGAAALAPGSLEEVLLQAAFDGNLRLVRKMARALDEGDGRRLGDKVGAVRDGNGVGALHLAAGRGSLPVCGYLLEELRVDIDAVEDRGETALTFAINSGNADMVRYLLDHGADTEKLNNDGLTVLHFASGEGV

SEQ ID NO: 15871 - protein, 455 aa, Oryza sativa
  Clone ID: TF_OSC400555j.C1.p7.np
MAVPGRRDDLVGDDLVDDDGIGEEYMAPSDDEEAQLPDELFRLADAAQSGNVAALRAALDNYSGNIDDPIEDGDTLLHIACLYGHLPCVQLLLERQASLECLLLERQASLECKDEEGAIPLHDACAGGFSDIVQYILNFAANIDGCVTRMLNTVDSEGDTPLHHAARGEHLGIVDLLLKAGACAKKENTYGQVPAEMADEGTEVRKLKVVTVPSSNPHPCHQLPIRHSPNHDDGGGAAPSPSSRRPSSAVPRTMEDERDERVVSMDGTYDADEKPVLLFSRGDGVVRVHDLPSLKKRGDILCYDEVKTISIRSRGVVFTGDASGEPSTGVMFAKLNADTSEIKLTEKQDDDTEDDKKKVNGSMKIPRVWLSLSDCWEKMKVSIFEFMIDTSGKKEAIYTVYSYIAIGIILSLNCFWKVWREASNSDEKPSGFKAFFITIVCMVGKKLYDSLKTTK

SEQ ID NO: 15872 - protein, 557 aa, Oryza sativa
  Clone ID: TF_OSC401007j.C1.p11.fg
MERQTSFRLGALEKLKSFRGMEKQKSFKMMSTDNFRRHRDSPGKRGDTPLHLAARSGNAAGAQRIIAEFDPEVAAERAAQANHDGETPLYVAAERGHTDVVREILKVSDVQTAGVKANNSFDAFHIAAKQGHLEVLKELLQAFPALAMTTNSVNATALDTAAILGHTEIVNLLLESDANLARIARNNGKTVLHSAARLGHVEIVRSLLSRDPGIGLRTDKKGQTALHMASKGQNAEIVIELLKPDISVIHLEDNKGNRPLHVATRKANIVIVQTLLSVEGIEVNAVNRSGHTALAIAEQLNNEELVNILREAGGVTAKEQVHPPNPAKQLKQTVSDIRHDVQSQIKQTKQTKMQVQKIKKRLEKLHIGGLNNAINSNTVVAVLIATVAFAAIFTVPGNFVEDITQAPPGMSLGQAYVASNPAFLVFLVFDALALFISLAVVVVQTSLIVVEQKAKRRMVFVMNKLMWLACLFISVAFIALTYVVVGRDDWWLAWCTMAIGAVIMLTTLGSMCYCIIAHRMDERKIRKASTSQSRSWSQTVDSDPDLLNSEYKKMYAL

SEQ ID NO: 15873 - protein, 628 aa, Oryza sativa
  Clone ID: TF_OSC400632j.C1.p12.fg
MAASAAPVAPASPSPSPAAAADGEEGEGPAPAAEDDSLKNDVYTAAAYGDLEKLQRLVEGEGHPVTEPDGLGYHALQWAALNNRVAAAQYILEVFPPPASRPSVSRFGWPSCSRCLLASEGFGWGFGVFTFSSLAGVLDTKLPVPVVELLQHGADVNAVDHTGQTALHWSAVRGHIQVAELLLKEGAKVDVADLYGYQATHVAAQYGQTAFIYHIVAKWNADPDVPDNDGRSPLHWGNLEACTVLVQAGKKDDLMVKDKTGLTPAQLAADKSHRQVAFFLDNAKRVYDRGCDGNTNFGKLSKLGLAPVLWCIIVGLLATYIHSVISGQYIMDMTAPFGLFAWSGVFLATAGLVMFYKCSRKDPGYIKANIRDSQNQRDDEPLLKLELDNPALLSGNWSQLCITCKIVRPVRSKHCSTCDRCVEQFDHHCPWVSNCIGKKNKWEFFMFITLEVFAMIITGSAAIIRMVRDPASPASFIPWLSYSAFNHTGALSFFIMDLFLFFGVAVLAVVQASQIAKNITTNEMANSMRYSYLRGPGGRFRNPFDHGARKNCSEFLLNGYNEDIERLDHTSHTDEEMGMIQMTNAVSQNGEGPSHHGNGTGHSCAESHAHSKSHSQIVCVHAEAPLFI

SEQ ID NO: 15874 - protein, 464 aa, Oryza sativa
  Clone ID: TF_OSC413065j.C1.p4.gm
MALNAGSLKCVVLLLKAGADVKGVGTVTPLITAANNGQTDFYKCLLEAGADPNVPDEDDPMYKMSPADMKLAASEAYRRQDYITAMKLYTRDAQICRLMHSDWSKACYLEGAAQMLLKDFEKACDAFFDGLKLDPASDEIAEALSHFVEHLVGITPPSAWAPPPPTLDADTATGPGVPQQLLIQSAAAGDLPAFKKFARMLDGGKGRLKEAVEAVKNRGAGALHQAARYGRTAMCAYMVEELQVDIDAADELGITQLDEAGADVKGVGTFTPLIVAATEGLTDFYKCLLEGGADPDVPDKVDPFFKIRPADLKLEGNRAYMRKDYLTAAKLYNMADGRRQQAAAATAAALSGVGGSSSNNSSTSTITRRRHRLHHRQHVTAVACSSNTTSTAAATTSKEDCGTRILRPDWPKGCYREGTAHMFMKDYEKACNAFLDGFKLDPANIEIENALREALKSLKASRAA

SEQ ID NO: 15875 - protein, 422 aa, Oryza sativa
  Clone ID: TF_OSC900166j.C1.p9.fg
MEKKDKGRHRGRDGGGGGGGGGGGGGGGVDRGGGGSGGGGPGMGRRGSDARGQQAEAAAAAISGIATRLGFGCTISMTPLFCAVLDGQEITVKYFLDKGADPNKKDAEGFAPLHEAAKIGNVGIARLLLSKGASVDVSSSEGTPLHVAASNGKSSIVLILLEHHANPNVMTPDCYTPLTAVLSATPEIVNESECLKCMKLLIKAGAHYKLATPDTPLEIATRNGLTECVAYLLEISTVVRLSEHDKGSDGDRKSKLKLHGGKAFEEGDYAGAIIFYTEFLCKYNFFNNPSPNYKQQRLAQKNPTPHIPHRRSMAVSASQLTSRILLSLLLSRNYCCVNKGRLSLNFQWHCHHVGDTLAMKLDPADATLYSNRSLCHLRSGAAQEALLDANDCIKLKPEWTKDHEEDACEDPVDPLEWDSYGF

SEQ ID NO: 15876 - protein, 773 aa, Oryza sativa
  Clone ID: TF_OSC900128j.C1.p2.fg
MFFTRLDDSPMFRKQIQSLEEGSELLRERCLRFHKGCRKYTEGLGEAYDGDIAFASSLEAFGGGHNDPISVAFGGPVMTKFTIALREIGTYKEVLRSQVENMLNDKLLQFVDIDLHDVKDARKRFDKASLLYDQARERYLSLKKGTRTDVATAVEDVTALSNIEAKKRFEFLEAVSGTMDAHLRYFKQVLAYAQQSRERSNYEQAALVERMQEFKRQIDRESRWSPNGINDSPNGDGIQAIGRSSHKMIEAVMQSASKGKAHISAWKFMSYFKSGYTNQRSSAPSEHGSGLLSRWFSSHYHGGVHDEKSVARHTVNLLTSTIKADADQSDLRFCFRIISPTKNYTLQRLLSSPKGSGHNRTASESSSFSSSTELDHSISEDCMLERNSGSGYFDHSGRAIQHHRTSMKPDKPIDLLRKVVGNNICADCGAAEPDWASLNLGILLCIECSGVHRNLGVHISKVRSLTLDVRVWEPSVINLFQSLGNTFANTIWEDMLPSSSSVDHGDNSRADGLENTSHNLIFSKPKHSDHIAVKEKFIHAKYAERDYVRKLNMDDSLVAQQMWENVSSNNKKGVYSLIVGSNADVNLTYGQTSFNSALTLGKALLLQEQPTSPSDGSSRCFDRSSLERISPRDSLSLASTSARIDELDDCVEGLSLLHLACRVADVGMVELLLQYGANVNSADSRGRTPLHHSILKGRHMFAKLLLSRECVNIIKLGIVPGEMISGSWFLQCGSWGADSQATDRDGRTALQYAIDSGTIDDEEILVLLEDPSR

SEQ ID NO: 15877 - protein, 406 aa, Oryza sativa
  Clone ID: TF_OSC900390j.C1.p14.fg
MVSLPLQWKPALATHVDRNKSSPLHFASSDGDCSIVQAILACSPPSAPYMQDNEGFSPIHAAALMGHTATVRLLLQFSPASADICDNRGQSFVHTAATKGHSSIISYAIGSSMLEHLLNAQDREGNTPLHLAVDAGKCKIVSKLLSSEIVQAHIMNNEGHTPSDLVQNCKGFYSMVSLVVKMYASGAQFQPQRQDHIEKWNAQDIMKWRDTTSKYLAIVSTLVATVAFSAAFNIPGSYGDDGKANLAGNCMYDTFLILDTISLVTSVVAIMLLVFGRAFSSHHSWLSFMISTHFLWLSINTMVLGFLAAISAVMSKKKGLNITMAILIYFGMWILTMLLTSLTTVGSFTGILKFLFGGRMERQRRAKRRISRQYPYAIFYTFNMVLFFVIANIALAGFDTFKSLSY

SEQ ID NO: 15878 - protein, 388 aa, Oryza sativa
  Clone ID: TF_OSC416911j.C1.p18.fg
MEAVLRHPSLSRLKPPNPNAQRTPALSITVPFRLRLPNRRLTAAAVFQDQTNPRNPASKGGDDDEAYGEVDRIVSSRTIKNPVFAEDGSATTVTATEYLVEWKDGHEPSWIPAEAIAADVVAEYETPWWTAAKKADAAEITALLADETLRRDPDAEDAQGRTAMHFAAGLGSEECVRALAEAGADVGRPERAGGGLTPLHIAVGYGRPAAVRALLELGAEPEAPDGQGRTPLELVQDVLAKTPKGNPATFERRLALEAAAKELEKAVYEWGEVEKVVDGRGEGKWREYLVEWRDGGDREWVRAAWVAEDLVKDFDAGLEYAVAEAVVNKREAAEGEGKWEYLVKWVDIEEATWEPAENVDAELLQEFEQRQSGVAAGGDAPPPPPVAG

SEQ ID NO: 15879 - protein, 526 aa, Oryza sativa
  Clone ID: TF_OSC422826j.C1.p2.fg
MDLPPLSHQALFAAVRSADAAAVAGLLADAGASGPTTQALAAAQTDAGETALYVAAEAGSEEIVRLLIPLYDLEAATVRSRLDLDAFHVAAKQGHTGAVKEFLGRWPELCSICDSSNTSPLYSAAVKDHLDVVNAILDTDDSCIRIVRKNGKTSLHTAARIGYHRIVKALIERDPGIVPIRDRKGQTALHMAVKGKNTDVVEELLMADVSILDVRDKKANTALHIATRKWRPQMVQLLLSYEALEVNAINNQNETAMDLAEKVPYGESKMEIIEWLTEAGAKNARNVGKIDEASELRRTVSDIKHNVQAQLNENAKTNKRVTGIAKELRKLHREAVQNTINSVTMVATLIASIAFVAIFNLPGQYYVDRDSGGDIGEAHIANLTGFRVFCLLNATALFISLAVVVVQITLVAWETGAQKRVIKIVNKLMWSACLSTCAAFISLAYVVVGPQNAWMAFTISAIGGPIMIGTLLFLAYLLLRPRFKFGEDRQRRIKRASGSKSFSWSIHEGISDLEAFSDHEKRIYAL

SEQ ID NO: 15880 - protein, 556 aa, Oryza sativa
  Clone ID: TF_OSC403477j.C1.p12.fg
MSLEIHEEEGGGTAAAAAVKVMTVSGSGKRGRYVRQVTGRHNDTDLHVAARGGDAGALRRALDEAAAAVATGEGREALEEVRRAVAAEPNEAGETPLVAAAERGHLEVVRELLRHLDAEGVAAKNRSGYDALHVAAREGRHAVVQEMLLHNRLLAKTFGPANTSPLISAATRGHTEVVKLLLELDDFGLVEMAKDNGKNSLHFAARQGHVEIVKALLEKDPQLARRNDKKGQTALHMAVKGTNCDVLRALVDADPAIVMLPDKNGNTALHVATRKKRAEIVAVLLRLPDTHVNALTRDHKTAYDIAEALPLCEESSEIKDILSQHGALRSRELNQPRDELRKTVTEIKKDVHTQLEQTRKTNKNVHGIAKELRKLHREGINNATNSVTVVAVLFATVAFAAIFTVPGGNANNGVAVVVQAASFRIFFIFNAIALFTSLAVVVVQITVVRGETKSERKVVEVINKLMWLASVCTTISFIASCYIVLGRHFQWAALLVSLIGGITMAGVLGTMTYYVVKSKRMRKIRKKEKMSRRSGSSSWYDNTELSETELNQVYAL

SEQ ID NO: 15881 - protein, 619 aa, Oryza sativa
  Clone ID: TF_OSC401044j.C1.p4.fg
MGEPGGAEAAVSARLLELAADDNAAGLGELLAAWPSLADEPAPWYTPARGAEPLTPLMVAAVYGSVGCLDALLSPPYLVDPNRASASSLSTPLHLAAAGGSASAPAAVSRLLAAGADPALLDHLQRRASDLVALPPNSLPLKNHLLSLLGARKEWPPDPSLPDIKNGAYASDDFRMYSFKVRACSRAYSHDWTECPFVHPGENARRRDPRKYHYSCVPCPEFKKGAGCRRGDMCEYAHGVFESWLHPAQYRTRLCKDGVGCARRVCFFAHTPDELRPLYVSTGSAVPSPRGALEMAAAAAAMGMGLSSPGSSSFTPPLSPSAGGGGGGGGGSGGGGAWPQQPSVPALCLPGSAGNLHLSRLRTSLSARDMAVDELLAAAAAAADYDGLVASPASIRSARGKALVPSNLDELFSAELAAAAASRSPRYADQGGAAFSPTRKATVLNQFQLQQQHSLLSPRAAAVTPEPVSPMSSRLLAALAQREKMQQQTLRSMSSRDLGNAASLLVGSPVSSSMSKWGFPSGNPDWGADDEELGRLKRCSSFELRSGAANGNHEPDLSWVNTLVKEPTPEKMMTTTSAMDSIGILGQNTSRDHIVGGEDDTAGVISSWLEQLQLDEMVV

SEQ ID NO: 15882 - protein, 482 aa, Oryza sativa
  Clone ID: TF_OSC404797j.C1.p18.fg
MSGAEEEAAAARGGGSGSESGGSGGGGRGGGGGGAGSSGSSGARRRFDDKGLVARTSLILWHTHQNDAGAVRKLLEEDAALVNARDYDSRTPLHVAALHGWHDVAECLIANGADVNAQDRWQNTPLADAEGAKRHAMIELLKEHGGLTYGKTGSHFEPKTIPPPLTNKADWEINPLELDFSKAVIIGKDDLFRCYMQIEIVGCSKLAIILAGSFGEILKANWRGTPIAVKRILPSLSDDRLVIFFGVCRQDFKHEVNLLIKLRHPNIVQFLGAVTETKPLMLVTEFLRGGDLHQYLKEKGALAPATAVNFALDIARGMAYLHNEPNVVIHRDLKPRNILLVNSAANHLKVGDFGLSKIIKAQHANDVYKMTGETGSYRYMAPEVFKHRKYDKKVDVFSFAMILYEMLEGDPPFSNYEPYEAAKLIELCWSGDIHLRPSFLEILKRLEKIKEYLAAHDHHWHLFSQFPALFMFLENQYSGYRK

SEQ ID NO: 15883 - protein, 384 aa, Oryza sativa
  Clone ID: TF_OSC900309j.C1.p12.fg
MAARRSRLAAPTSSSAAAASMQHELLEAAASGDLRHLKRLVRALDKVRGRLQEVVEAARTDGGIWALQLAAGNEQLEVCRYLVEGLRVDVNAADDEGRTPLVFAVIGENAAIVKYLLDHGADPDKADDDGLTPLHSAAGIGDCEMIETLLAKGADIDPAVNVSSVECVKLLVEAGADVNSDCISTAALDSAMGNDGSTECLNFLMEAGANYGGPNDFRVYSVCGCSLPHFWQPKFGNILVEDMIHQPWHQDQHVNKKKIEELKTSGNKAVDREDYISASAFYTKAMDLDPNDATLFSNRSLCWLCMGDGKKAFLDALECREMRPDWPKACYRLGAALMTLKDFESACDALFDGFKLDPDNAEIERALREAMESLKISSKGTKAT

SEQ ID NO: 15884 - protein, 575 aa, Oryza sativa
  Clone ID: TF_OSC32693j.C1.p1.fg
MGGPYRSIVPEPVAHEQCNLLEVTAERNTVLHVAAEKGHIELIKELYHRFIKDNNFLSRRNSALNTPLHCAAREGHTGTVTTLVHLAQDRVENIMGCQNTAGDTALHLAARHGHGATVEALVAAHAKATELNKVGVSPLYLAVMSRSVPAVRAIVTTCSDASAVGPSSQNALHAAVFRSLEMVHLLLQWKPELASQVDCNGSTPLHFAASDGNSKIIRAIMATAPPGTVYMKDSDGLSALHVAAKLGHADVVKQLIGIRPDAVELRDSHGETFVHSAVREKRSSIVSLAIKKHKQVGGLLDAQDGDGNTPLHIAVVAGAPGIVNALLQKGKVQTDVLNDDGHTPLDLASTSPSLFNMVREGDREDFGQPRGGGRAHRHRCLAAGFNMPGGYTNDGSASLEGMSLFRWFVVLDPIAVASSVIAVILLVYGKASRSTGSWKSFVAALHCIWVSLVSLILAFFAASRAVMRTSTAESIVYIVIYVGIIVLSLFVAQWIGPVTTARAFWRFLWLSHRAHTVRRQYPFAVASIYNWLLFLHITYIMFAGLGVVHNHSNSDRGGLSSSWNPNHISPAPAPM

SEQ ID NO: 15885 - protein, 1385 aa, Oryza sativa
  Clone ID: TF_OSC401914j.C1.p21.fg
MEMRRRIFRPPHAAPLQPPADCRPSPAGPLPLSSAHRTPHAGPLRLPAAPLLPPAARRFSHAGVIEGEISREEVELVFVFREKFVSVFVPDHIRFLFVFEIIRIRFRIRAIHIRFRIRFARRASPRRLRRFPSISREVGAVVLLLPPPESKPERMELRFKAPDYATWKKEAAACDKNNGNDKDGSIPVRNKYPRHPPPRFELAEGLDYKKIDKFMDERAISIAKTIANDIIIPDPAPEWMCHTFLDKHDELEPIFVKDSPRCFLRYFKNCGCYGMSWNLTITAQTLTCMVSFNALRCAKVVLEGRAPELFGMHANPNCVTKYGYFPLHEAAERFSVEMIKLLLRFGASANVRTVGDDVIEDLLPLHIAIENTCLHKYLEDNLSPSQNHLDYIYKLIHLLCLPEMKIFLDTIRLLAGKTNNLLEELWYYIEDGKLIQSAILLLAAQEQIRGGCSSKINGSSKKDGFGIISKRILRLSFALRWEKGSNGMAQKLREEKRALIDCTGLLVDVISQAGEPLSAYVQAHSEAPHVEVLEHVSTILKEYGFYPTAEVIDTMNLQPYDCEMERESCSKGWEKGSRRRMGSHVYKEKFFPILEISFTNPVSCEVGRIPPFANNHQSKRSFSTCATGAFRLLKLLKSSVTDLAWGLRYPCPLDLEAQQLGKYIVKYSLLFCQFQNVMVTIYWCSRQKVAWSATGCTLLISLLFFFSGSPHRILLNKKPLNFKTAPSRLLREISISSSRVQRVNNSSAEFVANLNDRNVEIVQHMEDNDHNIINATANVTSDWSIVKEEFTFPAGSAPFNSCHASTIVETEKDSFLVAYFGGSKEGAPDVKIWLQRYSPFLVEDGRLLCGSSVESWNSWGAWLEVTKDAGRTWRKYGPIYIEGETLGVIQPVPYMTANGTIRVLLRSFETIGRVCMADSADGGVTWSYVHETDLPNPNSGIDGVKMKDGRVLLAYNTFSRGTLKVAVSMDDGDSWNDVMTLEDTEGMEFSYPAVIQTMDDLIHITYTYNRTQIKFDLPTLSSQGSKDHGLILHIQEKCDKMTNKWSVLREEFTFSEGNVPFKTCHASTIVEVQKNMFLVAYFGGTQEGADDVKIWLQRYYNGSWHSPEVVDEVPNVPLWNPVLFQLPSGEILLFYKVGKTVESWSGCMKCSSDGGVIWSKREQLPPGILGPIKNKVTKDHGKTWKKYGPIYVRGKTMGVIQPVLYQTSSGTIRMLLRPSDEVGRICVAESKDSGVNWSYAQPTELPNPNSGIDGVKLKDGRVVLVYNSTSRGVLKVAVSQDDGDKWEDVLTLEETHGVEFSYPAVIQTSDGLVHVTYTYKRTQIKVVLPMLFGLLMVITSFIIFHVKNEFLLVTALCSMSFYNQARFDAVSNQTCGFVSGVKFEL

SEQ ID NO: 15886 - protein, 108 aa, Oryza sativa
  Clone ID: TF_OSC3475j.C1.p1.fg
LAAALDEEGKGVAAVAAAVKDANKRTALHFAAREGRTHVCHFLISDLALPVDPKDDDGNLDLMKLFLSKGVDVESESDAGTPLIWAAGHGQQEAVKLLLQHDAKVAPQ

SEQ ID NO: 15887 - protein, 232 aa, Oryza sativa
  Clone ID: TF_OSC900390j.C1.p19.fg
MEITPAGCDHEIPEHLFMCSRLYIAAFRGYTDEVFSLLAGSSGAAVEPANSRPSPAAQEHANHHGGCSIREVTAERSKLLHIAAGEGHGELIAELCSHDSSLLSSSSSSGNTPLHCAARAGHASAVRGIVRLARANVEEDRLKAMLRGMNATGDTALHLAARHGHGEAVEELMEVAPETALELNGGGVSPLYLAVMSRSVRAVRAILSCRDASAAGPSSQNALHAAVLQSSG

SEQ ID NO: 15888 - protein, 260 aa, Oryza sativa
  Clone ID: TF_OSC400831j.C1.p4.fg
MGRRHGGGGGGGGGRGRGGRGRGGGEEDDLHLHKAARSGDLAAAESLCEANPLALNSRDRLSRTPMGWHVELVKCLCKHKADVGAAAMDDTAAIHFASQKGHVEVVRELLASGASVKAKNRKGFTALHFASQNSHLELVKYLVKKGADIAAKTKGGQTALHVAEKDDVRDFLKECEQSLKKGGELPSEKKDDSVSTIAEKPDDDKSSGEATKDEDEAGFGEKRKSDGIAAALRSPELKKAKVSLGHLISANDMEEEEEAD

SEQ ID NO: 15889 - protein, 403 aa, Oryza sativa
  Clone ID: TF_OSC415629j.C1.p25.fg
MGHGVSCARTGDEHDFFRAAQLGDLDALAALLAADPSLARRATLYDRLSVLHIAAANGRIEVLSMFLDRGAPPDAVNRHKQTPLMLAAMHGKIDCVLKLLQADANILMFDSVHARTCLHHAAYYGHVDCLQAILAAAQTTPVADSCFPGSTSLHLAARSGNLDCIRKLLAWGADRLQRDSAGRIPYSVALKRNHGACAALLNPTSAEPMVWPSPLKFISELEPEAKALLEAALMEANREREKKILNGTKYSLPSPSPGDDSADDDACSEVSDTELCCICFDQACTIEVQDCGHQMCAPCTLALCCHNKPNPTTLTPPSPACPFCRGSISRLVVAQTRSACDPDKPSSLQLTRKRSRRSHNLSEGSSSFKGLPSAMGSFSKLGRGSSRMADSDSSNLDKPEHDL

SEQ ID NO: 15890 - protein, 411 aa, Oryza sativa
  Clone ID: TF_OSC413065j.C1.p12.fg
MAPPHACSPGATQRLLLHAAADGDLRLFKRIASRLDGGEGRLKEAVEAVKDRGAGALHQAARNGRTAMCVYLVEELQVDINAANESEVEKFEIYGICGIVGCGNFATLEPHPHVLGGIVYTVSYLLDHGANPDKPNEQGRAPLHLAVEQGNCEILKVLLVKGADVDSSSDCGTPLHIAAVKSHDGCMKILLDHHADCNKVFSTFYTPLIAALMVRSLKCVKLLIKAGADIKGVGTFTPLIAAATEGLTDFYKCLLEAGADPNVPDENRRKDVEILLPVTSRIPSVYDWSVDGIITYVNKNVQATNLEPEDGTCTRIGAFAWLKMGEGMKALTDAHLCRMLCPDWPKACYREGAAHMFLKAKSFFICNNYFVFRTDKACDAFLDGLKLDPANMEIENGLREAFKSLKKSRAA

SEQ ID NO: 15891 - protein, 749 aa, Oryza sativa
  Clone ID: TF_OSC401482j.C1.p8.fg
MNGTPISASAAAGVDGVGAAVALAAATKKSAAAAAAVAEMAKTLTVDTDDAFAGLLELAADDDAEGLRRALERAPPAAADEAGLWYGRRKVLEHRTPLMVAATYGSLAVLRLLLSLPSVDVNRRCGSDGTTALHCAASGGSPSCVEAVKLLLAAGADADATDASGYRPADVISVPPKMFDAKIALQDLLGCPKAGHGVLRVVTRAANSMLSPVSSPTAEDARSPSAAVMMTTKFADLPRVVTSEKKEYPVDPSLPDIKNSIYASDEFRMYSFKIRPCSRAYSHDWTECPFVHPGENARRRDPRKYHYSCVPCPDFRKGVCRRGDMCEYAHGVFECWLHPAQYRTRLCKDGTSCNRRVCFFAHTTDELRPLYVSTGSAVPSPRASATATMEMAAAMGLMPGSPSSVSAVMSPFTPPMSPSGNGMPPSLGWQQPNVPTLHLPGSSLQSSRLRTSLSARDMPADDYSLMQDIDSQLINDLCYSRIGSSTGNHTSRTKSLNPSNLDDLFSAEMVSSPRYSNADQGGMFSPSHKAAFLNQFQQQQQALLSPINTVFSPKSVDNQQLPSHSSLLQASLGISSPGRMSPRCVESGSPMNSHLAAALAQREKQQQTMRSLSSRDLGPSAARASGVVGSPLSSSWSKWGSPSGTPDWGVNGEELGKLRRSSSFELRSGGDDPDLSWVHTLVKESPPEKQVTTAESINSVGPSPLMPPSVSNGEGPSLNAPLDGHDQAAVIGALLEQMQLDQHIGSLAT

SEQ ID NO: 15892 - protein, 341 aa, Oryza sativa
  Clone ID: TF_OSC900351j.C1.p1.fg
MGKQEQEKMLLQAAYDDNLRLLRKMARGLDTGQGEAAVVAAVAGRADGNRALHLAAARGSMDVLRYLVEDLHLSVNQFNAKVCIVEGSIHMTIRVPYGPYAIFFLAGHCEIVELFLSRGVDVDLDSITGTPLLTAAMNGQYSTMKILLEHHADVGADVNFRDPNGVTCVMVAANHGSPVIMKCLLDAGANSNIPDEFNRTPIEVAANRGRRDIVKMLFPLTSPISTLPDWSIDGVISHVQTFGLKPRDNDLSKRKSAELKLQAREAFEREEYMLAGQHYTNAIELTTNAHDKATLLANRSLCWLRLSTGNGALADANMCRMLRPSWPKACYRQGAAFMFLK

SEQ ID NO: 15893 - protein, 145 aa, Oryza sativa
  Clone ID: TF_OSC401693j.C1.p5.gp
AARYAHSEAHHAVATRDHAALRRVLDALPRARRPEEIRTEADSVAEEARAEAASAVIDRRDVPGRETPLHLAVRLGDAAAAEMLMAAGADWSLQNEQGWSALQEAICAREEALARVIVRHYQPLAWAKWCRRLPRVVAAMRRMRD

SEQ ID NO: 15894 - protein, 656 aa, Oryza sativa
  Clone ID: TF_OSC401693j.C1.p8.gm
MAGVDAARYAHSEAHHAVATRDHAALRRVLDALPRARRPEEIRTEADSVAEEARAEAASAVIDRRDVPGRETPLHLAVRLGDAAAAEMLMAAGADWSLQNEQGWSALQEAICAREEALARVIVRHYQPLAWAKWCRRLPRVVAAMRRMRDFYMEITFHFESSVIPFISRIAPSDTYRVWKRGANLRADMTLAGFDGFKIQRSDQTILFLGEGSDDGKVPPGSLCMINHKDKEVMNALEGSGAPASEAEVQQEVTAMSQTNIFRPGIDVTQAVLLPQLTWRRQERTESVGPWKAKVYDMHHVMVSVKSRRVPGAMTDEEFFSACNENDTESEGFDDVLTEEEKKQLEAALKMDSPDGAGGEGQSDTFVGPRHSCVEPREREIPIEDLSISGNGDSKHDKKGWFGHWGKRVQSSKLEGTKKMAPPRSSLCVDEKVSDILIESPSNVQTRPGRHSVDVVRGDESRRGKERDYRRPAASSECGHRRKEGSKESEYKKGLRPVLWLSPNFPLRTEELLPLLDILANKVKAIRRLRDLLTTKLPPGTFPVKVAIPVVPTIRVLVTFTKFEELQPLEEFTTPPSSPDNSKSPVAQSSSSSWIQWIKAPYHQNFSTAPGPSSRVEDIQDPFVIPADYVWTTPEEKKKKTQENKSKSKKGRNAAA

SEQ ID NO: 15895 - protein, 677 aa, Oryza sativa
  Clone ID: TF_OSC900416j.C1.p6.gm
MAGVDAARYAHSEAHHAVATRDHAALRRVLDALPRARRPEEIRTEADSVAEEARAEAASAVIDRRDVPGRETPLHLAVRLGDAAAAEMLMAAGADWSLQNEQGWSALQEAICAREEALARVIVRHYQPLAWAKWCRRLPRVVAAMRRMRDFYMEITFHFESSVIPFISRIAPSDTYRVWKRGANLRADMTLAGFDGFKIQRSDQTILFLGEGSDDGKVPPGSLCMINHKDKEVMNALEGSGAPASEAEVQQEVTAMSQTNIFRPGIDVTQAVLLPQLTWRRQERTESVGPWKAKVYDMHHVMVSVKSRRVPGAMTDEEFFSACNENDTESEGFDDVLTEEEKKQLEAALKMDSPDGAGGEGQSDTFVGPRHSCVEPREREIPIEDLSISGNGDSKHDKKGWFGHWGKRVQSSKLEGTKKMAPPRSSLCVDEKVSDILIESPSNVQTRPGRHSVDVVRGDESRRGKERDYRRPAASSECGHRRKEGSKESEYKKGLRPVLWLSPNFPLRTEELLPLLDILANKVKAIRRLRDLLTTKLPPGTFPVKVAIPVVPTIRVLVTFTKFEELQPLEEFTTPPSSPDNSKSPVAQSSSSSWIQWIKAPYHQNFSTAPGPSSRVEDIQDPFVIPADYVWTTPEEKKKKTQENKRRMSGRFEDFDELQGSIFMVEFVFSVLSGLLF

SEQ ID NO: 15896 - protein, 1003 aa, Oryza sativa
  Clone ID: TF_OSC410211j.C1.p17.fg
MAEGRRYAIAPQLDIEQILKEAQRRWLRPTEICEILKNYRSFRIAPEPPNRPPSGSLFLFDRKVLRYFRKDGHNWRKKRDGKTVKEAHERLKSGSIDVLHCYYAHGEENINFQRRSYWMLEEDYMHIVLVHYLEVKLKFHFLHIYGYDHQAGKLSSRSTGHDDVLQASHADSPLSQLPSQTTEGESSVSGQASEYDETESGSYQGLQATAPNTGFYSHGQDNLPVVLNESDLGTAFNGPNSQFDLSLWIEAMKPDKGTHQIPLYQAPVPSEQSPFTGGPGIESFTFDEVYNNGLSIKDVDGDDTDGETPWQIPNASGTFATADSFQQNDKTLEEAINYPLLKTQSSSLSDIIKDSFKKNDSFTRWMSKELAEVDDSQITSSSGVYWNSEEADNIIEASSSDQYTLGPVLAQDQLFTIVDFSPTWTYAGSKTRVFIKGNFLSSDEVKRLKWSCMFGEFEVPAEIIADDTLVCHSPSHKPGRVPFYVTCSNRLACSEVREFDFRPQYMDAPSPLGSTNKIYLQKRLDKLLSVEQDEIQTTLSNPTKEIIDLSKKISSLMMNNDDWSELLKLADDNEPATDDKQDQFLQNRIKEKLHIWLLHKVGDGGKGPSMLDEEGQGVLHLAAALGYDWAIRPTIAAGVNINFRDAHGWTALHWAAFCGRERTVVALIALGAAPGAVTDPTPSFPSGSTPADLASANGHKGISGFLAESSLTSHLQTLNLKEAMRSSAGEISGLPGIVNVADRSASPLAVEGHQTGSMGDSLGAVRNAAQAAARIYQVFRMQSFQRKQAVQYEDENGAISDERAMSLLSAKPSKPAQLDPLHAAATRIQNKFRGWKGRKEFLLIRQRIVKIQAHVRGHQVRKHYRKIIWSVGIVEKVILRWRRRGAGLRGFRPTENAVTESTSSSSGNVTQNRPAENDYDFLQEGRKQTEERLQKALARVKSMVQYPDARDQYQRILTVVTKMQESQAMQEKMLEESTEMDEGLLMSEFKELWDDDMPTPGYF

SEQ ID NO: 15897 - protein, 456 aa, Oryza sativa
  Clone ID: TF_OSC1309j.C1.p3.gm
MTMEDGSCPPAVAPSGSQAEDYGSWTLKQKLEDLINCDPIHGIMPKNPKYKAYFEEKFEEKLSFMGLGEFLYPDILTNMASQNALRCARVALQGTSPLLRCRRRADPNTRHRYGFAPLHMAAENFSVDMVKLLFRCGASANIRTKGDNVIEGLLPLHVAVENASMHKYIEDHWAHGDHIINLIFLLCLPEMTDNIVDEVWNYIQHEEKHVQAAILLLAAEKQLRGRLNKSSGKASLNGFDIVKSRIGDALSTIHLEGLNMVQEGKNGRALKRLKDKKEALLTALVLVCIVHKAGEALDGYIQTHSQPPPPPRRWFSLAGELSLPNDGAASSATRGLVSGGAEQGGGVVEDREERGGVVEEGEEQANQATTPTAQISFAACPRCGEKTCIPDRGQAAELGCGPRRHVDLNPSWSNEITRQVGALRSRHLLLAHQLRIQLLSAAAHQLLSAAAHHLRR

SEQ ID NO: 15898 - protein, 73 aa, Oryza sativa
  Clone ID: TF_OSC16667j.C1.p1.np
IANFVFTPLVSSLLGGSLECMKLLFQADANVNGAGFNGATPLLLACSHTGSIRFVNCLVESGADPNIPDEVSI

SEQ ID NO: 15899 - protein, 1033 aa, Oryza sativa
  Clone ID: TF_OSC401695j.C1.p21.fg
MAAAADARRFAVVPQLDIAQILKEAQQRWLRPAEICEILKNYKSFRIAPEPPNRPQSGSLFLFDRKVLRYFRKDGHNWRKKKDGKTVKEAHERLKSGSIDVLHCYYAHGEENENFQRRTYWMLEEDFMHIVLVHYLETKGGKSRTRGNNDMHQAAVMDSPLSQLPSQTIDGESSLSGQFSEYEEAESGGTGYHSFTQMQQQQNGIGPVTDASMFSSRVSASSIGNYQGQHAMGHTTNFYSSSQHDSPLVLSDPNLELANNGHESLWNGVMKPDEGTVQMTHLQPPVHPEQGMFTTEGQGVEYLTFDEVYSDGLSLKDIGAAGADVEPFWQFSSNSYLTEAIAFQLSSATADISATENSVQQNDGSLGAAIGFPFLKTQSSNLSDILKDSFKKSDSFTRWMSKELLDVEDSQIQSSSGAYWNTEEADSIIEASSREPLDQFTVAPMVLQDQLFSIVDFSPSWTYAGSKTKVLVTGRFLHANEVTERCKWSCMFGEVEIQAEISADGTLRCYSPPHKPGRVPFYVTCSNRLACSEVREFEFRPSDSQYMDAPSPLGATNKVYFQIRLDNLLSLGPDVYQATITNPSKEMIDLSKKISSLLANNDEWSKLLKLADDNEPLSHDQQDQYAENLIKEKLHVWLLHKVGDGGKGPSVLDDEGLGVLHLAAALGYDWAIRPTVTAGVNINFRDFHGWTALHWAAFCGRERTVVALIALGAAPGALTDPHPNYPAESTPADLASANGHKGISGFLAESSLTSHLQALNLKEANMSEISGLPGIGDVTERNASQPAIGDSLGAVRNAAQAAARIYQVFRVQSFQRKQAVQYEGDKGGISDEHALSLLSMKPSKSGQLDPLHAAASRIQNKYRGWKGRKEFLLFRQRIVKIQAHVRGHQVRKHYRKIVWSVGIVEKVILRWRRRRAGLRGFRPTEGAIESSSGGTSSNLVKDKPAGDDYDFLQEGRKQTEERLQKALARVKSMVQYPEARDQYQRILNVVSKMQESQTVQEKILDESTEMDEGDFMSEFKELWDDDTPLPGYF

SEQ ID NO: 15900 - protein, 149 aa, Oryza sativa
  Clone ID: TF_OSC400782j.C1.p8.gp
MQFGVLENKIDVLKVLLEHDFSLGYIISTSGIPLLGSAAYQGHVGVAMEILKHCPDAPFLVENDGTTCLHIAVQKGHIKFVEFVLQSKELRKLINMRDRNGETALHYAIRKCHPKIVALLLQCKAQDVTVLDSNGNPPIWVPNDAADHA

SEQ ID NO: 15901 - protein, 1073 aa, Oryza sativa
  Clone ID: TF_OSC400432j.C1.p22.fg
MEASISPPGSSKQAGLRRPSPGNSLKDLCLVSKQGSIAEVESALALLKKSGGSIDGRNVFGLCALHLATWRNHLPIVRRLLDAGADPDARDGESGWSSLHRALHFGHLCVASVLLQFGASLALEDTKGRTPVDLLSGPVSQANGDSPDSVAMEVFSWGSGTNYQLGTGNAHIQKLPCKVDALHGSYIKTVAASKFHSVAVSSDGELYTWGFGRGGRLGHPDIHSGQTTAVITPRQVTVGLGRKRVNVVAAAKHHTVIATEAGELFTWGSNREGQLGYPSVDTQPTPRRVSSLKARIISVAAANKHSAAVADTGEVFTWGSNKEGQLGYGTSNSASNCIPRMVEYLKGKAFKCVSAAKYHTVALGTDGEVFTWGHRLVTPRRAVISRCLKKGGNTNLKFHRMERLQVISVAAGVMHTTVLTADGAIFYWVSSDPDLRCRQIFSMCGRNVVNISAGKYWTALATAGGDVFMWDAKKHKDDLPMFTRVHGVKRATSVCVGETHMLVLSSIYHPEYPPKPKIQCKKAMLEWNGGMEELDEDIMFNDVQPDSGISGSDGVIKKGAPSLKSLCEKVAIEHILEPKNSIQLLEVAESLEAKELKKHCEDIAIRNLDYIFTVAAPSVMNASPETLANLERLLDEKSSEPWSHRRLPTVTATYPAVIDSDEEGDEAGGFLRLRDSQKSASKSYGISSYGNFLEKDSNAGQAASKQIRALRKKLQQIEMLEAKQLDGHQLDNQQLAKLESRAALEGELAELGIPTDLRTPVCVTEEKTNKKSSVSKKQKRKNKQAAHSDTPLVKREDRDQIYVKDLQEVLPVHISAEKEASVADSIKPSEHVTFINTKAISCPLENKASQPTSSKKKNRKGGLSLFLSGALDDTPKPSPPTPVVTVTPKHEGPAWGGAKVTKGSASLRDIQSEQRKTNEPITAKAKDRFEDSPDSAGRMRLSSFIPDARSTPITVTPARVVPASEGDKSTLSWSSSATSPNVLRPSLRDIQMQQEKRQTGISHSPKTRTSGFAIPSQGTSPEVGGIKDNVPNRWFKPEADAPSSIRSIQIEEQAMKDFKRFYSNVRIVKPQVQ

SEQ ID NO: 15902 - protein, 236 aa, Oryza sativa
  Clone ID: TF_OSC900400j.C1.p3.gm
MASSNGEQPPESPKEANAAPVAAKLAMASGRDGCERLKDLAEGISATDQQASGAVYSLSLLEGLTLDSDQNSALHVVAASGDSQAWEPLLALAAAAPARDSSGAARVDDQELLARRKNKVGETALHGAVRAGHSKVVEVLMKEDPGLAGVDRHDGTSPLYLAVSLGRFEIAWDLLDMSSRKLSYSGPDGQNVLHVAVQHPQGKEGCVTEREGEEEQVAGGLPLLPANNGMHPRPKP

SEQ ID NO: 15903 - protein, 170 aa, Oryza sativa
  Clone ID: TF_OSC900156j.C1.p11.hg
MDLDGVTTEGNTALHVVATCGDGPGYLRSAGVIYSRSQHLMLVQNNNGDTPLHCAVRAGHSKMVDHLIDLVETKDNSPSSARLEELLRKENCRKETAFHDAVCIGNKDIITNLLKYYSELAGFLMDATDKMHCTQPFYKTKVNMSYTNAKLMLLQVGAHNANRKWVLRSA

SEQ ID NO: 15904 - protein, 687 aa, Oryza sativa
  Clone ID: TF_OSC900348j.C1.p23.fg
MDHVAGVQFAEQIEQALRKADELGDDDLRAALRRARNSPADTAFQLPLLQLPVEDPVHAGAAATQPEQQNAGRRLMCPELYRAAFSGSVDKLQELLVSPSGTAAEEQGRRHDGQCVLDETTAGLNTVLHLAASQGKIGLVRKLCDGDDTAAAAVAALLPKETTKSETALHHAARAGRRDMVSLLIRLAQMHGSGAPGLLVTKNSAGDTALHVAARHGRVAVVKVLMVAAPALSCGVNNFGMSPLYLAVVGRSIGAVKAIVQWKHASASGPKRQNALHAAVLQSVEITRELLSWNSNLAKEPDESESTPLHYAASDGVREIISMLIQSMPSAMYIPDKEGLTPLHVAAKMGHLDVIQDMLKECPDSAELVDNEGRNILHLAIERGHEPVVSYILGDPSLAELFNEQDKKGNTPMHYAVKAGNPRLAILESRNIKLNIVNNEGQTPFDLASNTTGFLHMIGFLLRLSANGARFGAQRQDCISQWSSKNVKEWNEKTTKNLGIVAVLIATIALTAMFNVPGGYNSDGVANLRATTPYNAFLVLDTVAMASSVIATMLLTYGRGAARSSTAWICMSLIFLWMALMSMILAFMAAVVSGLDSTTTKYILWSIFVLPFAFLVALSFVWAVPAPTFTTLLLLPRALAGEDSGWTRRRIGRRFRSVGVYLLVLYLFWFLNAVAFFLTVYVVVNAI

SEQ ID NO: 15905 - protein, 378 aa, Oryza sativa
  Clone ID: TF_OSC900390j.C1.p21.fg
MVSLLLQWKPALLSDYDSSKSSPLHFASSDGDCSIIQEMLTHAPPSTAFMLDNEGLSPLHVAALMGHAAIVHLLLQFCPSSADIRDNYGRTFLHAAAMKGHSSIISYAIKKKILEHLLNAQDKEGNTTLHLAVIAGECKVVSKLLSSGKMQANIMNNVGHAPTDLIKNCKGFYSMDIMKWRETTSKNLAVVSTLVATIAFSAAFNIPGSYGNDGRANLAGNSLYSAFLILDTFSVVTSVMATILLVYGRASRSQRSWLGFMVTMHFLWLSLNSMVLGFFAALAAVMSKEKGIKIAMSQVIYYGMYILTTLLSILAMPGSFTSIVKFLISAPKERQRHTKRQISRQYPFAIFYIVNAVLFVIINSLAMASFEVARNLSY

SEQ ID NO: 15906 - protein, 150 aa, Oryza sativa
  Clone ID: TF_OSC401078j.C1.p13.fg
MGAESEQPTAAAATAEQAQDLIDAARYDDLEDVVALFTAGVSLDSADSQGRTALHMASANGHLAVVQYLIQNGANVNATNSEKNTPLHWACLNGHIEVIKALICAGASVSALNSHEKTPMDEAVTKGKMEVIDAIGAAVAQAELDGVTVS

SEQ ID NO: 15907 - protein, 823 aa, Oryza sativa
  Clone ID: TF_OSC401583j.C1.p5.fg
MSLPRRFGSIVSDSPFGDSAIDSDSRTGSCLFGSVLPGSELTGRARCSTSKLSLVLSNRAGGLGFGGNQEGASGPYFLGGAWFLFNRRVLRYFRNDGYEWRKKKNGKTIAEAHERLKVDNVDALNCYYAHADKNSTFQRRIYWMLDPAYDHIVFVHYRDVQEGSISVSALNDSSTSNQNGSGSRAEAQSSPGLTSELFAPCLNSCSPGSAEEVSSQIMAINNETNSVSQPDWVQHCNQAALRKLKVQLSLEDREDHDVDAKDIPSNSEPITVYGIQNEEPGTCRNLADVFSGLEFSKENHPEETGLPFSSTIDVLKNSDTWLEEDQIEAILHSASMIVTENQWFNIREVSPEWSYCSESTKVIIAGDFLRDPSHGSWAIVFGDVKLLFDGHVSEQFLKFGLPFPNLECGLQVSPSEIMKGASERLNRDTAVNCVMEVLLNNKFEEWLFSKYEQNSEGNHFLPRQYHGVIHTIAALGYNWALKLLLNSGVLVNYRDANGWTALHWAARFGREETVVLLLDAGAAAGALSDPTAQDPAAKTPASVASAYGFKGLSAYLSEAELIAHLHSLESKENGSSGDQISRVVGRISDTSAHAQSGSDDQLALKESLGAMRYAVQAAGRIQTAFRIFSFRKKQQAGLQNRGNHIISIREVGAASHGMLEKAALSIQKNFRCWKKRKEFLKIRKNVIKIQARVRAHQQHNKYKELLRSVGILEKVMLRWYRKGVGLRGFHPGAIAMPIDEEDEDDVAKVFRKQRVETALNKAVSRVSSIIDSPVARQQYRRMLKMHKQNKDDDEKVEVSPASHVYGSGSHHMCWLSHNNKAMH

SEQ ID NO: 15908 - protein, 378 aa, Oryza sativa
  Clone ID: TF_OSC900390j.C1.p23.fg
MEPAGCSTDEVTGDRSTLLHIAAWKGHSDLIAQLCRWGNGSLITSVNSSGYTPLHCAAGAGHAGAVEAIIRALAAGANVEEGRLQEILRGRNEAGDTPLHLAARHGHGEAAEALVRVDPGLAAELNGAGVSSLYLAVMSGSVRAVRAILWCRNASAVGPKSQNALHAAVLQSSGDYFVDNLAFYICTGQRQEEHTGLPERRGREYPQPLEEPPALGLLPSPTLPLVVIVGDHSQRCHGAAIPIDLLSPHRNTATSLFVHIANLGQCQRLGMKRMPLPTASSVATMPRASNECRCHLSTSEVGAIGFDEATATVASSTIGTVSSTAMGERREITVAVVSSGLEPPLCRRANPAAGVASAAISLTAACLPSPLVHPAVEE

SEQ ID NO: 15909 - protein, 675 aa, Oryza sativa
  Clone ID: TF_OSC101199j.C1.p3.fg
MEEESQSQSHFPLRWESTGDQWWYATPIDWAAASGHYDVVRELLRLDANLLIKLTSLRRIRRLESVWDDDMRFADAARNRAAVARRLLHDCEPPRGAAAGGGSRPNRLIRAGYGGWLLYTAAAAGDAAFVRELLGRQPLLVFGEGEYGVTDVLYAAARSDSSEVFRLLLSAVLSPPECSAGGEGDGGTAAIAGGFMFRCEMMNRAMHAAARGGNWRSSGSSCRGAPTRRRSGTLRDRRSCTPRPRGGSLSCHECLVVKDLIASFDIVNSTDEQGNTALHLAAFRGHLPVVKALITASPSLISATNEVGDTFLHMALTGFRTPGFRRLDRQMELMKQLIGGVIMDLSSIINMQNDDGRTVLHLAVIGNLHSSLVELLMTAPLIDLNVRDNDGMTPLDLLRKQPPTASSEILIKQLILAGGIANSMDHETRSAIASQLKMHCIVGSPGTSFKIPDAEIFLHAGIDASDISERTNSFSSVGQSEPEFPESSRKKLNSMQNAAKHLKILLRWPLRKEKKSSSGARNELDDDASSVDSVKSWSHGETPTPLRQKYSRMSSLFNNKRTMAARIGSPSPSMKKSFADGLAHGVMQPESPSGSGSWSSSSLVDRIEAVHLDKNGQASPDTSVVIRRTPKKHGSLNSRLMNQYFCIGAQGIAVEDSTTGQRSSRMFRSSLLSAA

SEQ ID NO: 15910 - protein, 571 aa, Oryza sativa
  Clone ID: TF_OSC900001j.C1.p24.fg
MAEIEVVGDGGGGGGGGGVKQGVVEVREARANGGEGDPVVDVYSAAAYGDLERLRGFVERDGGASLAAPDGNGYHALQWATLNNYPHVALYIIEHGGDVNAGDNAQQTALHWAAVRGAIAAADVLLENGARVEAADVNGYRAVHVAAQYGQTAFLHHIISKYGADFECLDNDGRSPLHWAAYKGNADTIRLLLFMDANQVRQDKNGCTPLHWAAIRGNYEVCTVLVHAGTKEELTLKDSGGFTPVELANDKGHRHLSYILSNATKVTFEDKYCSGRSRKIGYASILFCFLIVLITLFLNSIIFAPNFSRITAAVGIWSWGAISLAFASLVMFYRVSRKNPGYIQANTKRLDPKEPLMEIDLNSSAWTGNWSQLCPTCKIIRPMRSKHCPTCKHCVEQFDHHCPWISNCVGRRNKWDFFVFLCMGTTTAFLGAAIGFHRLWTEPIILSSSESWINFMLSNHPGAVLFMFMDVFLLTGALILTGAQATQLKVFYVSITPLWRKFLEEQMIARNLTTNEAANQSRYAYLRGPDGRFRNPYSRGCRRNCADFLVNGYSNDEEAAWPTLQQTVQRS

SEQ ID NO: 15911 - protein, 690 aa, Oryza sativa
  Clone ID: TF_OSC900367j.C1.p17.fg
MAEIEVVGDGGGGGGGGGVKQGVVEVREARANGGEGDPVVDVYSAAAYGDLERLRGFVERDGGASLAAPDGNGYHALQWATLNNYPHVALYIIEHGGDVNAGDNAQQTALHWAAVRGAIAAADVLLENGARVEAADVNGYRAVHVAAQYGQTAFLHHIISKYGADFECLDNDGRSPLHWAAYKGNADTIRLLLFMDANQVRQDKNGCTPLHWAAIRGNYEVCTVLVHAGTKEELTLKDSGGFTPVELANDKGHRHLSYILSNATKVTFEDKYCSGRSRKIGYASILFCFLIVLITLFLNSIIFAPNFSRITAAVGIWSWGAISLAFASLVMFYRVSRKNPGYIQANTKRLDPKEPLMEIDLNSSAWTGNWSQLCPTCKIIRPMRSKHCPTCKHCVEQFDHHCPWISNCVGRRNKWDFFVFLCMGTTTAFLGAAIGFHRLWTEPIILSSSESWINFMLSNHPGAVLFMFMDVFLLTGALILTGAQATQLKVFYVSITPLWRKFLEEQMIARNLTTNEAANQSRYAYLRGPDGRFRNPYSRGCRRNCADFLEGISPNLLPLFAFPAVMATTTCSKIVSGRCKNEIVYRDDRSCIHSYSLRLGQFDVFESLIFLWIRVAPAEFERAAAGADGQRAKSMALNSEGLEGLVPRAKLLLSLGSTFFLGFAPLILVTVSLFAVLYVDRKCFAPISHA

SEQ ID NO: 15912 - protein, 213 aa, Oryza sativa
  unsure (1)..(213): unsure at all Xaa locations
  Clone ID: TF_OSC4136j.C1.p1.np
LAVATDALSFGXSIRREIMGELADLVVVPSQPPLAGGRRDRLAALLELAAADDVDGLRGALAEGGEEAAELADGVGLWYGRSKASEARTPLMVAATYGIAGVVSLLVGLGGCVDVNRRPGADAALHCAASGGSRNAVAVVKLLLAAGADPATPDSAGRFRAGVILAPPASPDALGDLEVLLGRRRALAVATSVASGSSSPPLSPPDEGNRSPS

SEQ ID NO: 15913 - protein, 657 aa, Oryza sativa
  Clone ID: TF_OSC12505j.C1.p11.fg
MGELADLVVVPSQPPLAGGRRDRLAALLELAAADDVDGLRGALAEGGEEAAELADGVGLWYGRSKAYEARTPLMVAATYGSAGVVSLLVGLGGCVDVNRRPGADGATALHCAASGGSRNAVAVVKLLLAAGADPATPDSAGRFPADVILAPPASPDALGDLEVLLGRRRALAVATSVASGSSSPPLSSSPDEGNRSPSSRSSSLSPITVDRGKKEYPVDPTLPDIKSSVYASDEFRMFAFKVRPCSRAYSHDWTECPFVHPGENARRRDPRKHPYTAVPCPNFRRPGGCPSGDSCEFSHGVFESWLHPSQYRTRLCKEGAACARRICFFAHDEDELRHVPHNSGAGLLSPRASSSIDMTAAAALGLLPGSPTRHFAPPPVSPSAGSNGGAAAAHWLQGSRLRSSFNARDAAVDDLGMLLEWESQYLGALCLPPSSRPQPRLSAGLSIRPTIAPSNLEDMYASDMAMSPRFPNDQGHSVYSPAHKSALLNKLHQQKGLLSPVNTNRMYSPRALDPSSLAHSPFGGMSPRSPRTMEPTSPLSARVGAPATQRPSVGSPRNSSAWGTVGSPMGKVDWGVDSEELVRLRRPAQPGFGEDETDVSWVQSLVSNAELNGKRGEVQGMPGTSALMNRPDLNNQGDLLDQTVIGAWLEQMHLDQK

SEQ ID NO: 15914 - protein, 426 aa, Oryza sativa
  Clone ID: TF_OSC401716j.C1.p83.fg
MATAKPASPSPPPSTAVVPAANTAAAADKPAVEQLLEVAEDEVVIDFKPNAKCRADLRLRSLHPSLPVAFKVQTSSPLKFLVSPPRGAVQPLSSASLRVVLRPQQHAPASFPRSRGDRFLVLSSLSAAHLDSSASSSAATGGTTAIRLRVFFGGPYLLRLAAEAGDAAAVRLILRRQPHLLPLLEPEAAVPDGAEQWAPLHAVAARGDTGEVRRLGPDSMGARDREGRTALHVAAAAGEAEAAAALVDMGADAAATDARGRTPLDVAREKGYQEVVDVLERWELVMTAARRGDLQSLESLLSKRAGVRGRDQYGLTALHLAAIKGHCDVIALLAGSGCMDIECEDVEGHRPLHLAVEGGSAEAVELLLDMGAEVHAATRRGATPLQMAVTMGYEAIALLLRGRGADEAAAPALCIASSSSSSISCA

SEQ ID NO: 15915 - protein, 444 aa, Oryza sativa
  Clone ID: TF_OSC418098j.C1.p3.fg
MSLPDLFEKLLGDEIAATLDDDGEGIAATVARTAFHGMNALHAARSLHVYRYLLEVANMDVNKPDTTPGRKTPLERAIAGGDLPSVRYLIDHGADIHHEREGNITFLHSAAKKGFPATSNLHSVMMSSLTLNVEKNADNTPLKHVPPRVNCSFCVLFRTGRTEIVKLLLSRGAHVDGKSDHGTPLHFAAIKGYESTVKILLEHQADPNKVMPSSQATPLSAALFTTSLPCVKLLIQAGADVNATNNPLARAAGSGLTEAIKLLLKAGANPNCPDTHGRMPIELAAVYGTREDVEILFPLTNPIPTVADWSVDGVITYANLERKKLEDDDYVNTKMSDLKQKGNEAFDEQDYEKASVWYTQALEVDPCDATTLLKRCLCWLRMGEGKKAVKDATTCAKHHPKLSEAYHRLGEALMLEKDYEKACVALTHGIELDPESDEMDKLFW

SEQ ID NO: 15916 - protein, 346 aa, Oryza sativa
  Clone ID: TF_OSC31716j.C1.p1.fg
MEANAPAVLPMDAKLMVATAHGDCQQLKDVVNKEDAAMMVLVMASSNGTPASAAAASPPVAMHPLLHASASSGDWKGVNFLLNREEAYADSSVQPSKKFLKSLEACIPGNCTNGRCRPRRKLLMTYKKSLLEGVTIEGDTALHVVATHGDGHNYLKCVDTICAKGKHLLFKPNNKDDTPLHCAARAGNHEMVNKLIGLAIGPSRREESVDSIANNLILKSDNLSTETFLSDDVRVANNLTVGDSISISEDNVHRGVEYLRMENDSNETALHAAIRIGHSPIVTELLTYDSELALFPQEGTSPLYLAILLKQFDIARTLYQMSRQNILSYSGPSGQNALHVAVLRSR

SEQ ID NO: 15917 - protein, 722 aa, Oryza sativa
  Clone ID: TF_OSC413151j.C1.p12.fg
MAEEYELNEIDDTLHGSVGSRLSLFARELKSRRSSSWHGGTALRLPKDLYESLVIHPNGRWYRIWANMMFLWSIYSTFFTPFEFSFFRGLPDQLLDLECVQLVFLADVAVHFFLAYRDPHTYRMVHDKRHIALRYIKGSFALDVLGCFPWDAIYKVTGRVEAVRWLVWVRLYRGRKVMAFFKRVEKDIRVSYLLTRIVKLITVELYCTHTAACGFYYLATTLPPAREGGTWIGSLSLGDARYINFREVDLLTRYVTSLYLAIVTMATVGGSGYGDIHAVNTREMAFTVVYISFSIVLSAYLIGNMTALIVKGSRTERFRDRMTDLIRYMNRNRLGSAIRSQVKDHLMLQYESSYTRDRVIVDDIPVAVRSKMSQTLYLDMVSRVGLFRGCSDDFLSQIVLKLHEEFFLPGEVILEQGTVVDQIYIVAHGCLEEVANGEDGSEEIISELRPYGIVGDVAVICNIPQPYTVRVCELCSLLRIDKQSLTSILQIYFKDNSQILSNLLKGKETESKRKQLESDITYLLAKQESELVLGVNNAAYHGDIFRLKSLISAGADPSKSDYDGRTALHIAALRGYENIVRFLIQRGANVNSIDRFGNSPLLQAVKSGHDRITSLLVEHGAILNLEDAGGYLCRVVRGGRIDLLKKLLRFGISPNCRNYDQRTPLHIAAAEGLHLVASTLIESGADIQAKDRWGNTPLDEGRRCSSKPLVRILEQARTVATN

SEQ ID NO: 15918 - protein, 724 aa, Oryza sativa
  Clone ID: TF_OSC900133j.C1.p17.fg
MEANAPAVLPMDAKLMVATAHGDCQQLKDVVNKEDAAMMVLVMASSNGTPASAAAASPPVAMHPLLHASASSGDWKGVNFLLNREEAYADSSVQPSKKFLKSLEACIPGNCTNGRLPTPPQASNDIEEGANMPLLLSPESLLEGVTIEGDTALHVVATHGDGHNYLKCVDTICAKGKHLLFKPNNKDDTPLHCAARAGNHEMVNKLIGLAIGPSRREESVDSIANNLILRSDNLSTETFLSDDVRVADNLTVGDSISISEDNVHRGVEYLRMENDSNETALHAAIRIGHSPIVTELLTYDSELALFPQEGTSPLYLAILLKQFDIARTLYQMSRQNILSYSGPSGQNALHVAVLRSRVGEKRTIEIFVQKYPSSAGLRDKRGRTFLHVAVENRRVNVVGYACRNRSFLIFQSTEEMVRFVLTQAGAMNDSCRHDHFREKHKDTHNLKSDSESKELEKLKDATETMAIGSVLIATVTFGATFALPGGYRADDHSNGGTPTLVGRTGAAAGGDGGERRRRGCGVAACEQQRHGSGGGRHWSGDGGGAWAELHRLLTDGDQALEQEDGGRRQDKQAAADRQERRRRRPWWYMVQINVKRWLHRRTMLLLRDNGGMNSLCEDRYIKLTCLGTHRILIHYARQMQCLYYNVLMNEVGMDSWEEYTEQDREDVRALIDKIVDLCRSSIPRPPHDGFVWFSLFCDLYLSPEIVLILDLQGSEDEDLREVTL

SEQ ID NO: 15919 - protein, 399 aa, Oryza sativa
  Clone ID: TF_OSC400284j.C1.p23.fg
MAAAAESKAGKSPEELLCAAAESGDAEAITGLLAEGADPTHFDASGLTPLMHAATGGHAAVVQLLLDAGAPWNALSPTGISAGDLASDSATFDLLLDHALRSELVLGTVARRQAGPADSPAESYLESRVSFSEERVMDADSKAVMMEWERPLMEAHARAVCSGGKVLNVGFGMGLVDTAIQRYEPEEHTIVEAHPEVYARMLKLGWGEKKNVKVVFGRWQDVLPQLGSYDELSVSCFEGIAKQDFYLLDSSQISAASDKYDAILNKIIALDNSVLLIHYYPKMFVHVYFITKQHGIFFDTYGEYYEDMREFHQHLPKLLKPGGIYSYFNGLCGDNAFFHVVYCQLVALELANLGYSTQFIPLPVKDCLSEEIWNGVKQKYWQLDTYHLPVCQAESEPEQ

SEQ ID NO: 15920 - protein, 626 aa, Oryza sativa
  Clone ID: TF_OSC414121j.C1.p6.fg
MANREEPYSTTGGTAAKAPPVAMDAKLLMAECPEDRKLLKELVHKEDASKMMVVLASTTNQPAAEKPAAARAVMNPLLLAAASFGACEVFYFLFCREDAREPLPTMTARAFHAMLAGDASGADGRWPSTHQQALDEVEEGGAGAAVAVGHQSTRRLPPPDAPLLEGITVEGDTALHVVATHGNAANFLECAEIICNRARRLLLATNDKGDTALHCAARARRLEMASRLIALAKAREDHEVERGQAASFGKVLLRTENERNETALHDAVRAGDGDMVRRLMDEDPDLALFPVQGTSPLYLAISLRNGTIAEILHEKSNGNISYSGPHGQNALHAAVLLRHTAVLELLLKWNSNLTKQGDENGSTPVHFAASFPLWHRKFHWRHPWIIRVPHSLSMLLNTGEVDPFYQSDKNGMFPVHVAAAVGAELTVAFLLDKFPNSAGLRDAKGRTFLYVAVEKQSLAVVRFACRTTSLQWILNMQDKDGNTALHLAIQANHHRLFCALLGNPQVNLDLTNHSGHTPLDLSRRMLPRGMKYTANTEELIYLTLKQVGSEHYHDRRDHIEEIYSRRVVSKEDLAEELDKMQESTQTLGIGSVLIVTVTFGAMFALPGGYRADDHPYGGTPTFSGRW

SEQ ID NO: 15921 - protein, 222 aa, Oryza sativa
  Clone ID: TF_OSC19440j.C1.p1.fg
RRKLFTDEEKVLLNKRVPDLEAATSSKWLPLHTIAASGDFYLLDNLLKHNINVNALDKDGLPAIHKAILSKKHAIINYLLRNSANPFIHDKDGATLMHYAVQTACSQTIKTLLLYNVDINRPDDYGWTPLHLAVQTQRTDIVKLLLIKGADRTLKTQDGFTPLELCLRLGHHARTYELIKLLKSFRLPKQHDPVQHLDDRGCSLKGINRLWYAHDNWKAKVP

SEQ ID NO: 15922 - protein, 434 aa, Oryza sativa
  Clone ID: TF_OSC416913j.C1.p38.fg
MPPSLSLHHHLLLFPFPSHVQTLNPLSASPRLHPHSKSLLPRRRPLVTSPSSFAVAAVDEFDEDFAIGDCVVFEDDAFEEPDVDLPSPAPSTTSRPRRKPAAEAGGGGGSSLVPERWRDAAEEINLTKKEKRRIAHGLRFGSRLERRAPPAVAAPDEYRAYREGRLDAELGRVARDYPEPIERSPVPDRVEAPPPPEPGARVAPRNPRLGLGRRKLFTDEEKVLLNKRVPDLEAATSSKWLPLHTIAASGDFYLLDNLLKHNINVNALDKDGLPAIHKAILSKKHAIINYLLRNSANPFIHDKDGATLMHYAVQTACSQTIKTLLLYNVDINRPDDYGWTPLHLAVQTQRTDIVKLLLIKGADRTLKTQDGFTPLELCLRLGHHARTYELIKLLKSFRLPKQHDPVQHLDDRGCSLKGINRLWYAHDNWKAKVP

SEQ ID NO: 15923 - protein, 565 aa, Oryza sativa
  Clone ID: TF_OSC403629j.C1.p29.fg
MDAKNQQSGDGQQRPAQQAAGMDPAKAAAQAATRRKKMTKQLTGKRDDTALHGAARAGQLVAVQQTLSGAPPDELRALLSKQNQAGETPLFVAAEYGYVALVAEMIKYHDVATACIKARSGYDALHIAAKQGDVEVVNELLKALPELSMTVDASNTTALNTAATQGHMEVVRLLLEADASLAVIARSNGKTALHSAARNGHVEVVRALMEAEPSIAARVDKKGQTALHMAAKGTRLDIVDALLAGEPTLLNLADSKGNTALHIAARKARTPIVKRLLELPDTDLKAINRSRETAFDTAEKMGNTESVAVLAEHGVPSARAMSPTGGGGGNPGRELKQQVSDIKHEVHSQLEQTRQTRVRMQGIAKQINKLHDEGLNNAINSTTVVAVLIATVAFAAIFTVPGEYVDDAGSLTPGQALGEANISHQTAFLIFFVFDSVALFISLAVVVVQTSVVVIERKAKKQMMAVINKLMWVACVLVSVAFLALSFVVVGKAERWLAVGVTIMGATILVTTIGTMLYWVIAHRIEAKRMRSIKRSSLSRSRSFSASGMSEAEWVEEEFKRMYAI

SEQ ID NO: 15924 - protein, 624 aa, Oryza sativa
  Clone ID: TF_OSC400525j.C1.p62.fg
MEPSSSITIASSSSYLSNGSSPCSVSLAPPGAGAVAAQAAPVAAGEGGGGGGGGGGGGSSSVEVVSLNRLSANLERLLLDSDLDCSDADVDVADGGPPVPVHRCILAARSTFFYNLFAARGRGGDGAAGGGGGGGGGGGERTGGRPRYKMEELVPGGRVGRDAFLSLLGYLYTGKLRPAPDDVVSCADPMCPHDSCPPAIRFNVEQMYAAWAFKITELISLFQRRLLNFVDKTLVEDVLPILQVAFHSELTPVLEKCIRRIARSNLDNVSLDKELPPEVAVQIKEIRQKSQPNEGDTVISDPVHEKRVRRIHRALDSDDVELVKLLLNESEITLDDANALHYAAAYCDSKVVSELLDLRLANLNLKNSRGYTALHLAAMRREPAIIMCLLNKGAAVSQLTADGQSAMSICRRLTRMKDYNTKMEQGQESNKDRLCIDILDREMIRKPMAVEDSVTSPLLADDLHMKLLYLENRVAFARLFFPAEAKVAMQIAQADTTPEFGIVPAASTSGKLKEVDLNETPVTQNKRLRSRVDALMKTVELGRRYFPNCSQVLDKFLEDDLPDSPDALDLQNGTSDEQNVKRMRFCELKEDVRKAFSKDRADNSMFSILSSSSSSSPPPKVAKK

SEQ ID NO: 15925 - protein, 173 aa, Oryza sativa
  Clone ID: TF_OSC401105j.C1.p1.fg
MAARRSRLAAPTSSSAAAASMQHELLEAAASGDLRHLKRLVRALDKVRGRLQEVVEAARTDGGIWALQLAAGNEQLEVCRYLVEGLRVDVNAADDEGRTPLVFAVIGENAAIVKYLLDHGADPDKADDDGLTPLHSAAGIGDCEMIETLLAKGADIDPVADECGTPLHLATKE

SEQ ID NO: 15926 - protein, 451 aa, Oryza sativa
  Clone ID: TF_OSC900134j.C1.p1.fg
MAKTLDRLKPKKKQGSDTTCRIKTQELSQPEEGSMVAMPKNPNLLRNKKLPSNSTKIGLTEIDLALDDFLNLVATPTVPATLSPSPDGLKGGPASNNGLNTTMGTQQASSSSSSAAAAAGEERACVILYNPVQSPSIPGLARLMVSRLIGLAKTEDDNSGCGSSLKQLLRKENYLHETALQDAVRSGNKEIITEILEFDPELASSPMDGTGTSPMYIAVLLGRVDIAKLLHEMSKGNNPSYSGPEGQNALHAAALQGKDSKLAVAYLIKERPEIAGFRDSKGRTFLHVAVERKKSDIVAHASSIPSLAWILNLQDNDGSTAMHVVVQLAHIKSFCSLLRNTEVKLNIPNNKGQSPLDVSQSNIPRGTFYDSKNNPELQIARALIACNASTGRRMDLFLEQRQKQSDEKTESEKMTYSTQTLGVGSVLIVTVTLGAIFAIPGGYKGDDCYIS

SEQ ID NO: 15927 - protein, 241 aa, Oryza sativa
  Clone ID: TF_OSC900390j.C1.p16.fg
MEITPAGSDHEIPEHLSMCSKLYLAAFRGYTDEVCNLLAGSSGAAVQPANSSPSPAAQERANHQGPCSIREVTAELRTLLHIAAGQGHDDLIAELCLHDSSLLSSASSSGHTPLHCAARAGHALAVRAISLLAGASVEEDRVRDVVRSKNVAGDTALHIAARHGHGKAVEELMEVAPETASELNGAGVSPLYLAVMSRSVRAVRAIISCRDASAAGPNSQNALHAAVLQCSDFQLIFTRVN

SEQ ID NO: 15928 - protein, 250 aa, Oryza sativa
  Clone ID: TF_OSC12219j.C1.p1.fg
MNPKLLMAARHGDIETLKRLLAVNTAQPPPQVVLQVDRPAAAAPSAAANTLLEGVTSEGDSALHVVAAAAVAAACGDDDDDVFLDCAGVIHGAARHLIRARNSNGDTPLHRASRAGSVNMVRRLIAMAKDEAGDDDHDDHDDGGERRRQRAAVELLLRAQNKRGETALHEAIRSNSRDLVVDELLSHDPELARVPGEEGGTSPLYLAISLRRFEVAKKLHERDEQLSYSGPQGRNALHVAVLIGKGLKFG

SEQ ID NO: 15929 - protein, 441 aa, Oryza sativa
  Clone ID: TF_OSC401247j.C1.p9.fg
MGDPNPSFGFRVGLAFLRALPYLNDGGPQSQFFEAATHGDVSRLRGEHGGWSRLAAAGPVLAFSWACVLAMSNFAPSRASCSKKKELASGEDAEGKARLADDISFSGIGPLQAAARLGEVDACRCMVEELGFDINAGRELGHDEVERLLLSRGASVDIAYFHGTPLHIAAAYGKASVMKVLLEHDADAGADINFSDRDTPLVVAITNGLTNCIKYLLKAGADPNIPTCHCGALPIQLAASYGRRKDVELLFPLTSPIRAVSNWTVEGILAHAKSKHARSKCSKPKDKQDDHNKKAQFKLRGEKAIKDKHDEQDKKAQLKLQGEKAVKRKDYHGASIFYTEAIELDPTDATLYSNRSLCHLQMTEALFDADYCIKSRPEWLKGYYRKGAALMLLKEYEKACDAFLAGLKLDPLNAEMEKVFREAVEAMKKHHVTTKSFKPSD

SEQ ID NO: 15930 - protein, 562 aa, Oryza sativa
  Clone ID: TF_OSC401323j.C1.p1.fg
MDPRLHKAAVQGNTASLAALLGEEQGGGKILNSTTPQGNTALHIAAGLGRVAFAEAAAAEHGDLLVARNDQGDTPLHLAARAGKMAVADMLITFITMAGPCWPEEEPLMMMNKTRNTPLHEAVKQRRSAVALRLLEAEPNCGHTPNVDMQTPLHIAAREGLADVVDKILDQPWVPEKFVTADNVSGTALHQAVLGGHTRVVEILLMKTAPGLIDLTDAVGNTALHFAAQKNDKRMVRMLLDHKPDLAHRRNERQQSALHVAAYYGSTAAAAELLRHSPDAAEMLDREGRNAVHVAVSSGKVDALRCLLGRVRPAEVVNRGDNSGDTPLHLAAKMARIKSALMLLRDPRVDPCLLNREGHSARSLVEERVAGGEMDAYVVYLWEKLKKYESRRCKNQQLPPVATYQSLRSRRPGSGSNDEYFELSVGTYTLVATLIATVTFAATFTMPGGYNQNTGLAIHADRAPFKIFVVSNTVAMCSAIVVVFCFIWAWRDPVKFKLDQLTWGHRLTVVACLAMIVSLMTSVYLTVLPTERWLAYLVIAIGACTPAVVILILRWEVFYVPL

SEQ ID NO: 15931 - protein, 43 aa, Oryza sativa
  Clone ID: TF_OSC28368j.C1.p1.gm
VGADMNFRDSNGVTCVMVAANHGSSVIMKCLLDAGANPNIPDE

SEQ ID NO: 15932 - protein, 516 aa, Oryza sativa
  Clone ID: TF_OSC409418j.C1.p2.fg
MAACAASTATIDWELLEAAISGDTRSMKMKYMDSHDPTILLGKNPQGNTCLHISSMCGHLEFCKDVLSLPQDPTVKKKLLTTVNVMNETPLLTAITSGHVTLAAFLLKYCHEQGFSEVILKQDKHKCNALHHAICNGHKDLALELIATQPALSKDVNKYGESPMYIALMMRDSKFTDIFEKLLGIDGSSHSGTYGYNALHAAIRNGNPDIAKRIIVERPNLATEENKDGNTPIQLAMLHIAKKMGGHVFIKLSNQKLVNMRSSKGKTALHYAIQKCDPKIVAALLDKKIDLTILGSDGNAAAWELRDALDSAKTLNWNEVSMLMIKADPPNAKSVYNLHEEAKEKLINASRKDARSLTQTYTSNTSLVAILIATITFAAAFTLPGGYSSDAGSQGLPIMARNVAFKAFLISDTLAMCASLAVAFICIIARWEDLDFLLYYRSFTKKLMWFAYMATTTAFATGLYTVLAPRLLWLAVGICSVAVLVPILTKVLGEWPVLKLRIRLGQAFKSEFLDMV

SEQ ID NO: 15933 - protein, 259 aa, Oryza sativa
  Clone ID: TF_OSC421303j.C1.p1.fg
DCGTVQLLLAKGACVDTVANRGTPLHVAASKGKDGAMKILLDHNADSGVQIPEVLIFVSSFNKMVDGHLTPLATAITAGELKCVNLLIEAGAVVSGDCISTAAKGGSNECNYSMEETGANRNISDNGEPVSKRKATELKSLGNKAVEKKDYLSATGFYSKALDLYPDDATLFSNRSLCWHHMGNGGKALLDAYECRKLRPDWPKAYYRQGAALMLLKDYESACETLYDGLKLDPGNSEMEDALREALASLKASASTEAR

SEQ ID NO: 15934 - protein, 382 aa, Oryza sativa
  Clone ID: TF_OSC420016j.C1.p2.fg
MGQGASCGRPSEEVDFFGAAQSGDLARLAAAVRSRPSLLGRTTLFDRLSALHIAAAHGHLQVVSMALDLCVHPDVVNRHKQTALMLAAMHGRTECVRRLLDAGANIVMFDSSHGRTCLHYAAYYGHADCLRAILSAAQSAPVSQSWRIPYEVAMKRGHVACAALLNPSSAEPLVWPSPLKFISELEPDAKALLEAALMEANREREKRTLKGARSASPLALPSPSRSDDGAHDAAISEEAAAAGGGEVCSICFEQACTIEVRECGHQMCAACTLALCCHAKPSAAAATPCQQPLPTCPFCRGGISRLVVATTKTRAGGDDEEDDEEAGSRLASPLHRRSRRAVNHPSGDGGSTSSIMGSIASSIGKMGRRRTDSSEHVDVDKP

SEQ ID NO: 15935 - protein, 400 aa, Oryza sativa
  unsure (1)..(400): unsure at all Xaa locations
  Clone ID: TF_OSC413853j.C1.p1.np
MNGRNALHLAASYGHLEICKFLVEESGLDVNSGSHRGACTSMISRALGGWEDSYHDGSSSCLGHDEAVRLLLSKGVHVDPLNYRGAPLHLAASKDRVQAMKVLLEHGADVSGGSRCYQLSIISFHHSXWHAAHSLKCVKLLVEAGADVNGNSTNGPTPLTEAVDDSLTDVVKFLVGAGADPNIPDEQEGRIPIMVAAARGQRELVEILFPRTKPIPCLPDWNVDGIIRTMRTRIEPQVCSPVEEQVSDAKSKGKEAFAKGDYLTAIYFYTLAMDKSPLDATLFANRSLCWLRQREGDRALLDAQQCRMLRPGWSKAWYREGAALSFMKDYKGAVDAFGEALKLDPMSDEVKNALREAIECLKRAAXSEDPNNPXAATASSFWPHLTCQTASHLSTVTTND

SEQ ID NO: 15936 - protein, 203 aa, Oryza sativa
  Clone ID: TF_OSC100876j.C1.p4.np
VLRANPVQLYKQDSEGLYPIHVAASSGANLTVKSFIRERPEIAGLRDSKGRTFLHVAVERERWNVVVYACHTQSLARILNMQDNDGNTALHIAVKHGNKAIFCSLLMNKEVNLNISNNKGQTALDISQSKILAGLFALQNPNKLILRALTFCNARGGCRRVDHLQEQYIIHQKQVDEVRESDKMTNSTQTLGIASVLIVTVTF

SEQ ID NO: 15937 - protein, 201 aa, Oryza sativa
  Clone ID: TF_OSC400368j.C1.p21.gm
MEPDQWHGNGKGLSPSCRCRGKLADMPCSCGVMKHWADIEEASYGGGGGGGGGSPLFDELAAAAGRRSISGAGRLKIPVSGKEGRRIMGLLGMVGDSFGCSATGERLVSAARDGDIQEAMALLELNPRLARALRRLINNKSDGGVTPLHLAALHGHAECVQLLLDLGASVSEVQEAHLSTMRPVVEVLYAVNRSKHESSKY

SEQ ID NO: 15938 - protein, 660 aa, Oryza sativa
  Clone ID: TF_OSC415431j.C1.p4.fg
MASPAAETSPPSTPSTASCPTPRPDAAAAAPSMSPSLLRAARSGDERRFVKALLADPAAPDLDAVATAGGNTLLHVAAWGGHPALASLLLRRAPGLLAARNAALDTPLHLAARAGAHKVVALLVAAFSSSSSSSAAADASSPSLRALTRATNRRGETPLHDAVRGGHEAAARALTAADPGLAGLCGGAGESPIYMAAAAGSLGMVRLLTKTYRNDEEEEEELPVLCSCTGPGGRTVLHAAVLTSNVIEMTQGLLQWNPTLVKEVDDSGSTPLHYVASVGNIPALKLLLGYDTSPAYVPDSNGLFPVHIAAKMGYGQLIYELSRYFPDCDEMLDSKGRNFLHIAVEHKKWKVVWHFCGTQELERMLNVMDYEGNTALHLAVKNADQMIVSLLMANKAVLPNIVNNQGLTALDLAVLATDKGISYTLNPQVIILRCLAWTGAVLSPRRLDHFIDEFNIGKASGNELKKFTNISQNLVVGSVLISTVTFAAVFTLPGGYISDGHPHAGAPILWHRYTFKAFVMANTLAFVGSTLSTIWLTYAGSEHVHPLLRALYMFFSVISMEQATRSMVAAFALGAYVVLSPVSERIALVLYLLALKLKSITVGLPPLLQTVPVTVNARVLPQPRRWQEMLQRSFSSSPIKEKNMPKYDSISLSSSAPFSK

SEQ ID NO: 15939 - protein, 158 aa, Oryza sativa
  Clone ID: TF_OSC400431j.C1.p7.fg
MAAPFVRRPTDDGTSGTREDIIKSLDMGKGKARDAVLARKKDGIGLLHAAACQGHLTVCKFLMEELGGFIAHLIHAQDAAGADVNNKGTGITPLMFAALQGCYTYFIKILLETGAIPNIPNVLGWLPVEHVASCDCREGVEMLFPFTSPNSKCPKLEC

SEQ ID NO: 15940 - protein, 546 aa, Oryza sativa
  Clone ID: TF_OSC900398j.C1.p6.fg
MQPVRIQAHDDKIIWAKSHGEDYEVEMAKAEESRWYLARPNASLGEGCMLKDGGFAITSPTLKRPKGPSQPLRPIPDSKATADSPVMDRGLLKAATSGVKPALHDPSLLLGRTVQGNTCLHIASAHGHEEFCKDILMLNPSLLCTVNADGETPLLATVKSGNVALASFLLSYYCRRHDDLDTREAMVRQDKQGCNALHHTIRRGHRKLAFELIEKEPALTKAVNKHDESPMFIAVMRNFTDVFDKLLEVPDSAHGGTSGYNALHAAFRNNNTDIAKKIIETRPKLAREENSARVNPMQFGVLENKIDVLKVLLEHDFSLGYIISTSGIPLLGSAAYQGHVGVAMEILKHCPDAPFLVENDGTTCLHIAVQKGHIKFVEFVLQSKELRKLINMRDRNGETALHYAIRKCHPKIVALLLQCKAQDVTVLDSNGNPPIWVPNDAADHAKTLNWSEVSMRMLKADPEDKGEIYNLIKTIKDQVTEKARKDIRTLTQTYTSNTSLVAILLATITFAAAFTLPGGHSNNAGSEGLPNMGRKLAFQAFLISDT

SEQ ID NO: 15941 - protein, 466 aa, Oryza sativa
  Clone ID: TF_OSC400144j.C1.p1.fg
MASLSRVPPPARGSRRRPPPSSPVPLSPRQEMLLEAASDGDLGFLKRVVRSLDGGRGRPAEAVEAVRECGAGALHLAAGAGKLAVCRVHLYTKFVFSALLGKQLLHQSQFSKGPSSGMEEMEGETPLAYAVNGANVATVRYLLDHGAHPEKADNKGFTPLHFAAEEGYCNVVELLLAKGAQVDSMSVRGTPLHLAATNGQHRVVKILLDHNADCNKIVSAVYTPLLVAIYGSSLKCVKLLIKAGADVNGVGNITPLIASVGSTEIMKCLLEAGADPNVPDEFGRMPIEFAVRCGTLKDVNILFPLTSPMPTVPDWSVRGIIRHVNTLPGQKDYESGLEKEVAGLKLQGVEALKRQDYLAASDLYTKALCLDFNDATLYSNRSLCFLHMGDGDKAYGDAYTCRMMRPDWPKACYRQGAALMLLKEYQKACDALLDGFKMDPGNSEIENALREAMESLKISDGAKLTT

SEQ ID NO: 15942 - protein, 1132 aa, Oryza sativa
  Clone ID: TF_OSC402545j.C1.p5.fg
MDRAKAAAREDKAAAAATGKETAVSRAVAEDDTALLLAAVGSFRKEAMGRLRKGSDASRMLDQEMSTRLLHLACKHDAVQCARLLLEGGHGITASPVDARDQLTRTPLQVAAEAHSARCIELLLSKNARTDLKLVDGRPLVALEIALLSRRAQVKWSLDNSIEDLLSSLQEKDLNAVRLLAEKTREVGEVAYRYAMEGRVTVLAMLLLVAEEKISAPVSVVIEGVRTKKSIYYSIVDEALSIGDAPARDSNERRKALLSEIQLLNQFGAALWRDRNIDKRSLPPLLKAAKVGDVNVTKMLLMGDVDVNEADPEGNTALHWCLSGSSSTQEPRIVWLLLKNGARVFQGNKLGLTPVHSAAAKGNYKALQSLLLHAQDCVDTPSKTKETPLFLAVKNGSLDCVKLLLRSGASTKVQNLRKQRPIDVATSQDMRFILTSANVAPWNRSSHPKKSVTNKESCKEFLEDFGDYDSDDLNESFTGLKTSASHRDFRSSNGSAQGGKSKNHCAPKQGSKFVPRPNHWPKHDYTRKIFVGGLPPSVGAEYLTEFFTAEFGPVEEAVVIGIRMGDRVQSRGFGFVKFKREEDVISAKETHHVYMLGKRVEVKDAVARGSLPAEIQKIAPFRHHSQEVPKVTHHLLDGELKEEHYIRKRRPLPEKCLPSWFFIFRKWLPGFLADATERLGDRYPLSSLKGDFRAICRMELDHGTLGYPKLSDFMRSLPGICRMCVVPVGSGPATHMVLLPPVSRPKYVPLLEPFSFDHDELPESVSDHQSPRSPLTTNITEDSPHNTDSQQGDTCSESNVQSHQGDECCGSNTESQQDSASTDNGSLLGEVTVSTPKPDSIESIPTGKSDLIELVPTRKPHLIDTVTTRKPDLIVTEPTRKPIVIEPVPTRKPSVIEPVPTRKPMAIEPVVPTRKPIVIEPVPTRKPIVIEPVPTRKPIVTEPLPTRKPTVIEPASLTQKIVSEPMRKTDLFESGLARRIGLIGSRPTTCFVDCPVERPAVTPSNCEADMRFSFFQSQWDRFLAPYPKSDYCIICRSYDAVMQLVPCLHKICVACMMRCNVRACMTCGTAGVMERASDQRCQLMVVCRGAEAIVRCSPCMHSIACRGCFLASVTLLKGCTTCGCMIEHFKFC

SEQ ID NO: 15943 - protein, 166 aa, Oryza sativa
  Clone ID: TF_OSC100621j.C1.p7.fg
MVQFRSSLSMSRARTRHGDGDDRGWNQLHVASRKGDLNQVRRLLDDGMDVNAPAWGPKSPGATPLHLAAQGGHVKIMDELLERGANIDARTKGACGWTPLHIAAKERNKRAVRFLIENGAFLPPDMNDHRFNPPLHYCSGLEWAYEMKRMQDESDSTGETSLGSES

SEQ ID NO: 15944 - protein, 1705 aa, Oryza sativa
  Clone ID: TF_OSC413065j.C1.p13.fg
MERVVGRGGPAGAACGEAAAGMQIQVHQDIEGLQTCSNYYVSVLILVLLFFVLSLAENVRALDEGDGRLADKVGAVRDSDGLGALHLAAAREKLPVCHYLVEELRVDVDAVDNKGETALTFAINCGNEDMVRYLLDHGADTEKINNDGLTALHFAAGEGKCKIVEILLSKGAYIDSLTTGGTALHCAAYNGRDAVVKILLDHHADHKKVSWGAYTPLFVAVESGSLKCLKLLIEAGADVKGIGKEIPLITAASKGLTDIIKCLLEAGADPNVRDCLGHMPIEVAARCGERKAIEILFPVTSRIQSVSDWTVDGIINHVKSLPEVKEEDFCEATLDMGKFQGREAVKNKDYLGAMNIYTAAIALNPRDASLFSNRSLCWLHLGEGKKALMDAEACRMMRPDWPKACYRKGTALMLLKDSIYPLAYFSVARTTAVRHMWEAVRYGDVDYDEDRRALDALIVAVPPEMQFSLSQKRTAKEAWDAIAAARIGSDRARKSTLQALRKEWENLAFKPGEDVDDFALHLNTLLQKMERAVEKLFRCVPEKYRQIARSIESLLDLSTISIEEALGRLKVVDGDEPQPLSGPITIGGKLHLTREQWEASQGDGRKGESSSPTGGPAFLHLDEPKVLVSLCNGSSNDKADGWYLDTGATHHMTGRREFFTEFDSSVRGSVKFGDASGVEIKGVGSVTFTAKSGEHRLLTGVYYIPALRNSIISVGQLDENGSRVLVEDGLMRIWDRRRRLLAKVTRGTNRLYILSAQVAQPVCLAARRDDEAWQWHERFGHLHFEALKQLSAKEMLCDICVVTKQRRLPFPQQTSFRAKERLELVHGDLCGPVTPATPGGRRYFLLLVDDLSRYMWVMVLGSKGEAADTIRHAQAAAEAECGRKLRVLRTDNGGEFTAAEFASPQQNGVIERRNQTVVGMARALLKQRGMPAIFWGEAVVTAAYILNRSPTKALDGRTPYEAWHGRKPAVSHLRVFGCLAFAKELGHIGKLDDRSTPGVFIGYVEGSKAYRILDPETQRVRTAGDVVFDEGRGWVWDKAVDDGLTPMYDDFTVEYVHFEGAGGVGSSSSPSVSTPAPESPPTPTPTHPRATTSTTTSSSSIQPQPVTPHAPAPTATPPSTSTPTPARVERSPVEFATPLSHDGERIDAYHDGEQLRYRTMEDLLGDQPVPGLVPRDLEAQLHLACDDGEPRSYVEAEKHAAWRAAMQSEMDPVQENRTWELADLPRGHRAITLKWVFKLKRDEAGAIVKHKARLVARGFVQQEGIDYDDDFAPVARMESVRLLLALAAQEGWGIHHMDVKSAFLNGDLKEEVYVHQPPGFVIPGKEGKVLRLHKALYGLRQAPRAWNAKLDSTLKGMGFEQSPHEAAIYQRGNGGNALLVGVYVDDLVITGTKDAEVAAFKEEMKATFQMSDLGPLSFYLGIEVHQDNSGITLRQTAYAKRVVELAGLTDCNPALTPMEERLKLSRDSMAEEVDATQYRRLVGSLRYLTHTRPDLAFSVGYVSRFMQRPTTEHQQAVKRIIRYVAGTLDHSLYYPRCLGKAHFIGYSDSDHAGDIDTSKSTSGILFFLGKCLVSWQSVKQQVVALSSCEAEYMAASAALTQALWLARLLSDLLGRDTGTVELRVDSKSALALPKNPVFHERSKHIRVRYHFIRSYLEEGSIKASYINTKDQLADLLTKPLGRIKFLELCSRIGMAQLPHKTTHKT

SEQ ID NO: 15945 - protein, 378 aa, Oryza sativa
  Clone ID: TF_OSC400867j.C1.p23.fg
MAERSSSSSESTGNDEKKSSKPQGSSNDHQGFLPGGSPANTFDFASLHSLLNLFYMILPAAYLRFRFYEPSDPSVKEIADQIAKDPAFTQMAEQALEGEGEQGMPAIDPYIETMQKFMESPHFFTMAERLGDALVKDPAMSSLLENLTSPMHNAKIEERVSRMKEDPAVKSIMDELETGDPAALIKYWNDPETFRKISQAMGPLGGPDFAEPSGTEGTEEEGEYEDESIVHHTASVGDDEGLKKALDGGADKDEEDSEGRRALHFACGYGEVSNDKNISLRILCKTDCMYALLVFRKLHLKCAQVLLEAGAAVDALDKNKNTPLHYAAGYGMKGCVDLLLKNGAAVTLENMDGKTAIDVAKLNNQDEVLRLLEKDAFL

SEQ ID NO: 15946 - protein, 404 aa, Oryza sativa
  Clone ID: TF_OSC32697j.C1.p2.fg
MVHLLLQWKPELAVQVDCNGSTPLHFTVSDGNRKIVRAILATAPPGTAYMKDSDGLSALHVAARLGHGGIVEELTGFYPDTAELRDGRCETFLHAAARERRSSVVSLDIKNPIMMGGLVNAQDAGGNTPLHLAVVAGAPDIVEALLREGNVQTDVLNDDGHTPLDLASESNSLFNMAQPQRNDHLKPSSGHDMASGIEKTSDSLALVAVLIAAAVFAVGFNMPGGYGDDGTANLRDNISFKYFMVLDTFAITTSVVAVILLVYGKTAAAAHLAVSWKSFVVTLQCIWVSLVSLILAFFSAIHAVVIATSSSRTVLITMFLVIYVCFNALILWIEKWIDPAATTYRAVWRFVWRGRHAHAIKRRYPFLGDSLYSLLIFSVIIINITAFVVLVVVYYFDVRRLSNN

SEQ ID NO: 15947 - protein, 439 aa, Oryza sativa
  Clone ID: TF_OSC401411j.C1.p8.fg
MALPQAFELLLGRDRDAWPRGAAFLVAAHYGDVREMKRIAKELDEDGKGIEATVANTSFLGMNALHALGWLGKVPAYRYLVEEVKMDVNKADTAQGFTPLEHAVYHGRLPATRYLLDHGADVHQIRSTGNVSLLHSAAVKGFSEVAKFLLSRGVNVDAESEMGTPLALAAFRGYDSTVKVLLEHNADPNKVTNKALGAPLDLALTSSSVSCVKLLVQAGAEVKVEGPNNHLVRAAEKGLTEAIKCMLEAGANPNVPDRLGRMPIELAAEYGTREDVEILFPFSSAIPTVANWSVDGIINHVQSEIKQLEILFTQDDNFIKKRRSDMKQQGDAAFKKQDYLNASVFYTQALKVDPFDGTLFSNRSLCWLRMGDGERALDDANACEKLRPKWAKSYYRQGAALMFLKEYERAHRALGRALELDPESEEIENLYWESMELCG

SEQ ID NO: 15948 - protein, 847 aa, Oryza sativa
  Clone ID: TF_OSC418633j.C1.p8.fg
MGRGIGSKRRVEDDDGENMPGRKKKEEEEEEEDDDGEEEYEVDVVRDRIGSSRGSRLALFGSDLRLGRFRPRRRRVAPVDGDDGIFQDFVIDPDNKWYRLWTRFILVWAVYSSFFTPLEFGFFRGLPRNLFFLDIAGQIAFLIDIVLRFFVAYRDPDTYRMVHNPTSIALRYCKSSFIFDLLGCFPWDAIYKACGSKEEVRYLLWIRLTRAMKVTEFFRSMEKDIRINYLFTRIVKLIVVELYCTHTAACIFYYLATTLPESMEGYTWIGSLQLGDYSYSHFREIDLTKRYMTSLYFAIVTMATVGYGDIHAVNVREMIFIMIYVSFDMILGAYLIGNMTALIVKGSRTERFRDKMKEVIRYMNRNKLGKDIREQIKGHLRLQYESSYTEASVLQDIPVSIRAKISQTLYKPYIESIPLFKGCSAEFIQQIVIRLQEEFFLPGEVILEQGSAVDQLYFVCHGALEGVGIGEDGQEETILMLEPESSFGEIAVLCNIPQPFTVRVCELCRLLRLDKQSFTNILEIFFVDGRRILSNLSESSEYGSRIKQLESDITFHIGKQEAELTLRVNNAAFYGDMHQLKSLIRAGADPKNTDYDGRSPLHLAACKGFEDVVQFLLHEGVDIDLSDKFGNTPLLEAVKQGHDRVATLLFSKGAKLSLENAGSHLCTAVARGDTDFVRRALAYGGDPNARDYDHRAPLHIAAAEGLYLMAKLLVDAGASVFATDRWGTTPLDEGRRCGSRTMVQLLEAAKSGELSRYPERGEEVRDKMHPRRCSGVPAPTRGTAASGGGKGWCSAQEKLGLAGSGEGLRLLGEDGARVLDVDMVHDGQKLYLVVGGGGDDGGTEARQ

SEQ ID NO: 15949 - protein, 368 aa, Oryza sativa
  Clone ID: TF_OSC900156j.C1.p2.fg
MASAVKSKLTVAKTKEDTAKPPMNPWLLLLASRGDCDGITDHILLNMEAATQQKAAKEEGACHRPAPSADSSPLDQANPAIPTMATQQASGDDGHQSCLDLEGVTIEGDTALHVLATSGDGWSYLRSVEIICSKAPHLLLVQNNKGGTPLHCAVRAGHSQMVSFLIDLANNPRSNLQVAARLKEVLRKGTAFLPLHDAIRIGNKEMITKLLEFDPELASSPTDEAGISPLYLAIVLQRSDIAKLLHQMSPENLSYSGLSGQNALHAAVLQGKVTNSVISASPLLISGSFLNATVRFGPMFFPSEREGFLIFCHFHLSGVTSRIASMGGVKKSILPLVDPTTQPQPFPTLLTSVLFKTVLDAYMDGEGT

SEQ ID NO: 15950 - protein, 395 aa, Oryza sativa
  Clone ID: TF_OSC421842j.C1.p8.fg
MPVPGSQNGRPRPAKAETIHGLARAGDLAGVQRKLQENPALINDRNPVMSQTPLHVAAGYNNTGIVKFLLDFQGTDKVELEAKNMYGETPLHMAVKNSSCESAKLLLERGAHIEAKANNGMAPLHLAVWHALQSGDCSTCTESCSHHTLPHQEGKIPSNHIPGGAGKTMVARILGKLLHMVGVLPTDKVTEVQRTDLVGEFVGHTGPKTRRKIQDAEGGILFVDEAYRLIPMQKSDDKDYGVEALEEIMSVMDNGKIVVIFAGYCEPMKRVIASNDGFCRRVTKFFYFDDFTTTELAEILHLKMNNPTESSLLYGFKLDPSCSIEVVGELIARETTEQRRKQMNGGLVDTLLINARENLDLRLDFNCDDANTMITITLEDLEAGLKQISKQRQLQ

SEQ ID NO: 15951 - protein, 844 aa, Oryza sativa
  Clone ID: TF_OSC412194j.C1.p18.fg
MGFLNLVGNSIGCSASGERLVSADRDGDLQEARALLEYNPRLAWYSTFGGRNSPLHYAAAQGHHEIVSLLLESEVEINLRNYRGQRCHAPVSPPSSPARPPPRRRPRPPRPRRRRAHPCGDGDGSAPVPARALNGILAALARAPPSAACGDAPALAIELFKRMDRWACPRHSPPTIHTYNILIDCYRRVHRPDLGLAIVGRLLKNGLGPDDFSYSLIYGFVKDGEVDKAHCLFLEMMEQGVLPKILICNSIIKELCKMKEMDKAESIVQKMVDSGIAPDLFTYSLIIDGLCKSKAMDKAERVLEQMVEAGTRPNSITYNSLIHGYSISGMWNESVRVFKQMSSCGVIPTVDNCNSFIHALFKHGRTNEAKCIFDSMVLKGPKPDIISYSTMLHGYATATDSCLADVHNIFNLMLTKGIAPNKHVFNILINAYARCGMMDKAMLIFEDMQNKGMIPDTVTFATVISSLCRIGRLDDALHKFNHMVDIGVPPSEAVYGCLIQGCCNHGELVKAKELISEMMNKDIPPPGVKYFSSIINNLCKEGRVAEGKDIMDMMVQTGQRPNVVTFNSLMEGYCLVGNMEEAFALLDAMASIGIEPNCYIYGTLVDGYCKNGRIDDALTVFRDMLHKGVKPTSVLYSIILHGLFQARRTTAAKKMFHEMIESGTTVSIHTYGVVLGGLCRNNCTDEANMLLEKLFAMNVKFDIITFNIVISAMFKVGRRQEAKELFDAISTYGLVPNIQTYSMMITNLIKEESYEEADNLFISVEKSGHASDSRLLNHIVRMLLNKAEVAKASNYLSIIGENNLTLEASTISLLASLFSREGKYREHIKLLPAKYQFFEGAWQD

SEQ ID NO: 15952 - protein, 431 aa, Oryza sativa
  Clone ID: TF_OSC400025j.C1.p16.fg
MSLPDLFEKLLGDDRRDAGRRRGGDRGHRGAHGFHGMNALHAARSLHVYRYLLEVANMDVTSRTPLQVGRLPSSEPLPVGTCPLSGISLIMVLISIMNVKETSLFFIQLQRKGNILSSCRIPCYIQSAFCHDEQPYVECGEKCRQYWRTEIVKLLLSRGAHVDGKSDHGTPLHFAAIKGYESTVKILLEHQADPNKVMPSSQATPLSAALFTTSLPCVKLLIQAGADVNATNNPLARAAGSGLTEAIKLLLKAGANPNCPDTHGRMPIELAAVYGTREDVEILFPLTNPIPTVADWSVDGVITYANLERKKLEDDDYVNTKMSDLKQKGNEAFDEQDYEKASVWYTQALEVDPCDATTLLKRCLCWLRMGEGKKAVKDATTCAKHHPKLSEAYHRLGEALMLEKDYEKACVALTHGIELDPESDEMDKLFW

SEQ ID NO: 15953 - protein, 1026 aa, Oryza sativa
  Clone ID: TF_OSC401616j.C1.p29.fg
MAEVRKYGLPNQPPDIPQILLEAQNRWLRPTEICHILSNYKKFSIAPEPPNRPASGSLFLFDRKILRYFRKDGHNWRKKKDGKTVKEAHEKLKVGSVDVLHCYYAHGEENENFQRRTYWLLEEGFMNIVLVHYLEVKGKNNFSRVASKVSAVLKKLKRVQDYLMLIVLHAQTLSLVRASVSKEKFGATDNCRASSRYHPFVEMQQPVDGVMMNNMLGVSAPSAGYHGEMQTTTANSDNHFATHYDIAGVFNEAGAGLRGVSKTLHDSVRFAEPYPECSAEFMEPALYSSNATMESNNLDDNSRLETFMSEALYTNNLTQKEADALSAAGIMSSQAENNSYTDGIRYPLLKQSSLDLFKIEPDGLKKFDSFSRWMSSELPEVADLDIKSSSDAFWSSTETVNVADGTSIPINEQLDAFAVSPSLSQDQLFSIIDVSPSYACTGSRNKVLITGTFLANKEHVENCKWSCMFGDVEVPAEVLAHGSLRCYTPVHLSGRVPFYVTCSNRVACSEVREFEFRDSDARQMDTSDPQTTGINEMHLHIRLEKLLSLGPDDYEKYVMSDGKEKSEIINTISSLMLDDKCLNQAVPLDEKEVSTARDQNIEKLVKEKLYCWLVHKVHDEDKGPNVLGKEGQGVIHLVAALGYDWAVRPIITAGVKVNFRDARGWTALHWAASCGRERTVGALIANGAESGLLTDPTPQFPAGRTAADLASENGHKGIAGFLAESALTSHLSALTLKESKDGNVKEICGLGGAEDFAESSSAQLAYRDSQAESLKDSLSAVRKSTQAAARIFQAFRVESFHRKKVVEYGDDDCGLSDERTLSLVSIKNAKPGQNDGSHSAAVRIQNKFRGWKGRKEFMIIRQKIVKIQAHVRGHQVRKSYRRIVWSVGIVEKIILRWRRKRRGLRGFQPVKQLEGPSPIQQLEGPSQIQPAKEEEEDEYDYLKDGRKQAEGRLQRALARVKSMTQYPEAREQYSRIANRVTELQEPQAMMIQDDMQSDGAIADGGDFMAELEELCGDGDAPMPTIL

SEQ ID NO: 15954 - protein, 493 aa, Oryza sativa
  Clone ID: TF_OSC415309j.C1.p12.fg
MGLQQSKEELVYQQWIDKEGKTPLMVASMRPDLINVVQVLIELGANVNAYRPGSYCGTALHHAAKKGLEQTVHLLLSHGANPFITNDDCHTALDLAREKGHVNVVRAIEGRISLFCGWMRENYGPGFLEAFAPQFLTRKIWAVILPREARNQTRPLKLELTIYPELQASKPQAVIKLWKCQLEEPKFNQANPSVTIFDKGTRTRYKLLPVCEGDKQQLQWFYSACCGIPQVASMVPAQPANAPLPNPSSASSLPSVISTPSKEDAELAMAINASILSAIAEGVPDVQPITTTTATNDWGNPPSNSLNGWGPPDTSAPSKTSGQVPVVTSSSSTYNGWDVPGTSSGQSSSKHNKSQNSTFVVPQEALPSLPVPTAPPLAVGTFYDGPIQYPSIDSTPVDVTMPSADGGTAVSSAKPAENEGDAKPAESDANASNSGNTPPGTCVICLDAPVEGACIPCGHMAGCMSCLKDIESKKWGCPICRAKINQIIRLYAV

SEQ ID NO: 15955 - protein, 439 aa, Oryza sativa
  Clone ID: TF_OSC401914j.C1.p20.fg
MSKRRKKNERVELRFKAPDYATWKKEAAACDKANGNGKDGSITFMDERNISIAKTIANDIIIPDPAPEWMCYTFLDKYDQLEPIFIKDSARCFLRLFKNWKGYTMSWNLTITAQTLTCMVSFNSLRCAKVVLEGRAPELLGVHANPNCVTKYGYFPLHEAAERFSIEMIKLLLRHGASANVRTVGDDVIDGLLLLHIAIENTCLHKYLEDNLSPGQDHLDYIYKLFHLLCLPEMKIFLDTTRLLAGKTNNLLEELWNYIENGKLIQTAILLLAAQEQIRGGCSSKINGSRKKNGYDIMYKRILRLSFALRWGKVSNGMTQKLMKEKRALIDCMGLLVDAISHAGEPLSAYIQAHSEAPHVEVLEHVSTILKEYGFCPTEEVMDTINLQPYDCKMSETKSCSKGFTDANTAVAEMANLHAADKKALEAVEVKHEYKRFYS

SEQ ID NO: 15956 - protein, 630 aa, Oryza sativa
  Clone ID: TF_OSC29958j.C1.p2.fg
MDGSIPPKPPSCRQPQRETHNNSENTGATGNDQAQDEGFLLHVVAANGDGENYRKCATLLSGMDKTRLFARNSENKTALECAANAGYTNMVFHLLDMERKHNFCGLNTKPNEILKKTSGRSETPLHEAVRQRCERKIEELKGKDSGLARVPDINGMSPLYLAIPLGYRDIVDKLTLTFGDANLSYDGPNGQNVLHAAALQSAGRRGDLMNKADWSGSTPLHFAASVGVQGVTTALLDGIDQDRRTDYTQRPDNNGMFPIHIAASVGSMDTITSLVNADQDCATLRDNVKGRTLLHIAIENRKYKVVKLVCKDPRFKETLNLEDNDGNTALHLAVKKRDEYIFTYLLQNKAVELNHVNLEGYTPLDLAKVIRMEDYFASPQNPTEWMVRVLAHSGAVFSPRRRDELIRGGSSQEQEKHGKTLSESTESVLVASALIATLTFAAAFTMPGSYRTTGPKEGTPALGALYGFKVFLVADILAFFCSVAATFSLAEYGNRGTVDPLVRCRYSQRAVWLFHVALRSIIVAFAFGVSVVMWNISLSAISIGGVATIAVVFYGNVPLGQDFRLMLLMHRRFGFSRSWNLYPSTASHLNWTSWQLKSFSATLVWNLMNLFWTYVLIFALAGFAQLKQKH

SEQ ID NO: 15957 - protein, 298 aa, Oryza sativa
  Clone ID: TF_OSC18672j.C1.p1.fg
MTEMLLNWNKDLTEQVDKNRSTPLHFAASLCKDFAASLSEYTVITWMSRTPLIPVLLANPVQLYQQDSEGLYPIHVAASSGAIRTIKYLIEEQPDEIAGLVDFKGRTFLHVAVERGRRNIVEYAHRTRSLARIFNMQDNDGNTAMHIAVRNGNKYIFCILLRNRKNPEKLILLALTHCNASGGCRRADHFQKKQADEAKESEKLTTSTQTLGIGSVLIVTVTFGAILAIPGGYKADDHYNGGTPTLAGRYIFDAFTMANTIAFICSTLAIIHLMYSGMAMVCIWYWLQWLDGLQLQSV

SEQ ID NO: 15958 - protein, 387 aa, Oryza sativa
  Clone ID: TF_OSC900156j.C1.p1.fg
MTEMLLNWNKDLTEQVDKNRSTPLHFAASLCKDFAASLSEYTVITWMSRTPLIPVLLANPVQLYQQDSEGLYPIHVAASSGAIRTIKYLIEEQPDEIAGLVDFKGRTFLHVAVERGRRNIVEYAHRTRSLARIFNMQDNDGNTAMHIAVRNGNKYIFCILLRNRKNPEKLILLALTHCNASGGCRRADHFQKKQADEAKESEKLTTSTQTLGIGSVLIVTVTFGAILAIPGGYKADDHYNGGTPTLAGSSVISLGAAFMLGMYLVLAPVARWTAIAICVMMMIASLCLFTEPLHAPRVAIAMYVRKGNQDIQRTYIINCGTPNNMHGNYRQVILVDRILRALGPLTNSSGLPLFPQAVTTTATVTTRRSIAGRDDDGGDSAWICCRP

SEQ ID NO: 15959 - protein, 797 aa, Oryza sativa
  Clone ID: TF_OSC900138j.C1.p2.fg
MSRRRAAAVAAAAREEEEASPAQRLVEAALRGDVVTMEACLAAAAAAAAADDDTDDGVPAASRVGVARLRVRCAEVALREEAAGEVIVESRELKTDVSPLFAAAHAGHAEVVRTLLSGGGGKVAGVSSCKKVYCSVFEVAGADVNQKLFLGYATTAAAREGNIHILEMLLQAGVTREACEDSLSEAALFAEAEAVRLLVCSEMIQPEAAAHALVTASSRGFDDVVVILLQNGVDVNSMARVLLRSVKPALHANVNCTPLVAAVMSRQISTVKLLIEEGSYLDCLVQVGSWCWDSATGEELRVGACLGEKYNAIWCAVEYYECSGEILKLLLDKAPWLLETPRKGRNLLCHAILCQNPNAVSVLLNAGANPRFPIMMTNGTHVSYPIHFAARLGHAPVLKQLMLDGANINAQTSTGDTPLMVSARCGHSDCFLELIKSGADLGIVNNAGDTAIMLAKKSSFSSTIIDILSRALSCGGCITSSDITVFSPLHFFAASDSAEALLMTLHYSAADLNRPDGSGLTPVMVAAESGHADIFRLLVMAGADIAATSAEGKSAMSIIRSRAPETRDRFEQILLQASLADAIAGQQPSFRPLHYAARIGDTSSLTQLLKMGHDPNAMDEDGYTPLMHAAAAGKLEACRALVSRGGAADAGSETALSVARRSGRSNKATEEWLLDHVARAHVLAGEELTKHTRGGRGPPHRKAVRMMRSGVLTWGATRRRNVACREARAGPSAAFRRNRRIIRTGSEEQLILMVETVTGREIHFEATSASSVELWVRGINLIVQDCAWSRPDEAEQA

SEQ ID NO: 15960 - protein, 792 aa, Oryza sativa
  Clone ID: TF_OSC900205j.C1.p26.fg
MSRRRAAAVAAAAREEEEASPAQRLVEAALRGDVVTMEACLAAAAAAAAADDDTDDGVPAASRVGVARLRVRCAEVALREEAAGEVIVESRELKTDVSPLFAAAHAGHAEVVRTLLSGGGGKVAGVSSCKKVYCSVFEVAGADVNQKLFLGYATTAAAREGNIHILEMLLQAGVTREACEDSLSEAALFAEAEAVRLLVCSEMIQPEAAAHALVTASSRGFDDVVVILLQNGVDVNSMARVLLRSVKPALHANVNCTPLVAAVMSRQISTVKLLIEEGSYLDCLVQVGSWCWDSATGEELRVGACLGEKYNAIWCAVEYYECSGEILKLLLDKAPWLLETPRKGRNLLCHAILCQNPNAVSVLLNAGANPRFPIMMTNGTHVSYPIHFAARLGHAPVLKQLMLDGANINAQTSTGDTPLMVSARCGHSDCFLELIKSGADLGIVNNAGDTAIMLAKKSSFSSTIIDILSRALSCGGCITSSDITVFSPLHFFAASDSAEALLMTLHYSAADLNRPDGSGLTPVMVAAESGHADIFRLLVMAGADIAATSAEGKSAMSIIRSRAPETRDRFEQILLQASLADAIAGQQPSFRPLHYAARIGDTSSLTQLLKMGHDPNAMDEDGYTPLMHAAAAGKLEACRALVSRGGAADAGSETALSVARRSGRSNKATEEWLLDHVARAPRARRGGADEAHARGPGSAAPQGGADDAVRRADVGGDPPEERGLQGGPGGAQRGVQEEQEDHQDGQRGAADPNGGDGDREGDPLRGHLRVQRRAMGQRHQSHRARLRVVKAG

SEQ ID NO: 15961 - protein, 182 aa, Oryza sativa
  Clone ID: TF_OSC26895j.C1.p1.gm
GVQGVTTALLDGIDQDRRTDYTQRPDNNGMFPIHIAASVGSMDTITSLVNADQDCATLRDNVKGRTLLHIAIENRKYKVVKLVCKDPRFKETLNLEDNDGNTALHLAVKKRDEYIFTYLLQNKAVELNHVNLEGYTPLDLAKVIRMEDYFASPQNPTEWMVRVLAHSGAVFSPRRRDELIRG

SEQ ID NO: 15962 - protein, 202 aa, Oryza sativa
  unsure (1)..(202): unsure at all Xaa locations
  Clone ID: TF_OSC418633j.C1.p14.gp
LENAGSHLCTAVARGDTDFVRRALAYGGDPNARDYDHRAPLHIAAAEGLYLMAKLLVDAGASVFATDRWGTTPLDEGRRCGSRTMVQLLEAAKSGELSRYPERGEEVRDKMHPRRCSGVXPHPWDGGERRREGVVVWIPHTIEGLVSSAQEKLGLAGSGEGLRLLGEDGARVLDVDMVHDGQKLYLVVGGGGDDGGTEARQX

SEQ ID NO: 15963 - protein, 417 aa, Oryza sativa
  Clone ID: TF_OSC401428j.C1.p1.fg
MRHIDIYTLCLDRFLYPRKTRGDSLTLTGMLMDADESSAYQPDDKGSFPIHVAAAEGNDGTINILLNKSPNCATLRNAQGRTFLHIAVENGRHTIIMFVRRRRRLAAKIMNLQDNDGNTALHLAIQDGDLHAVLCLLMNPVVKVDCLNKEGLTPLDISRKLIPEGLLHGSHQRIWIKRSLHLANAHHANPSLDHRQEKCICRTVREERDSKIVEKDDDEQEDSKTITESTQVMAVCSTLIATVAFAAAFTLPGGYRADDHTNGGTPTFVGSYGFDAFVLAITFAFVYSLLATFSLVYSGMTKVDYSIRLEHLNSANSLVWLSIRCLLAAFALGLYVVLAPVAHKTALLICLMCSVGLLHGHTSMKTQIRMAVLLQGRIGFKVWWILGRKILRNFLHSFWPFLIIFGWAAYLKWRHQQ

SEQ ID NO: 15964 - protein, 390 aa, Oryza sativa
  Clone ID: TF_OSC900359j.C1.p1.fg
MRHIDIYTLCLDRFLYPRKTRGDSLTLTGMLMDADESSAYQPDDKGSFPIHVAAAEGNDGTINILLNKSPNCATLRNAQGRTFLHIAVENGRHTIIMFVRRRRRLAAKIMNLQDNDGNTALHLAIQDGDLHAVLCLLMNPVVKVDCLNKEGLTPLDISRKLIPEGLLHGSKCICRTVREERDSKIVEKDDDEQEDSKTITESTQVMAVCSTLIATVAFAAAFTLPGGYRADDHTNGGTPTFVGSYGFDAFVLAITFAFVYSLLATFSLVYSGMTKVDYSIRLEHLNSANSLVWLSIRCLLAAFALGLYVVLAPVAHKTALLICLMCSVGLLHGHTSMKTQIRMAVLLQGRIGFKVWWILGRKILRNFLHSFWPFLIIFGWPAYLKWRHQQ

SEQ ID NO: 15965 - protein, 1238 aa, Oryza sativa
  Clone ID: TF_OSC401095j.C1.p7.fg
MAQEYQTMPSSAHDKRYSGLSNGGDKEQLPSQGVCVTLSCLTVGKSEVPLTTRFDGNAMQVDGLLKNVSPTTKIVVKPNEELKSPFLVKRHLFLKRPDPIILDELYSLTTKVTDEESRQSVWVSGNLPINLKLVDIQETIKPEGVMGINCMDLAVRIMSRQDAEIFKNTKCLGWRHYVDSNWKQYINDPNNLRNEYSRLSTMYDPSGSHLVLIPVSSDGHWTLYAFNMHDKKLCILDSRRDTSEGGDQDPVKRHEKIRKEVCHALNETMDVDFNFLSWKHEFPKVPRQQNSCDCGFFVFNFMRLWDGHRLIRWFSTETKELRKNFLAYILSSLDDHSVLPTNVSELIKKLPGETMMNVELLEAARAGNANAFCELVIDPARSINHEPFRSASCSCLLFRSTSSGSYCLCFECTSSRNSDQEKSPNKHNALTRSDAPSTFTRDTRDMLHAIQGVTVEGDGVLHIAASFGVLEPVKTVLEAQNGAFATALLQAENNKGDRPLHCAATTGSIVTVKLIVDEAEKIMRAQSDTFAWFLRAKNLDGQTCLHEAVRHGHEDVVKYLVSKDADLGDVPLPLVQIVDNEGTSPLYLATTLRRDSIVKVLTEAAPSGMPRAASYSGPAGKTALHAAVLFSEELSRTLVNWNHSLIKIRDESGSTPLHYLADGKYTTEPSCISVTELLLKKDPSSGYCEDSEGSLPIHIAAANGTLGIIDQLIKLCPGCESSCNASGQTILHIAVQTESHDVVRFVCSNEMFKMVLNMKDYDGNTALHLAVQKGHNKTFGILMGCKNVSLSIRNRNGYTPLDHAVLNKTSGLTYATYWPGHQRWVCNSLLAAGADFGTFRADHLSSKIPEQAKADREAFSDTLSKSAAVMATCAALLFNAALNIFLNVQAIYHNNNTSTNNNNATQGSDQLKQIQKVKKLSGDSLSISACAILLFAIAGFPILPGVIGRTFALILGLGVLIGSSMISLQALAARLDLAKVYGTGIGAFCVIFSLLCVTLCTNLLRKIVQHARPLWDRCGARGFFRSILNVRRAQNYSAIPLLQVVNLKTVEEITEWELRGGKGNGSTRIWRDEPFFFLNGEVEGKRMYTNGLMGGEQWGSSRLMGFLGPNAVLLRGINAEVFVVGLYRLARLDLAKVYGTGIGAFCVIFSLLCVTLCTNLLRKIVQHARPLWARCGAHGFFCSILNVRRAQNYSAIPLLQVVISVPRNGCFVLLCADGLRSALVNGEDRDYAQRGVEV

SEQ ID NO: 15966 - protein, 296 aa, Oryza sativa
  unsure (1)..(296): unsure at all Xaa locations
  Clone ID: TF_OSC3151j.C1.p3.np
AAQXPIIPSGRPGKPRVYSRQVFPLLWPILEKDSLTRFNRLCQGWSRLMGLRGFIYPEILSSIVANNALRCARVALQGSSPLRGRRADPNGLHPYGYTALHLAAETFSVEMVKLLLRHGASANHRTEGDYVIEGLLPLHVAVENASMHKYLEDNWADPLSNLISLLCLPEMKMYLDTTRLIAQHTHNIVDELWDYIDKKKFVQLAILLLASQKQLRKANLNGFESIRRRTYEAISGLHLQMKGKNGSALKKLKEKKEALLTADALVGIIDKAGQDLEDYIQTNSEVVLIPPFVILM

SEQ ID NO: 15967 - protein, 375 aa, Oryza sativa
  Clone ID: TF_OSC3151j.C1.p6.fg
METPSAPAPGDGNSAPASSRVTFEDMLRSCDQSYYQMLGFPDAASYFEAKERNLLAQYSRQVFPLLWPILEKDSLTRFNRLCQGWSRLMGLRGFIYPEILSSIVANNALRCARVALQGSSPLRGRRADPNGLHPYGYTALHLAAETFSVEMVKLLLRHGASANHRTEGDYVIEGLLPLHVAVENASMHKYLEDNWADGHSPNNLISLLCLPEMKMYLDTTRLIAQHTHNIVDELWDYIDKKKFVQLAILLLASQKQLHGPINRSRGKANLNGFESIRRRTYEAISGLHLQMIAMVNEGKNGSALKKLKEKKEALLTADALVGIIDKAGQDLEDYIQTNSEPTVCTNMYRQKSQWILDRSDSVLQNRGKNEIIPTI

SEQ ID NO: 15968 - protein, 308 aa, Oryza sativa
  Clone ID: TF_OSC414138j.C1.p10.fg
MAMETPPPFQESAHCDVCRCTFTTFRRRHHCRNCGRTLCHEHSSYHMALPQYGIYTDVRVCYDCFNKSSSRGGVGNAGSPGSVSSAADSFSGLNLGEDDASSPMKNSAFHSAPAVIECKCGMPLCICEAPKPEPVPVKFCVPPPNEHMQQSISTTSSSAQSNPRPKKSSTNQQSAESSVKKASATSSSNSSSFLNLGLMSNDTNDKGPSEYDVTGEGLREAIKSGDIKAVKKLLSQGVDSNYCDKQGFALLHLAALFNQTEIALILMDNGANIQSKNGQGETPLDCAPAMLQYKMRQRMEELAASQRP

SEQ ID NO: 15969 - protein, 191 aa, Oryza sativa
  Clone ID: TF_OSC100669j.C1.p3.fg
MTTQQASGADAESGMDLDGVTTEGNTALHVVATCGDGPGYLRSAGVIYSRSQHLMLVQNNNGDTPLHCAVRAGHSKMVDHLIDLVETKDNSPSSARLEELLRKENCRKETAFHDAVCIGNKDIITNLLKYYSELAGFLMDATGTSPLYLAVLHQQVDIAKLLHQMTDGNLSYSGPNRQNALHAAVLQDQGV

SEQ ID NO: 15970 - protein, 234 aa, Oryza sativa
  Clone ID: TF_OSC28292j.C1.p6.fg
MDPKLLRAAGRGDCAVLEALLLGAAAAAAATPNQQVAIDVGSGQQSPLLLDAATTPQGDSALHVVAASGDGEGSLRCARTIYSHAARLLDRPNARGDTTLHCAARAGNAAMVRCLLDMAREEELAGSAGRVAEVMERQNGRRETALHDAVRLGDKQLVDHLISVHPRLARLPGGDGMSPLYLAVSLGHDHIAEALHQQGDELSYAGPAGQTALHAAVLRGAEFSFIYAIHVTQE

SEQ ID NO: 15971 - protein, 473 aa, Oryza sativa
  Clone ID: TF_OSC28292j.C1.p4.fg
MTEKMLQWNDGLSGEADASGSTALHFAASAEGPEIELEKSSLLRRLALRWPCSRNGRRRRRTSTQVLLKADPSLACRPDSNGEYPIHVAASMGNLKLVALLLHRCPECAGLRDARGRTFLHVAVDRGREEIVGFATDDRRRRDGSQLATPILNAQDDDGNTALHLAVASGVLNVFCYLLRNRRVCLDLANNDGLTPADLSRCTIPAGLNYKTNARTWILWSLVVAKALSGNIRRDHFQQQYVPKLDEIAESKKMTESTQILGVGSVLVATVAFAAAFSPPGGYAAGDGNNNNGRGNVVVVAGSPALSGRYAFDAFMYAVTVAFTCSMLATFSLIYAGTAAVDWKIRHRYFKHSLSWMRKSTRSLLVAFALGVYLVLAPVSRATAVGVCVFTTGTLLFRNREVVRMLICAYVLQRRMGITVLAKIGVPITVDLVKSNLVYLVIFGGPLCTPLCVLFFVWRLAPVIMRYVHRKLI

SEQ ID NO: 15972 - protein, 329 aa, Oryza sativa
  Clone ID: TF_OSC401769j.C1.p15.fg
MEDQKKNAKPEGSSGSQRGAPPAPDAGLPNPFDFSQFSNLLNDPSIKEMAEQIASDPVFTQMAEQLQKSAHVTGEQGGPALDPQQYMETMTQVMQNPQFMSMAERLGNTLMQDPGMSSMLESLTSPSHKELLEERMSRIKEDPSLKGILDEIESGGPSAMVKYWNDPEVLQKIGQAMSINFPGDAATSTTLSGPEETEEDGGDDDESIVHHTASVGDAEGLKKALEDGADMDEEDAEGRRALHFACGYGELKCAEILLEAGAAVNALDKNKNTPLHYAAGYGRKECVDLLLKHGAAVTPQNLDGKTPIEVAKLNNQDEVLKVLEMDAFL

SEQ ID NO: 15973 - protein, 174 aa, Oryza sativa
  Clone ID: TF_OSC400284j.C1.p44.fg
MGGDAAASVVNGKDEEGWAPIHTAASSGKAEIISILLDQGANVDLTTDAGRTALHYAASKGRLNIAETLIAHSANVNKKDKFGCTPLHRAASTGNAELCEFLIEEGADVDAVDKTGQTPLMHAVISEDKAVALLLVRHGADVAIEDKEGYTVLGRASDSFRPALIDAAKAMLEG

SEQ ID NO: 15974 - protein, 416 aa, Oryza sativa
  Clone ID: TF_OSC34032j.C1.p41.fg
MGNSLGCVGLGERLAAAAKDGDAAEAQRLLAANPGLARCTTFGNLNSPLHVAAAKGHHEIIYCNNMLNDQITDEIAALLLENGADVNARNIYGQVWRVENLSGRTALHMAAAGGHVKCVRLLVADAAGDRDGYVNKAANGGVTALHLAALHGHVECVHLLIDERASLAAQTLPCAAPPMASIGAGSTPLHYAACGGEVKCCQILVSRGADRTAINCNGIVVVRWLPIDAARIWGCNWLEHVLSPKSHLPIPKFPPSGYLSQPLPSLIAIAREQGLNLSSEVSDGFDEGADACAVCLERPCTVAAEGCDHELCVKCAMDLCSVIKSYDSAGIAGEIPCPLCRTGIASFRTTAAPPPPSLAGSPARRSRRNNSGGGGGEHEASNSGGSEKGYGSIDPDAGAVVPLYYAPPFAPSAILT

SEQ ID NO: 15975 - protein, 792 aa, Oryza sativa
  Clone ID: TF_OSC9742j.C1.p4.gm
MDFGPCNETLDTELLHVLTSGDEVRMADLLGRERRGHGHSLSQVAIRVDDDDDGRAPAGASRLLGVTTGNGNTALHVAATRGHAALAALVCATAPALAATRNRFLDTPLHCAAKSGHRDVAACLLSEMLRAGGAASAALPLRRATNCLGATALHEAVRNGHAGVVALLMAEAPELASVANDGGVSPLYLAATVGSVDIVRALLHPLPDGTPSPASAAGPDGRTALHSAATTSKEPSLALVCDIQGSFPLHVAAVMGSVRIVVELIQKCPNNYNDLVDDRGRNFLHCAVEHNKESIVRYICRDDRFGILMNAMDNEGNTPLHLAAEYGHPRMVSLLLETMSVDVAITNRDGLTAADLAYRHLQPGLHYFLNPRAVVKNLFYCTRAPVTLEGDHARTGIPSAMEDADAPKDSGGVTSTGTVASVLIATVTFAAALTVPGGYVADDHPNAGTAASAGRFAFRAFAVSDTMAFLCSIVGTCLLVVGEAREVRPSRGRLRAYQGSAWALVTAGAQFMVAAFAFGLQVALGGGADSRWLVVFVHALCSASVLLCFPGIWAPFCLGKACVDLEPATRAWRSPKCAAASARKEACHAGTRRSYNWRFSFFQRFRSASTWLALGLLGHGRRPPLPALILAIGATAGSLPPYQRLPVANASLPQLPSPAQRQLHGGSLVGGRATAKVSKLSRGSTEEWRKVTSEARKLSKHNVFCWACLVDDKAVPWLLCFLSSTTAAIQDNAVASLLNLLKHPAGQMTIMEVGGVGLVVDVINVVAKAVAQHNVAAILFYLSSNNPDASRR

SEQ ID NO: 15976 - protein, 785 aa, Oryza sativa
  Clone ID: TF_OSC400283j.C1.p61.gm
MAVLLRPAAAIAGGRQVWPVAEDHHRQLRDEAEAEAASQRLVEAVARGDAREAGELLASGRADVNYAGVVWLKARRVAEAALRDGAAAELRAAHEEIRADVSPLFLAAGNGDAALVRALLADELARATAMRASAKGADVNGKVFRGYPATAAAREGRAEVAALLVRAGASQPACEEAVVEAALQGQAALAVIFMGSDLVRPRVAVHALVSAAARGFVDVVDSLIKCGADPNATSRVLLRSLKPSLHANVDCTALFAAIVSRQIAVVRQLLQAGVKRDTKVRLGAWSWDTATGEELRVGAGLADPYDAVWCAVEYYESTGAILRMLLQNGYSSGATHLGRNLLHHAVLCGSAGAVQTLLASGVDHEVAVKTSRSSRSRPVHMAARLGQPEILEMLIGKGCDVNARAEGGDVAAILAARHKREDCLRILVSAGADVALLNSAGESAASVACSGGWKAGFERAVLGVIRSGTIPRSSDRNVFSPMMFTARCGDAAAMEVLLAQPDVDVDEQDVDGCSPIMAAAKEGNVDAFRALVFAGANVKLSNKRGETAIGLAQQSKKRDLFEQVMLEFALEKGMPGGFYALHCASRRGDTAAVRHLASAGCDVNIPDGDGYTPLMLAAREGHAAVCELLISYGARCDTRTPRGETALSLARATAAFNKAEDVIMDELGRQLVLGGAHVKKHTKCGRGKPHGKSLRMVAAAGVLRWGGSGRRNVVCREAELGGSSAFQLHRQRRGCDAYEPGLFRVATATGREVHFVCQGGEEEAELWVRGIRAVTRAVYGKRGKE

SEQ ID NO: 15977 - protein, 695 aa, Oryza sativa
  Clone ID: TF_OSC900133j.C1.p13.fg
MDSKKTTTQSEPNDGVQAPHRPELLMAARHGDRDRLKRLLGTVSPPVALPVGEVVLHVEDVETVGVGVDDDDDAEPTAAVVTSAEAVTVALDSVLHVVASSGDEPAFLESATAVHARASHLLDAGNGKGDTPLHCAARAGMVRMVSHLLDLARRGGGGGVAGDAAARAFARRRNSKGETALHEAVRLGSKAMVEALMSADPELARVVAADGGSPLYLAVSLGRRDDIARLLHEHDRGLSYAGPDGNNALHAAVQKGKERYEFNDLSISETTKMILGWNKDLIKQADRHRGSTPLHVAASWGHHDVISLLLDADPSAAYQPDHDGAFPIHVAAYDGQVRAVSILLGLDNHRKCAGLCSGERRRRDLRGCAELRDGRGRSFLHVAVEEQRQSVVAYACKLGNLSPAVMNMQDDDGNTALHLAVKAGNMWIFNPLMERRQVELNLTNNKGETPLDISWIEKPVGVYFGLNQRVKIYKLLKDANAKQGNHRWDLFLKKHNKKVDEEVEGKKLTESTQTIGVGSVLIATVAFAAAFAPPGDYGDDGAPRLAGRYAFDVFIIANTLAFICAGLSVISLTYAGVAAVDMRTRMISFVFSASFMACSARSLGVAFAFGMYVVLAPVARTTAIAACVITGLALADVAWFVFVVAAGEVMLLKRLGIARAWWRLPFAIMATLLMQFWPYIVIVVVVLYSKIRGVH

SEQ ID NO: 15978 - protein, 943 aa, Oryza sativa
  Clone ID: TF_OSC400795j.C1.p4.fg
MARWGAARMAACGPWGRNRRVGAGDAFEASEVRRDGRSRMMPACGPWGAGHGGGDPALERELSRDGSHYSISSAILPSLGARSNRRIKLRRFIISPYDRRYRIWETFLIVLVVYSAWVSPFEFGFIPKPTGALATADNVVNAFFAVDIILTFFVAYLDKMSYMLEDDPKKIAWRYSTTWLVLDVASTIPSEFARRILPSKLRSYGFFNMLRLWRLRRVSSLFSRLEKDRHFNYFWVRCAKLICVTLFAVHCAACFYYLLADRYPVPTSTWIGNYMADFHERSLWIRYVTSVYWSITTLTTVGYGDLHAENTREMIFNIFYMLFNLGLTAYLIGNMTNLVVHGTSRTRNYRDTIQAATSFGVRNQLPPRLQDQMISHISLKYRTDSEGLQQQEILDSLPKAIKSSISQYLFFHLVQNVYLFQGVSNDLIFQLLRTVTEYAYLVLLLDFVFEVSEMKAEYFPPREDVILQNEAPTDFYILVSGSVVIQVATSGEVVGEIGVLCYRPQLFTVRTRSLCQLLRLNRTAFLSIVQSNVGDGTIIMNNLIQFLKEQKENSVMAGVVKEIESMLARGNLDLPITLCFAVTRGDDFLLHQLLKRGMDPNESDNDGHTALHIAASKGNEQCVRLLLEYGADPNARDSEGKVPLWEALCEKHAAVVQLLVEGGADLSSGDTGLYACIAVEESDTELLNDIIHYGGDVNRARRDGTTALHRAVCDGNVQMAELLLEHGADIDKQDGNGWTPRALAEQQGHDDIQLLFRSRKAATASGHHHVPSSTTTRVAPAAAAASLIGRFNSEPMMKNMIHEDADLPSRVLPEKLRRKRVTFQNSLFGVISSSQAQRETDHPLSRGGLAATGSPNPSSGSRNAVIRVTISCPEKGNTAGKLVLLPQTLDMLLELGAKKFDFAPTKVLTVEGAEVDEVELIRDGDHLVLVSNEWDAEKMKGKS

SEQ ID NO: 15979 - protein, 777 aa, Oryza sativa
  Clone ID: TF_OSC4903j.C1.p2.fg
MSRRRAAAVAAAAREEEEASPAQRLVEAALRGDVVTMEACLAAAAAAAAADDDTDDGVPAASRVGVARLRVRCAEVALREEAAGEVIVESRELKTDVSPLFAAAHAGHAEVVRTLLSGGGGKVAGVSSCKKVYCSVFEVAGADVNQKLFLGYATTAAAREGNIHILEMLLQAGVTREACEDSLSEAALFAEAEAVRLLVCSEMIQPEAAAHALVTASSRGFDDVVVILLQNGVDVNSMARVLLRSVKPALHANVNCTPLVAAVMSRQISTVKLLIEEGSYLDCLVQVGSWCWDSATGEELRVGACLGEKYNAIWCAVEYYECSGEILKLLLDKAPWLLETPRKGRNLLCHAILCQNPNAVSVLLNAGANPRFPIMMTNGTHVSYPIHFAARLGHAPVLKQLMLDGANINAQTSTGDTPLMVSARCGHSDCFLELIKSGADLGIVNNAGDTAIMLAKKSSFSSTIIDILSRALSCGGCITSSDITVFSPLHFFAASDSAEALLMTLHYSAADLNRPDGSGLTPVMISLPRVPKGNPRCRSSEAELLNQDRFEQILLQASLADAIAGQQPSFRPLHYAARIGDTSSLTQLLKMGHDPNAMDEDGYTPLMHAAAAGKLEACRALVSRGGAADAGSETALSVARRSGRSNKATEEWLLDHVARAHVLAGEELTKHTRGGRGPPHRKAVRMMRSGVLTWGATRRRNVACREARAGPSAAFRRNRRIIRTGSEEQLILMVETVTGREIHFEATSASSVELWVRGINLIVQDCAWSRPDEAEQA

SEQ ID NO: 15980 - protein, 401 aa, Oryza sativa
  Clone ID: TF_OSC406054j.C1.p11.fg
MRQQEGGDHRHVAADDELLARLSSQRDNDNGSTPLHLAASINGLPSALYIPICSPRVLAPLRRPKPVELLLKANEFAAYQPDNQGMYPIHAAASAGSLETVKILLEKHPDCATLRDARGRTFLHAAVEKKRFGVVKYVCHWKRKESMMPLKCYYAWDLRVHIRTLLLKLGAPYGESQSHIFNKKRHAIIVDPKFKGGEEKMLENVTAATQVLALFSVLITTVTFASVFTLPGGYRSAGDGGSAAGTPLLAGRGCYAFDAFILSDALAFVCYFMATSVLLYAGVPAYKLEVRLRHINFAYSLMMNSGRSLAAAVALGLYVVLLPPVGRTIAIAIAAAMVMLALLLSKASEGIESLFGIAIARNRKLSIRDSVVGFTIYVGERYWSFILIFGLPAIRKWARAG

SEQ ID NO: 15981 - protein, 467 aa, Oryza sativa
  Clone ID: TF_OSC406019j.C1.p1.gm
MLCSASEQAQLLLNDNLRRVLLRIPPLLMLQLEALLLNLMRVMMWIPPLLLLTYQITALLMEKKKKVKPLMALLIHNLKPSTALIMQKIKPSTTFQLHKLLSTKKLEELKIFTVIRMKIRKELKAKLEPSTPNFITTPWHFVRNRVAIARREQYESRIDAVTAEGNTVLHIAASRGHAHAPGPDGTSQQEDLITVLYKARWHLLSSLNSEGETPLHRAARAGHVHAVQRIIAGVKENLEKLAENQLMDIIATRNCAGENALHLAAMHGDAQVVTTLLKYARDARLSSVLTEANNASALYLAVMSTSWPPSKHYSLTNAMIRQLKVQKGRMLYMLPQFSRIEDSEGSTALHIAALMGHVNVVRLLIKASPDSADIRDKQGRTFLHIACADEGWQRPTVRYVVKNPMLHDLLNSQDKEGNTPLHLAANHGKFVDVYALISSGKVHPDIMNAEGETAFDIAKNTVSFFFM

SEQ ID NO: 15982 - protein, 732 aa, Oryza sativa
  Clone ID: TF_OSC400867j.C1.p7.fg
MLFAKLDDSPMLRTQIQSLEESAEILRERCLKFHKGCRKYTEGLGEAYDGDIAFASSLETFGGGHNDPISVAFGGPVMTKFTIALRELGTYKEVLRSQVEHMLNDRLLNFVDIDLHDVKDARKRFDKASLLYDQVRDKYLSLKKGTRADITTAIEDGYDLLHQMEPYINQVLAYAQQSRERANKEQASLVERMHEYKKQIDREIRLSNGLTDAHNGDGIQTIARSSHKMIEAVMQSASKGKVQTIRQGYLSKRSSNLRADWKRRFFVLDSRGMLYYYRKQINRTPGGCSSHPRSIGNPTEHGSGLLSRLFSSHYHGIIHDEKSVARHTVNLLTSTIKVDAEQSDLRFCFRIISPTKVYTLQAESAIDQMDWIEKITGVIASLLSSQSPEQCFLLSPKSCGHDGSASESSSFTSQDLEPSMYDDLTLEKNTGNGQHDVRGTHYHKTNMKPEKPIDLLRKVDGNIICVDCGSMEPDWASLNLGALLCIECSGVHRNLGVHISKLISTTLFRSAHGLDTAWHFTVSKPKHSDPFSAKEKFIHAKYADKEFVRKYSMDEIQLAQQMWDNVTANDKRAVYSLIVQSRANVNLVYGEMSYSSRSTTGRSSQQEHSSSPSDGSPVFFDCHSHEKVSPREPLSPASTSSRVDDGEERCEDVGMVELLLQYGANVNAIDSRGRTPLHQCILKGRHIHAKLLLSRGANPQVADQDGRTALQCAIDGGTSDDEILVLLEDYTR

SEQ ID NO: 15983 - protein, 415 aa, Oryza sativa
  Clone ID: TF_OSC401493j.C1.p1.fg
MCDKKLSILDSLPDASEGGQDSLKRHEEIRKIVCGALNKTMDVAFCFFSWEYEFPKVPRQQNSYDGGFFVFNFMRLWDGHRLIRWFSTETMDMRKSFLACILSSKNNDATMPTNVSELIKTLPGEAMMTPELVQATRQGNTNAFRELRCPARREGSYGGHTSISINRAACCSCVFFESTSSRRSCFRLDCKSSCRSDEQENQIMRSPLRLDATSTVTSDRGPPEPYSIRGVTVDGDGVLHIAASFCHFELAKSILEGQEDKALIVMLLQQENKRGDRPLHCAAATESKEMVQLIVERAKCITEPSNFTTNLLRARNLEGQTCLHKAILLGHTEIVKYLVSQDEGLAQIVDNEDISPLYLAIALRRGDIVQELTIKASCGPAGAVSYCGPAGKTVLHAAVLFSEGTDAISSFVVKF

SEQ ID NO: 15984 - protein, 292 aa, Oryza sativa
  Clone ID: TF_OSC900166j.C1.p2.fg
MAGMTPLACAVSKGKAIAVRYFLDKGADPNKQDNIGFTPLHYATKEGYDGLARLLLSKGASVDVISSKGTALHLAASSWKSGIMKILLEHNADPNKVSADSETPLAATLIASDGLNEPAVLKCIKLLVKAGANLNRAIPDTPLVIATNKDFVECVEYLLEAGANANIPTNNGGKTPIEIAAKSGRRKLVEILFPCTLPIKGVSNWTVEGIITHVKSKKSKKKACAQDKESGTDKKAQLKSLGASAVQGKDYVGASKFYSEMRVRGVATGISLVRLNMEEDEKVPGSSNTSYI

SEQ ID NO: 15985 - protein, 486 aa, Oryza sativa
  Clone ID: TF_OSC400090j.C1.p61.fg
MVILDRYCEAVEYLVKNLDHSMPMQTTDKTDAVKSMLSGENSEGSDGSKSSDTVEWDPWDPPHPPCPTLPPTASLMSQVEMVKQHHFQVLAVLAASRATNIIAPDRTPQEVRRKFAEICSELADILEKDSVRRFLNLYRRNMRIMGWGLVITSQTMDFIVSFNALRCAKVVLEGKAPKLCQIRANPNYMTSYGYFPLHKAAEKFSVDMIKLLLCYGASANLRTSGQKVIEGLLPLHVAIENTCMHKYLEDNLLTDRKLKQVDLDFIYKLIHLLCLPEMKIFLDTTRLLADNTDNIVDELWNYIKEGRLVHAAILLLAAQRKIRTCASSNRNISCNLNGFDIIRDRVMGSIVSIEREGRGLTSGKNSKAHKQLEEKRKFFHNSLMLIFVISKTGEALDEYIQSHSEVSHQEVLEGVSSILDDHGFAPTGKGISIGDLECRPYDCNASNSVPKCNYEDSGTTKAVGESPNLNVKAKKSAPVVMLYGFG

SEQ ID NO: 15986 - protein, 749 aa, Oryza sativa
  Clone ID: TF_OSC402265j.C1.p11.fg
MEKPASCCCYFPLRWESTGDQWWYASPIDWAAADGHYDIVRQLLHLDPNLLIKLTSLRRIRRLEALWDDDARFAGAAGHRAGVARSLLLECECSKNGGAAAAAENTLLRAGYGGWLLYSAASAGDMAFVQELMERDPLLVFGEGEYGVTDMFYAAARGGNAEVFRLLLDHAMSPRCSTNCPNGGEGARGGGGGRSSVFRLEMMSRAVHAAARGGSVEMLRELIERRSDVSEYLDFRGSTVLHAAAGRGQLEVRHLLLGHCLLHYFCKMHHSELLFVPICMDDKVVKYLMATFDIVDSTDNQGNTALHVAAYRGHLPVVEALVAASPSTISAVNRAGDTFLHSAIAGFRTPGFRRLDRQMELMRHLIRGRTSNIQKIINLKNDAGLTVLHMAVVGCVHPDLVELLMTTPSIDLNAEDANGMTPLALLKQQLRSSTSDKLIRQIVSAGGVLNSTVLRTRSAIVSQIKMQGGIASSPGTTFKISDAEIFLYSGIGTAESRRPSSCSSNGKCDHAHHGDAKCGNAENHGSSEKRLSSASRAKDRLKLMLKWPRQKMSRGHKKSDDGDAMDSIKKLSEQAVETPAPLRQTFTKTTALNNKRTLAVKTSTPSSATKKKLNSKLIHGIMEAMPHLASSSPASAFPRSSTPPPPQSGKMKGVCLELDDENSMTTPVFGKLKDIVLNNDDDDDAMGEPSSSGSSVNDDASAEMPARRHGCGNGRLINICFGAQGLTVEDSASGQQTSKMFKQQCLRVS

SEQ ID NO: 15987 - protein, 572 aa, Oryza sativa
  Clone ID: TF_OSC407936j.C1.p23.fg
MADATAALSELAAALDEEGKGVAAVAAAVKDANKRTALHFAAREGRTHVCHFLISDLALPVDPKDDDGNLDLMKLFLSKGVDVESESDAGTPLIWAAGHGQQEAVKLLLQHDAKASLCLALNHLSISRSCGLSLTFLLKLVIAWQPNTENDDGITPLLSAVAAGSLPCLDILIQAGAHPNIRAGGATPLHIAADGGNMEIINCLLKAGSDPNACDDDGLKPIQVAALRNNREVVELLLPLTSPIPGVSSWSIDGIIEYTKSVEEKAQVKEATTQKADRLQVPQLVEVSSEAKERSLEAKSRGDDAFRNKDYLVAVDAYTQAIELNPNDATLHSNRSLCWLRAGQAERALEDARACRALRPDWAKACYREGAALRLLQRFEEAANAFYEGVQLEPENGELISTKLIDQLARDDEKIKKKTRKPKPKKTVKQHQQEPQDNSRELPASEPKAPPGWPLQPPMYLPVTPAPPPPPPAFSELEAIRAVLEESEKVQEKLDKQHAGMRDELIKKSKDLRDKEFKLPYQNPTPCTEERSNCRQCYVSNAQDPLKCAEAVKRFEACVRLARQRGNTKVAQ

SEQ ID NO: 15988 - protein, 443 aa, Oryza sativa
  Clone ID: TF_OSC409221j.C1.p5.fg
MAEELPFPANIEVMRHTPRFKLMQAAFHGDLRGLKRQAKILDMGRGRLRKAVEDVRVEGVPGEEGTGVLHMAASHGHMEMCKYLVETLQVDVDDADDKENFKIDSLVSCFFNKRFWPNAQTHKGGLARQSTPGRTSLLKAVHSGHRGIAKYLLNHDANPDLAMCCGLTPLHSAAGLGDCESVKLLLAKGAYVDPMSTFGTPLHLAAKEGQDGTMKILLDNNADCNKMVNGITPLLLAMKAASAKCMELLVEAGADATYSDVIWNYMSTTFMDDEDSGSSVFSDSEPEEIDANHHIPVNDKPVNRRKIAEFKSLGLEAVEKKDYLSAAGFYSEAMDLDPDDATLLSNRSLCWLYLGEGGKALVDAHKCRKMRPDWPKACYRQGAALMLLKMVFNVSLIFFWQDYVSACEALFDGFKLDPEDVEIENALREALEFLKVSQSTSAN

SEQ ID NO: 15989 - protein, 109 aa, Oryza sativa
  Clone ID: TF_OSC421294j.C1.p1.fg
MATLLDDGRGRIGEAVQAARVRGAPMGGMGALHLAAGKGRLEVCRYLVEELRLDVDDADQEGRTALIIATLCKHLSTVKYLLDHGADVNKASHDGRTPLHYATHLGAPL

SEQ ID NO: 15990 - protein, 446 aa, Oryza sativa
  Clone ID: TF_OSC401721j.C1.p26.fg
MGHGLSCSRDTDEYDLFRAAQLGDIHALSALLAADPALARRATVYDRFTALHIAAANGRLQVLSMLLDRDGDVDVLSRKKQTPLMVAAMRGNTECVVRLLRGGANVLTFDSPRARTCLHHAAYYGHAECLQAILGAAAQAQGPVAASWGFARFVNVRDERGATPLHLAARHARASCVRLLLDKGAIVSAPTAVYGFPGSTALHLAARAGSMECIRELLAWGADRLQRDSAGRIAYAVAMRRGHRACAALLNPAAAEPIVWPSPLKFIGELEADAKALLEAALMEANREREKRILHGSDINIKGGDEEEESEDEEEACNICFEQACSMEVKECGHQMCAACTLAICCHSKPNPKTLLLHPPACPFCRTTISRLVVATTNSNKTNSRRRSRSRSSSFKGGLSSAMGSFSRIGRGSGRLVVDGSSVGELADKPDHDFSSVAAAAAICDT

SEQ ID NO: 15991 - protein, 349 aa, Oryza sativa
  Clone ID: TF_OSC18816j.C1.p2.fg
MTSFQHYKCQKLICTDFVAISTDVICNWGKKRSPNTVPTPEGRRPHDDVEQWREAAHTAAAAAAATANEAVPSSATTEQQEARPDDERAPKDHTGCECKPKVVMLPELLRAASHGDLQRLRVLLGVLHDDESPAPTTTTTTTSQDDDAVVLEVYRSAPLLPPPSTTAGEGEDEGTLSLLEGTTFQGDSALHVVASSGDDGDFLKSARLIYGKARHLLEATNNNGDTPLHCAARAGNVKMVTHLLELAGGDGAGDQRKKLILRKKNHQHETVLHEAVRLGNKDLIDKLMTEDPELARHPSNGATSPLYLAVILPNPQVAMQLHGYDKMLSYSGPDGQNVLHAAVLRQRGT

SEQ ID NO: 15992 - protein, 716 aa, Oryza sativa
  Clone ID: TF_OSC900348j.C1.p4.gm
MVDTKARVQCTWKVKDTSGQTGDIRAVRPAAAARQQQEYIKFEMKPGEALDDYLGRYNKILSDLRSVDSSYDVNYTQYEVSRHFLNGLDMMEDKGDEKTNDNKPNSIVKGGKKIRETLKKAFDQVYAPFGPLSDVDDESGDEDKGKNISVDPTVGPATGQTGSSASVRPAPGQTSSYVAYYGFDFCLCVDFGGEEGEHVDHGFRLFAAHDWYIVTGSGEDGRIFEDESDDDDDGEVGSAVRVQNVKQLQKSLLLCTFNDDIRRNKLLVEGLEFDETFGPVARIEAIRLLLTFAQGFEAIRPAQTASNRQDTNGQTGGIAAVRPAATVPTPEGRRPHDDVEQWREAAHTAAAAAAATANEAVPSSATTEQQEARPDDERAPKDHTGCECKPKVVMLPELLRAASHGDLQRLRVLLGVLHDDESPAPTTTTTTTSQDDDAVVLEVYRSAPLLPPPSTTAGEGEDEGTLSLLEGTTFQGDSALHVVASSGDDGDFLKSARLIYGKARHLLEATNNNGDTPLHCAARAGNVKMVTHLLELAGGDGAGDQRKKLILRKKNHQHETVLHEAVRLGNKDLIDKLMTEDPELARHPSNGATSPLYLAVILPNPQVAMQLHGYDKMLSYSGPDGQNVLHAAVLRQRGVAVAGNGAPSPPPDLAGGEVVDLGDGRAVVRWRRLRRPRPPLRQIRPERRQRTSAEAAQRLAADLGGGGWRRPCPPLR

SEQ ID NO: 15993 - protein, 439 aa, Oryza sativa
  Clone ID: TF_OSC9745j.C1.p1.fg
MAAASAATVEFGPQILWLDKELLQVLAAGNKVLLEELLRGEGGTHPPRTNGQVAISFHGTSEPAARRGTSRLLGVTSNGSTALHVVASHGHAELAALICERAPSLAATRNRSLGTPLHCASKAGHRDVAACLLRVMDQATPRSRNLTGATALHEAVRHGHVEVVDLLMTTDPWLASVTTNGGVSPLYMAFRSLNSVNFNCKPEIAQEILNWPEGPSLLTRADSSGRTPLHFAVIYGRLDTVKLFLGGDAASPRLTSISDSDGSYPVHAAAMFGRTKIIDELVKKCPNYYELVDDKGRNLLHIAVESEQEMVVRHICGNDMFAMLLNATDYDGNTPLHLAVKQGYPRIFGLLLGTRGVDMCIMNKDGHTARDISCCASTLEHGRLRYFLLFVGSRNQATRWELGAPVDTATAPTISPSTLDLVTGRRPTAVVRSLRRRGG

SEQ ID NO: 15994 - protein, 402 aa, Oryza sativa
  unsure (1)..(402): unsure at all Xaa locations
  Clone ID: TF_OSC900351j.C1.p6.np
DEPNPLRXPFYLGIIIPWCRTRPEFKCXLCFSDRCSPVDIEMARGLDGQGEAAVVAAVEGSGFGHRALHMAASGGSVDVLRYLVEDLCLGVNQSCFSSGQTPLFLSSIHGRAAATRYLLDHGSNPAIDKIVLPLHGAAVKGHCEIVELFLSKGVDVDLYSIAGTPLLAAAISGQHSTMKILLEHHADPNRVFNLDGTPLIMSIVSGSLECVKLLIKVGADMNFRDSNGVTCVMVAANHGSSVIMKCLLDAGANPNIPDEQFNTTPIEVAANHGRRDIVEMLFPLTSPISTLSDWSIDGIISHVENFGLKPRVFVPLSAHLQLISLFIIIISFPYYPTLLGSGKYGREARHLEGARAERAAMAARASELEVREKALASRAAQXHRSSXPARHAGRTRRSGTPD

SEQ ID NO: 15995 - protein, 974 aa, Oryza sativa
  Clone ID: TF_OSC400431j.C1.p4.np
MPIKRLEIEKVKAQDAVLAFKNDGIGLLHAAACQGQLNVCKFLVEELGGDVNIAGAQGLTPFMAAAESDDVPTVKYFLDHGGDVTKADVRGCTVLHHAAGTGCCKVTEFLLSKGIPVDIDCGLGTPLLHAANDDKDKTLKILLDHKADAGADVNGKGALVSPLMFAASQGCYTNFIKFLLKAGANPNIPDDLGWLPVEHAALRDCREDVERLFPLTSPIPNVPEWSVNGIISHAKVKDIRPMTIDHGPTTVLYTNRSICRLLMGDGEDAQSDGNRSRMMRPNWEKACYRWSAGHMLLKEYKQLWDALMDAQKLDPGSVEIEKEQREYDIQESKDVVESKVGLYDKPTASYGVKPPNVSSVMGKTQIDTCKDVVFLKEEVEKRMRLDVSGSFFVYQMSTLEAGIPLSSYAGKTWNGNIDMDGLIVVHGRVRIKKKPWKGLNSSKMNSDCTKLTSMIREMFVKKNVHPPYLKHLLGKLEALAVDVFTVRQQLAFDYHISLIPSLNRVNLVYQIKRCYDGWDDREKMYFRFVADNCTVPEDWCNTLMSKHLFRLVILEGQKRNIIYGSNGMSAFHLVRNYNTHAPEHSWIHVFVDSKIEHYQWFQCDSGIELMVPKYLGDFLAEAVFKFIEDEFDLTHVKPNITKCNSGIPTLLRHNFHEGSECNSHDKLSSPFDGGIPTLLRHNFHEGSECNSHDKLSSPFDGMGQKVMPSETFDRSVVYVAIIYGEALDRLASSSAMCSNGDFSVCSQVTRINEFMDRPTCISKCGKSDHDVKTHGLSLILHINAVLALNKHGIGVLHAAAVLALNKHGIGVLHAAACQGHLNVCKFLVEELGGDVNIAGKEDITPFMAAAESGDVPTVEYFLDHSGDVTKADVRGCTVLHHAAGTDLWPISFIAGCCKSNVIVNNGAGSPLMSSLIYRSLKCMKLLIKAGADVNGKGTVVTPLMLAASQGGYTNFIQFLLKAGANPNIPDDVCF

SEQ ID NO: 15996 - protein, 613 aa, Oryza sativa
  Clone ID: TF_OSC28294j.C1.p1.gm
MAMLALPPAGHTRHTGCNARQDPVSMDRRLLRAARGGHREWLEAVLLGAAPAPNHVTVHVAAAGEPQPPTAAALLLDVATTPQGDSALHVVAASGDSEAFLSCARTIYRSAMALLDRANARGDTPLHCAARAGNAAMVRCLLDMAMEEDEERGGARFRVADVLEKQNGRRETALHDAVRLGDERLVGHLMAVHPRLARLPGGDGMSPLYQAISLGHDRIAELLHQQGGDELSYSGPAGQTALHAAVLRGAEMTEKIMQWNAGLSGEADASGSTALHFAASADGPKIDIENSSLLRWLLLPCPFQCRRTPTELLLETDPSLACQPDGDGDYPIHVAASAGNLRLVALLLDKCPECAGLRDARGRTFLHVAVDRRRQEVVGFASDVDGRANALSGGNIRRDHFLQRHVPKLDESAESKKMTESAQVLGVGSVLVATVAFAVAFSPPGGYVAAGAPALAGRYAFDAFMYAVALAFTCSMLATLSLMYAGTAAVEMNVRHRYFKNSVWWMRLSMRSLLVAFALGVYLVLAPVSRATAAGVCALAAGTMLFRNRELVLMVSCAHVVRRRMGIRVVLRIGAPIGIDLLISNIVYLIIFGAPFCTPLCVLILFWRVAPTE

SEQ ID NO: 15997 - protein, 203 aa, Oryza sativa
  Clone ID: TF_OSC400151j.C1.p24.fg
MAAPFVYCRPTDDGTSESALLRAAFDGNLGRLKGILKSLGIEKGKTQYAVLALNKHGIGMLHAVACQGHLNVCKFLVEELGGDVNIAGKEDITPFMAAAESGDVPTVQYFLDHGGDVTKADVRGCTVLHHAAGTGCCKVTEFLLSKGIPVDIDCGLGTPLFHAANNGKDKTLKILLDHKADWRSQDKIIVGAPQTFGPSNNLR

SEQ ID NO: 15998 - protein, 1659 aa, Oryza sativa
  Clone ID: TF_OSC418872j.C1.p2.fg
TVGCHSVSALRKNFPILSLLSSSPSSPSFLHSDSGGSSSDGSDDDDDDFFGRPSRRSSAAGAGAGAAAPSLQPAGCASFDLASHPDLKLARRIGSGPPGPAGQEVWSGTLSRGGGGGGAKRCKHPVAVKRVPVTAGDVLEGVQEEVERLRRAATWCRNVTTFHGAVRVGGHLCFVMDRYAGSVQTEMRQNGGRLTLEQILRYGADIARGVAELHAAGIVCMSIKPSNILLDTNGHAVVSDYGLSAILKNLTSRRVSDDSNMVGLDATLLSPNYTAPEAWVPLKKSMNLFWDSANGILPESDAWSFGCTLVEMCTGAVPWAGLSAEEICKSVVKERKPPPQYSRVVGVGLPGELWKMIGDCLQFKPSRRPSFQDMLKTFLRHLLDIPRSPPASPENDFTNASMPNGTDVPPASVLDMVQDNPNALHHLVCEGDAAGVRNLLAEAASDGNGRLIRSLLEAQNADGYTALHLACRRGSAEIVEAIVAYQENVDLLDKNENPPIIFAMAAGSPQCVRALVRRSSDVNSRLREGLGPTLAHVCAHHGQPECMRELLMAGADPNAIDGEGESILHIAVAKRYTDCAIVLLENGGCRSMGIPNSVNKTPLHLCIKTWNADVVKRWVEVASEEEIAEAIDVPSPVGTALCMAAALKKEHEKEGRELVRVLLSAGADPTAQDDPHCRTALHTAAMINDAELVKIILEAGVDVNIRNAQNTTPLLVALNRGANSCVGLLLAAGANCNLQDDDGDNAFHIAADAAKMIRENLSWIVQMLQQPSPAVDVRNHRQVYDVSGVKLNLLQYNVMQSKRGWTLRDFLERLPREWISEELMETLEEKGVHLTPTIYEFADWVKFRRTVTEPAFGWQAHARFRSVLIMIVLKVYTDVLDVVKNDGILVVPKKENDARCKCCSSAYCKKANFKNLIIGATVLIFMSMLMRIPSINILTEDLWRMSHGSNNKFTHLSRFGWRGQSRDSIGTVLCVDDDGILRVGFPGASRGWRADPAEIVRVEEYKVGNWVRIRPSLTVAVHGMESITPGSVGIVYSIRPDSSLLLGLCYLSSPWLCEPEEVEHVDPFKCEAHVSSNFQIGDQVCVKRSVAEPRYAWGGETHHSVGKIIDIESDGLLIIDIPNRAVHWQADPSDMEKIEKFKVGDWVRVKAAVPSPKYGWEDVTRSSIGVVHSLEEDGDMGVAFCFRSKPFSCSVADVEKAQPFEVGEKIHVLPSISQPRLGWSNETAATIGAISRIDMDGTLNVKVSGRNSLWKVAPGDAERLSAFEVGDWVRLKSSIGSRPTYDWSVGKISIAVVHSIQDSGYLELAGCFRKGKWLTHNTEIDKVEPLKIGHHVRFRAGITEPRWGWRDAKPDSRGIIAGVHADGEVRVAFFGVPGLWKGDPADLEIEQVYEVGEWVRLRNNADDWKSLKPGSIGVVHGIGYEDDVWDGTIHVAFCGEQERWIGPSSQLEGVSKFVVGQRVRVKLCIHQPRFGWSNHNHSSIGTISSIDADGKLRIHTPAGARAWLIDPAEVEKVEEEEEVCVGDWVKVKDCVATPTYQWGDVNHNSIGVIHRAEDGELWVAFCFCERQWLCKRWEVEKVRPFRLGDRVRIRPGLVTPRWGWGEETYESKGEVVGVDANGKLRIKFRWRDGLWIGDPADIVLDDIPSLTEASNGFCS

SEQ ID NO: 15999 - protein, 359 aa, Oryza sativa
  Clone ID: TF_OSC401048j.C1.p4.gm
MTLTTAAPLEARQSAVGSGDRLHDIQIHGAGEGRARWPRWSVSAAGRHGARWSEELRIKGRRSIPESSRGGWGRGRLRSRRWTSSSVLADGAEVGTGRGGSGGGEEAPAPAAGMQWQSTRGRSTGSGGGEEEESEAPAAAVHAGRISSEDAAARRQNIRGGGGASEEEKRSLRDGWTPLHLAIQSRNRDITMILLVNGADETRRNKELSLAVTDVLTCAYAVLLSSLRRSWSRGICYQISKSRVGGADTRSPSVGDIAPGPLWTGTTVVVHHRSTGTGAQLGTSRPDDGERRHGKEREEEKRRASPTTTATSTGRTTTMAARGVQAPERPREEDQRGLRGHGGNHCRPEAVDMEGSPAN

SEQ ID NO: 16000 - protein, 611 aa, Oryza sativa
  Clone ID: TF_OSC900035j.C1.p5.fg
MERAQPDQPVAAAAPGHVVLCFGASTAVAERQPEEGPAADSPVADAATGGAAAEPYARHDVDPPAAFAHVHALDHPAASIDAALPPRMPKHLYLAVFNGEKANVIEMLQLPNNGAPHGEEEEGQATDGASHSQPQTIDGAHHAEDQTVYDFPIAQVAINEEVGGAQNIHRDPHENKEGAQGQGHFVRNRVAIARREQYESRIDAVTAEGNTVLHIAASRGHAHAPGPDGTSQQEDLITVLYKARWHLLSSLNSEGETPLHRAARAGHVHAVQRIIAGVKENLEKLAENQLMDIIATRNCAGENALHLAAMHGDAQVVTTLLKYARDARLSSVLTEANNASALYLAVMSTSVATVKALLAHECNDTSAQGPKGQNALHAAAVLQNREMVNILLEKKPELASGVDDMKSTPLHFASSDGAYSIVHAILYPKSKSLFGDPAGQSLVAMQDSEGSTALHIAALMGHVNVVRLLIKASPDSADIRDKQGRTFLHIACADEGWQRPTVRYVVKNPMLHDLLNSQDKEGNTPLHLAANHGKFVDVYALISSGKVHPDIMNAEGETAFDIAKNTVSFFFMLHDPYTPATYNDQLGFSVEVRLMEGGVESSLHYTGQGHL

SEQ ID NO: 16001 - protein, 1066 aa, Oryza sativa
  Clone ID: TF_OSC401685j.C1.p224.np
MVSPTLFLPVHWCRLPAATRRVEFNTRSGTFPHMPRRRHPLGADEDRAWRGHHDAYADGQAIVRWEAQRKRDGLRLLHQAHGLLLAMALLAVALLAAALHADAAPASAAPGSSFPDAYGDRARAAQLPPRKQQPQVAYALRRASATSSAHLHGATSRSFTGVATEDLVARHGGVLVARHGGVGEAGLREENGDRSSVEASGGGHWPTIVKLASSIGTVVPVALSIVPYFYQVYTGNFERTIEVYGAPAMLAGSINSIIWLTYSIMASKKDLNLALILMHALLCMSTFTYLMCICACKRATKEGSVPKRSQKVATGFDLILSCITNLVTFIITFHDHPEHTTSLITSGVGFVLNVVEIVLLVIVTIMVRGLLPDFAMLFVEVIQRTMMRIERDHYIQILLQASGIAGQEPDASPSIRGRKRGGSVPLLVYYRCAAVLDVDTARAQAGETPLLLVATFGHTARRGGRPTYLLERAAGPSTPDPDVRRRHHNAAAASCLALQAPSKQAMSPMAMPAANLPGAPRRVVSESAARRRAGLGMGCRTRENGLHNCIVVYSFVSGENVTNGSSSSEMNVLCPSSSAATPPPPAPAAGAPGVGVAVGGEAREEERRRQCYYYRCAGALLRAAVLGDLHHLARMAAEVDAAMAAEVDAAAPGGGEGAGGVRSRCGRGALHLAAANGRTHVCRFLLEGLGLPVDALSASGAPPSRPAAAARSSHVSSMLAERLISCFVFDAAAHAGETPLLLAATFGHTSTAAYLLDRGADPSTPDPNGGDTPLHWAAYNGDRELAKLLLLRGADVGAANPRGTALHVAAARGHAAVVSVLLNHGADVRGRAQQDCQYRLHTVGFFTFGGIIGMHEVAHSACSRTGSIGFIKCLVESGADPNIPDELDRLPIEIAAIHAEREVIEVLLPLTHQVPTLLDWSVGGIIRYVKYPAYKEWARNASCKRKDELKLQGNSSFNNEDYDAAILLYSMVTTFAHSRFFMLMFGCKCFFSSKGAKYCFAMKFDNTDAKLYSNRSACWLNLGIGDEALSDAQICSKMQPDWAKGYYRQGMAFSLLQVTIMYHPCS

SEQ ID NO: 16002 - protein, 201 aa, Oryza sativa
  Clone ID: TF_OSC12692j.C1.p1.hg
VDSRGSPGGPTCHVTEARLTRVSGEWSGEEELKKPFVLERAAIRSNLSPLCLAHQIEQEKSRGRCGFLCWSVARIDGGGGRRRGDGGGDEGASDAAAAAGVVEEFVLCCKFARQTEPSKVLAGQSRVDVDAARKKKQARAKNGDTPEPDAAGGARARASRRAKRGPGSYRGVRQRRWGKWVSEIREPNRGKRHWLGTFGSA

SEQ ID NO: 16003 - protein, 161 aa, Oryza sativa
  Clone ID: TF_OSC900276j.C1.p6.gm
MVGGEVMCEAAAPRYRGVRKRPWGRFAAEIRDPANGRATNFPLVSSLPLPSPHYHLPGKAAAAAPPVAGPACSASSTVESSSGPRGPRPAATAAAVPRRRVPRPAPPAPDAGCHSDCASSASVVDDADDASTVRSRVAAFDLNLPPPLDRDHVDLCTDLRL

SEQ ID NO: 16004 - protein, 1124 aa, Oryza sativa
  Clone ID: TF_OSC401273j.C1.p2.fg
MARYPAPTSSRAIGAPIQPTEPHAPLPNTGGEGAPPPARTMPPPSSQAATSTPPAAATPLQRPPAQATAQPSTQRYYVGVQRDKGTGKWAACVVDPSNPTKHRLVGAFPDEHAAALAHDRLDLAFRGGGHRGAGDNFRPAFHAVELEFLRLCAATSSPGSHCGLVAGGDKYDEKYSEFLRKIYHGVMDNSPSYKKFFDVILDFFIARAREIGREALEDGGDMLVERFVAMHKNKAVTPRWRAWYRSDSRKVLQIPLSLRGGGGEIDHSTQKEARMDSDSCKRRKHESGHDSSSRVQSQSSILSRNRILCHQLLEQCDDLKYGSSTNDYKAISMKRLELISILQKLQEVPIQLPYASPLKSSETNRLVQDGRNSSCRNIIDLDSDNDEDYTFANVDNIGANTTVVLVDSDDGDSVASFVDEKSSDSKQNANYIEESVLPEQHAQQQEISMLDNENISSEAQAVKKGKDSMDINDVIYNKSGHEEIGEEEAQAENVQIKGNLKKEIISVASDELACEVMRSQSPTNGNFDQYDNSSPVDELEGLWMDMYLAMACSKTVGSDHNIVPSENSCEQAEDECQHDFLMKDDLGIVCRVCGLIQQRIENIFEYQWKKRKQSYRARPSEHRNSSDADAIDKTSGAILEVVPDALCLHPQHSQHMKPHQVEGFNFLVKNLADENNPGGCILAHAPGSGKTFLIISFVHSFLAKYPAGRPLIILPKGILSTWRTEFLHWQVDDIPLYDFYSSKADKRSEQLKVLNLWEESRSILLLGYQQFACIVSDHTSDTEAIMCQEKLLKVPSLVILDEGHTPRNEETDLLTSLENIRTPRKVVLSGTLFQNHVREVFNILKLVRSKFLKMDKSRAIVNCILSKVDLMGKSARSKNISDKDFFDLVQEHLQKDGNDKMRAVIIQNLRELTADVLHYYQGKLLDELPGIVDFTVFFNMSMMPREGKVLVFSQYVRSLIFLEKLVSRMKGWKSEVHIFRVTGGSTQDQREQAVHRFNNSPDARVFFGSIKACGEGISLVGASRIVILDVHENPSVMRQAIGRAYRPGQSKMVYCYRLVAADSPEEDDHHTAFKKERVSKLWFEWNELCSSDDFELATVDVSDSEDRFLESSALKQDIKALLKR

SEQ ID NO: 16005 - protein, 1197 aa, Oryza sativa
  Clone ID: TF_OSC410066j.C1.p4.fg
MARYPAPTSSRAIGAPIQPTEPHAPLPNTGGEGAPPPARTMPPPSSQAATSTPPAAATPLQRPPAQATAQPSTQRYYVGVQRDKGTGKWAACVVDPSNPTKHRLVGAFPDEHAAALAHDRLDLAFRGGGHRGAGDNFRPAFHAVELEFLRLCAATSSPGSHCGLVAGGDKYDEKYSEFLRKIYHGVMDNSPSYKKFFDVILDFFIARAREIGREALEDGGDMLVERFVAMHKNKAVTPRWRAWYRSDSRKVLQIPLSLRGGGGEIDHSTQKEARMDSDSCKRRKHESGHDSSSRVQSQSSILSRNRILCHQLLEQCDDLKYGSSTNDYKAISMKRLELISILQKLQEVPIQLPYASPLKSSETNRLVQDGRNSSCRNIIDLDSDNDEDYTFANVDNIGANTTVVLVDSDDGDSVASFVDEKSSDSKQNANYIEESVLPEQHAQQQEISMLDNENISSEAQAVKKGKDSMDINDVIYNKSGHEEIGEEEAQAENVQIKGNLKKEIISVASDELACEVMRSQSPTNGNFDQYDNSSPVDELEGLWMDMYLAMACSKTVGSDHNIVPSENSCEQAEDECQHDFLMKDDLGIVCRVCGLIQQRIENIFEYQWKKRKQSYRARPSEHRNSSDADAIDKTSGAILEVVPDALCLHPQHSQHMKPHQVEGFNFLVKNLADENNPGGCILAHAPGSGKTFLIISFVHSFLAKYPAGRPLIILPKGILSTWRTEFLHWQVDDIPLYDFYSSKADKRSEQLKVLNLWEESRSILLLGYQQFACIVSDHTSDTEAIMCQEKLLKVPSLVILDEGHTPRNEETDLLTSLENIRTPRKVVLSGTLFQNHVREVFNILKLVRSKFLKMDKSRAIVNCILSKVDLMGKSARSKNISDKDFFDLVQEHLQKDGNDKMRAVIIQNLRELTADVLHYYQGKLLDELPGIVDFTVFLNMSSKQEHIIKGLDGINKFAKRSRCNAVSLHPCLKNANKADADDGNVTNRKIGSIISGIDINDGVKAKFVHNLLSLSEATGGKVLVFSQYVRSLIFLEKLVSRMKGWKSEVHIFRVTGGSTQDQREQAVHRFNNSPDARVFFGSIKACGEGISLVGASRIVILDVHENPSVMRQAIGRAYRPGQSKMVYCYRLVAADSPEEDDHHTAFKKERVSKLWFEWNELCSSDDFELATVDVSDSEDRFLESSALKQDIKALLKR

SEQ ID NO: 16006 - protein, 277 aa, Oryza sativa
  Clone ID: TF_OSC900257j.C1.p13.fg
MSELAYSPTQEVKVNSLFCNGITERSSRFSPSIWLAPDITEGYRKCQRQVFWYSFLKLHVTLEVFQQEGWKDSLPVDFPKPSDNENSVEVAHPNIKPFSVHPLPLTKNSDVLLESSNGSDSLKEEKNHYYPGKEIKRRKRHRRKQYVDQEPCIMRGVYFKNMKWQAAIKVDKKQIHLGTVGTQEEAARLYDRAAFMCGREPNFELSEEEKKELQNYTWKDFLDMTRDTITSKKQRKVGLIRRNKTDSLVGQSDGDTEMINGGGSSHSEDGDAETSAS

SEQ ID NO: 16007 - protein, 82 aa, Oryza sativa
  Clone ID: TF_OSC400795j.C1.p54.gm
MAMMRRGGLTSPDRARDPHRAVAGRCAGADVVPERKFRGVRKQPWRKYGAEIHISQQSVRMWLGVFDTTEEATRDKTGIKTA

SEQ ID NO: 16008 - protein, 227 aa, Oryza sativa
  Clone ID: TF_OSC400138j.C1.p12.fg
MAGDGTGDDDDVHARVKYKGVARTADGRWRGFITNKFGRRYGVGDHGTPEEAALAHDRAILAILGAHASPAALNFRAAFSDTELRFLRGPHAPSRRAAGVVAAVMRGAAFDAALERFAARAYDAHTDPELALDVAAFRLATRDAGTPLAQPDAERAAFVAAARNKVHDAAWLRSYLRRRRLVGATFEDENRWPPVVPPAVADVGDGFAGNELVYLPYGSCHVDEMMI

SEQ ID NO: 16009 - protein, 189 aa, Oryza sativa
  Clone ID: TF_OSC19001j.C1.p5.np
ALPGSRGERLWVGTFDTIEEDAHAHDAAMLALCGASASLNFSNSAWLLHIPRAPAPRRLRPLAARHAARRQRGRRRVPAPGKTATSGDAASTAPPPTPVLQTKQCDFISVSSLDCWMLMSKHISSSIAKGSLCLQKNPISFCMVTNSYPSLLLEYIILQMNSFVLCISRLQRTLSILTNTTNSIHTYSY

SEQ ID NO: 16010 - protein, 312 aa, Oryza sativa
  Clone ID: TF_OSC900259j.C1.p16.fg
MVAFRRIRISYSDPDATDSDSDSDSADAGDHDISSRSSRTNAAARRKVIVISLSRKKGRSLSQSGRHYRRRRSEIPAAAAKAVEAEDWPSSSDGMRRGAVAAARSASAAAKKGSRGGVYQRQPGRWAVDFRDSQLKVRQWLGTFPSEEEARAAYDAFEVQVRASLSRGGAGASSPAVAIAPSPARVKIQLPAPRRASGRRKKTQTTATVTTTTTTESLSQVTASSASPSSKEAPPPSSSASAATPPPLNPPPFVVDTFLGEDDHLAADEDDRFGFGLADLGHLPLPFLDDNDMDFKLSDSDDLSFLFDIGFM

SEQ ID NO: 16011 - protein, 110 aa, Oryza sativa
  Clone ID: TF_OSC1021j.C1.p1.fg
LEEYEKERSEMEGVSREEYLASLRRRSSGFSRGVSKYRGVARHHHNGRWEARIGRVLGNKYLYLGTFDILYNLSQNYRFKNLFYKNTDSVASFITKLQFCDRLYKLPVVL

SEQ ID NO: 16012 - protein, 180 aa, Oryza sativa
  Clone ID: TF_OSC400824j.C1.p4.fg
MSACHVNPPLPLFSSFLPSLSLTLLSQAGRRSRDAERRWRQAGTRAAAGGGGGPLAAGMVVVGALSRRRPYCAALAHAAPPRWGMVVRRATRRPIRRGPRSRSSQYCGVKFYRRTGRWESHIWTYDLAAIKFRGVEGWRPTSISAWRIMGDDLKQVRTSLTRSLWMSNLTKEEFVHVLRR

SEQ ID NO: 16013 - protein, 156 aa, Oryza sativa
  Clone ID: TF_OSC411132j.C1.p6.fg
MDVNGIITVLITYELLVRRVSHRPHYPDIAGTTFHPRVAGHAARCLLLRLRPPLTSAGRNGQPRCSSLQYPNGLVPPSHSDLVAPVLITAGLIDAMKGIGKEENGCCSSQGSEPGKKTQIWLRTFESPKMAAVANYVASLRLHGLEPRLNFLALII

SEQ ID NO: 16014 - protein, 242 aa, Oryza sativa
  Clone ID: TF_OSC1032j.C1.p1.hg
LISTNVPLFTDTQEEAAKAYDLAAIEYRGANAVTNFDISCYLDQPQLLAQLQQEPQLLAQLQQELQVVPALHEEPQDDDRSENAVQELSSSEANTSSDNNEPLAADDSAECMNEPLPIVDGIEESLWSPCLDYELDTMPGAYFSNSMNFSEWFNDEAFEGGMEYLFEGCSSITEGGNSMDNSGVTEYNLFEECNMLEKDISDFLDKDISDFLDKDISISDRERISPQANNISCPQKMISVCN

SEQ ID NO: 16015 - protein, 154 aa, Oryza sativa
  unsure (1)..(154): unsure at all Xaa locations
  Clone ID: TF_OSC1342j.C1.p1.gp
TFNTAEEAALAYNQAAYRLRGDAXRLNFPDNAXSRGPLHASVDAKLQTLCQNIAAAKNAKKSSVSASAAATSSAPTSNCSSPSSDDASSCLESADSSPSLSPSSAATTAETPATVPEMQQLDFSEAPWDEAAAFALTKYPSYEIDWDSLLAANX

SEQ ID NO: 16016 - protein, 113 aa, Oryza sativa
  unsure (1)..(113): unsure at all Xaa locations
  Clone ID: TF_OSC31818j.C1.p1.np
ACGSRVPVTACPRCPAPRVVCRHERPHRAREVGGAPRHRDDERVHHHSSSSTSTNKDAQSEIDXENKKLCVQRRTRRSSRWRGERRTLYRGIRRRPWGKWEAEIRDPVEVLQR

SEQ ID NO: 16017 - protein, 693 aa, Oryza sativa
  Clone ID: TF_OSC29687j.C1.p13.gm
MGECGFRWREEFLETLGEAQKKATRFGVADLFPLSRLLPVVRSPSGDGRRELTRELAGAAGGGSLWRGAVSTVAATQAPPVAASFCSASTRVSSNPPPLQLPPAASTSAPAPPPLQPCSRGRGRPSGRAPAPMPTACSASALAWGLGLGGFGFGSALSLFGSGGGIAGTREGSWTPERRGEEEKEEERVLGSWPVAFKVSAPSTSESESCSCSCRRTAGELHPRARTPASSSPGARTAGELHPRARTPARGRQASSTPARGRQASSSPGAQTAGELHPRARTAGGLLPRVWTAGELLPRASSPSPPPRFYYWKISDTSTTRETKTGSTLPREGPLGGESTDAGYRGSFHGTWEFASAGKLGLDRPCVNSLACRRSGGSSGPAASWSPRRITTVHSQSPTVQSQTESHRRTPHLLIGRRRRRRALSAPPRGQAVVASSLRGQAAAAVGTNRLLAQSPHRRRRSNQRRLCRAPSPPRAVTRHITAAGPSQRRRRGAPSPPRLPSPLACHIAAAGARRRRRRAKPTSPPSSLSDLPKKCERSTAAPLPPGKVDGRDDVRSPPLRRPSGLLERSPASAIDVRGAVGVRGPRAGAPRLQALARQFDGADTVTRAHDAAMPALRGRAACLNFSNSAWLLAYAALYAALLSGGGADHARRRCRSSPAAPPTRAVRCPGRREGKGKERGVRLTWGPYIFVT

SEQ ID NO: 16018 - protein, 379 aa, Oryza sativa
  Clone ID: TF_OSC400151j.C1.p86.gm
MVGPCGPLLLGEGPLGGESTDAGYRGSFHGTWEFASAGKLGLDRPRVLVTTADHYWFVERARSYAEGIKKCEWDGELEFHETEGEGHSQTESHRRTPHLLIGRRRRRRALSAPPRGQAVVASSLRGQAAAAVGTNRLLAQSPHRRRRSNQRRLCRAPSPPRAVTRHITAAGPSQRRRRGAPSPPRLPSPLACHIAAAGARRRRRRAKPTSPPSSLSDLPKKCERSTAAPLPPGKVDGRDDVRSPPLRRPSGLLERSPASAIDVRGAVGVRGPRAGAPRLQALARQFDGADTVTRAHDAAMPALRGRAACLNFSNSAWLLAYAALYAALLSGGGADHARRRCRSSPAAPPTRAVRCPGRREGKGKERGVRLTWGPYIFVT

SEQ ID NO: 16019 - protein, 142 aa, Oryza sativa
  Clone ID: TF_OSC401865j.C1.p18.fg
MAARAHDVAALAIKGRAAHLNFPDLAHELPRPATAAPKDVQAAAALAAAADFPASSANAGASNNPDGSDDASAGSASPPPPPDAADDALFDLPDLLLDLRYGPPSSGLSCASSWEDEVGLISGAGAAAAGVFRLEEPLLWEY

SEQ ID NO: 16020 - protein, 253 aa, Oryza sativa
  Clone ID: TF_OSC100569j.C1.p2.fg
MAACAYDVAARAMRGTRARTNFPVPAAAGFPGGGGGGCWPWVNIPPQGAAAAASHQQPLNTLLLHNLLMSSSPHGCLLLHHAGHGHGHAHSHSHSHSRAHNPSTRPPTSAPPPPPPAAASSATTAPATTTGAAATSAPGADDDAWGFLLRREPPEAGLLQDVLHGFYPTRRPHDDAGPAPKLERPYEATSSYRVSSPWGAVEDCDDGDGDGDDDYRGFPMMPQGLLEDVIQCPPYMEVLAAPSAAVGRVSRRG

SEQ ID NO: 16021 - protein, 156 aa, Oryza sativa
  Clone ID: TF_OSC401894j.C1.p11.fg
MAAVAYDVAARALRGPDAALNFPDLAASRTAPPASSSADDIRAAAAAAAASLQHDRAGGGIAPAASGSAHQQRGGSSAAARTTAGSGGAQQEGSSGAGAGSHQYFLDEEALFETPQFLRNMAAGMMMSPPRLSPSSSDDSPDPSEAGGSLWSYRDP

SEQ ID NO: 16022 - protein, 163 aa, Oryza sativa
  Clone ID: TF_OSC12713j.C1.p1.gm
AVDAALAYDKAAASILGPRAVLNFPAFSPPAAAIAAPEQCEPPFCSPATTAAATAPEQRQTPGCSPAAVAGSGGGAVFEERDVKPVVLPLPLPAILQDGGGTEAMAQHWDWEWDASWPELEMFECLDDIAMYLDVDAVMTTRDCKVEELDADIVDSPLWTLSD

SEQ ID NO: 16023 - protein, 241 aa, Oryza sativa
  Clone ID: TF_OSC900118j.C1.p25.fg
MGTNPSLHELAAGAAPRGRVVRILVRDADATDSSSSEDEAVAVAQPRPRRRGKVGGGGGGGGGVKRRVMEAGAGEARPTARFRGVRQRPWGRFAAEIRDPHLRRRLWLGTFDTAEEAAAAYDAASVRLRGSSAATNFASVRCYSLPPELPKPTISPPEAAVRPITLPIGTAKPTLLPRVKEEGESCGGRVKEEASSCEVQVLAPEPMWTMISGKRKKRSGCGTRVRAFHAVSACVEEVGGA

SEQ ID NO: 16024 - protein, 498 aa, Oryza sativa
  Clone ID: TF_OSC400325j.C1.p3.fg
MDMDTSHHYPWLNFSLAHHCEMEEEERGAAAELAAIAGAAPPPKLEDFLGGGCNGGSSGGACPPVQTTAPTAAELYESELKFLAAGFQLSGAAGAAPPVPALLPAAALEQTDETKQLALPPQAAVAPPPEQKKAVDSFGQRTSIYRGVTRHRWTGRYEAHLWDNSCRREGQSRKGRQGGYDKEEKAARAYDLAALKYWGPSTTTNFPVAEYEKELEEMKHMTRQEFVASLRRKSSGFSRGASIYRGVTSLASHVWPLARKSQVKNIYFDQDLIVACFLLSGTEEEAAEAYDIAAIKFRGLNAVTNFEIGRYNVESIISSNLPIGSMAGNRSTKAGLELAPSSSADAIAATEANHTGVAPPSTLAFTALPMKYDQADYLSYLALQHHQQGNLQGLGFGLYSSGVNLDFANANGNGAMSNCYTNVSLHEQQQQHQHQHQQEQQQDQQDDQSQSSNNSCGSIPFATPIAFSGSYESSMTAAGTFGYYPNVAAFQTPIFGME

SEQ ID NO: 16025 - protein, 330 aa, Oryza sativa
  Clone ID: TF_OSC401715j.C1.p5.gm
MATARGTAGGSGAARGARRGLAARGDETARGAAAAMGRARRRDVDGDGDSAVLARLSLVPHQFPPHDENVPREPSSRRLRVRLAGDAPFRTTMVPRVERGGGGFHLPNSEREDSLFIRALISVVSGDTTVPTLLPEPTMATVVAGAATDEEDEGECTTGAVASGGVTGGVGKRRPRRRSGGEGSRYRGVRRRPWGKWAAEIRDPRRAVCKWLGTFDTAEDAARAYDVAALEFRGQRAKLNFPASTAAQQPRPLLHHNLRENCGSNASSPVHAPEHARTAAAAKDQEIWDGLREIMMLDDGSFCVQRDGMAASLYATASSIPCGHVAVAAV

SEQ ID NO: 16026 - protein, 284 aa, Oryza sativa
  Clone ID: TF_OSC418226j.C1.p6.fg
MEADASHTPTTSSSVSVSFSSSSLSTSSSTSSLVDNGAQDRPKSSKPKHAAKKRKRAAAEEPANAAHGAGEDTSSCSTDDNAAASGKAQAGGGGGGVDSSSTCTAASAPRSGFKHPSYRGVRRRSWGKWVSEIREPRKKSRIWLGTFPTAEMAARAHDVAALAIKGRNAHLNFPDSAHELPRPESTSPADIQAAAAKAAAEVRCEEESSPSSSPTAEQPEEEAACPDTVHADGGQDNALFDLPDLLLDLRDGLWWSPVWPAALAAEEYDGGDAVVLNEPLLWAE

SEQ ID NO: 16027 - protein, 444 aa, Oryza sativa
  Clone ID: TF_OSC400851j.C1.p68.fg
MAPSKQQQMLLKKVMAKKPKTKRLSGFGLKPSAAFSRPHVPSAAASLQPSRRVRVVFEDPDATDSDSDDDEDAGAASKKRYFELFIGKPASSTKQASPASTVAAYANIGKVGSTCYRGVRLRKWGKWAAEIRNPFTGHREWLGTFDTADAASAAYQSASRNFAEEKRRRGVASSASPASSATPTPTASSSSSTSAAPFAHPSPSSVLEATKPAPKPESPPLPEQAATPLLVEATNETAELPDDPEFYKDILRGLQLPDIDPMDFRAGLDALDISDVPAYMNGEQDVLFTEDMLLGDFAEEDDLDLDDIGDDFCEDFPEIPSGYDFGRGDMFRQDSHASAHLGRGTAQLEATLRRWSEIRIYTNPARVLTGSMLRVADQEYTTATIPLAIAAYGEDKTSKSQTCPYTTTAGDKSVLLREDPKLPRLTDQLPVDMVSSAPDFSTFS

SEQ ID NO: 16028 - protein, 224 aa, Oryza sativa
  Clone ID: TF_OSC900408j.C1.p14.fg
MDVSAALSSDYSSGTPSPVAADADDGSSAYMTVSSAPPKRRAGRTKFKETRHPVFKGVRRRNPGRWVCEVREPHGKQRIWLGTFETAEMAARAHDVAALALRGRAACLNFADSPRRLRVPPIGASHDDIRRAAAEAAEAFRPPPDESNAATEVAAAASGATNSNAEQFASHPYYEVMDDGLDLGMQGYLDMAQGMLIDPPPMAGDPAVGSGEDDNDGEVQLWSY

SEQ ID NO: 16029 - protein, 184 aa, Oryza sativa
  Clone ID: TF_OSC900408j.C1.p23.gp
MDVSAALSSDYSSGTPSPVAADADDGSSAYMTVSSAPPKRRAGRTKFKETRHPVFKGVRRRNPGRWVCEVREPHGKQRIWLGTFETAEMAARAHDVAALALRGRAACLNFADSPRRLRVPPIGASHDDIRRAAAEAAEAFRPPPDESNAATEVAAAASGATNSNAEQFASHPYYEVMDDGLDLG

SEQ ID NO: 16030 - protein, 199 aa, Oryza sativa
  Clone ID: TF_OSC102044j.C1.p3.fg
MRRGGAAEEDAEAARFRGVRKRPWGRYAAEIRDPAKKARVWLGTYDSAEDAARAYDAAARALRGAKAKTNFPLSLPHAQPQLHHHHHHHLTYPAAAVVAARPATSSLSSTVESFGTRPRPVLPPRPPPPPPIPDGDCRSDCGSSASVVDDDCADAAASPSCRLPFQFDLNLPPGGGGGGGGGFGCAYDDEELRLTALRL

SEQ ID NO: 16031 - protein, 255 aa, Oryza sativa
  Clone ID: TF_OSC400075j.C1.p16.fg
MCGGALIPNDYGDKPPPPPSESSEWDATTKMKKKKKRGGGGDDDWEAAFREFIAGDDDDDDGGVSMFPSGAGTMETTTEVAPAAAVVERPRRRRRVRRSYPYRGVRQRPWGRWASEIRDPVKGARVWLGTFDTAVEAARAYDAEARRIHGHKARTNFPPDEPPLPAPSQAPFCFLLDDDDDDDGVARGNSPASSSAPDRASACTTSSTVASGERGDELILLECCSDDVMDSLLAGFDVSSEPRRFWEWLISSAHA

SEQ ID NO: 16032 - protein, 222 aa, Oryza sativa
  unsure (1)..(222): unsure at all Xaa locations
  Clone ID: TF_OSC400766j.C1.p23.gp
MAPRNAAEAVAVAVAEGGGAGMEPRFRGVRKRPWGRYAAEIRDPARKARVWLGTFDTAEAAARAYDSAALHFRGPKAKTNFPXPSRTPTTTPRRRRCPRRRRWPSSXTSSTVESSSRDTPAAAPVAAAAKAQVPASPSLDLSLGMSAMVAAQPFLFLDPRVAVTVAVAAPVPRRPAVVSVKKEVARLDEQSDTGSSSSVVDASPAVGVGLDLNLPPPIEEAX

SEQ ID NO: 16033 - protein, 236 aa, Oryza sativa
  Clone ID: TF_OSC416364j.C1.p3.fg
MAPRTSDKTMSPAAAATGLALGVGGVAGAAAVGTGQHFRGVRKRPWGRYAAEIRDPAKKSRVWLGTFDTAEEAARAYDAAAREYRGAKAKTNFPYPNGAPAAGVNSGSSNSSTVESFGSDVQAPMKAMPIPPSLELDLFHRAAAAAAAGAGGMRFPFEGYPVSHPYYFFGQAAAAAAASGCRMLKIAPAPVTVAALAQSDSDSSSIVDLAPSPPAALAKKAIAFDLDLNCPPPMEV

SEQ ID NO: 16034 - protein, 250 aa, Oryza sativa
  Clone ID: TF_OSC900129j.C1.p28.fg
MCGGALIPNDYGDKPPPPPSESSEWDATTKMKKKKKRGGGGDDDWEAAFREFIAGDDDDDDGGVSMFPSGAGTMETTTEVAPAAAVVERPRRRRRVRRSYPYRGVRQRPWGRWASEIRDPVKGARVWLGTFDTAVEAARAYDAEARRIHGHKARTNFPPDEPPLPAPSQAPFCFLLDDDDDDDGVARGNSPASSSAPDRASACTTSSTVASGERGDELILLECCSDDVMDSLLAGFDVSSEPRSVLGMVN

SEQ ID NO: 16035 - protein, 466 aa, Oryza sativa
  Clone ID: TF_OSC400220j.C1.p29.fg
MDAPSGESGGGGGGGGGRRWKGKGVTPIQPRRQLGTVLEDSSAALLRPLKKIGRSPDRLLRSASSLSTSSSAPPSPRSSSASDAPVRVISSSPSSPSPPSARHIFPFAYEASTTTVGGSPRLHPLSWQQSSMSQPASPQQQQQQPLQHQQMISFGASPPCSTTQFVVPENAQQQQMLLRYWSEALNLSPRGGPGGVPPWLYQQLLRVPPPPQKLYRGVRQRHWGKWVAEIRLPRNRTRLWLGTFDTAEDAAMAYDREAFKLRGENARLNFPDRFLGKGRAGGKGRTSVSSSAAAAASCSSSSLSPPETPDDANTQQQAPQQREQRDTAGVSMEKKQPQPPAPTSRQEGCSGGDAAAPYPAEMLHAPAACGGMWVAPDESWFSTWGPGSSFWDDYDMDSARGLFLHPRFTGDETSMDHSGTQATVPAVAATAAGMSMPCDDVPVTSSSSDLPPQGTPQTPTFMWKED

SEQ ID NO: 16036 - protein, 191 aa, Oryza sativa
  Clone ID: TF_OSC20641j.C1.p1.hg
DTAEAAAAAYDDACLRLRGPGAALNLPSRRCVAPAPPPPPPPPPPTAEEKKLLLFPPPLPPRKKAMLFPLPLPPRKKPLLYPPPLPPKKKPLPPPSPPPQPPLPEKENTPLPPLLLPPKKKPLPPPSPTAAAKEEPIELEHAAPPPPFVPRPVWPLLASGGGGKRKKQSGCGGRIPALNTAAAAVEETGRA

SEQ ID NO: 16037 - protein, 1473 aa, Oryza sativa
  Clone ID: TF_OSC407093j.C1.p8.fg
MDPEERVAEAMKGLLVEYSQQSARLAVQVRGNEYRRAAAAGGGGGFLLSPGERERLRAGSGLELVIVPVMEGDQVVSSSASAEVLVSPLVEGEVRVVPAVERRRWRRQAAAEEWEEIDPETKYRGVRVRFGTRYVAEIHNPTGAGRLWLGTFDTAEQGAWAYDAAARVLRGEAAATNFGDPAQTPSPLSAEMRSMLAFFDRARARRERVVEERGAAAAEAEASEAPAPAPLLLLPAPPPSSDVSPVTVQVAAPPSSSDAAPVPATLLSDASPVIVQVPVPPSSDAAPVPAPTLSDASPVPVQVPAPPSSDVALVPVPVQVPAPTSSGSDEAAFVGGRGRGAGAGVGGGRGLGRGGGGGRGRGGKRAPTTAVTVVAPPPPVPTPAAGAAAPTLAPASAAAHAPALSVEPDALVSPASIAPAYAAPAPAPAPAALEALAPPPPAAPASLSASGGERGCVAIANAAVAGRGRGRGSGAKRAPTAVTVGAPPPQARTPAAAPAKAFVSAPAPAPSSVISPVLAASASAAAAFAPAPAPAAAEVIPPPPLPAAASTAAAPAAERKRKLLTASSLSSSGGERGRGRARGRGRVADAAIAGGSRGRGRGCGLTPAVVTVGAPPPPSAAPAPAPASAPSLEPNDIIAPVVSSTLAPGASAAAAAAPAVAPPAAALEAILIPMPPPAAAAAAAAPVPKKRKVRTASTLSGSGGPGRGRGRVAEATFVGRGRGVWSVRGRGRGRIPTEVTVGTPSPSAPTPAPASATAPLIQSNVVISPVPPTLAASGVAAWPPVPAIPELTTAAAAPLPEKPVLTAHDVVMATLFPNGVFSYTAGSSHAPPPPVASGSFFQEVIPPGGVPTNYAIHEAPDFDPNVFFADVPDGEQDELVLLSLTSTLLDIDNSLTLVADDAASSAQAAVDVASSSAQAAIDVPSSSVLAVVDIPSSSAQAAIDVPASLAQAATDVASSSTQGAFVGGRGSGRGASVGVGGGRGLLRGVGTGHGRGGGGGRGRGGKCAPTAVTVVAPPLPVPTPAVHAPAPPVEPNAVISPPSSALAPAYAVPAPAPSLAALEALAPPPATPATLSASSREHGLGRGRGCVAIANAAGRGHGRGSETKCAPTVVIVGAPPPPAPIPAATPAKALVSAPAPAPISTVSSTLAASASAAAAFAPAPVAAEAIPPPPPPLPAAATAVAAPAPDRKRKLQTASTLFASGGERGRGRARGRGRVADAAVAGGNRGRGRGCGLTSAVVTAGAPLPPSAAPVPVPASAPTMEPNATISPGSSTLAPGASAAAPAVAPPTAVPEAILVPMPPPAVAAAAAAPVPKKRKLQTASTLSKSGGPERGRGRVAEATFASRGRGVWNGRGRGRGRIPTAVTVGTPSPSAPTPATEPALVPASASALATAPLMQPNVVISPVPSTLAASGAAAPPPVPAKLELATAAATTLPEKPVLTAHEVVMATLFPNGVFSYIAIACATATAGG

SEQ ID NO: 16038 - protein, 496 aa, Oryza sativa
  Clone ID: TF_OSC900368j.C1.p22.gm
MSFQDLLRDMEAGVLQPAAPPAQEVAHGVFQLNTKVEALRYMAGALGTPRDTPSLRGRLRGTRAGIKRLATSTSQALRQAAAAADDDESVSSCSKLAMDFEAAVNEYQKIERRIAAVERQETAAAARRSPPPPTPGFNHINNNGDHTFPEQKQTQLAVLRDINLLDSEIELHEAIIAEREQGILEVQQEIADIHEIFRDLAVLVHDQGECIEIVTANIEMTEAATSQAEVQISKAAGIRGEKEELLTGAGTEDNSPSKCLLLAVLGLFLFIVGRRKLYSSGCPSKRGITDNQTKNTAAPAPEKKYKGVRLRQWGKWVAEIRLPNSRERVWLGSYDTPEKAARAFDAAFVFLRGAGAADAAGLNFPDSPLPVVARTRDLREVYAFAVSHANRPPPVAGETAATALAAMAALEHNEVRENIAPSSPLSAVQVAAPPAGSFDWSQLMANSPPLYSPIVIGSHAYDDLAVWPTTQPVEEFSEEDNENEGATSDELWSFDV

SEQ ID NO: 16039 - protein, 315 aa, Oryza sativa
  Clone ID: TF_OSC400585j.C1.p9.fg
MELNFQVQPPVFQLQDYCYYYSQEVAAAASPAAKPTKPRGRKKGSTSHSKFVGVRQRPSGRWVAEIKDTTQKIRMWLGTFETADAAARAYDEAARLLRGAEARTNFAPRISPDCPLAVRIRGILHHKKLKKARSAAAATAGSPGAASKKRSTTAAAAAATPTITTTSNSNSDGAGSACGGSSSSSSSTDSCDGAVKQGGGGGGAPTDASEVYRPDFVHAGAEEFDSWMFDTAFGPFPELDSFAAVDAVTPPPATASPEESSAGTPPVEMAEFERIKVERRISASLYAMNGLQEYFDKVFDASACDPFWDFSPLCH

SEQ ID NO: 16040 - protein, 145 aa, Oryza sativa
  Clone ID: TF_OSC102007j.C1.p2.fg
MSTTNSSSSVSVPAMDAHGQEEEEEPMQVQQQQAFRGVRKRPWGKFAAEIRDSTRNGVRVWLGTFDSAEEAALAYDQAAFAMRGSAAVLNFPMEQVRRSMDMSLLQEGASPVVALKRRHSMRAAAAGRRRKSAAPDRRIRKAEEG

SEQ ID NO: 16041 - protein, 166 aa, Oryza sativa
  Clone ID: TF_OSC401268j.C1.p16.fg
MDAHGQEEEEEPMQVQQQQAFRGVRKRPWGKFAAEIRDSTRNGVRVWLGTFDSAEEAALAYDQAAFAMRGSAAVLNFPMEQVRRSMDMSLLQEGASPVVALKRRHSMRAAAAGRRRKSAAPAPADQEGGGGVMELEDLGPDYLEELLAASQPIDITCCTSPSHHSI

SEQ ID NO: 16042 - protein, 297 aa, Oryza sativa
  Clone ID: TF_OSC410211j.C1.p10.fg
MATTVDWCGRGSNLPAAMYDMVVDSKELMGALAPSMVSFSYPCSEQSASSLLAGANYLTPAQVLHVQAQLQRLRRPGAASGCLAAAPPLPMKRHGAVAVAAAAAARAPVKLYRGVRQRHWGKWVAEIRLPRNRTRLWLGTFDTAEEAALAYDSAAFRLRGESARLNFPELRRGGAHLGPPLHAAVDAKLHAICHGMDLPQPQPQTQSNATTTTMSTTATNTPSPFFSSESPVVKSEPVCSASESSSSADGDVSSTGSSDVVPEMQLLDFSEAPWDESESFLLHKYPSLEIDWDAILS

SEQ ID NO: 16043 - protein, 399 aa, Oryza sativa
  Clone ID: TF_OSC21837j.C1.p4.fg
METYGLVKDELLHGIGGGQGRLYCEVKPTAAPAVITAAGGGAKSVKRRKREPSAAAMSAVTVAGNGKEAGGSNAANKRSSRFRGVSRHRWTGRFEAHLWDKGTWNPTQKKKGKQVYLGAYNEEDAAARAYDLAALKYWGPTTYTNFPVADYEKELKLMQGVSKEEYLASIRRKSNGFSRGVSKYRGVARHHHNGRWEARIGRVFGNKYLYLGTYSTQEEAARAYDIAAIEYRGINAVTNFDLSTYIRWLKPPSSSSAAGTPHHHGGGMVVGADRVLAPAQSYPISAAADDDVAGCWRPLPSPSSSTTTALSLLLRSSMFQELVARQPVVEGDDGQLAVVSGDDADADADSDVKEPPPESEYGEVFASDEAAAAAAYGCSMYELDDSFALIDDSVWNCLI

SEQ ID NO: 16044 - protein, 601 aa, Oryza sativa
  Clone ID: TF_OSC401520j.C1.p13.fg
MVKSGQEAAPGSGGNAAAAAARQGGGGGGRGRQYKGVRMRSWGSWVSEIRAPNQKTRIWLGSYSTAEAAARAYDAALLCLKGSAADLNFPVHLPFHIPAAAMSPKSIQRVAAAAAANATSPLQHHSGAPSFATATGGYNPAAAPTTPPCSYGDMSSCSAVSSPETANYYGADHDMVAREDDVDYAALADIDAFFQSPKCMDYSMMDPCSTFFSPAPESLAAEWEDEASHPNPRGRDSLAFALLVSFLPSAAAAAAARAMGYTKEQLLARLQELNIEFSCYDHPVVLTVEEQAKHVGHLGGALSKNLLLKDKKHRLYVVSALAGTKVDMKILSQRLGLGKGGLRMAPEENLLEVLQVPLGCVTPFALLNESASFFHGYAIAFLTDSYNCVFASSAVSLLLDQGFKSKQSCYFHPLTNDVTIALSSSNLDKFLMSIGRQPAYVDLEASPVVGKDNPPDLADFVPSGVPNSAEPIEKVTPTNVPRQNDVPKEKTCLPEVKAKPKVQNKGAEKTQSKIPTNGANVEKFVNDVFDIMSPLFLSEVSKKLNVKQEELSSIFDGFKEQATIDLESVTTSLKNAAYTAGFEAGFETMLNSGLKGQASRK

SEQ ID NO: 16045 - protein, 404 aa, Oryza sativa
  Clone ID: TF_OSC403248j.C1.p1.fg
MATMNNWLAFSLSPQDQLPPSQTNSTLISAAATTTTAGDSSTGDVCFNIPQDWSMRGSELSALVAEPKLEDFLGGISFSEQQHHHGGKGGVIPSSAAACYASSGSSVGYLYPPPSSSSLQFADSVMVATSSPVVAHDGVSGGGEEVRRHVRPENIDLPRRDKICRIYHYVIIMWDMIVVINKVVISFGLVIGIDGQGGGYDKEEKAARAYDLAALKYWGPTTTTNFPVNNYEKELEEMKHMTRQEFVASLRRKSSGFSRGASIYRGVTRHHQHGRWQARIGRVAGNKDLYLGTFSTQEEAAEAYDIAAIKFRGLNAVTNFDMSRYDVKSILDSAALPVGTAAKRLKDAEAAAAYDVGRIASHLGGDGAYAAHYGHHHHSAAAAWPTIAFQAAAAPPPHAAGLYH

SEQ ID NO: 16046 - protein, 235 aa, Oryza sativa
  Clone ID: TF_OSC400993j.C1.p33.fg
MAPRAATVEKVAVAPPTGLGLGVGGGVGAGGPHYRGVRKRPWGRYAAEIRDPAKKSRVWLGTYDTAEEAARAYDAAAREFRGAKAKTNFPFASQSMVGCGGSPSSNSTVDTGGGGVQTPMRAMPLPPTLDLDLFHRAAAVTAVAGTGVRFPFRGYPVARPATHPYFFYEQAAAAAAAEAGYRMMKLAPPVTVAAVAQSDSDSSSVVDLAPSPPAVTANKAAAFDLDLNRPPPVEN

SEQ ID NO: 16047 - protein, 236 aa, Oryza sativa
  unsure (1)..(236): unsure at all Xaa locations
  Clone ID: TF_OSC400993j.C1.p38.gp
MAPRAATVEKVAVAPPTGLGLGVGGGVGAGGPHYRGVRKRPWGRYAAEIRDPAKKSRVWLGTYDTAEEAARAYDAAAREFRGAKAKTNFPFASQSMVGCGGSPSSNSTVDTGGGGVQTPMRAMPLPPTLDLDLFHRAAAVTAVAGTGVRFPFRGYPVARPATHPYFFYEQAAAAAAAEAGYRMMKLAPPVTVAAVAQSDSDSSSVVDLAPSPPAVTANKAAAFDLDLNRPPPVENX

SEQ ID NO: 16048 - protein, 289 aa, Oryza sativa
  Clone ID: TF_OSC422332j.C1.p15.fg
MAMAKELQETSSSSSSSAASTSSCSSAVTDAWSSPARPNAVAGGKRKKEVVGEADEAAGGGAGEEEEEEAEAAAAGKSSAATKKRKRSSDGKHPVYRGVRMRAWGKWVSEIREPRKKSRIWLGTFPTADMAARAHDVAALAIKGRAAHLNFPDLAGVLPRAASASPKDVQAAAALAAAFTTSPSSSPSSSLSADDVAPCVVHADADEQPAAAAKNDDDDGSTTAPVAAAAAAAAADEQQLFDLPDLLFDIQDGPFGFPAMWAPLADVDEVNAELRLEEPLLWDLGVTDA

SEQ ID NO: 16049 - protein, 377 aa, Oryza sativa
  Clone ID: TF_OSC400789j.C1.p4.gm
MAGGGGQAAGGAARGRGRRGRAWRRPAGKLLAAAVPSQRSMCCTGDEVAGPGEQRRRPLDADAGGDKGAVATTSSSLLAAPMLSRRRQAEEMAAMVSALASVVAGGGGTSLPAKRPAEREPEEGAAVEGVWWSYCSELAAAAAAPSPAAPFPAGYVPSPGQHSPASAAAGDEEELPSPSSADSSGGTARKRYRGVRQRPWGKWAAEIRDPHKAARVWLGTFDTAEDAARAYDGAALRFRGSRAKLNFPEHATLPPPPTTTTAAAHRCPPPPRTDALLESQELSPGAGGGDPYSQYARFLQGSGGDGGEAAARPGGGASQRTPPATTLLYSFEGDAASAACLWQPESGGGGMGWPATSPAAWLEYGFYPPPERRDTDT

SEQ ID NO: 16050 - protein, 167 aa, Oryza sativa
  Clone ID: TF_OSC4060j.C1.p1.fg
MDDSSFGSEPTTSSSGGEAPASPPSTASSSSDGAGGKKKRPRKDGHHPTYRGVRMRSWGKWVSEIREPRKKSRIWLGTFATAEMAARAHDVAALAIKGRAAHLNFPDLAHELPRPATAAPKDVQAAAALAAAAASRPPPPMRAPAITPTDRTTRAPVRLAAPAAGRR

SEQ ID NO: 16051 - protein, 217 aa, Oryza sativa
  Clone ID: TF_OSC418226j.C1.p2.fg
MDDSHDLASPTSPDTASSSSSSTSTSSSSATVAPKKRPRNDGRHPTYRGVRMRSWGKWVSEIREPRKKSRIWLGTFATAEMAARAHDVAALAIKGRTAHLNFPDLAHLLPRPATAAPKDVQAAALLAAAAADFPSVSVDANAKSPDTCSVASAASPQPPPPDAEADPDSTLFDLPDLLLDLRYETSSSLSCGASWAVDDDVAGGVVFRLEEPMLWDY

SEQ ID NO: 16052 - protein, 286 aa, Oryza sativa
  Clone ID: TF_OSC900314j.C1.p20.fg
MAAMVSALASVVAGGGGTSLPAKRPAEREPEEGAAVEGVWWSYCSELAAAAAAPSPAAPFPAGYVPSPGQHSPASAAAGDEEELPSPSSADSSGGTARKRYRGVRQRPWGKWAAEIRDPHKAARVWLGTFDTAEDAARAYDGAALRFRGSRAKLNFPEHATLPPPPTTTTAAAHRCPPPPRTDALLESQELSPGAGGGDPYSQYARFLQGSGGDGGEAAARPGGGASQRTPPATTLLYSFEGDAASAACLWQPESGGGGMGWPATSPAAWLEYGFYPPPERRDTDT

SEQ ID NO: 16053 - protein, 198 aa, Oryza sativa
  Clone ID: TF_OSC900007j.C1.p7.fg
MCGGAIIADFVPPAGARRAAASDISDNAVLSAAGAGDESFAAAKAPAPGRKTAYRGIRRRPWGRWAAEIRDPRKGARVWLGTYATAEEAARAYDVAARDIRGAKAKLNFPPTIGAAAAPPPPKKRRKAAAAANHHHHHHQQESSGSSSASSLPPTPPPAAEHQLRECMSGLEAFLGLEEEEDDGGAGEPWDAVDMMLE

SEQ ID NO: 16054 - protein, 318 aa, Oryza sativa
  Clone ID: TF_OSC404155j.C1.p16.fg
MTARSMLRNHPEASVLDTIRQHLLEEPRGGGGGEAAEASFGSLVADMWSDSLPFRDDDADDMVVFGAMRDAFSCGWLPDGVFAEVKPEPLLSPDSSSYDGSSCCFGFADVSEPVTPSDAASGAAEAAAAAAAATAEHGKEEEAAAAVARGKHYRGVRQRPWGKFAAEIRDPAKNGARVWLGTFDTAEDAALAYDRAAYRMRGSRALLNFPLRIGSEIAAAAAAAAAAAAGDKRPSPEPATSESSFSSSSSCTTTTTSSSTSSSGSPKRRKRGEAAAASMSMPLVPPPSQLNWPVQAWYPAAAPVEQVAITPRVEQLVI

SEQ ID NO: 16055 - protein, 196 aa, Oryza sativa
  Clone ID: TF_OSC24031j.C1.p2.fg
MAALFEAAETAAIVAALTRVIADGGRGGSGAGVPPPAPSLVVPPLAGTGGGRRVDVAREEEMVGVVSAGDHTGEASVAAAAPVGQVAGVDQGPEEAARVWLGTFRTAEDAARAYDAAALRFRGRRAKLNFPEEVSRPWQGHDVDHMSCSPPSISNARFLGSWTFGPPQPPSRSVAAAATTLLGGSHGGNGAENGRE

SEQ ID NO: 16056 - protein, 107 aa, Oryza sativa
  Clone ID: TF_OSC404155j.C1.p19.gp
IRDPAKNGARVWLGTFDTAEDAALAYDRAAYRMRGSRALLNFPLRIGSEIAAAAAAAAAAAAGDKRPSPEPATSESSFSSSSSCTTTTTSSSTSSSGSPKRRKRGEA

SEQ ID NO: 16057 - protein, 323 aa, Oryza sativa
  Clone ID: TF_OSC900036j.C1.p3.fg
MCGGGPDNHHAITVAADLPPPPPSVVAVEMAPPRGHRPGKEVEYNEEEEDDDDEYDGREFEEEFLRFSMMVDEEDDDGDDDDEVEVEIIAVVSPPHRPLVGARGTTSAVESVTNLQARTSPLPNPVVPQTGTKASKRGDSGAKAKPAAAKKRRSKHGFLGVHQRTYGRWSAEIRDNVIKGSRFWIGTFDTALDAALAYDAVSRRLYGLNAKTNFPAAAGEDDLPPPPPPAKPCSSTKRPKKCNTSGDLGAAAAPPQAVDTPAAAAAGVELTSLLCSVAAQAQEVSDGWEFIQELLLLGGGVSPLDYLNGQELAGAAVGDLWSF

SEQ ID NO: 16058 - protein, 392 aa, Oryza sativa
  Clone ID: TF_OSC407093j.C1.p2.fg
MGRPVKQKTTTWLVELLREYCQRAAAQATAGNGAVAAAAAVEGEINTDGLAALAVEAEGFAAANGEGWVAPAVEGEGEGFVGAPVVEGEEGLTAELLVAAERKYRGARKRPWGKYAAEIRIRNTMGVKERVWLGTFGTAEEAAWAYDTAATVIHGDKATTNFPRAPLRPATTPVMRSMLVFFGIAHLVRSLVPRARGPRGRGGGARGRGRSRRRRAAAAAAPSAPASEAPPPPPPSSALVPEPELQVQGGRGERGRGRGRGRGGGRGGRRGRGRTPARVVAEDSPMLQATTPAAAPAPAPALAPAPANQAIFQPMIIPPGGVVVAPDDFLLSAISDDEPVLPHKKPKLLGVYTPPDSPDQFVMEFFADLGDGDDILSSSFWQDPAGDGEDTQ

SEQ ID NO: 16059 - protein, 178 aa, Oryza sativa
  Clone ID: TF_OSC400825j.C1.p36.fg
MARPQQRYRGVRQRHWGSWVSEIRHPLLKTRIWLGTFETAEDAARAYDEAARIMCGPRVRTNFPHDVADEAAPPPPPHSAAAASSSFLSAALVAKLHRFNLASVQAAQRGNSNDDDSTTSSSAAASSRAVIPSLPAAAGALGNAAATAEWSGGFLEEQYVDQMIEELLDSNFSMEISC

SEQ ID NO: 16060 - protein, 321 aa, Oryza sativa
  Clone ID: TF_OSC900006j.C1.p4.fg
MDRQWRCLAAAASTSGNSKLPPLPMALGGAVEYGQLVHGAAAPVAPFFVDAEQQSLSPATAMVLGAGWYNYNLVTPSQAAQLHHRLRRAVGAAPCSMKRCGGMAAAAAGRLALVGPAPVQAKLYRGVRQRHWGKWVAEIRLPRNRTRLWLGTYDTAEDAALAYDGAAFRLRGDAARLNFPELRRGGRHHAPALSASVDAKILQATTTTTADTAAAAAPASTNTTPPPSPRVVKTEPGCCSVSEASTTTTADAADVSSTGSSPSPTSSNQAATATPPAPRPPPPLPETIQQLDFTEAPWDEADGFALRRYPSWEIDWDAILS

SEQ ID NO: 16061 - protein, 247 aa, Oryza sativa
  Clone ID: TF_OSC418226j.C1.p5.fg
MEQEQVMSQESNSCTCSSSSNDASSAACSSLNASSPSSVDSGSAGGGGGGKKRPRSDHLKHPTYRGVRMRSWGKWVSEIREPRKKSRIWLGTFDTAEMAARAHDVAALAIKGRTVHLNFPDLAHLLPRAASASPKDVQAAAALAAATASPAPALSPTPCHDVDAAADDEPEPAEPEQATAPVCIVENGTLQQDGGTGLDYTYFTMPDALLEFGFTLPPPPPPYYCGSPWDDDADDFFFGEPLVLWEH

SEQ ID NO: 16062 - protein, 221 aa, Oryza sativa
  Clone ID: TF_OSC401961j.C1.p10.fg
MEQHSHCWYYGGGMAVTAAAGAGAASSTSSESQPSGYDYETAGSAEVSAPGGGAGRERAARKEEGGAGAAAAAAGFIGVRKRPWGRFAAEIRDSTRNGVRVWLGTFETAEAAAMAYDQAALSARGAAAALNFPVERVRESLRALALGAAGGSPVLALKGRHSKRKRRKRSELAGATATANKTTTTTSATTGGEHKQIVLELEDLGADYLEELLWMSEQTSH

SEQ ID NO: 16063 - protein, 299 aa, Oryza sativa
  Clone ID: TF_OSC421444j.C1.p10.fg
MAFSEPPKPASQPSPPSSPMSERPPSGRSRRRAQEPGRFLGVRRRPWGRYAAEIRDPTTKERHWLGTFDTAQEAALAYDRAALSMKGAQARTNFVYTHAAYNYPPFLAPFHAPQYAAAAAAPSSVQYGGGVGAAPHIGSYGHHHHHHHHHGHGAASGASSVGECSTMPVMVPVDPHRSSMSSSLLDMDRNGHDFLFSGADDNSGYLSSVVPESCLRPRGGGAAADHQDMRRYSDADAYGMMGLREDVDDLAQMVAGFWGGGDAADQLGACGFPASGGAADMVASSQGSDSYSPFSFLSH

SEQ ID NO: 16064 - protein, 219 aa, Oryza sativa
  Clone ID: TF_OSC401894j.C1.p9.fg
MEWAYYGSGYSSSGTPSPVGGDGDEDSYMTVSSAPPKRRAGRTKFKETRHPVYKGVRSRNPGRWVCEVREPHGKQRIWLGTFETAEMAARAHDVAAMALRGRAACLNFADSPRRLRVPPLGAGHEEIRRAAVEAAELFRPAPGQHNAAAEAAAAVAAQATAASAELFADFPCYPMDGLEFEMQGYLDMAQGMLIEPPPLAGQSTWAEEDYDCEVNLWSY

SEQ ID NO: 16065 - protein, 373 aa, Oryza sativa
  Clone ID: TF_OSC401369j.C1.p98.fg
MEEGFVALKRTEHVEVTSLAVAVEATPSAKGGKGKVVVGGGGAGGGVGPTRVRVFCDDFDATDSSSDEDEEEVTARRRVKRYVQEIRLQRAAAVAVPPVKVKGEEVFPAAVSAKMAEAAKARVVLAAGRKRKAGGVDGAEPRFRGVRRRPWGKYAAEIRDPWRRVRVWLGTFDTAEEAAKVYDTAAIQLRGRDATTNFNQSGDSASLDVPPEVAERVPQPPGASKNASPATSYDSGEESHAAAASPTSVLRSFPPSAVVATADTANKKQPPPPPLVVRETDESVDVFGCSFSDDGGFAGELPPLYTDFDLLADFPEPPLDFLSNLPVEPFSLAPFSSNNGSPDLHLDDAPSPAAAQVDDFFQDITDLFQIPVV

SEQ ID NO: 16066 - protein, 419 aa, Oryza sativa
  Clone ID: TF_OSC400957j.C1.p1.fg
MATTTWCCGCCCSCLATARSRSSVLNSGDAGGGGGGGGGGGLFRFDLLASSPDDDECSGEQHQLPAASGIVTRQLLPPPPPAAPSPAPAWQPPRRAAEDAALAQRPVVAKKTRRGPRSRSSQYRGVTFYRRTGRWESHIWAYDRAAIKFRGLEADINFNLSDYEDDLKQMRNWTKEEFVHILRRQSTGFARGSSKFRGVTLHKCGRWEARMGQLLGKKYIYLGLFDTEVEAARAYDRAAIRFNGREAVTNFEPASYNVDALPDAGNEAIVDGDLDLDLRISQPNARDSKSDVATTGLQLTCDSPESSNITVHQPMGSSPQWTVHHQSTPLPPQHQRLYPSHCLGFLPNLQERPMDRRPELGPMPFPTQAWQMQAPSHLPLLHAAASSGFSAGAGAGVAAATRRQPPFPADHPFYFPPTA

SEQ ID NO: 16067 - protein, 361 aa, Oryza sativa
  Clone ID: TF_OSC900118j.C1.p3.fg
MATTTWCCGCCCSCLATARSRSSVLNSGDAGGGGGGGGGGGLFRFDLLASSPDDDECSGEQHQLPAASGIVTRQLLPPPPPAAPSPAPAWQPPRRAAEDAALAQRPVVAKKTRRGPRSRSSQYRGVTFYRRTGRWESHIWAYDRAAIKFRGLEADINFNLSDYEDDLKQMRNWTKEEFVHILRRQSTGFARGSSKFRGVTLHKCGRWEARMGQLLGKKYIYLGLFDTEVEAARAYDRAAIRFNGREAVTNFEPASYNVDALPDAGNEAIVDGDLDLDLRISQPNARDSKSDVATTGLQLTCDSPESSNITVHQPMGSSPQWTVHHQSTPLPPQHQRLYPSHCLGFLPNLQVLLSTPLAYQF

SEQ ID NO: 16068 - protein, 692 aa, Oryza sativa
  Clone ID: TF_OSC400032j.C1.p34.fg
MATMNNWLAFSLSPQDQLPPSQTNSTLISAAATTTTAGDSSTGDVCFNIPQDWSMRGSELSALVAEPKLEDFLGGISFSEQQHHHGGKGGVIPSSAAACYASSGSSVGYLYPPPSSSSLQFADSVMVATSSPVVAHDGVSGGGMVSAAAAAAASGNGGIGLSMIKNWLRSQPAPQPAQALSLSMNMAGTTTAQGGGAMALLAGAGERGRTTPASESLSTSAHGATTATMAGGRKEINEEGSGSAGAVVAVGSESGGSGAVVEAGAAAAAARKSVDTFGQRTSIYRGVTRHRWTGRYEAHLWDNSCRREGQTRKGRQGGYDKEEKAARAYDLAALKYWGPTTTTNFPVNNYEKELEEMKHMTRQEFVASLRRKSSGFSRGASIYRGVTRHHQHGRWQARIGRVAGNKDLYLGTFSTQEEAAEAYDIAAIKFRGLNAVTNFDMSRYDVKSILDSAALPVGTAAKRLKDAEAAAAYDVGRIASHLGGDGAYAAHYGHHHHSAAAAWPTIAFQAAAAPPPHAAGLYHPYAQPLRGWCKQEQDHAVIAAAHSLQDLHHLNLGAAAAAHDFFSQAMQQQHGLGSIDNASLEHSTGSNSVVYNGDNGGGGGGYIMAPMSAVSATATAVASSHDHGGDGGKQVQMGYDSYLVGADAYGGGGAGRMPSWAMTPASAPAATSSSDMTGVCHGAQLFSVWNDT

SEQ ID NO: 16069 - protein, 118 aa, Oryza sativa
  Clone ID: TF_OSC18348j.C1.p1.fg
MENLSCLISSPLPMPMPEYELAACSPASPSSSASSTSTPPSPGGEAAARCGEKRGRGGGGGRHPTYRGVRMRAWGKWVSEIREPLKKSRIWLGTFPTPEMVAHAHELFALVVNMIISL

SEQ ID NO: 16070 - protein, 244 aa, Oryza sativa
  Clone ID: TF_OSC401762j.C1.p9.fg
MALSEPDLAAETEAIVSALTHVVAYGGGGPPPSEETAASAVTRTAPWRADGARQGAVPAARKYRGVRRRPWGKWAAEIRDPHRAARVWLGTFATAEDAARAYDAAALRFRGGRARLNFPEDAAAADERRATDAAAAAAAASSAPAALLESQPGDVADCLDYSRILAGAPERPTSSTVPDGFFGGGGNGRFLHSWSIGTSPSPSGSGSGGAGGGGGGGGGGAPVRPLFHGGNGWEQRGDSAYNGF

SEQ ID NO: 16071 - protein, 247 aa, Oryza sativa
  Clone ID: TF_OSC401286j.C1.p8.fg
MPELEVCSPASSGGASPPESPVEGRRGGGGGEKRGRSGDGGRHPSYRGVRMRAWGKWVSEIREPRKKSRIWLGTFPTPEMAARAHDAAALVVKGPAAVLNFPDMAASLPRPASASPRDVQAAAARAAAMEPPQPPPSSLTVQADSAAAAFLTPKNGGVSGAGAADDELEAIVELPRLDELDAAELVFGAAFQDTAAEHPWCDPVWIDGGYAAAAAAAAAAAAHDDLFGLDADHHGWAQSVGALLWNL

SEQ ID NO: 16072 - protein, 136 aa, Oryza sativa
  Clone ID: TF_OSC419098j.C1.p8.fg
MDGDGGGGWDDQGNGGGETTKYRGVRRRPSGKFAAEIRDSSRQSVRVWLGTFDTAEEAARAYDRAAYAMRGHLAVLNFPAEARNYVRGSGSSSSSRQHQQRQVIELECLDDQVLQEMLKGGDDQYRSAAGSKRNNY

SEQ ID NO: 16073 - protein, 216 aa, Oryza sativa
  Clone ID: TF_OSC401153j.C1.p10.fg
MCGGAIISDFIPQREAHRAATGSKRALCASDFWPSASQEAADFDHLTAPCTFTPDQAAEEPTKKRERKTLYRGIRRRPWGKWAAEIRDPAKGARVWLGTFATAEAAARAYDRAARRIRGAKAKVNFPNEDPPLDDPAADGHSHGGAAIPCREFMDYDAVMAGFFHQPYVVADGVPAVPAEEAPTVAYVHHHLPPQPQQDAGLELWSFDNIHTAVPM

SEQ ID NO: 16074 - protein, 639 aa, Oryza sativa
  Clone ID: TF_OSC401980j.C1.p10.fg
MTNSNNGNGGTNAAASGWLGFSLSPHMASSTMDEHHHVHHHQQQQQQQQQQQHHQQQQHGLFFPSVTTAAAAAAYGLAGDVVAATNGYYSQLASMPLKSDGSLCIMEALRRTDQDHHGPKLEDFLGAAQPAMALSLDNTSSFYYGGGGAAAAGHGQHGYLQACDLYGGPAAPSLVTAADEEAAAAAAAMASWVAARGAATAYATGAADANAAENVLPSATAAQHLHHPLALSMSSGSLSSCITAGEYGMAAVAAADGGRKRGGAGGGGQKQPVHHRKSIDTFGQRTSQYRGVTRHRWTGRYEAHLWDNSCKKEGQTRKGRQGGYDMEEKAARAYDLAALKYWGPSTHINFPLEDYQEELEEMKNMTRQEYVAHLRRKSSGFSRGASMYRGVTRHHQHGRWQARIGRVSGNKDLYLGTFSTQEEAAEAYDVAAIKFRGLNAVTNFDITRYDVDKIMASNTLLPADLARRNAATTTSKDDHSAAGAGAIVSVHSAADIAVADTLWKATTAPRQQQQHHDDVVLSGADQAAFSVLHDLVAVDAAAAHQQQQQQQHMSMSAASSLVTSLSNSREGSPDRGGGLSMLFAKPSPAVAASAQQQASTKLMAAPLPLGSWVSSPPASARPPAVSIAHMPLFAAWTDA

SEQ ID NO: 16075 - protein, 379 aa, Oryza sativa
  Clone ID: TF_OSC401446j.C1.p16.fg
MAKPRKNSTTTNTSSSGVAAAAAAAAVKPKRTRKSVPRESPSQRSSVYRGVTRHRWTGRFEAHLWDKNSWNESQNKKGKQVYLGAYDDEEAAARAYDLAALKYWGPDTILNFPLSAYEGELKEMEGQSREEYIGSLRRKSSGFSRGVSKYRGVARHHHNGRWEARIGRVFGNKYLYLGTYATQEEAAMAYDMAAIEYRGLNAVTNFDLSRYIKWLRPGADGAGAPQNPHPMLGALSAQDLPAIDLDAMASSFQHDGHGAAAAAAQLIPARHSLGHTPTTSALSLLLQSPKFKEMIERTSAAETTTTSSTTTSSSSPSPPQATKDDGASPQCSFPEDIQTYFGCAAEDGAAGAGYADVDGLFFGDLAAYASPAFHFELDL

SEQ ID NO: 16076 - protein, 207 aa, Oryza sativa
  Clone ID: TF_OSC21386j.C1.p4.fg
MSSSSSATTTKYRGVRLRKWGKWVSEIRLPNSRERIWLGSYDTPEEAARAFDAAFVCLRGGGEAAGNGINFPGSPPAVARTSDPQEVYAAAVSHANNRPPPPPSARATSSALPWEEAPVVAAQEAAADMAPDVVVLPSSPVNVLAAAGSFEYWSQQPLYSPTAASLDLQRWMTAAAAAEESIMEDDDDEGTSDGLWSFHYSPTRSKW

SEQ ID NO: 16077 - protein, 177 aa, Oryza sativa
  unsure (1)..(177): unsure at all Xaa locations
  Clone ID: TF_OSC416986j.C1.p7.np
GEGWRRRREVVRVATALRRWRGEMERSEARSVADGGGSKSRKCCPLRRSRKGCMKGKGGPENQRCPFRGVRQRTWGKWVAEIREPNRGARLWLGTFNTALDAARAYDSAARALYGDCARLNLLLAGICCXQLIHTFMYMHVVYVRIASVILLRVMXYTLSISKYLTPLISLIYLTVH

SEQ ID NO: 16078 - protein, 173 aa, Oryza sativa
  unsure (1)..(173): unsure at all Xaa locations
  Clone ID: TF_OSC900118j.C1.p39.gp
WRRGRGRRGRXRFRGVRQRPWGRFAAEIRDPHLRRRLWLGTFDTAEEAAAAYDAASVRLRGSSAATNFASVRCYSLPPELPKPTISPPEAAVRPITLPIGTAKPTLLPRVKEEGESCGGRVKEEASSCEVQVLAPEPMWTMISGKRKKRSGCGTRVRAFHAVSACVEEVGGAX

SEQ ID NO: 16079 - protein, 232 aa, Oryza sativa
  Clone ID: TF_OSC900129j.C1.p30.fg
MRRRVSSSSSSSSSSSPARHHKARRSRRKLAVDEDWEAAFREFLSRDHDDDDDDHDGQHVVVAPLIRGSDKCVHGHEVVASTVGGGASGGRRRADDDDGERRRRRRREKRSYPYRGIRQRPWGRWASEIRDPVKGIRVWLGTFDTAEGAARAYDDEVRRIYGGNAKTNFPPSPPTPPPPEKPAAERSPSTTPTTTTEDSGDSRILIECCSDDLMDSLLAAFDMTTGDMRFWS

SEQ ID NO: 16080 - protein, 738 aa, Oryza sativa
  Clone ID: TF_OSC31530j.C1.p6.fg
MKNGARKDAGGGGGGVFVPCVDIKSFVLSLAFLTVFVALWQLQPYGSLLTAARSTASVSASPCSLIATPAAAAASAGVIRSENSTADTAKTAPAAVASAVPARLARAARPARVEDPNKRELRPYGSAAALFVQMGAYRGGPRTFAIVGLASKPTHVFSNPYFKCEWLPNPTAGNPSPRPVRTKAYKMLPDWGYGRVYTVVVVNCTFPSNPNADNAGGKLLVHAYYSTTSRRYERFVALEEAPGSYDESRFSPPFPYDYLYCGSSLYGNLSASRMREWVAYHAHFFGPRSHFVFHDAGGISPEVKAVLDPWVRAGRLTVQDIRAQAEYDGYYYNQFLVVNDCLHRYRHAANWTFFFDVDEYIYLPNGQTLDQVLGKLSGYSQFTIEQNPMSSKLCVQDPSKDYSREWGFEKLVFRNSITKVRRDRKYAIQARNAYSAGVHMSQNVYGRTTHKTESLIRYYHYHNSINVMGEPCREFVPVPVNGSKLMFEGIPYVYDDNMKRLAGQIKREELGGLEEEEGEPVVGEAALGGGAGGGRVEGGVDVGEEGVGDGDVDEEEEGEREDEGGGDAGEERAVGDDDDELRRRRLEGERGAGGGRPALTSPASRRRRCPRPDPASPGRIWPPRRHSDDDDPAVFYLRGRSARLNFPEEISLLASPSEGGGAGEPREPDGGTLSAASIRKKAIEVGSHVDALQTGMMVAPTHHREQQKHHHHPHLQPHGEEQHHHEDWISSKYEDIHT

SEQ ID NO: 16081 - protein, 182 aa, Oryza sativa
  Clone ID: TF_OSC989j.C1.p1.fg
MAKRRSNGETAAASSDDCSAGVCGGGGGGEVEPRRRQKRPRRSAPRDCPSQRSSAFRGVTRCAPVDGRFEAHLWDKNTWNESQSKKGRQGAYDGEEAAARAYDLAALKYWGHDTVLNFPLSTYDEELKEMEGQSREEYIGSLRGRAVASQEGCPSTEELQGIITTANGRLGLGVCSATNTST

SEQ ID NO: 16082 - protein, 216 aa, Oryza sativa
  Clone ID: TF_OSC900306j.C1.p12.fg
MATVQPAASDPAPPPPPETEEQPAAAGGEEIAALDEQLAVADGGGDDGKAAAAAEGGGGGGGGKLVAETMRKYAAPRSSRYHGVTRLKWSGKFEAHLWDNSSQVEGRKRKGKHGSYVTEENAARAHDLAALKYWGAGPNTKLNFNVSDYEKEIERMKTMSQDEFVVYIRRQSSCFSRGTSSYRGVTRRKDGRWQARIGRIGESRDTKDIYLGTFGE

SEQ ID NO: 16083 - protein, 364 aa, Oryza sativa
  Clone ID: TF_OSC401190j.C1.p4.fg
MCGGAILADFTPARVPRRLTAAELLPVTPTPPAAERRTTRKRKSDVDFEAEFELFEDDDDDDEFELSDDGDESLAVSCVSSPKSKAVPSFSCTMRWRNLACFLEGFSPDGNLNFTRFLLLLLISSIAGGSFVGCLLELQAAAARGGGGGRSSEGEQEEQVQGRRRRPSGRFAAEIRDPKKGRRVWLGTYGSAEEAAMAYDREARRIRGKGARLNFPRDGDGSPRRSNDRPCWTIDLNLPAAAVSGDDDDAMAVDAADADAGSAGRAAAYADQEALSAAKCKIKQCPRDEQMASATPELMEEDASSSRNMVPLSMALQLQYAAMIAECDREMEEIAAVERDLERRRRQVFERRGHLVRQASLLLD

SEQ ID NO: 16084 - protein, 175 aa, Oryza sativa
  Clone ID: TF_OSC30077j.C1.p2.fg
MADAAEQHHRQEETAAATTTPQQMMMRRRRARASSEYLGVRRRPWGRYAAEIRNPYTKERHWLGTFDTAEEAAVAYDLSAISISGAAAARTNFLYPDMHHHHPSPPQHALSPAVPPPPPPPPPSPLYDDDYLSPAAAEEEVEAGDDESLTIATILQSFQYQQSVPPASSGSMFYY

SEQ ID NO: 16085 - protein, 292 aa, Oryza sativa
  Clone ID: TF_OSC405965j.C1.p10.fg
MMNFSSYFYSSSAAAAGGGGGGGEKKSSSSSASKKKQQQAAAAEGGNNQTRYLGVRRRPWGRYAAEIRDPATKERHWLGTFDTAEEAAVAYDRAARSLRGARARTNFAYPDLPPGSSVTPYLSPDLSADASDQLLQPFYANPSAAAALPTPAAVMAGGGGVEFGGEYMYGGGVDMSSLMDDIAAMPDDLPPSVTGGGGGFASSDEYSSGGGGMVDDVSMYCGGNGGGSSWCDASDFASYSSSSPAAAAAAGSHGMYFEEGYVHSPLFSPMPAVDDAGADGFQLGGSSSSYYY

SEQ ID NO: 16086 - protein, 44 aa, Oryza sativa
  Clone ID: TF_OSC417134j.C1.p8.gm
MRKSKQPQPQPSPEIRYRGVRKRPSGRYAAEIPGPGEEDPDSGW

SEQ ID NO: 16087 - protein, 394 aa, Oryza sativa
  Clone ID: TF_OSC900225j.C1.p16.fg
MDSTSCLLDDASSGASTGKKAAAAAASKALQRVGSGASAVMDAAEPGAEADSGGERRGGGGGKLPSSKYKGVVPQPNGRWGAQIYERHQRVWLGTFTGEAEAARAYDVAAQRFRGRDAVTNFRPLAESDPEAAVELRFLASRSKAEVVDMLRKHTYLEELTQNKRAFAAISPPPPKHPASSPTSSSAAREHLFDKTVTPSDVGKLNRLVIPKQHAEKHFPLQLPPPTTTSSVAAAADAAAGGGDCKGVLLNFEDAAGKVWKFRYSYWNSSQSYVLTKGWSRFVKEKGLHAGDAVGFYRAAGKNAQLFIDCKVRAKPTTAAAAAAFLSAVAAAAAPPPAVKAIRLFGVDLLTAAAPELQDAGGAAMTKSKRAMDAMAESQAHVVFKKQCIELALT

SEQ ID NO: 16088 - protein, 329 aa, Oryza sativa
  Clone ID: TF_OSC101030j.C1.p16.fg
MCGGAILAELIPSAPAARRVTAGHVWPGDANKAKKKGARADDFEAAFRDFDNDSDDEEMMVEEAEEEEATSEHKPFVFRAKKAAAAASSRRRKPAQYRGVRRRPWGKWAAEIRDPVKGIRVWLGTFTNAEAAALAYDDAARAIRGDRAKLNFPSATTPDTRKRGRATAAAAPAVKATPVINLVEEEDEEEVAAAMASIKYEPETSESSESNALPDFSWQGMSASDEFAVAAAALSLDSDDDLAKKRPRTEPEDTTDSGSGDDTDALFDALLFADQYNHFNGGAYESLDSLFSADAVQTTAAAAAADQGMGLWSFDDGCCLVDVEASLSF

SEQ ID NO: 16089 - protein, 330 aa, Oryza sativa
  unsure (1)..(330): unsure at all Xaa locations
  Clone ID: TF_OSC101030j.C1.p28.gp
MCGGAILAELIPSAPAARRVTAGHVWPGDANKAKKKGARADDFEAAFRDFDNDSDDEEMMVEEAEEEEATSEHKPFVFRAKKAAAAASSRRRKPAQYRGVRRRPWGKWAAEIRDPVKGIRVWLGTFTNAEAAALAYDDAARAIRGDRAKLNFPSATTPDTRKRGRATAAAAPAVKATPVINLVEEEDEEEVAAAMASIKYEPETSESSESNALPDFSWQGMSASDEFAVAAAALSLDSDDDLAKKRPRTEPEDTTDSGSGDDTDALFDALLFADQYNHFNGGAYESLDSLFSADAVQTTAAAAAADQGMGLWSFDDGCCLVDVEASLSFX

SEQ ID NO: 16090 - protein, 707 aa, Oryza sativa
  Clone ID: TF_OSC17489j.C1.p1.fg
VTTSSMIEHMKNLLKIPGSKVLFGGEPLENHSIPEIYGAFKPTAVFVPLSEILKSGNFELVTREIFGPFQVVTEYSDDELELVLEACERMNAHLTAAVVSNDPLFLQEVLGRSVNGTTYAGIRARTTGAPQNHWFGPAGDPRGAGIGTPEAIKLVCDPNFNGSNWIGIPVHDTNSGEPRHNENSVHGALRLQMRPLYDTAKYADNKQVTNSVASQCNQYINTPAVIQIATCYIGGQEPSYIMMVKNEIENYSGSSPAMIINALEGGAEAGPVVRRRRREPSLLAPINGDGDTNGGGIGKSSLSGITVKRSSRFRGVSRFRACRDDKKMLSCRHRWTGRFEAHLWDKNSWNPTQRKKGKQVYLGAYDEEEAAARAYDLAALKYWGPTTYTNFPVMDYEKELKIMENLTKEEYLASLRRKSSGFSRGVSKYRGVARHHQNGRWEARIGRVFGNKYLYLGTYSEYKNSAYTLFYIVNWYSNASKTSHLNIGPSAILPKSFSPGTQEEAARAYDIAAIEYKGVNAVTNFDLRSYITWLKPTPAHVAMNPAEALAMQIPVDHFLPMETQMMMLPQSNPFTSYHNAQSLGGGDGGSSSTNNQEASMIISPSGSSRKRSSSTALSLLLKSSMFRQLVEKNSDAGEENGGEMREPGAHPGEGYEYHNFFQGDAAPDMDMCDLLSSGNVHAASGSAGFEEDIACYSGFGSMQSLQQ

SEQ ID NO: 16091 - protein, 292 aa, Oryza sativa
  unsure (1)..(292): unsure at all Xaa locations
  Clone ID: TF_OSC417300j.C1.p3.gp
MAAAIDLSGEELMRALEPFIRDASGSPPVCSQFSPTSPFSFPHAFAYGGGLAQQPELSPAQMHYIQARLHLQRQAAQAGPLGPRAQPMKASSSSASAAGAAATPPRPQKLYRGVRQRHWGKWVAEIRLPRNRTRLWLGTFDTAEEAALAYDQAAYRLRGDAARLNFPDNAASRGPLHASVDAKLQTLCQNIAAAKNAKKSSVSASAAATSSAPTSNCSSPSSDDASSCLESADSSPSLSPSSAATTAETPATVPEMQQLDFSEAPWDEAAAFALTKYPSYEIDWDSLLAANX

SEQ ID NO: 16092 - protein, 291 aa, Oryza sativa
  Clone ID: TF_OSC417300j.C1.p4.fg
MAAAIDLSGEELMRALEPFIRDASGSPPVCSQFSPTSPFSFPHAFAYGGGLAQQPELSPAQMHYIQARLHLQRQAAQAGPLGPRAQPMKASSSSASAAGAAATPPRPQKLYRGVRQRHWGKWVAEIRLPRNRTRLWLGTFDTAEEAALAYDQAAYRLRGDAARLNFPDNAASRGPLHASVDAKLQTLCQNIAAAKNAKKSSVSASAAATSSAPTSNCSSPSSDDASSCLESADSSPSLSPSSAATTAETPATVPEMQQLDFSEAPWDEAAAFALTKYPSYEIDWDSLLAAN

SEQ ID NO: 16093 - protein, 487 aa, Oryza sativa
  Clone ID: TF_OSC400651j.C1.p26.fg
MAKRSSPDPASSSPSASSSPSSPSSSSSEDSSSPMSMPCKRRARPRTDKSTGKAKRPKKESKEVVDPSSNGGGGGGGGKRSSIYRGVTRHRWTGRFEAHLWDKNCSTSLQNKKKGRQGAYDSEEAAARAYDLAALKYWGPETVLNFPLEEYEKERSEMEGVSREEYLASLRRRSSGFSRGVSKYRGVARHHHNGRWEARIGRVLGNKYLYLGTFDILYNLSQNYRFKNLFYKNTDSVASFITKLQIKDHETKIPSYTQEEAAKAYDLAAIEYRGANAVTNFDISCYLDQPQLLAQLQQEPQLLAQLQQELQVVPALHEEPQDDDRSENAVQELSSSEANTSSDNNEPLAADDSAECMNEPLPIVDGIEESLWSPCLDYELDTMPGAYFSNSMNFSEWFNDEAFEGGMEYLFEGCSSITEGGNSMDNSGVTEYNLFEECNMLEKDISDFLDKDISDFLDKDISISDRERISPQANNISCPQKMISVCN

SEQ ID NO: 16094 - protein, 219 aa, Oryza sativa
  Clone ID: TF_OSC401719j.C1.p17.fg
MDTEDTSSASSSSVSPPSSPGGGHHHRLPPKRRAGRKKFRETRHPVYRGVRARAGGSRWVCEVREPQAQARIWLGTYPTPEMAARAHDVAAIALRGERGAELNFPDSPSTLPRARTASPEDIRLAAAQAAELYRRPPPPLALPEDPQEGTSGGGATATSGRPAAVFVDEDAIFDMPGLIDDMARGMMLTPPAIGRSLDDWAAIDDDDDHYHMDYKLWMD

SEQ ID NO: 16095 - protein, 197 aa, Oryza sativa
  Clone ID: TF_OSC101807j.C1.p6.fg
MEKKYKGVRRRKWGKWVSEIRLPNSRDRIWLGSYDSPEKAARAFDAAFVTLRGHGAAGADLNFPDSPPSCDARSSDPRQVQAAALSHANRAHVTPQQAAAALMSPPSLSPPPGFATGSEVVAPAVRADGSIDWRPVMAHPPPLYSPPGWGGGHAYDFLQPPPPSPPLPSCDDDMVDVVDESSASLWSFDTRDSYFRY

SEQ ID NO: 16096 - protein, 622 aa, Oryza sativa
  Clone ID: TF_OSC404117j.C1.p14.fg
MASADNWLGFSLSGQGNPQHHQNGSPSAAGDAAIDISGSGDFYGLPTPDAHHIGMAGEDAPYGVMDAFNRGTHETQDWAMRGLDYGGGSSDLSMLVGSSGGGRRTVAGDGVGEAPKLENFLDGNSFSDVHGQAAGGYLYSGSAVGGAGGYSNGGCGGGTIELSMIKTWLRSNQSQQQPSPPQHADQGMSTDASASSYACSDVLVGSCGGGGAGGTASSHGQGLALSMSTGSVAAAGGGGAVVAAESSSSENKRVDSPGGAVDGAVPRKSIDTFGQRTSIYRGIDGQEDMKLICGIIAVGEKAKVARGDRMSNYEKELEEMKHMTRQEYIAHLRRNSSGFSRGASKYRGVTRHHQHGRWQARIGRVAGNKDIYLGTFSTEEEAAEAYDIAAIKFRGLNAVTNFDMSRYDVKSILDSSTLPVGGAARRLKEAEVAAAAAGGGVIVSHLADGGVGGYYYGCGPTIAFGGGGQQPAPLAVHYPSYGQASGWCKPEQDAVIAAGHCATDLQHLHLGSGGAAATHNFFQQPASSSAVYGNGGGGGGNAFMMPMGAVVAAADHGGQSSAYGGGDESGRLVVGYDGVVDPYAAMRSAYELSQGSSSSSVSVAKAANGYPDNWSSPFNGMG

SEQ ID NO: 16097 - protein, 342 aa, Oryza sativa
  Clone ID: TF_OSC401545j.C1.p27.fg
MVEVIVEKKARRIVRGRWHVEASNEAAAAAPAVAAPAPRVVRVLCRDHDATDSSGDDDGEDDAPRRARLLVHEIHVARQPVAMSPAAASSSQRRRVGPMKRTESAVDATMDATAAAPERKFRGVRKRPWGKYGAEIRVSQQSARVWLGTFDTAEEAARVYDHAALRLRGPSATTNFPMTPAAPSPPPSRATYAGAASGYDESSDESQLVGSPVSVLRPMPARATAKKEAKEEDDSAPDILGISAGDGLISPFTCDVLNFPPPDEDMFGGGISFGEPTPPPMVFDDDCMARLGHAPNDDEHPVTSSSFLDGDLGDLPSWTEVDGFFSDVGGDDLFAAEPFPAL

SEQ ID NO: 16098 - protein, 192 aa, Oryza sativa
  unsure (1)..(192): unsure at all Xaa locations
  Clone ID: TF_OSC401249j.C1.p62.gp
MVGGEVMCEAAAPRYRGVRKRPWGRFAAEIRDPAKRARVWLGTYDSAEAAARAYDVAARNLRGPLARTNFPLXLLPPAPVAPLPPPREGGGGGAAGGRPXACSASSTVESSSGPRGPRPAATAAAVPRRRVPRPAPPAPDAGCHSDCASSASVVDDADDASTVRSRVAAFDLNLPPPLDRDHVDLCTDLRLX

SEQ ID NO: 16099 - protein, 190 aa, Oryza sativa
  Clone ID: TF_OSC401249j.C1.p42.fg
MVGGEVMCEAAAPRYRGVRKRPWGRFAAEIRDPAKRARVWLGTYDSAEAAARAYDVAARNLRGPLARTNFPLVSSLPLPSPHYHLPGKAAAAAPPVAGPACSASSTVESSSGPRGPRPAATAAAVPRRRVPRPAPPAPDAGCHSDCASSASVVDDADDASTVRSRVAAFDLNLPPPLDRDHVDLCTDLRL

SEQ ID NO: 16100 - protein, 243 aa, Oryza sativa
  Clone ID: TF_OSC401517j.C1.p1.fg
MDHIGISGGGEGGVVSPAQPSSPERRYKGVRLRKWGRWVSEIRMPNSRERIWLGSYESAEKAARAFDAAAVCLRGSRGAGSLNFPESPPPDVRRRFPGAALTVEQIQAEAARHANRPFPANTAAAGGSSSSYSISQRQEAAAPARSTSNDDTAMSSVPSTDGGAADYDGGDDVIDWSFMDTLPAMSSSAASTNADLVPAMDDFMYGFLHTMPPSPCEDGGEDVMIDGNCNMDQTFFSVDLWRF

SEQ ID NO: 16101 - protein, 529 aa, Oryza sativa
  Clone ID: TF_OSC410095j.C1.p16.fg
MDMNSGWLGFSLSSSSARGYGDGCGEGNGGGDGDGSCSSPVAASPLVAMPLHSDGSVHYDAPDWRHAEAKDPKLEDFMSVSYSNKSSSNLYGSSSSSSCGHADQIKYHHVHDVQAFSTPYFYGHGGSGVGIDINMNAPPAGCTGVLPDHRPPPPQQDHIFLPPHGQYFLGPPNPMAPAPMYNAGGGGGGVVDGSMSISGIKSWLRQAMYVPERSAAALSLSVPAAPPSEAPLPPAAMPVVRKPAQTFGQRTSQFRGVTRHRWTGRYEAHLWDNTCRKEGQTRKGRQGGYDKEEKAARAYDLAALKYWGPTTHINFPLSTYEKELEEMKHMTRQEFIAHLRRHHQHGRWQARIGRVAGNKDLYLGTFSTQEEAAEAYDIAAIKFRGLNAVTNFDISKYDVKRICSSTHLIGGDLACRRSPTRMLPPDAPAGAAGVDVVVAPGDHQQISAGGGGASDNSDTASDGHRGAHLLHGLQYAHAMKFEAGESSGGGGGDGATTNWMAAAAAAARPVAGIPTTVHHQLPVFALWND

SEQ ID NO: 16102 - protein, 192 aa, Oryza sativa
  unsure (1)..(192): unsure at all Xaa locations
  Clone ID: TF_OSC900276j.C1.p5.gp
MVGGEVMCEAAAPRYRGVRKRPWGRFAAEIRDPXERARVWLGTYDSAEAAARXYDVAARNLRGPLARTNFPLXLLPPAPVAPLPPPREGGGGGAAGGRPXACSASSTVESSSGPRGPRPAATAAAVPRRRVPRPAPPAPDAGCHSDCASSASVVDDADDASTVRSRVAAFDLNLPPPLDRDHVDLCTDLRLX

SEQ ID NO: 16103 - protein, 1040 aa, Oryza sativa
  Clone ID: TF_OSC414535j.C1.p7.gm
MEDNRSKDTATKYRGVRRRPWGKFAAEIRDPERGGARVWLGTFDTAEEAARAYDRAAYAQRGAAAVLNFPAAAAAGRGGGAGGAASGSSSSSSAQRGRGDKIEFEYLDDKVLDDLLDDEKYRASAQRGTRREGRRGCRRWGGQEPRPRRWRRLPLPARSHGPRVDCPFRCLTTGLRLGLLRPLRALSSVSRSSTRNCAPPRCLLKPWRLTAHPIRFASSATVELPRFHPLYSITAASFYDDGGLKTSEAKEMPLYVLGDRLVEVYMHMTNAKELWDALNTKFGATDASNDLYIMEQFHDYRMADNRSVVEQAHEIQIMANANVVHKAQNKCKGKYKAQQTTNFKKQKKKNNKPNQDERTCFVCGQPGHLARKCPQRKGMKAPAGQTSKSANVTIGNTGDGSGYGNLPTVARGSTVLMGNGSHASAHGVGTVDLKFTSGKIVQLKNVQHVPSIDRNLVSGSCLTRDGFKLVFESNKVVVSKHGYFIGKGYGEAPRRSKRQRMAKSFGDDFIVYLVDDTPKSISEAYASPDADYWKKAVRSEMDSIITNGTWEVTERPYGCKPVGCKWVFKKKLRPDASHGLLVHQMDVKTAFLNGELDEKIYMDQPDAFVVEGFAVNEVDKCVYYRYGGGEGVIPCLYVDDILIFGTNLRVINENFLERTHLCELDCWSQSMKILDYSILLAGVHRRSGEQVSGTSAFDVLHREKAAIMFLESASRDCSLFIRDGSSSSPFACCALSSTPATASSSCRVTGLSATSRLSARRPLARALDSTPPAANCRDLNSAPLRRCPAPSRLAAPAASAATTVPSPSRAARPQLQHSASPRRRRRCHCRPRRPLPSSAPAPRVLSSGLPAVRAELPTSRRATVPSPPLLSPDNDIVSLFRKHEAKKIATSSSSSNGFIGDEAPVPEEEPPQAPTIDDEAPVPEVNAPHYPIYDVNRLESDPGLRLPISSYPANDQDSVRRAYILKGPWQKSSLRACQLATPQVASLLASSLPAPPPLAGLCRFHLRRASALARWPASARDSRICGTRGKGEKEKEDWSR

SEQ ID NO: 16104 - protein, 189 aa, Oryza sativa
  Clone ID: TF_OSC1014j.C1.p1.fg
MAKRSSPDPASSSPSASSSPSSPSSSSSEDSSSPMSMPCKRRARPRTDKSTGKAKRPKKESKEVVDPSSNGGGGGGGGKRSSIYRGVTRHRWTGRFEAHLWDKNCSTSLQNKKKGRQGAYDSEEAAARAYDLAALKYWGPETVLNFPLEEYEKERSEMEGVSREEYLASLRRRSSGFSRGVSKYRGVAR

SEQ ID NO: 16105 - protein, 243 aa, Oryza sativa
  Clone ID: TF_OSC414122j.C1.p5.fg
MAAIDLYKYQLSSSSSSSSSDQELMKALEPFIRSASPTSTSTSTPLFYSSSSISTTTTTPFSYSSPLPQESYYLPASSSYAAIVPPPTTTTNTTTSFSELPPLPPSSSSFASPANAAAVGLAHLGPEQIQQIQVQFLMQQQLQQRGMAASASASAAASYLGPRAQPMKQAGAAAAAAAGGKMYRGVRQRHWGKWVAEIRLPKNRTRLWLGTFDTAEDAALAYDKEALRLRGDYVLLTSALFAL

SEQ ID NO: 16106 - protein, 395 aa, Oryza sativa
  Clone ID: TF_OSC900238j.C1.p1.fg
MEPNYSDYHPNSVPFDAYYEHGHGHLDDHGHGHHHLIPAHPEPSYSYGNWSFLHADATATSSSESSSASASSGAAHIVGASGPSASFVRQLHFGGEYYDDDAADISALMEAASISCWTTNGGAGASTSQTTGLEGVEVMRRAAAPAPDNGSSDKEEAARPLIGVRKRPWGKYAAEIRDSTRNGARVWLGTFNTPEQAALAYDQAALSVRGPGAVLNYPLHRVRESLRTLELGAAAAASESPVLTLKRRHRIRKRSTTKKALAGKEADEAPATTSSEGKKKRQVNTTSHSHDGAWRRHLLSSGRLSMEGSTAAGGHGGLAGGRGEAAGSNVRAADDDEDGEAAAGSSVHVANDDDDGSEAAAVSSMHAADNDDEAVAGSGVRMTTTTAARRRSGAG

SEQ ID NO: 16107 - protein, 509 aa, Oryza sativa
  Clone ID: TF_OSC400090j.C1.p33.fg
MELDLNNVAEGVVEKHETAARSDSGTSESSVLNGEASGAAIAPAEEGSSSTPPSPPPPPAAVLEFSILRSSASASGENDADDDEEEEATPSPPPHHQHQQLLVTRELFPSAAPSPQHWAELGFLRPDPPRPHPDIRILAHAPPPAPPPPPPQPQPQAAKKSRRGPRSRSSQYRGVTFYRRTGRWESHIWDCGKQVYLGNFIEHIIFLLSIQRDIAMNNLTNTFIFSQTITGGFDTAHAAARAYDRAAIKFRGVEADINFNLSDYEEDMRQMKSLSKEEFVHVLRRQSTGFSRGSSKYRGVTLHKCGRWEARMGQFLGKKAYDKAAIKCNGREAVTNFEPSTYDGELPTDAAAQGADVDLNLRISQPAASQQSPKRDSGSLGLQIHHGSFEAPSELASRPHRFPLLTEHPPIWTAQPHPLFPNNEDASRSSDQKRKPSEGVAVPSWAWKQFGASYQVASRANTRDGNCARLPVYPRVKTLLGLGLFSILYPWVSYWFKSYARWVNGHGYG

SEQ ID NO: 16108 - protein, 344 aa, Oryza sativa
  Clone ID: TF_OSC415507j.C1.p9.fg
MDFSGDIDDLISLQLLHDQLLGVEADACLPVAVHHDGVAAFAEHQQGFHPAAFLPQQPMTMTPAGYVDMANDQYLGAHAAAGEAEAVYRAAAAEPVMIRFGGEVSPVSDPRRPPLTISLPPTSHAWAAAEAVHPAALLQAQTAAAAADPNDFRKYRGVRQRPWGKFAAEIRDPKKRGSRVWLGTYDTAIEAARAYDRAAFRMRGAKAILNFPNEVGSRGADFLAPPPPPPPPTTSTHGKRKRHETAAADPDVEVIGESSKSVKTETYTSPASSSLASTTTSTVTSSSTSPSPSSEAAACGGGGGELFVPPMPSSWSWDQLEGFFGILSPLSPHPQMGFPEVAVN

SEQ ID NO: 16109 - protein, 426 aa, Oryza sativa
  Clone ID: TF_OSC401001j.C1.p62.fg
MVSMRKKKKAFAVAAATTLLSPPRSSSSSSSTASSCIVPPRTESGKKKSKHRKRAKDGTGGDDDDAAVAAAPRKGSSIYKGVARHRGSGKYEAHLWDKQGWNPNQTRKRGRQGAYDTEEAAARTYDLAALKIWGSDHVLNFPIDTYRKELERMQRMTREEYLATLRRKSSGFSRGVSKYRGVAKHHHNGRWEARIGRAVGKKYLYLGTFDTQEEAATAYDLAAIQLRGRSAVTNFDASCYTYTDHLPPPPPPQPPSVCKTEPELEPPQPAAPPGSESLLRPKMEPCDDWEPPAICPSLRDADDADHAIAEILPALCMDRADFEARYPARRARDAAADGWSTSSDDVAAASVDDDVLRSLPDDVGFVDDVESLFLDAPGPAAAAAAAAMPDDVERAVQRAPSAASRRANAAAVSYAISSLASGRWWY

SEQ ID NO: 16110 - protein, 273 aa, Oryza sativa
  Clone ID: TF_OSC413093j.C1.p2.fg
MDASLRTLPPAIFPGEVRSAVSSLLLSPGGSALDTVFSHLPPPVTIPPLGSSVYYRQSELLRHFAASQAAQAQSATAAASSSSAAAAGLDDGAPRKLYRGVRQRQWGKWVAEIRLPQNRVRVWLGTYDSPETAAHAYDRAAFKLRGEYARLNFPGVMDGRDCPDNLRQLRDAVDAKIQAIRVRMARKRARARRQREESKKSQRAEDAKAATPSRPVASERAASETTTTTTTTSSSYGSPDGVLSMSAASVDGDCPLERMPSFDPELIWEMLNF

SEQ ID NO: 16111 - protein, 233 aa, Oryza sativa
  Clone ID: TF_OSC407922j.C1.p8.fg
MQGEYHRSSSEDSAASAAAAAAAAAAAMAPLAAAAAAVAAKEEQAAAAAVLPLQQQQPRRQYRGVRMRKWGKWVAEIREPHKRTRIWLGSYATPVAAARAYDTAVFYLRGRSARLNFPEEISSLASLSEGGGASEPREPDGGTLSAASIRKKAIEVGSRVDALQTGMMVAPTTHHRERQKHHHHHHHHHPHLQPHGEEQHHHHEQKHQRTAWSGRAKNPDLNQAPSPENSDAE

SEQ ID NO: 16112 - protein, 232 aa, Oryza sativa
  Clone ID: TF_OSC900281j.C1.p6.fg
MQGEYHRSSSEDSAASAAAAAAAAAAAMAPLAAAAAAVAAKEEQAAAAAVLPLQQQQPRRQYRGVRMRKWGKWVAEIREPHKRTRIWLGSYATPVAAARAYDTAVFYLRGRSARLNFPEEISSLASLSEGGGASEPREPDGGTLSAASIRKKAIEVGSRVDALQTGMMVAPTTHHRERQKHHHHHHHHPHLQPHGEEQHHHHEQKHQRTAWSGRAKNPDLNQAPSPENSDAE

SEQ ID NO: 16113 - protein, 330 aa, Oryza sativa
  Clone ID: TF_OSC900393j.C1.p17.fg
HRWTGRYEAHLWDNSCRREGQSRKGRQGGYDKEEKAARAYDLAALKYWGPTTTTNFPVANYETELEEMKSMTRQEFIASLRRKSSGFSRGASIYRGVTRHHQHGRWQARIGRVAGNKDLYLGTFSTQEEAAEAYDIAAIKFRGLNAVTNFDMSRYDVDSILNSDLPVGGGAATRASKFPSDPSLPLPSPAMPPSEKDYWSLLALHYHHHQQQQQQQQFPASAFDTYGCSSGVNVDFTMGTSSHSGSNSNSSSSSAIWGTAAGAAMGRQQNGGSSNKQSNSYSGNNIPYAAAAAMTSGSALYGGSTGSNGTWVASNTSTAPHFYNYLFGME

SEQ ID NO: 16114 - protein, 1742 aa, Oryza sativa
  Clone ID: TF_OSC900383j.C1.p18.fg
MDRQWMYADRRSKEFIDGVHYFLRVAEANRQRGFICCPCNKCKNQKEYSASRTIHFHLFESGFIPSYNCWTSHGEQGVEMEEDEVEDDNIPDFAQYVGFEGNQTGEEEIAADGNDVADDLGQMLQDAREDCESEKEAHKLDKMLEDHRTSLYPGCEQGHKKLDTTLELLQWKAKNGVSDKAFGDLLKLVKNILPGGNKLPETTYEAKKIVCPLGLEVHKIHACPNDCILYRGEEYENLEACPVCKALRYKIRRDDPGEVDGQLTKKRIPAKVMWYFPIIPRLRRFFRNKGNARMLRWHAEERQQDGMLRHPADGSQWRNIDRKFKEFGKDARNIRFGLSTDGMNPFGEMSSGHSTWPITMCIYNLPPWLCMKRKYIMMPIIIQGPKQPGNDIDVYLRPLVEDLKLLWRKEGVPVWDEDKQEEFNLRALLFVTINDWPALSNLSGQSNKGYKACTHCMDETESTYLKHCRKVVYMGHRRFLAANHPVRKKGKHFEHKADHQFRNSENVNENENDRTNESENENDRTKTSENEGTNVNENKRTNVNENERTNMNELGNMADRDEEQILYDTIAEGSSQYWNEEEGNEDPNQYLNEEGNVERDAEGNQQGHVERDVEGNQEEEASGSQPSVGQKRARGQRGAAKKLEGRHIITEVEEDGRPSAPAEAAKNYVRHSGWVVRDNVPVSTVYWRRIRARGDHESFVPDSEKEMLWTTMLETFTLPAGTEDKVKRWTLKKMAEQFQSFKGDLYQKYILKGQTPNFDTFPKLRDHWDEFVAYKTGEQGQAMMERNKENAAKKMYHHHLGSGGYSVAMPNWEQMEASLIERGIEPATANWPERSKFWYYAHGGTLNPADGSLVFGDQMREAARRLTDAVEASSQGTFRPDRDRDELTLALQTPEHPGRTRGKGVIPWKIGFKEDIYTYRSRMRSKRDTEAKIADLEFRVSSYELNMQEEVARKVDERMAAHRSHDPQPTIPPAMVSPLGNRSSCASMGQVGSQSMDAMQTQDESTRPVDDITQRTPCELHIPFKNLSIKVASGMAIPTDPSGTYHCRPIPAGYSKVEVELVEGAYEDLELDYPGGDGETHLRDTCHAIILRRRRYIILPGRQAASRALSPPAPPSPPQDPAPSPPHAPPAPSPAQAPASTPPQDPAPTPPRAPTPTPPQAPLPAPSKSRAPPAPPPAHTRATKKAKVDAAKNKDPGYDCTQEELDAYVASEIKRQFKPRSPEKKIPIDPSVRNFFRGMSASVKEAIKLSDYERTLKKASSGKSKPVPQLGEQPNQEIEPLVTGKEMTIEQFITDTGLTTDQLLGVAPIEKAEVKYMYELGKPLVKPELLQSLPTQMYKFHQLYMEMSATGREMIGVRIRDTDFLQGDDILWINFRGIYELYQLDALDVSIMSCWILMEIQRARRRRVFDTGFIDPRKVNVAMLDQYPQETEDNLVHLLKAQHYKTFILLPYNTEFHWVLLLIDLEACTVNVYDSMDKKESTFDKVFELIDSFKLHVVRGKWRERLRRKFKFPCAKQKQGTNLCGYYVCEYCHCLADQIITTRELDFIRMRDNLTTHKEFIAAVQEQLMGFINEEILDPKGGGKTRGEMNKDDEVIGTFDTAVEAALAYDATARWLYGSKAVTNFPTTTGDGDDGLPVAEPAVVVVAAPAFAGEEMDKQVAPAAATAAETVAADPGAGELGPVVLCHELEATNGWQYEAYGYGYSMGLELLENYAYAGDVQPLGLGGSTSNAAAANDCLWMF

SEQ ID NO: 16115 - protein, 261 aa, Oryza sativa
  Clone ID: TF_OSC900408j.C1.p17.fg
MADLTEHPSPTAPPQVQTAGLPAAASPGPASPHSPSEQGDKTAPGAATASTMTTASSGEPSPRSSGKHAFYRGIRCRSGKWVSEIREPRKARRIWLGTYPTAEMAAAAYDVAARALRGADAVLNFPGATASRPVPASASPADIRAAAAAAAAAAAHLERPHGPTGTAYPATAAAEHHQQQQQQQYGSGSPAADDVSGYPPMEGGIGNDDFMDEEAIFELPQLLRNMAAGMMMSPPRLSPTTSDVSPEPSEAGESLWSYRDP

SEQ ID NO: 16116 - protein, 402 aa, Oryza sativa
  Clone ID: TF_OSC423200j.C1.p1.fg
MAFHLQPHSLTQAKLAIDRSSSMPPSMATARVASPSTDRKRKASSEDDIDAAAAAAALTSPLAPARGRKRFVGVRQRPSGRWVAEIKDTIQKIRVWLGTFDTAEEAARAYDEAACLLRGANTRTNFWPRPSPPPAAVAPPETTTTPALPSKVTNLLLLRLKARNQQVVDAGAAAPQEAALLQLQQQTPASCQEVFVRSHGEEYGFHVDDFLSDACSNEQYSGDSSLGLDDDDGEVEDEEEEELDFQFMDVAPGASSAAAEAGLGGEGALCSPFEMVAAELGGAVDVAAHDAMRQMDYERKISASLYALTGVSECLRIRAAAGATAAARDHLTGLREACRKKQKFAAAAAAPPQQQEPSPPPQQPETPASSGGGMSETASGGGGDGDVLMWSSLDLAPICHMA

SEQ ID NO: 16117 - protein, 205 aa, Oryza sativa
  Clone ID: TF_OSC401241j.C1.p1.fg
MVQPKKKFRGVRQRHWGSWVSEIRHPLLKRRVWLGTFETAEEAARAYDEAAVLMSGRNAKTNFPVQRNSTGDLATAADQDARSNGGSRNSSAGNLSQILSAKLRKCCKAPSPSLTCLRLDPEKSHIGVWQKRAGARADSNWVMTVELNKEVEPTEPAAQPTSTATASQVTMDDEEKIALQMIEELLSRSSPASPSHGEGEGSFVI

SEQ ID NO: 16118 - protein, 303 aa, Oryza sativa
  Clone ID: TF_OSC415507j.C1.p6.fg
MLLNPASREVAALDSIRHHLLEEEEETPATAPAPTRRPVYCRSSSFGSLVADQWSESLPFRPNDAEDMVVYGALRDAFSSGWLPDGSFAAVKPESQDSYDGSSIGSFLASSSSEAGTPGEVTSTEATVTPGIREGEGEAVAVASRGKHYRGVRQRPWGKFAAEIRDPAKNGARVWLGTFDSAEEAAVAYDRAAYRMRGSRALLNFPLRIGSEIAAAAAAAAAGNKRPYPDPASSGSSSPSSSSSSSSSSSSGSPKRRKRGEAAAASMAMALVPPPPPPAQAPVQLALPAQPWFAAGPIQQLVS

SEQ ID NO: 16119 - protein, 304 aa, Oryza sativa
  unsure (1)..(304): unsure at all Xaa locations
  Clone ID: TF_OSC415507j.C1.p7.gp
MLLNPASREVAALDSIRHHLLEEEEETPATAPAPTRRPVYCRSSSFGSLVADQWSESLPFRPNDAEDMVVYGALRDAFSSGWLPDGSFAAVKPESQDSYDGSSIGSFLASSSSEAGTPGEVTSTEATVTPGIREGEGEAVAVASRGKHYRGVRQRPWGKFAAEIRDPAKNGARVWLGTFDSAEEAAVAYDRAAYRMRGSRALLNFPLRIGSEIAAAAAAAAAGNKRPYPDPASSGSSSPSSSSSSSSSSSSGSPKRRKRGEAAAASMAMALVPPPPPPAQAPVQLALPAQPWFAAGPIQQLVSX

SEQ ID NO: 16120 - protein, 217 aa, Oryza sativa
  Clone ID: TF_OSC900404j.C1.p1.fg
MAALFEAAETAAIVAALTRVIADGGRGGGGGVCVPPPAPSLVVPPRAGTGGGRRVDVAREEEMVGVVSAGDHAGGANVAEAAAAVVVAAPATARRYRGVRRRPWGKWAAEIRDPRKAARVWLGTFRTAEDAARAYDAAALRFRGRRAKLNFPEEVSRPWQGHDVDHMSCSPPSISNARFLGSWTFGPPQPPSRSVAAAATTLLGGSHGGNGAENGRE

SEQ ID NO: 16121 - protein, 266 aa, Oryza sativa
  Clone ID: TF_OSC413120j.C1.p7.fg
MAAARQDSCKTKLDERGGSHQAPSSARWISSEQEHSIIVAALRYVVSGCTTPPPEIVTVACGEACALCGIDGCLGCDFFGAEAAGNEEAVMATDYAAAAAAAAVAGGSGGKRVRRRRKKNVYRGVRHRPWGKWAAEIRDPRRAVRKWLGTFDTAEEAARAYDRAALEFRGARAKLNFPCSEPLPMPSQRNGNGGDAVTAATTTAEQMTPTLSPCSADAEETTTPVDWQMGADEAGSNQLWDGLQDLMKLDEADTWFPPFSGAASSF

SEQ ID NO: 16122 - protein, 268 aa, Oryza sativa
  Clone ID: TF_OSC404645j.C1.p13.fg
MVTALAHVIRAAPDLHLPHHPSSSASAAAHPQQASSFYPTAAAAASSPSDQLAAAAAAEEQGRRRHYRGVRQRPWGKWAAEIRDPKKAARVWLGTFDTAEDAAIAYDEAALRFKGTKAKLNFPERVQGRTDLGFLVTRGIPPAATHGGGYYPSSSPAAGACPPPRQQQTVVPYPDLMRYAQLLQGGVGGSYMPFGGAATMSSSTVSSSSAPQILDFSTQQLIRAGPPSPMPSSGSGSATAAASSTTSASSPGAWPYGGSERKKKDSSS

SEQ ID NO: 16123 - protein, 236 aa, Oryza sativa
  Clone ID: TF_OSC401008j.C1.p5.fg
MEKNTTAMGQLMSSSATTAATATGPASPKRPAGRTKFQETRHPVFRGVRRRGRAGRWVCEVRVPGSRGDRLWVGTFDTAEEAARAHDAAMLALCGASASLNFADSAWLLHVPRAPVASGHDQLPDVQRAASEAVAEFQRRGSTAATATATSGDAASTAPPSSSPVLSPNDDNASSASTPAVAAALDHGDMFGGMRTDLYFASLAQGLLIEPPPPPTTAEGFCDDEGCGGAEMELWS

SEQ ID NO: 16124 - protein, 210 aa, Oryza sativa
  unsure (1)..(210): unsure at all Xaa locations
  Clone ID: TF_OSC400832j.C1.p8.np
LYXLRWTMTILGPTIFRYFSSGGRCTRFRGVQKRPWGRYMAVICDPVKKARVWLETYDSAEEDTXAYDAARAYDVAARALGPKAKTNFTLSLPHAQPQLHHHQHHHHHLTHPTPLPSLARPATTSLSSTIESFGTRPRPVLLPRLSPSILDGDCHNDCGLSASMVDEDCTDATASLSCQLTFQFDLNLPPIGAIWLDRGGWRLHITARRL

SEQ ID NO: 16125 - protein, 362 aa, Oryza sativa
  Clone ID: TF_OSC400736j.C1.p6.fg
MCGGAILSDLIPPPRRVTAGDLWLEKTKKQQQQKKKNKGARRLPLRQEEEDDFEADFEEFEVDSGEWEVESDADEAKPLAAPRSGFAKGGLKNTTVAGADGPAARSAKRKRKNQFRGIRQRPWGKWAAEIRDPRKGVRVWLGTFNSPEEAARAYDAEARRIRGKKAKVNFPDGAPVASQRSHAEPSSMNMPAFSIEEKPAVMSAGNKTMYNTNAYAYPAVEYTLQEPFVQIQNVSFVPAMNAIEDTFVNLSSDQGSNSFGCSDFSQENDIKTPDITSMLAPTMTGVDDSAFLQNNASDAMVPPVMGNASIDLADLEPYMKFLIDGGSDESIDTLLSSDGSQDVASSMDLWSFDDMPVSAEFY

SEQ ID NO: 16126 - protein, 237 aa, Oryza sativa
  Clone ID: TF_OSC401539j.C1.p112.fg
MSLSLGFSAGAGVGADRLAAAPALQAAGALPPRVDVSLSLARAANGQPSSYLPLNENDSLDMVLFDVLREASAVAALSSSSSSSPELGARTTAPVVAGHPAGRKGGGGGGGGRGAAARGGAAGGRHYRGVRRRPWGKYAAEIRDPTRHGARLWLGTFGTAEEAAAAYDRAAFRMRGAKALLNFPPAVAGDGARRGAAAAAKQVGMSDVVPRACHVVCYSVLSAHIFYDIFRGVIPIP

SEQ ID NO: 16127 - protein, 100 aa, Oryza sativa
  Clone ID: TF_OSC6566j.C1.p6.np
QIEGEIKSRTERDHGEVDLSSPEEAMSRAECGGGEEEERCRYRGVRRRRWGKWVSEIRVPGPGRLWLGSYATPEAAAVAHDTAVYFLRGQGNYLNFGFLC

SEQ ID NO: 16128 - protein, 490 aa, Oryza sativa
  Clone ID: TF_OSC410566j.C1.p16.fg
MSPPTNGAISLAFPPMGPLPADALIYPFDGLSYDDFVLPVAAAPQHPLPVAVADPAPLLLLPPPSSCTCNGASSGMGAVAPRTLALGATTDGSVMTPTSWGSDGGGGGSSSARAVRSPSPVLPLVQGTGQRTSCYRGVTRHRWTGRYEAHLWDNTCRREGQKRKGRQVTTPVELFLLSVLVDWHLATNFCTLLDTLAELHSAVVPFFFLRKDYQWFHDSDTMTCCFFAFSGYDIEDKAARAYDLAALKYWGANATTNFPKESYVKEIEEMQKMSKQELVASLRRKSSGFSRGASIYRGVTRHHQHGRWQARIGRVAGNKDLYLGTFATEEEAAEAYDVAALKFRGANAVTNFEPSRYNLEAISQSDLPISVSGRRHNSSSNSNNPAPEAGGQITLMSSPPISQQSSSAPPYLIHNLLQFQPCGPPYAPPPPPPPPPPPPQALPLPGSYNFAEPVGFYWPYGDGEEQKVQLNSNMVGMASGGFLHLANAAN

SEQ ID NO: 16129 - protein, 417 aa, Oryza sativa
  Clone ID: TF_OSC415455j.C1.p7.fg
MEDFLGGLGGGGGAVAAAPAAAPEDQLSCGELGSIAAGFLRRYPAPENAGGVTIAMATDAAAELADPARRTAETFGQRTSIYRGVTRHRWTGRYEAHLWDNSCRREGQSRKGRQGGYDKEEKAARAYDLAALKYWGPTTTTNFPVANYETELEEMKSMTRQEFIASLRRKSSGFSRGASIYRGVTRHHQHGRWQARIGRVAGNKDLYLGTFSTQEEAAEAYDIAAIKFRGLNAVTNFDMSRYDVDSILNSDLPVGGGAATRASKFPSDPSLPLPSPAMPPSEKDYWSLLALHYHHHQQQQQQQQFPASAFDTYGCSSGVNVDFTMGTSSHSGSNSNSSSSSAIWGTAAGAAMGRQQNGGSSNKQSNSYSGNNIPYAAAAAMTSGSALYGGSTGSNGTWVASNTSTAPHFYNYLFGME

SEQ ID NO: 16130 - protein, 358 aa, Oryza sativa
  Clone ID: TF_OSC417508j.C1.p10.gm
MELLAYKEGIALAIQWTLKPIVVESDCLEAAHAKVGVAAAEILVPRRPVITGKGMWHLQLFHLHDSRLDKVFIVVALIMFAYREITMVWLRVLSPPSWTALSPPVAAGSRVGGHLPVLSMDFYFFSSSAPAPEKKTRRQQQQQQQREQEGGGGGNEARYLGVRRRPWGRYAAEIRDPATKERHWLGTFDTAEEAAVAYDRAARTIRGAAARTNFAYPDLPPGSSLTPYLSPDLSTNDLHRHYYGAGAGADTQTAAALPAPAQPAHGGDAQEMAYGGGGGQNVGGVFDVVGGGGGAAWCDASELEFGGYDDAGASAAAAAVYFEEGYVHSPMFSPMPAADEVAADGFQLGGSSSSSYYY

SEQ ID NO: 16131 - protein, 225 aa, Oryza sativa
  unsure (1)..(225): unsure at all Xaa locations
  Clone ID: TF_OSC900102j.C1.p14.np
GTAGTTAVRPAGTRSSSFHGVTRHRWSGKYEAHLWDSSCRMEGRRRKGRQDYAGSYDTEEKAARSYDVAALKYWGQNTKLNFSSEYERELEDIRDMSREECVTYLRRRSSCFSRGASRSSCFSRGASIYRGVTRRRQKDGRWQARIGLVAGTRDIYLGTFKTEEEAATEEEAAEAYDIAAIEIRGKNAVTNFDRSNYMEKALLYGIFYXERSVPNKLKDYKNLVV

SEQ ID NO: 16132 - protein, 483 aa, Oryza sativa
  Clone ID: TF_OSC407922j.C1.p4.fg
MRSSSSKATPTTSPAFRVLCSPPSAKSPRPNKGEDGGGEAEASHRRGKGDAMWDLNDSPAAEAAPPPLSPSADDSGASSSSAAAVVEIPDDADDDSAAVVVVTRQFFPPAVPGGGGDPAPGNARAGWLRLAGAAPPVAATGPAASAAVSKKSRRGPRSRSSQYRGVTFYRRTGRWESHIWDCGKQVYLGGFDTAHAAARAYDRAAIKFRGVEADINFSLEDYEDDLKQMSNLTKEEFVHVLRRQSTGFPRGSSKYRGVTLHKCGRWEARMGQFLGKKYVYLGLFDTEEEAARAYDRAAIKCNGKDAVTNFDPSIYAGEFEPPAAATGDAAEHNLDLSLGSSAGSKRGNVDGGGDDEITGGGGGGAGSDQRVPMAFDLDWQTAAARSTKAKFLSNGDPGTAGGLSLTIGAGMAGHWPPQQQQGWGNAGGMSWPHPPHPPPPPTNAAAAATATAAAASSRFPPYIATQASTWLQKNGFHSLTRPT

SEQ ID NO: 16133 - protein, 471 aa, Oryza sativa
  Clone ID: TF_OSC900281j.C1.p2.fg
MESFSFHVFPHTAKSPRPNKGEDGGGEAEASHRRGKGDAMWDLNDSPAAEAAPPPLSPSADDSGASSSSAAAVVEIPDDADDDSAAVVVVTRQFFPPAVPGGGGDPAPGNARAGWLRLAGAAPPVAATGPAASAAVSKKSRRGPRSRSSQYRGVTFYRRTGRWESHIWDCGKQVYLGGFDTAHAAARAYDRAAIKFRGVEADINFSLEDYEDDLKQMSNLTKEEFVHVLRRQSTGFPRGSSKYRGVTLHKCGRWEARMGQFLGKKYVYLGLFDTEEEAARAYDRAAIKCNGKDAVTNFDPSIYAGEFEPPAAATGDAAEHNLDLSLGSSAGSKRDNVDGGGDDEITGGGGGGTGSDQRVPMAFDLDWQTAAARSTKAKFLSNGDPGTAGGLSLTIGAGMAGHWPPQQQQGWGNAGGMSWPLPPHPPPPPTNAAAAATATAAAASSRFPPYIATQASTWLQKNGFHSLTRPT

SEQ ID NO: 16134 - protein, 213 aa, Oryza sativa
  unsure (1)..(213): unsure at all Xaa locations
  Clone ID: TF_OSC100759j.C1.p1.np
IAMIYLHSPASFSCSNKPMANSSNRSAIQRVRRRGAKXSVRPYKGVRMRSWGSWVSEIRAPHQKRRIWLGSYATPEAAARAYDAALLCLKGSDAVLNFPSSASSRPSTSTGGARTRLSPRSIQRVAAAAAGHSTPPPPPSSSGGGDVLDSGGGDVLDHATTPSSSSSAAANVCSPPLEGDHELWTELDAFASKFMDLMAPAARRSRVGGARGG

SEQ ID NO: 16135 - protein, 284 aa, Oryza sativa
  Clone ID: TF_OSC401685j.C1.p143.fg
MERGEGRRGDCSVQLCGIIELPHWVRKKRTRRKSDGPDSIAETIKWWKEQNQKLQEENSSRKAPAKGSKKGCMAGKGGPENSNCAYRGVRQRTWGKWVAEIREPNRGRRLWLGSFPTALEAAHAYDEAARAMYGPTARVNFADNSTDANSGCTSAPSLMMSNGPATIPSDEKDELESPPFIVANGPAVLYQPDKKDVLERVVPEVQDVKTEGSNGLKRVCQERKNMEVCESEGIVLHKEVNISYDYFNVHEVVEMIIVELSADQKTEVHEEYQEGDDGFSLFSY

SEQ ID NO: 16136 - protein, 358 aa, Oryza sativa
  Clone ID: TF_OSC401827j.C1.p10.fg
MPMPAAAGEGPWPRRAADLGVAQSQRSPAGGKKSRRGPRSRSSQYRGVTFYRRTGRWESHIWDCGKQVYLGGFDTAHAAARAYDRAAIKFRGLDADINFNLNDYEDDLKQMRNWTKEEFVHILRRQSTGFARGSSKYRGVTLHKCGRWEARMGQLLGKKYIYLGLFDSEIEAARAYDRAAIRFNGREAVTNFDPSSYDGDVLPETDNEVVDGDIIDLNLRISQPNVHELKSDGTLTGFQLNCDSPEASSSVVTQPISPQWPVLPQGTSMSQHPHLYASPCPGFFVNLREVPMEKRPELGPQSFPTSWSWQMQGSPLPLLPTAASSGFSTGTVADAARSPSSRPHPFPGHHQFYFPPTA

SEQ ID NO: 16137 - protein, 216 aa, Oryza sativa
  Clone ID: TF_OSC900301j.C1.p3.fg
MAALFEAAETAAIVAALTRVIADGGRGGSGAGVPPPAPSLVVPPLAGTGGGRRVDVAREEEMVGVVSAGDHTGEASVAAAGVVVAAPATARRYRGVRRRPWGKWAAEIRDPRKAARVWLGTFRTTEDAARAYDAAVLRFRGRRAKLNFPEEASRPRRPWKGHDVDHMSCSPPSIANARFLGSWIFGPPPPSRSVAAATTTLLGGSHGSNGADNGRE

SEQ ID NO: 16138 - protein, 276 aa, Oryza sativa
  Clone ID: TF_OSC405795j.C1.p6.fg
MSPADSLAAGRSRRVGASMPRPKRVRVYFVDADATDTDSSGDERSRPRVREVIDIDVGAASPAPAPKHPRRLVPTATAALARRRAGMAASRRFRGVRRRPWGRFSAEIRDPSLQKRLWLGTFDTAEEAAAVYDDAALRIKGSHAVTNFPSDSDTPSAKAKQMKLHPRRHTTPDKTPSSSTAAAAKASVPDPTPAPPEEDRANDSSFNPFASPTSVLRYAAADEVTAPSFEHLLVELGDLSAPPPSTKAAEFDWLPWWEGEDFVTAGLTASNAVSVK

SEQ ID NO: 16139 - protein, 318 aa, Oryza sativa
  Clone ID: TF_OSC410095j.C1.p5.fg
MESYGRKRAWKKGPTRGKGGPQNAACEYRGVRQRTWGKWVAEIREPNKRTRLWLGSFATAEEAALAYDEAARRLYGPDAFLNLPHLRAASAAAAHQRLRWLPASAAAAAARGGAAAVPAYGLLNLNAQHNVHVIHQRLQELKNSSSSPTKPPPRTPTRANPPPPPLPTSSPCSTVTNSVGSAALPPPMSCFQALEQAMAATAAMESAPCDDDAAVVGFGADKPQLDLKEFLQQIGVLKADDDGATGKNGAVHGDDGELADAFGFGGSGEFDWDALAADMSDIAGGHGGALGANGGFQMDDLHEVEQFGGCMPIPIWDI

SEQ ID NO: 16140 - protein, 294 aa, Oryza sativa
  Clone ID: TF_OSC22414j.C1.p4.fg
MPPCAAGKRSSIYRGVTRHRWTGRYEAHLWDKSTWNQNQNKKGKQGAYDDEEAAARAYDLAALKYWGAGTQINFPAYVHYVFAYLGKDITLDGKFAGTFGLERKIDLTNYIRWWLPKKTRQSDTSKMEEVTDEIRAIESSMQRTEPYKFPSLGLHSNSKPSSVVLSACDILSQSDAFKSFSEKSTKLSEECTFSKEMDEGKTVTPVPATGHDTTAVNMNVNGLLVQRAPYTLPSVTAQMKNTWNPADPSADPLFWTNFILPASQPVTMATIATTTFAKNEVGDNILHVYGFPSS

SEQ ID NO: 16141 - protein, 28 aa, Oryza sativa
  Clone ID: TF_OSC24042j.C1.p1.np
DGGRGGGGGRKYRGVRRRPLGKWAAEIR

SEQ ID NO: 16142 - protein, 189 aa, Oryza sativa
  Clone ID: TF_OSC401180j.C1.p8.fg
MVPPAAHAPKNLGLRGVRRRLWGRWAAEIRVPRGHRAAARLWIGTFPSPAAAALAYDAALYCFHGGAPPGNRAFNFPHAPRLRIDDRRRHALTPGHVRAIAERYAHDVGSVLFRPLPPPPPPVAAAAVPVFAAPAPPMAPAPANHAADPYYCNEPDTTTDEDVMAAADRLLSMDIEEVAALIAIVQQGE

SEQ ID NO: 16143 - protein, 282 aa, Oryza sativa
  Clone ID: TF_OSC900397j.C1.p2.fg
MAMEGEVEGGGRRRVVRIIFRDEDATDSSSSEEEGEGEVVAARRVVVKRTRLRCQEVERRFTGVRRRPWGRWAAEIRDPKENGRRVWLGTFDTAEAAAAAYDDACLRLRGPGAALNLPSRRCVAPAPPPPPPPPPPTAEEKKLLLFPPPLPPRKKAMLFPLPLPPRKKPLLYPPPLPPKKKPLPPPSPPPQPPLPEKENTPLPPLLLPPKKKPLPPPSPTAAAKEEPIELEHAAPPPPFVPRPVWPLLASGGGGKRKKQSGCGGRIPALNTAAAAVEETGRA

SEQ ID NO: 16144 - protein, 111 aa, Oryza sativa
  Clone ID: TF_OSC6563j.C1.p1.gm
MSRAECGGGEEEERCRYRGVRRRRWGKWVSEIRVPGTRERLWLGSYATPEAAAVAHDTAQMMTLYHLNQSFHVSNYNDDYHPMRTVLLDAMQLPIGSVLVIQTCMHLHFHL

SEQ ID NO: 16145 - protein, 342 aa, Oryza sativa
  Clone ID: TF_OSC414138j.C1.p23.fg
MCGGSILGDLHLPVRRTVNAGDLWGDAGKGRDGGDGLKKRKGSSWDFDVDCDDDDDDDFEADFEEFEDDYGDDDDVGFGDDDQESDMNGLKLAGFSTTKLGLGGSRKRKTRYRGIRQRPWGKWAAEIRDPRKGVRVWLGTFGTAEEAAMAYDVEARRIRGKKAKVNFPDAAAAAPKRPRRSSAKHSPQQQKARSSSSSPASLNASDAVSKSNNNRVSSAGSSTDATAAAIAIDDGVKLELLSETDPSPPMAAAAAAWLDAFELNDLDGSRCKDNAFDHQIHKVEAAVADEFAFYDDPSYMQLGYQLDQGNSYENIDALFGGEAVNIGGLWSFDDMPMEFRAY

SEQ ID NO: 16146 - protein, 201 aa, Oryza sativa
  Clone ID: TF_OSC22139j.C1.p2.fg
MALSEPDLAAETEAIVSALTHVVAYGGGGPPPSEETAASRAARVWLGTFATAEDAARAYDAAALRFRGGRARLNFPEDAAAADERRATDAAAAAAAASSAPAALLESQPGDVADCLDYSRILAGAPERPTSSTVPDGFFGGGGNGRFLHSWSIGTSPSPSGSGSGGAGGGGGGGGGGAPVRPLFHGGNGWEQRGDSAYNGF

SEQ ID NO: 16147 - protein, 86 aa, Oryza sativa
  Clone ID: TF_OSC100668j.C1.p5.np
RRYRGVRRRPWGKWAAEIRDPRKAARVWLGTFRTAEDAARAYDAAALRFRGRRAKLNFPEEVRHCRRRTWRWRDVGRRCAALPAPS

SEQ ID NO: 16148 - protein, 312 aa, Oryza sativa
  Clone ID: TF_OSC101030j.C1.p20.fg
MCGGAILADFTPARVPRRLTAAELLPVTPTPPAAERRTTRKRKSDVDFEAEFELFEDDDDDDEFELSDDGDESLAVSFSSDVSSSSRPRRRVAAAAAGRRKASKKSKYRGVRRRPSGRFAAEIRDPKKGRRVWLGTYGSAEEAAMAYDREARRIRGKGARLNFPRDGDGSPRRSNDRPCWTIDLNLPAAAVSGDDDDAMAVDAADADAGSAGRAAAYADQEALSAAKCKIKQCPRDEQMASATPELMEEDASSSRNMVPLSMALQLQYAAMIAECDREMEEIAAVERDLERRRRQVFERRGHLVRQASLLLD

SEQ ID NO: 16149 - protein, 387 aa, Oryza sativa
  Clone ID: TF_OSC400468j.C1.p6.gm
MGPQCSGPGGSFARTGRSPTEEAISEDREFQSLLVSGVLICSWCKIIEGNLMRALGEAPSPQMQKIAPPPFHPGLPPAPANFSSAGVHGFHYMGPAQLSPAQIQRVQAQLHMQRQAQSGLGPRAQPMKPASAAAPAAAAARAQKLYRGVRQRHWGKWVAEIRLPRNRTRLWLGTFDTAEEAALTYDQAAYRLRGDAARLNFPDNAASRGPLDAAVDAKLQAICDTIAASKNASSRSRGGAGRAMPINAPLVAAASSSSGSDHSGGGDDGGSETSSSSAAASPLAEMEQLDFSEVPWDEAEGFALTKYPSFRRLLAGVVFVSGVSDVYLVFGNSGLNFIQKNSGLGKTEATPTLEVEPRREEAAPALEAMPRREEVTPAPEAEAEAEA

SEQ ID NO: 16150 - protein, 396 aa, Oryza sativa
  Clone ID: TF_OSC900362j.C1.p6.fg
MCGGAIISGFIPPSAAAAAAAAVAKKQQGRRVTADVLWPGMLRKGKAAAAEEDFEADFREFERGMSDDEAEGGGGEEEEDDDDVVVVVPPPAAARFVVRAAAKAAPPTADGMLTTKLVQHDGPTARSAKHKRKNQYRGIRQRPWGKWAAEIRDPSKGVRVWLGTYNTAEEAARAYDAEARKIRGKKAKVNFPDEPAVAQKLSLKQNAAKQEKLAPPLKTCGDDAFFQLNSSDNDLFAMLAKVPAKPAEPVDLMPPVKPLASTETFEMNMLSDTSSNSFGSSDFGWEDDTLTPDYTSVFVPNAAMPAYGEPAYLTGGAPKRMRNNYGIAVPQGNGMPNLAQNMPTFDPEMKYLPLPYVESSSDESMDNLLQNDATQDGASNEGIWSLDELLMAAGAY

SEQ ID NO: 16151 - protein, 266 aa, Oryza sativa
  Clone ID: TF_OSC407938j.C1.p7.fg
MELQFQKPTQGQSQQQQCHYQVPTVTVAKNKAKTKCSSSKFVGVRQRPSGRWVAEIKDTTQKIRMWLGTFETAEEAARAYDEAACLLRGSNTRTNFATQAAPDSPLASRIRTILTHKKLKKSMPQPTITFSTAVYHHARSTVPAAATSTSTSGVSPSRSNSSSLNFATNLSNFAMSGGEELQLASSQQQYDQSWALNTSLLPIGDGCDMSGSNACPVASDQDKMKAEKQGSHGMNGIQEQETFDMGNDLCDSLWDLPPICQLSCKY

SEQ ID NO: 16152 - protein, 278 aa, Oryza sativa
  Clone ID: TF_OSC401961j.C1.p15.gm
MAGRAATWGRGVGARRGAEKAAARTVSAAVAVVGLAAGGRGRPDSHAGMYIGYTADAAASSSSSSSSSSSSSSEMLRFDTGWPDETPAPSSVAGRRRSAGGDHRQGRGQTEAAAAFIGVRRRPWGRFAAEIRDSTRNGARVWIGTFDSAEAAAMAYDQAALSARGAAAALNFPVERVRESLHALSLGAAGGSPVLALKRRHSKRKRRKKAELLAAAAATAATANATPQTRRISKSTELTTATTDEQKRFVVELEDLGAEYLEELLWLSEINGGSDPAD

SEQ ID NO: 16153 - protein, 282 aa, Oryza sativa
  Clone ID: TF_OSC413563j.C1.p9.fg
MAIGAAPASNQPHDTSNILENVWASIMTSSSSPAVSSSVAVSSSAVTGQEENSAILQRLPSLGRWISMGAEEWDELLLSGAALASESSGELQLVAASPGDHNQVVGGGGGANYRTTATAAARRSYRGVRRRPWGKFAAEIRDTRRRGARVWLGTFATADEAALAYDMAALRMRGHRAHLNFPLATVQKHLERDLAGGRSSSDQTSTRARRRRRPRANTTTDAAARSVVFSGVQTATNCDHMVSFASEKDQVSMQECSKSDAGVIDFEEIGGEYWDYLFPPLV

SEQ ID NO: 16154 - protein, 120 aa, Oryza sativa
  Clone ID: TF_OSC18525j.C1.p1.gm
DSGRERRDCVWLGTFTSEAEAGHAYDVAARQFRGHDTVTNFRPSSSLTRRLPSSSVSSPPGQRPRASSWQERPSRWRRRCEAHGGGGVSRRQELLEVVLSAAVAADGGRGIRSVHSGSRP

SEQ ID NO: 16155 - protein, 321 aa, Oryza sativa
  Clone ID: TF_OSC101030j.C1.p17.fg
MCGGAILANIIPATPPRPATAAHVWPGGDGEKRRKVGGGGCDDDFEAAFERFGREDSEMEEEEVEEVVVGKKAAVRRRRATPAAGRRARPSKYWGVRRRPWGKWAAEIRDPVEGVRVWLGTFATAEAAAHAYDAAARDLRGATAKLNFPSSSSSTAATPRPRKCRPTTATATPKATTPNVVVVVNLVDKEAEVSESSGASSSALPDFSWQGMSASSDDDAAAQQALLDAAGGAKKRPRSEPHVTSDDEVLPASFDSDNNTAAAGLLPLDDPFLFGDQFGDLNGGAFASLMDGLFAAGEANVAGESVGLWSFGDDFLNASYY

SEQ ID NO: 16156 - protein, 207 aa, Oryza sativa
  Clone ID: TF_OSC400325j.C1.p13.hg
MDDRRRGADATWPPFPADTFLCTHPRGPFGLVEQQHYSGSIHPIQPSKTLLSLAALPSSGTVYKAYLQVQHLIPAKQRHWGSWVAEIRHPLLKTRIWLGTYGTAEDAARAYDEAARLMSGPAARTNFPLSSSGGNARSCLSPTLRARLEKCCGAGSSAQAQQGAVAGQDNDDAAAAAAAMGVDDGDEYVEEMIQELTFYGSIEIVQP

SEQ ID NO: 16157 - protein, 277 aa, Oryza sativa
  Clone ID: TF_OSC412549j.C1.p4.fg
MEGVQHMEATSKCQTRHTHTEQQQQQQQHQTARHNERSLAFQAIKRFDMVKTAASNGAAAARRVGGGGDGKRAAYKGVRMRSWGSWVSEIRAPSQKTRIWLGSYSTAEAAARAYDAALLCLKGSAAADLNFPVRLPFDLPAAAMSPKSIQRVAAAAAANANANASSSCSAAVFAGVDDSGGASASEASTPACSSSDGAASPSPVSSPETVISDVDVDYSLLADIEAFFQSPKCMEYAMMDPCSAFFAPPPPPAMAMEEECGWEEEGDIALWSFSSLD

SEQ ID NO: 16158 - protein, 200 aa, Oryza sativa
  Clone ID: TF_OSC900026j.C1.p24.fg
MDRDESLGTQPLTGRRVRADTRHPVYRGIRLRSGKWVSEIREPGKSSRIWLGTYPTPEMAAAAYDAAALALRGADAALNFPGTATSRPAPASGSPDDIRAAAAAAAAMIGSGHRGNQRAADASTSRAATAAPEAAVAAGAGDQKRVVDEDDVFEMPRLLVSMAEGLMMSPPRLSPSTDGVGGVSPEDDEDEDGMSLWNHS

SEQ ID NO: 16159 - protein, 228 aa, Oryza sativa
  Clone ID: TF_OSC401367j.C1.p10.fg
MAASEQSSESSSTASTSSCGKKQQVAGKRKREDVGGGGEQAAAVAYRGVRMRAWGKWVSEIREPRKKSRIWLGTFPCPEMAARAHDVAALSIKGARAVLNFPDLAPALPRPASLAPRDVQAAAALAAVMHHHKHPSSSTSTSSPPAAPPPDEHHPRHEPQQPESSREDDQQQQPAAAAAAQMAVAELVFDELAPLWVEDVVEFGTSDHCWTAYDALDPIGFQPLLWEY

SEQ ID NO: 16160 - protein, 179 aa, Oryza sativa
  Clone ID: TF_OSC18350j.C1.p8.fg
MAARAHDAAALVVKGPAAVLNFPGAAASLPRPASAAPRDVQAAAARAAAMALDAVVPAPPSPPPPLMPPQASPSEAARAHALVAQVDQDDDDEELEEIVELPPIDELDAAAELVFASSGATTFHYDPAADQPWYDQPAACLQDGGGGGIAVHDALGFELDHVWADGVVASGFGALLWNM

SEQ ID NO: 16161 - protein, 318 aa, Oryza sativa
  Clone ID: TF_OSC403609j.C1.p3.fg
MCGGGKVASPPGPRLPRLAGAGGEEEEEEAAAGMLSRHGQAREMSVMVSALARVVAGGGGGEAEEWWPPAYGAAPLPPSTSPASHEHAAAMAAGQYAPATSSAMASPREQASSPSSGDAAGGGGGGGRKRYRGVRQRPWGKWAAEIRDPVKAARVWLGTFDTAEAAARAYDDAALRFRGCRAKLNFPEDAALLPPPPPPPAPAPAPPQSQGMVGVGEEYSEYARFLQGAGEPPHFLEQIMEDSPRPSTAAGASSSSSGQSSFPLFYSFAGHELGGNEANLARPPESGGAGGDGGRGSSPPVTWPGYGWGAPPPWDPSR

SEQ ID NO: 16162 - protein, 442 aa, Oryza sativa
  Clone ID: TF_OSC400189j.C1.p6.gm
MADQRRRFRGGGDWQASVDDVVDDGGELEAAAAAAARGSVLSGEYQAQEMSTMVSALTWVVAAGHDDHGGGQWSGLVDVPATTLAGGGGGDYGHGAQGSYYYYGAAPTSTPEFVAGGQQEQLSSDVPQGGASLGLAMDEHSPTYTVEASSSADQHGGGGGGRRYRGVRQRPWGKWAAEIRDPHKAARVWLGTFETAEAAARAYDEAALRFRGSRAKLNFPEDARLSSPPAGAGAGGATAAAQTVPVAYPASAVSDYLHGGAAAAMSSSLGPYSSIPTSSVTVASVPSSSSAASSSSGYGAPAEHGEAVQWTSWPDAQLQPAPARAEQTTGGATTPTTRAHAGFFVLFFFFFFFHPRDPPPPPRRSSWPPPPSTSTATSYHLEASGSFGKEAAPRAALPGLAMPEEKEYAPVPLGQAPEAVDPEDPVKSPPRPTSPANSTRKV

SEQ ID NO: 16163 - protein, 393 aa, Oryza sativa
  Clone ID: TF_OSC401948j.C1.p30.fg
MDSSSCLVDDTNSGGSSTDKLRALAAAAAETAPLERMGSGASAVVDAAEPGAEADSGSGGRVCGGGGGGAGGAGGKLPSSKFKGVVPQPNGRWGAQIYERHQRVWLGTFAGEDDAARAYDVAAQRFRGRDAVTNFRPLAEADPDAAAELRFLATRSKAEVVDMLRKHTYFDELAQSKRTFAASTPSAATTTASLSNGHLSSPRSPFAPAAARDHLFDKTVTPSDVGKLNRLVIPKQHAEKHFPLQLPSAGGESKGVLLNFEDAAGKVWRFRYSYWNSSQSYVLTKGWSRFVKEKGLHAGDVVGFYRSAASAGDDGKLFIDCKLVRSTGAALASPADQPAPSPVKAVRLFGVDLLTAPAPVEQMAGCKRARDLAATTPPQAAAFKKQCIELALV

SEQ ID NO: 16164 - protein, 172 aa, Oryza sativa
  Clone ID: TF_OSC1745j.C1.p11.fg
MARPQQRYRGVRQRHWGSWVSEIRHPLLKTRIWLGTFETAEDAARAYDEAARIMCGPRARTNFPLADATAAAAAAAASSSFLSAALVAKLHRFNLASVQATQRQREAAATAAAASSASATTPPLGNAAAADDDARTTTTYGAEWSGRFLEEQHVEQMIDELLDSNFSMEICY

SEQ ID NO: 16165 - protein, 128 aa, Oryza sativa
  Clone ID: TF_OSC407709j.C1.p1.gm
GVRRRRWGKWVSEIRVPGTRERLWLGSYATAEAAAVAHDAAVCLLRLGGGRRAAAGGGGGLNFPARALAAAAAASSYGGAGGLLSPRSVQRVASDAGMAADAQLVDLRRDHPPAAAAASSSGSGVAGD

SEQ ID NO: 16166 - protein, 260 aa, Oryza sativa
  Clone ID: TF_OSC900060j.C1.p3.fg
MSSRQPIGSGGGGAPPDWHDVEPQWQPVDDVVTVAAAAAYLAAPAGATLSSESADRRWRPVGPSAAAAAAALQAVEAQGAAAAERHYRGVRRRPWGKWAAEIRDPNKAARVWLGTFDTAEAAAAAYDDAALRFKGAKAKLNFPERVRGRTGQGGFLVSPAVPRPPPHGVPAPAPAVAPAPFPDLIQYARLLRSGEDAAAAAAVAGIAATAAPAAQILDFAAQRLVGVSPAMAPRPPSTLPTTTTAASSPSAWPHGGGHGS

SEQ ID NO: 16167 - protein, 233 aa, Oryza sativa
  Clone ID: TF_OSC400143j.C1.p10.fg
MGLTHLGPAQIQQIQAQFLAQQQQQRALAGAFLRPRGQPMKQSGSPPRAGPFAAVAGAAQSKLYRGVRQRHWGKWVAEIRLPKNRTRLWLGTFDTAEDAALAYDKAAFRLRGDLARLNFPTLRRGGAHLAGPLHASVDAKLTAICQSLATSSSKNTPAESAASAAEPESPKCSASTEGEDSVSAGSPPPPTPLSPPVPEMEKLDFTEAPWDESETFHLRKYPSWEIDWDSILS

SEQ ID NO: 16168 - protein, 339 aa, Oryza sativa
  unsure (1)..(339): unsure at all Xaa locations
  Clone ID: TF_OSC400143j.C1.p13.gp
MAAAIDMYKYNTSTHQIASSDQELMKALEPFIRSASSSSASSXATTTTLLLLPXSQDSYMPTPSYPTSSITTAAATTTSSFSQLPPLYSSQYHAASPAASATNGPMGLTHLGPAQIQQIQAQFLAQQQQQRALAGAFLRPRGQPMKQSGSPPRAGPFAAVAGAAQSKLYRGVRQRHWGKWVAEIRLPKNRTRLWLGTFDTAEDAALAYDKAAFRLRGDLARLNFPTLRRGGAHLAGPLHASVDAKLTAICQSLATSSSKNTPAESAASAAEPESPKCSASTEGEDSVSAGSPPPPTPLSPPVPEMEKLDFTEAPWDESETFHLRKYPSWEIDWDSILSX

SEQ ID NO: 16169 - protein, 299 aa, Oryza sativa
  Clone ID: TF_OSC401580j.C1.p12.fg
MSRSRTVRIFWDDPDLTDSSGEDEGCGGRRVGSMVRELPPAQMPVAQAGFAPAAAAAAAALPEQCSGGDGDMGRRVVGGGCTVGVGRRRLTKDGGPGAPSTKFRGVRRRPWGKFAAEIRDPWRGVRVWLGTFDTAEEAARVYDNAAIQLRGPSATTNFSASTNSAGAQDPVAVGYESGAESSPAVSSPTSVLRKVPSLCSLAEDKDDYEAGPCEPATAAGSNLTVLEEEELGEFVPFEDAPVYGGSSFWDFEPESGFLYAEPSSPETPWDAGATSSGEAQDYFQDLRDLFPLNPLPAIF

SEQ ID NO: 16170 - protein, 207 aa, Oryza sativa
  Clone ID: TF_OSC400601j.C1.p37.fg
MCGGAIIYDYIPARRRLCASDFWPDADDSDPHTPAPEKPPRAKRERKNQYRGIRQRPWGKWAAEIRDPVKGVRVWLGTYPTAEAAARAYDRAARRIRGAKAKVNFPNDFGAAPAPAAAAAKAVPRVAPTPAVLPPPKMEAVSEGAGACSSDEVKELSEELLAYENYMSFLGIPYMEGGAASAAGAEEAAAPAGLWTFEDYELPSLAL

SEQ ID NO: 16171 - protein, 315 aa, Oryza sativa
  Clone ID: TF_OSC400903j.C1.p14.np
MDNHAVAVQQRDTAPRPRARARASVSSIQGGGGPGWADHVALPRPPRCHPRRPPTPCRRPLAFASSSIHPHRAVLPSGAPPHVSAGARDTGGAAGLARPHHSFPQEKKPKPRHAGVASPRLALAPLRNSARMDRREATVFLPPPPPPQPTQPQQQPAAAAVRAPVGGRGGGGGRQYRGVRMRKWGKWVAEIREPNKRSRIWLGSYSTAVAAARAYDTAVFYLRGRSARLNFPDQLDGAGGGGAGAGGAEDHRELTAAVIRKKAAEVGARVDAQHSVVGAAAPVPLQPPQPPPPQRRRTKNPDLNREPTPDTSDDE

SEQ ID NO: 16172 - protein, 443 aa, Oryza sativa
  Clone ID: TF_OSC400466j.C1.p4.fg
MAKRSSPDPASSSPSASSSPSSPSSSSSEDSSSPMSMPCKRRARPRTEKSTGKAKRPKKESKEVADPSSNGGGGGKRSSIYRGVTRHRWTGRFEAHLWDKNCSTSLQNKKKGRQGAYDSEEAAARAYDLAALKYWGPETVLNFPLEEYEKERSEMEGVSREEYLASLRRRSSGFSRGVSKYRGVARHHHNGRWEARIGRVLGNKYLYLGTFDTQEEAAKAYDLAAIEYRGANAVTNFDISCYLDQPQLLAQLQQEPQLLAQLQQEPQVVPALHEEPQDDDRSENAVQELSSSEANTSSDNNEPLAADDSAECMNEPLPIVDGIEESLWSPCLDYELDTMPGAYFSNSMNFSEWFNDEAFEGGMEYLFEGCSSITEGGNSMDNSGMAEYNLFEECNMLEKDISDFLDKDISDFLDKDISISDRERISPQANNISCPQKMISVCN

SEQ ID NO: 16173 - protein, 334 aa, Oryza sativa
  Clone ID: TF_OSC101030j.C1.p19.fg
MCGGAILAEFIPAPSRAAAATKRVTASHLWPAGSKNAARGKSKSKRQQRSFADVDDFEAAFEQFDDDSDFDDAEEEDEGHFVFASKSRVVAGHDGRAAARAASKKKRGRHFRGIRQRPWGKWAAEIRDPHKGTRVWLGTFNTPEEAARAYDVEARRLRGSKAKVNFPATPAAARPRRGNTRATAVPPPATAPAAAPPRGLKREFSPPAETALPFFTNGFVDLTTAAAPPPAMMMTSSFTDSVATSESGGSPAKKARSDDVDSSEGSVGGGSDTLGFTDELEFDPFMLFQLPYSDGYESIDSLFAAGDANSANTDMNAGVNLWSFDDFPIDGALF

SEQ ID NO: 16174 - protein, 56 aa, Oryza sativa
  Clone ID: TF_OSC422801j.C1.p1.fg
MAGVGVGEGEVRYRGVRRRPSGRYAAEIRDPAKKTPIWLGTFDSAEAAARAYDAAA

SEQ ID NO: 16175 - protein, 322 aa, Oryza sativa
  Clone ID: TF_OSC401103j.C1.p24.fg
MSQTQSNSNQTHLPTPNPSRARAMCGGAILADLIPSPRSGGHTKKNKRRRISDDEDFEAAFEEFDAGDDDSDSDSESEEVDEYDVVVDDDDSEDGVVVLPPPPPPPPVIPHERHGARRFRGVRKRPWGKWAAEIRDPVRGVRVWLGTFPTAESAARAYDAAARRLRGAKAKPNFPSAPPPSAAAHRRKKRRAHAATRSPSSPPATSEVTAASASASSDVPAPAFASFVGEPGHGGAKSMPTTSHTSQPAPPATVASENVDDPEVFDPYDVHGGLASYFAGGAYESLESLFAHGGDSAAVDQAASDHWPAALWSFADDGSFCF

SEQ ID NO: 16176 - protein, 351 aa, Oryza sativa
  Clone ID: TF_OSC400259j.C1.p124.fg
MTVAGASELMSGYYQAQEMSTMVSALARVVAGGGGGGGDGDGDQWAWSSPSPSSSAAAAAARGVQERRREEQAMHELAGYACGGAPSPEFAGSEQSSDTQSASAATMDEHHSPVGGGGNAEGPDTPRRRYRGVRQRPWGKWAAEIRDPHKAARVWLGTFETAEAAARAYDEAALRFRGSRAKLNFPEDARLYPTAATTTTAAPPPAPVAAASPSAAIYPGASQSAEYLRYQMLLQGRLTTATPNQGTLLPFYGGGGGGGSMTNPYGGGGGGAMSGFLGSYYSFPTPSVSVATVPSSTSSAPGNYYSSHGGSHQSMSAAEEWNWENALVYPATAASWSESSYHHHPPPPHTQ

SEQ ID NO: 16177 - protein, 328 aa, Oryza sativa
  Clone ID: TF_OSC418226j.C1.p20.fg
MDFHHGDADDFALEFIREHLLGVDGATATATEPADLEVVEPAAAYPPMSWQEQRQQEQHGCHVELTDEHLESAPAAEAAAAFRTAPAQPAAEVMIKFGGEPSPVRPSSSLTISLPPSSFGSWASAAAPAAAAVEDFRKYRGVRQRPWGKFAAEIRDPKRRGSRVWLGTYDTPVEAARAYDRAAFRMRGAKAILNFPNEVGTRGAELWAPPPPPPAHSAAASTTNKRKRQPSEDPDDGVEVIGVVSKAVKTEAPTSNSSSLSSSLTSRDTTPATSSAGAEHAGAAAESSPATPSSWSWEQYWEALLGGLPPLSPLSPHPALGFPQLTVN

SEQ ID NO: 16178 - protein, 318 aa, Oryza sativa
  Clone ID: TF_OSC418226j.C1.p21.fg
MDFPGDAEDFALEFIREHLLGGDAPVLPPAAVPAAAAYLPTSTMFLPQQQRGYAGLTPQEYVVDSAPAADQAAFRDDQPDPAADVMIMFGGERFPAVKPSSSSSPSLTVTVPPSSFGSWAPAAVPAVAATAAAVEDFRKYRGVRQRPWGKFAAEIRDPKRRGSRVWLGTYDTPVEAARAYDRAAFRMRGAKAILNFPNEVGTRGAELWATPPPTNKRKRQPEDDTAAADDVEVIGVANKAVKTEAPTSAYSSSSLSSMSRDTTATTSSAGTSTGSSEPTSFPVVTPSSWSWDQYWDGLPPLSPLSPHPALGFPQLTVS

SEQ ID NO: 16179 - protein, 193 aa, Oryza sativa
  Clone ID: TF_OSC400698j.C1.p29.fg
MEQRAAAAAQQRQGRRQSAAACGIRRARAETRHPVYRGVRFRAGKWVSEIRELRKPSRIWLGTYATPEMAAAAYDAAALALRGRGAALNFPDAARSRPAPASASADDVRAAATAAAAAMAHQEEDDDSRRQLEDGGGGGGVVDEDDVLEMPRLMVSMAEGLMISPPPVMLGLQADGGGIMDEGGGVVRLWDHS

SEQ ID NO: 16180 - protein, 365 aa, Oryza sativa
  Clone ID: TF_OSC409411j.C1.p25.fg
MCGGAIIHHLKGHPEGSRRATEGLLWPEKKKPRWGGGGRRHFGGFVEEDDEDFEADFEEFEVDSGDSDLELGEEDDDDVVEIKPAAFKRALSRDNLSTITTAGFDGPAAKSAKRKRKNQFRGIRQRPWGKWAAEIRDPRKGVRVWLGTFNSAEEAARAYDAEARRIRGKKAKVNFPEAPTTAQKRRAGSTTAKAPKSSVEQKPTVKPAFNNLANANAFVYPSANFTSNKPFVQPDNMPFVPAMNSAAPIEDPIINSDQGSNSFGCSDFGWENDTKTPDITSIAPISTIAEVDESAFIKSSTNPMVPPVMENSAVDLPDLEPYMRFLLDDGAGDSIDSLLNLDGSQDVVSNMDLWSFDDMPVSDFY

SEQ ID NO: 16181 - protein, 241 aa, Oryza sativa
  Clone ID: TF_OSC400766j.C1.p8.np
MAPRNAAEAVAVAVAEGGGAGMEPRFRGVRKRPWGRYAAEIRDPARKARVWLGTFDTAEAAARAYDSAALHFRGPKAKTNFPVPSRTPTTTPRRRRCPRRRRWPSSARSSTVESSSRDTPAAAPVAAAAKAQVPASPSLDLPRDVGHGGRPAVPVPRPLGVRPGRRRRAENRGTNDHLRRRRLAGPVENESTRAQACAAGAELVGRRAAPRRVAQGRGRSRRGHAHTVTLAPTARQPRSQS

SEQ ID NO: 16182 - protein, 196 aa, Oryza sativa
  Clone ID: TF_OSC400555j.C1.p42.gm
MEDDKSKEGKSSSSYRGVRKRPWGKFAAEIRDPERGGARVWLGTFDTAEEAARAYDRAAFAMKGATAMLNFPGDHHHGAASRMTSTGSSSSSFTTPPPANSSAAAGRGGSDRTTDKVELECLDDKVLEDLLAETNYLRGERDAAGFATAHTQAGPVMGCVGAHAIRRRPLESPPPASDSPTPLRHATTAMLQTLPL

SEQ ID NO: 16183 - protein, 275 aa, Oryza sativa
  Clone ID: TF_OSC401067j.C1.p3.fg
MGGNQEYMIRFDGHIDDASPSSATAEPPPPLPPPRPFAGRAISAEREHSVIVATLLHVISGYRTPPPEVFPAARAEVCGVCGMDQCLGCEFFAGESGVVSFDGAEKVAAAAAAAAAGAAAGQRRRRKKKNKYRGVRQRPWGKWAAEIRDPRRAVRKWLGTFDTAEEAARAYDRAAVEFRGPRAKLNFPFPEQLSAHDDSNGDASAAAKSDTLSPSPRSADADEQVEHTRWPQGGGGGGGGGGGETGDQLWEGLQDLMQLDEGGLSWFPQSSDSWN

SEQ ID NO: 16184 - protein, 317 aa, Oryza sativa
  Clone ID: TF_OSC900147j.C1.p10.fg
MVPSSRKVRVFCSDPDATDSSDEDDQNKKERRFSREILIPMENSKASKPVKTLVQCGTKTVKDSEKEPTSKYRGVRRRAWGKWAAEIRDPVRKSRKWIGTFNSEEEAAAAYLAQSNQFHEELMALKIQSSVSEQEDLSSSVTISCVSSSQSCDQKIQAKPQEHKRVSVVVNRETVEQKFKAQPQAQKIKAQPEVQKRVSVKISHETEDEHLLNLPSTPKGKEISMGAVLGRIDEIPVSNCVGHIDEFPPDDFTRLADAFPVSDFIGMADVPLGDDYIGLADISHLPLPITDLKFDLNAELNWDGFDFASLEQELNCL

SEQ ID NO: 16185 - protein, 867 aa, Oryza sativa
  Clone ID: TF_OSC401715j.C1.p2.fg
MSSFILPFLLPPSLSSLPLFSSPFERLGGSGGRGPEWRRRPRHRLPCLQAGLPSRKLRQGLRRGRGMGARAQPTPSWAREPLFEKAVTPSDVGKLNRLLVPKQHAEKHFPLRRTSSDASATAAAATCNSARACSSTSRTARGSSQSYVLTKGWSRFVREKGLRAGDTIVFSGSAYGPDKLLFIDCKKNNTAAATGDEKPITSGEATRVVRLFGMDITGGGGDCRKRERAVEMGQEAFLMKRQCVCTTLHRPLSEGDITAMQVQQRKPKACAESAAAARGADQQQCDGRPLEAGEESLERSVPRKRKPAAAVAAAEKRWSSVAYVVLAAFVMATVFAVLGGRRPAVWIAATKALRRGSDDKSIPLARSAADKLLGGLLPEGFDEKSCRSRYESYLYRRNPGRRPSPHLVARLRMHEELQRRCGPNTESYNRAVQRLRDGGAAEADAHSPDDEQCKYVVSISYRGLGNRILAAASAFLYAVLTGRVLLVDPSNEMDELFCEPFPGTTWLLPRDFPLASSYANFSADTAESYGNMLKNKVLGTDGSTDGDMPAAQMPAFAYLHLDHDYGDGDKMFFCDDDQRLLSNIQWLVMRTDTYIVPSLFLVTTFQDELDALFPERDAVFHHLGRYLFHPANHVWGLVARYYRAYLATARQLVGVQVRVFDHRQAKSPHVVLEQITSCAWKEKLLPEVLDAVEDAAMPTPPTTPHGGSNNSKAVLITSLRPWFYERVKAMYWERATATGEDVSVHQPSHEEYQHFGEKSHDGKAWAEMYLLSLCDVLVTSGWSTFGYVAQGLGGLRPWVMYKPVNITAVPDPPCGRDVSMEPCFHSPPFYDCKTKRGVDTGTILPHVRHCDDVSWGLKLVDPNGSPN

SEQ ID NO: 16186 - protein, 85 aa, Oryza sativa
  Clone ID: TF_OSC900114j.C1.p17.gm
MRGGGGGGDSEVNCHGEHEAAADAGSSAVTAAAAASSSATAPWPHAKGSEGGGDQLGAVARVRRPVVSLPPVGSLVVYFPQGTAS

SEQ ID NO: 16187 - protein, 964 aa, Oryza sativa
  Clone ID: TF_OSC400188j.C1.p2.fg
MAGMAAAAAALVAAKRCMNAACGAPAPSPAGGEWRKGWPLRSGGFAVLCDKCGLAYEQLVFCDIFHQKESGWRDCSFCGKRLHCGCIASKNSFDLLDSGGVQCVTCIKNSAVQSVPSPVVPKLFSSQNNQRLFGKSDDLLSGRPLETSSLMVDARNDDLTIIAKNNLPFMVKNVEAGQSSNILRQKELENGARQIKWELPTLSIGDMGRIPFLTRSQSALESRRDENKDPTTESTTSESLSEACLNMSLGIASNGNKLEATSTVERPMLSPTTGFPEGRELTTALSPFQHAQRARHFLTRPPRVGEGAVFDPTKDMLPHLRVARPPAEGRGRNQLLPRYWPRITDQELQQISGEYPYYIYQLLGDIMHNSNSTIVPLFEKVLSASDAGRIGRLVLPKACAEAYFPPISQPEGRPLTIQDAKGKEWHFQFRFWPNNNSRMYVLEGVTPCIQSLQLQAGDTVTFSRIEPGGKLVMGFRKATNTVSLPDSQISAIANGSILGDTLFSSTNENLAIVSGYSGFLQSIKGAADLHTSSIYDHHVNSADGDVSWLKTDKFGSRPDEGSLQFLKRGRNIGSKSRRLSMDAEEAWELKLYWDEVQELLRPAPTAKPTVVMIEDYEIEEYDEPPVFAKRSIFTIRSTGEQDQWIQCDDCSKWRRLPLNVIVASKWTCADNTIDSKSCSCSAPEELTPKELHIVLQQYEDMRRRRNSFGFKQNIPEMDAVSLDAFATAAVYGDVGNQGSPSVATTTKHPRHRPGCTCIVCIQPPSGKGPKHNPACTCNVCMTVRRRFKTLMMRKKQRQSEREEAEASKKIAWMNRDEPEGSSLSRSPQTVDTTRDGDVTMFDKVDINKGHIDLNFHPTAVRDEERHGGQPRVSMVSLLEVANRPLENYMKQNGLTSLAGEQGSSSTCTGAATVPQPALVESEERTSNNDGGRVATAEQPESMAVDEAGDNQPDKAAGDSAAALA

SEQ ID NO: 16188 - protein, 375 aa, Oryza sativa
  Clone ID: TF_OSC100150j.C1.p1.fg
MEFTTSSRFSKEEEDEEQDEAGRREIPFMTATAEAAPAPTSSSSSPAHHAASASASASASGSSTPFRSDDGAGASGSGGGGGGGGEAEVVEKEHMFDKVVTPSDVGKLNRLVIPKQYAEKYFPLDAAANEKGLLLNFEDRAGKPWRFRYSYWNSSQSYVMTKGWSRFVKEKRLDAGDTVSFSRGIGDEAARHRLFIDWKRRADTRDPLRLPRGLPLPMPLTSHYAPWGIGGGGGFFVQPSPPATLYEHRLRQGLDFRASTPPPRWGGRAAGSPVVLDSVPVIESPTTAAKRVRLFGVNLDNPHAGGGGGAAAGESSNHGNALSLQTPAWMRRDPTLRLLELPPHHHHGAESSAASSPSSSSSSKRDAHSALDLDL

SEQ ID NO: 16189 - protein, 311 aa, Oryza sativa
  Clone ID: TF_OSC400240j.C1.p9.fg
MEFITPIVRPASAAAGGGEVQESGGRSLAAVEKEHMFDKVVTPSDVGKLNRLVIPKQHAEKYFPLDAASNEKGLLLSFEDRTGKPWRFRYSYWNSSQSYVMTKGWSRFVKEKRLDAGDTVSFGRGVGEAARGRLFIDWRRRPDVVAALQPPTHRFAHHLPSSIPFAPWAHHHGHGAAAAAAAAAGARFLLPPSSTPIYDHHRRHAHAVGYDAYAAATSRQVLFYRPLPPQQQHHPAVVLESVPVRMTAGHAEPPSAPSKRVRLFGVNLDCANSEQDHAGVVGKTAPPPLPSPPSSSSSSSGKARCSLNLDL

SEQ ID NO: 16190 - protein, 234 aa, Oryza sativa
  Clone ID: TF_OSC408625j.C1.p9.fg
MSSSTAASIGPPQPPPPPTSPEEEKCLNLELWHACSSPLVCLPSVGTRVVYFPQGHSEQVSWLSAMGCSLLSRGNHQRPWWIALPSSCWCFFSKTLAEREAFYYVVDNAAVMDFITVNTSGSILINMLKPEYRKFGEWGNRCIWFTTIQFSVISKDLASYISIQPVSGQTICVGLLWEYIIGHFLSSTALVSFICCSKTHGYIASAFYNAPQELKKDIELMIVMTRSYLRKKNK

SEQ ID NO: 16191 - protein, 317 aa, Oryza sativa
  Clone ID: TF_OSC100150j.C1.p1.np
FTTSSRFSKEEEDEEQDEAGRREGEAEVVEKEHMFDKVVTPSDVGKLNRLVIPKQYAEKYFPLDAAANEKGLLLNFEDRAGKPWRFRYSYWNSSQSYVMTKGWSRFVKEKRLDAGDTVSFSRGIGDEAARHRLFIDWKRRADTRDPLRLPRGLPLPMLTSHYAPWGIGGGGGFFVQPSPPATLYEHRLRQGLERFNPAAAIGDGVRAAGSPVVLDSVPVIESPTTAAKRVRLFGVNLDNPHAGGGGGAAAGESSNHGNLPPHHHHGAESSAASSPSSLPPHHHHGAESSAASSPSSSSSSKRDAHSALDSICSDLKR

SEQ ID NO: 16192 - protein, 762 aa, Oryza sativa
  Clone ID: TF_OSC101706j.C1.p7.fg
MAAAAAALADDGDGIVDRAMWLACAAPNSGRLPAVGSMVFYFVDGHAEQFCQFPAPLLEQLAVPGPRVFLCTVAAVRLRADALTNEAYADITLDPVADHDVPRLLPAPAPAAAAGGQQQQLRYFVKTLMSSDAEYRDRFAVPMDVAKDVFPPLVDAKAVQPLIVKDLQGSPMTFDYGRNGNRVTLAKVWKKFRDDMDFVDGDSVIFMRRRDDDELYVGVRRQRTLDKPLRTRRSRPPTPLPVAVQEVIAAAGRAAAGEQFTATYRSRQDGDEFVVPREVVEEGLRLRSRFTPEMEVEFVWALEDGAPPSVGPHGKITAIHDTTWMWRSVEIGWTGGSEMNKYANFWQVRLVGSDDFASAAPPPPLSPKRLKSSEQCPSRPPEPLPGRVFLCKVTAVRLDATRNELFATMSLIPVARDQAIQPQAPADPGPSSPQVQTTLVSFVKPLTCTDAVKNRYRFIVPKRETAMGVLPQLQLNEHVPLYIKDMHGKEWVINYTWKEYTHMLSSGWIKFANANRLVTGDNVVFMRSMDSGERYMGLRRTLKPEPVSVDEVIEAVWRAARLEPFEVTYLSRQDGDEFVVPCGIVHNALRAKFTPGMVVNFVWAVEEDRLPNVGPQGKVIAIENYATSIWRMIQVEWPSCAGMNRYVNFWQIREVLGESSFEASTCIVRSQDYSPAPQRNLVNALQLPDGTKQLQQNKKSVSSSSTFRLFGKKMTPGVPPRRDTSGLSGQVSLFSHYLPHDEDDGQVPTMRQRLETLFPDNI

SEQ ID NO: 16193 - protein, 407 aa, Oryza sativa
  Clone ID: TF_OSC101706j.C1.p6.fg
MAAAAAPLADDGDGIVDRDMWLACAAPNSGRLPAVGSVVFYFVDGHAAQFCQFPAPLLEQLAVPGPRVFLCTVAAVRLRADALTNEAYAEITLDPVADHDVPRLAPAPAPAPAAAAGGQQLRYFVKTLMISDFDFRIRFSAPMADAKGVFPPLVDAKAVQPLLVKDLHGSPMTFDYGRKGKRVTLAKVWKKFRDDMDFVDGDSVIFMRRRDDDDDDGELYVGVRRQRTLERPLRNTMRRYRPPTPPQAAVQEAVLAAAGHAAAGERFTVAYRSRKDGDEFVVPREAVEEGLRARLTSLAEVEFVWAVEDGAPPIVGPRGKVTAIATGQLWRNLEIVWDGNSEMDMSANFWQVRPVEEVDISPSTPPPKRLKNCEIDDTASTSVSVDNGDEQVPTMRQRLEALIPDNI

SEQ ID NO: 16194 - protein, 925 aa, Oryza sativa
  Clone ID: TF_OSC400219j.C1.p15.fg
MAAAATAAASPVEGLTGGGGGGGGGVDGLFVELWRACAGPLVTVPAVGERVFYLPQGHIEQVEASTNQVAEQQGAPLYNLPWKIPCKVMNVELKAEPDTDEVYAQLTLLPEKQQDGNGSGNGNVSKDKVEEEEVVPPAATERPRVHSFCKTLTASDTSTHGGFSVLRRHADECLPPLYSFFDRLIVAMPLTSLLDQDMSQHPPTQELVAKDLHGVEWRFRHIFRGQPRRHLLQSGWSVFVSAKRLVAGDAFIFLRGENGELRVGVRRAMRQQANIPSSVISSHSMHLGVLATAWHAVNTGTMFTVYYKPRTSPSEFVVPRDLYKESLKRNHSIGMRFKMTFEGEEAAEQRFTGTIVGVGDSDPSGWADSKWRSLKVRWDEAASVPRPDRVSPWQIEPANSPSPVNPLPAPRTKRARPNVLASSPDLSAVNKEVASKVMANSQQNGLPRAFHSQENMNLRSRFGDSNELNTSQKLTMWSSGSNQEKNNVSVQRELGSQSWMQMRRPDGSSEILSGFQPLKDTRNPLSSFPSQISGNRSNTWNTINVHYPDQNANHNMYPGTWSLMPPNTGFGVNQQNYLMTPDITLPQRSLNAKFGGNGAFTSLRAHGIDQRSSGWLGHIEPSSHIDDASSSLIKPQPLVIDHNVQKAKGSSCMLFGISLDSPAKPELLISPPSVAFDGKLQQDALEEDECSDPSKTVKPLDGAQHDSAREKHQSCPDGTKNIQSKQQNGSSRSCKKVHKQGIALGRSIDLTKFTCYDELIAELDQMFDFNGELNSSSKNWMVVYTDNEGDMMLVGDDPWNEFCNMVHKIFIYTREEVQKMNPGALNSRSFVVCKNRRRHIHGRKESFRGVVVVAGALYVSGKPRSTPFVDGACPGISCPLFVFDKFWVCFVEVLSYCMICPVVVKGAEAKLPRPVRLLACALPPS

SEQ ID NO: 16195 - protein, 412 aa, Oryza sativa
  Clone ID: TF_OSC1558j.C1.p4.gm
MTGIDLNTVEEDQEEAAEEVAANGSSPAPAKAGAVCLELWHACAGPVAPLPRKGGVVVYLPQGHLEHLGDAPAAAAAAAAVPPHVFCRVVDVTLLANAATDEVYAQLSLVPEKEEVARRADHGEGEDGDGMKQRFARMPHMFCKTLTASDTSTHGGFSVPRRAAEDCFPPLDYSQQRPSQELVAKDLHSTEWRFRHIYRGGGGCPDFAESAQFHKVLQGQELLGFKSHGDSKRSCKVKNYFVPTEELWLMRLWVVMGFINKIVLVHQQANSKMPRLEFGHGQLDKHENDRRVRFGPSEGIERREQRIPLQPYPTSGEVIDGQVTVEKSHSPGRHGKDGPDNKAVGTNSCKIFGISLTEKVPAREELDDGDANYSLQSLKQVPKSLGNSCATVHEQRPVVGRVIDISTMDMMI

SEQ ID NO: 16196 - protein, 1037 aa, Oryza sativa
  Clone ID: TF_OSC400924j.C1.p6.fg
MASSGGGGGGGEEGEGRGATKVNQELWYACAGPLVSLPPQGSLIVYFPQGHSEQADPDTDEVYARMTLQPVSNVTQCDKETLLASELALKQTRPQTEFFCKTLTASDTSTHGGFSVPRRAAERIFPRLDFSMQPPAQELQARDLHDNVWTFRHIYRGQPKRHLLTTGWSLFVSGKRLLAGDSVLFISDSMHIGILAAAAHAAANNSQFTIYYNPRASTSEFVIPFAKYQKAVYGNQLSLGMRFRMMFETEESGTRRYMGTITGISDLDPVRWKTSHWRNIQVAWDEAAPTERRTRVSLWEIEPIIAPFFIYPSPLFTAKRPRLPGMTDDETEMDGLLKRAMPWVGEEICKKDLNIQNSVVPGLNLAQWMNMQHSSSLPGTVVQPELLNSLSGKPVQNLAAADLSRQISFHPQFLQQNNIQFNTALVPQQNQQTEQLAKVIPTPNQLGSVIIPQKVVQDCNSEQRQHVVTQPVQGSQPNINIPQPQLVVQAQLQQPQVILQAQLQQPQVVVQAQLQQTQPSVQSHTVLQGGLQQIQLLQQQQPHVQHQQIPQQLHHQQQQTQQLQPVQQVQQSVQEHQQIKIQPVHVSMDASMNTQVADHQMKLQLLKALQPQQPLISEQQKMLLDLQQQVINSQSAPQQCVQQKVQSHQVQDLTGNVIPNSKSDIATSMGASSLHVAGGRQLLKTDDVPSTSTSPSTNSNPVLLQSIPSSSKNQSLTTAGKTSQSSVVLGPTIEQDTKPYQNVKQTVMIPKTTEQRPATGQDCINNNPQMDYLDTSSSATSVCLSQADGSLQQNFPPSSFHQHHLLKDTVPDSEFEVTDPRNNLLFGVNIDGQLGLPLNADLLANDIGTDKYMDQLPGNGISNFISSKDSQQELSSSMISHSFGVADMAFNSIDSAINDTPFLNRNSRSAAGPAHQRMRTYTKVHKRGAVGRSIDINRYSGYDELKHDVARMFGIEGQLGDQNRVGWKLVYEDHEKDVLLVGDDPWEDFVKCVRCIRILSPQEEMQMRLVGDFGDSFLPNQACSSSDGGHPWRITGD

SEQ ID NO: 16197 - protein, 515 aa, Oryza sativa
  Clone ID: TF_OSC900261j.C1.p1.fg
MSSSSAASIGPPQPPPPPAPPEEEKKCLNSELWHACAGPLVCLPTVGTRVVYFPQGHSEQVAASTNKEVEGHIPNYPNLPAQLICQLHDVTMHADVETDEVYAQMTLQPLNPVRRLGFLHDVCSAEVLMQEQNDAYLPAEMGIMSKQPTNYFCKTLTASDTSTHGGFSVPRRAAERVFPPLDFTQQPPAQELIARDIHDIEWKFRHIFRGQPKRHLLTTGWSVFVSAKRLVAGDSVLFIWNEKNQLLLGIRRASRPQTVMPSSVLSSDSMHIGLLAAAAHAAATNSRFTIFYNPRYMGTITEVSDADPVRWPSSYWRSVKVGWDESTAGERPPRVSLWEIEPLTTFPMYPSLFPLRVKHPWYSGVASLHDDSNALMWLRGVAGEGGFQSLNFQSPGIGSWGQQRLHPSLLSSDHDQYQAVVAAAAASQSGGYLKQQFLHLQQPMQSPQEHCNLNPLLQQQILQQASQQQIINPDAQNIQTMLSPSAIQQQLQQLQQMQQVQNDQKQKIQPDQSYQ

SEQ ID NO: 16198 - protein, 829 aa, Oryza sativa
  Clone ID: TF_OSC900260j.C1.p14.fg
MSSSSAASIGPPQPPPPPAPPEEEKKCLNSELWHACAGPLVCLPTVGTRVVYFPQGHSEQVAASTNKEVEGHIPNYPNLPAQLICQLHDVTMHADVETDEVYAQMTLQPLNPVRRLGFLHDVCSAEVLMQEQNDAYLPAEMGIMSKQPTNYFCKTLTASDTSTHGGFSVPRRAAERVFPPLDFTQQPPAQELIARDIHDIEWKFRHIFRGQPKRHLLTTGWSVFVSAKRLVAGDSVLFIWNEKNQLLLGIRRASRPQTVMPSSVLSSDSMHIGLLAAAAHAAATNSRFTIFYNPRYMGTITEVSDADPVRWPSSYWRSVKVGWDESTAGERPPRVSLWEIEPLTTFPMYPSLFPLRVKHPWYSGVASLHDDSNALMWLRGVAGEGGFQSLNFQSPGIGSWGQQRLHPSLLSSDHDQYQAVVAAAAASQSGGYLKQQFLHLQQPMQSPQEHCNLNPLLQQQILQQASQQQIINPDAQNIQTMLSPSAIQQQLQQLQQMQQVQNDQKQKIQPDQSYQVPTSAVLPSPTSLPSHLREKFGFSDPNANSSSFITSSSSDNMLDSSFLQGSSKAVDLSRFNQPVASEQQQQQAWKQKFMGSQSVSFGGSVLHNSPTSKDGSVENKIGRDVQNQSLFSPQVDSSSLLYNMVPNLTSNVSDGNLSTIPSGSTYLQNAMYGCLDDSSGLLQNTGENDPATRTFVKVYKSGSVGRSLDITRFSNYAELREELGQMFGIKGQLDDPDRSGWQLVFVDRENDVLLLGDDPWEFINIYMNVRNAKKSYIMKRREYNTLVSWFPQLIAYRGKTVLPSIICVGQSLHVDAQLPKTLRESKHQT

SEQ ID NO: 16199 - protein, 1093 aa, Oryza sativa
  Clone ID: TF_OSC401881j.C1.p3.fg
MASMKQQQTPASSAVTAAAAASSSATAAVAACEGERKAAAINSELWHACAGPLVSLPPVGSLVVYFPQGHSEQLLITVLVHYQSGWEHWAYWLPFSVALLVWSIDSLGRTNPAIIRAFLFRKMRKKVYKSNIILRNAFSMLLETAEYLLNLSFLFQVAASMQKDVDAHVPSYPNLPSKLICLLHGVNLHADPDTDEVYAQMTLQPVNTYGKEALQISELALKQARPQMEFFCKTLTASDTSTHGGFSVPRRAAEKIFPPLDFSMQPPAQELQARDIHDNVWTFRHIYRGQPKRHLLTTGWSLFVSGKRLFAGDSVIVVRASPTEFVIPFAKYQKALYSNQISLGMRFRMMFETEELGTRRYMGTITGISDLDPVGWDESAAGERRNRVSIWEIEPVAAPFFLCPQPFFGVKRPRQLDDESEMENLFKRAMPWLGEEVCIKDTQNQNSTAPGLSLVQWMNMNRQQSSSLANTAAQSEYLQALGNPAMQNLAADELARQLYVQNNLLQQNCIQFNSPKLPQQMQTMNDLSKAAIPLNQLGAIINPQDQKQDAVNHQRQQNSIQVIPLSQAQSNLVQAQVIVQNQMQQQKPSPTQNPQRINGQRLLLSHQQKDQNLQLQQQLLLQQKQQLQQQQQQQQQNQQQLNKSLGQLVNLASQQSKLFDEELQLQILQKLQQQSLMSQSTSTLSQPPLIQEQQKLITDMQKQLSNSHSLAQQQMMPQQEIKPSLQATPLLPTVQQEQQQKLLQKQVSLADVSGVAFQPISSTNVIPKTGGAMIISGATQSVVTEEMPSCSTSPSTANGNHFTQSTKNRHCINTERLPPSTAPMLIPTSIDAVTATPLMTKELPKPNNNVKQSVVNSKLPNVAPGPQNCINHALQTDNLETSSSATSLCPSRTDGLVHQGFPSSNFNQHQMFKDALPDVEMEGVDPSNSGLFGINNDNLLGFPIETEDLLINALDSVKYQNHISTDVENNYPMQKDALQEISTSMVSQSFGQSDMAFNSIDSAINDGAFLNKNSWPAAPLLQRMRTFTKVYKRGAVGRSIDIGRYSGYEELKHALARMFGIEGQLEDRQRIGWKLVYKDHEDDILLLGDDPWE

SEQ ID NO: 16200 - protein, 400 aa, Oryza sativa
  Clone ID: TF_OSC102151j.C1.p2.fg
MEFTTSSRFSKEEEDEEQDEAGRREIPFMTATAEAAPAPTSSSSSPAHHAASASASASASGSSTPFRSDDGAGASGSGGGGGGGGEAEVVEKEHMFDKVVTPSDVGKLNRLVIPKQYAEKYFPLDAAANEKGLLLNFEDRAGKPWRFRYSYWNSSQSYVMTKGWSRFVKEKRLDAGDTVSFSRGIGDEAARHRLFIDWKRRADTRDPLRLPRGLPLPMPLTSHYAPPSPPATLYEHRLRQGLDFRAFNPAAAMGRQVLLFGSARIPPQAPLLARAPSPLHHHYTLQPSGDGVRAAGSPVVLDSVPVIESPTTAAKRVRLFGVNLDNPHAGGGGGAAAGESSNHGNALSLQTPAWMRRDPTLRLLELPPHHHHGAESSAASSPSSSSSSKRDAHSALDLDL

SEQ ID NO: 16201 - protein, 679 aa, Oryza sativa
  Clone ID: TF_OSC100243j.C1.p9.fg
MSSQGDALPLVLVLFLFLFLFCFVCRELQEPTDPALLAEQIKMFQVPYKILCKVVNVELKAETETDEVFAQITLQPDPDQENLPTLPDPPLPEQPRPVVHSFCKILTPSDTSTHGGFSVLRRHANECLPPLDMSMATPTQELITKDLHGSEWRFKHIYRGQPRRHLLTTGWSTFVTSKKLISGDAFVYLRSETGEQRVGVRRLVQKQSTMPASVISSQSMHLGVLASASHAIKTNSIFLVYYRPRLSQSQYIVSVNKYLAASKVGFNVGMRFKMSFEGEDVPVKKFSGTIVGEGDLSLQWSGSEWKSLKVQWDEVTNVNGPERVSPWEIETCDGTAPAINVPLQSATKNKRPREPSETIDLQSLEPAQEFWLSGMPQQHEKTGIGSSEPNCISGHQVVWPGEHPGYGAVSSSVCQNPLVLESWLKDFNSSNKGVSPTLSEISQKIFQVTSNEARIATWPARSAYQAEEPTSKLSSNTAACGYRTEEVAPNASKVVEGKKEPAMFRLFGVDLMKCTSISTTTDDKSSVGAGEASAKGTGSHEDSGQLSAFSKVTKEHIAADESPQEIQSHQNYTARTRIKVQMHGNAVGRAVDLANLDGYEQLMNELEEMFNIKDLKQKWKVAFTDDEGDTMEVGDDPWLEFCQMVRKIVLYPIEDEKKIEPHPKLLSSANPEQDQKTGF

SEQ ID NO: 16202 - protein, 477 aa, Oryza sativa
  Clone ID: TF_OSC421067j.C1.p1.fg
HAEQCPAPLPDPLPSAHRFFLCTITAVDLSADTTTGEPYATISLLPLRHDAPAPAPAPAPAAAELAEAESQEFRYYAKQLTQSDANNGGGFSVPRLCADHIFPALNLDDDPPVQSLTMGDLQGDSWEFRHIYRGTPRRHLLTTGWSKFVNAKQLVAGDTVVFMWCGAPAPERKLLVGVRRAARYSGESACNARGRVQPQEVMEAVRLAAEQAAFRVTYYPRHGAGEFVVPRVEVDKGLTTPWRCGMQVRAQVMEAEDTRRLAWLNGTLTNLRHQQIWRTLEVEWDASAASSSMKNRFVNPWQVQPVDFPPLPMGLKISNNNISAPVCNGDSLLVPPILMHPQPQPPADIQGARHNNGHAYADIPSSSTPSMVRTQQLFPRDLQILVPHTDIVTPQNGSPPDNPVNTPLSASDGMKTIQLFGVTITSPVQGDTNGAFASAQVNQVPEGVDDETATEEASDTSLPDSLTNGHNQDGARL

SEQ ID NO: 16203 - protein, 347 aa, Oryza sativa
  Clone ID: TF_OSC900237j.C1.p1.fg
VRWDDSTDSSHQNRVSPWEIERVGGSVSVTHSLSSGSKRTKLHFPQGSLDTPFLNGNGHPDSMGTENFHRVLQGQEFRGSRSHGVVCSESPGVPNFQSPDNRRFSADMRGYMMPASGPPQRNTEFTYQPIGFSESLGFPEVLQGQEMSQVVPLFRGATFGARTQNDRVVSANSVHRSAAQSGLLASTLGHPISQFTLSSSKVSSPSSVLMFNQATAPNHETVSGTNNKGMHVSQFASQEMLSETVTWPGTQRQTPSEITSNQFALARIPAPPSGAESGLPKRDAGRSSCRLFGFSLTGNMLGEDGEGLDDGAIEAGCENPPVLELFGHSHSTPGALHALCAAAPLGM

SEQ ID NO: 16204 - protein, 729 aa, Oryza sativa
  Clone ID: TF_OSC400500j.C1.p18.fg
MVISRTLVVRGFDELWETIRPVLVSSDGPASMSKNGLLLVVSEEFWIGKVWWVSGDRIWGLEMKEVGEVEEVRCLDPQLWHACAGGMVQMPAPRSRVYYFAQGHAEHADGGGGAAAAAAELGPRALPPLVLCRVEGVQFLADRDSDEVYAKIRLAPVAPGEAEFREPDELCPLGAAGDAAEPSPEKPTSFAKTLTQSDANNGGGFSVPRYCAETIFPKLDYRADPPVQTVLAKDVHGVVWKFRHIYRGTPRRHLLTTGWSTFVNQKKLVAGDSIVFLRTRHGELCVGIRRAKRMACGGMECMSGWNAPGYGGGGFSAFLKEEESKLMKGHGGGGYMKGKGKVRMADVVEAASLASSGQPFEVAYYPRASTPDFVVKAASVQAAMRIQWCSGMRFKMAFETEDSSRISWFMGTISSVQVADPNRWPNSPWRLLQVTWDEPDLLQNVKCVSPWLVELVSSIPPIHLGPFSSPRKKLRVPPHPDFPFEGHLLNPIFHGNPLGPSNSPLCCYPDTAPAGIQGARHAQFGLPLTDHQLNKLHLGLLHSGSFNRLDAITPPSRISKGFVVSSAPAHDNISCLLSISTPQVAEKSDDRKTTPHIMLFGKAIFTEQQITSSGSTETLSPGVTGNSSPNGNAHKTGNASDGSGSSICIGFSSQGHEASDLGLEAGHCKVFMESEDVGRTIDLSVFGSYEELYGRLADMFGIEKEEIINHLHFRDAAGVVKHPGEVPFR

SEQ ID NO: 16205 - protein, 908 aa, Oryza sativa
  Clone ID: TF_OSC401589j.C1.p17.fg
MKLSPSAGGVSDQPPSPPEVAEEQKCLNSELWHACAGPLVSLPAVGSRVVYFPQGHSEQVAASTNKEMESQIPNYPNLPPQLICQLHNVTMHADAETDEVYAQMTLQPLSPQELKDPFLPAELGTASKQPTNYFCKTLTASDTSTHGGFSVPRRAAEKVFPPLDFTQQPPAQELMAKDLHGNEWKFRHIFRGQPKRHLLTTGWSVFVSAKRLVAGDSVLFIWNDSNQLLLGIRRANRPQTVMPSSVLSSDSMHIGLLAAAAHAASTNSRFTIFYNPRASPSEFVIPLAKYVKAVYHTRISVGMRFRMLFETEESSVRRYMGTITGISDLDPVRWMNSHWRSVKVGWDESTAGERQPRVSLWEIEPLTTFPMYPSPFPLRLKRPWPTGLPSLYGGKEDDLASSLMWLRDSQNTGFQSLNFGGLGMSPWMQPRLDSSLLGLQPDMYQTIAAAAALQNTTKQVSPAMLQFQQPQNIVGRSSLLSSQILQQAQPQFQQMYHQNINGNSIQGHSQPEYLQQPLQHCQSFNEQKPQLQPQQQQQESHQQQPQHQQMQQQKHLSNFQTVPNALSVFSQLSSTPQSTPSTLQTVSPFSQQHNFPDTNISCLSPSNVSSMHDTLRSFPSEAASDLPGVPRITPVPVSDPWSSKRVAVESTITSRPHDISSQIENFDLTPSSIPQNSTLAPLPGRECLVDQDGSSDPQNHFLFGVNIDSQSLLMQDGIPSLHNENSSSTIPYSTSNFLSPSQDDYPLSQTLTTPGCLDESGYVPCSDNADQVKRPHATFVKVYKSGTVGRLLDITRFSSYHELRSEVGRLFGLEGQLEDPLRSGWQLVFVDREDDVLLVGDDPWQEFVNSVSCIKILSPQEVQQMGKPGIELFSTSARRLGNSCDNYMSRQESRSLSTGIASVGSVEF

SEQ ID NO: 16206 - protein, 397 aa, Oryza sativa
  Clone ID: TF_OSC400860j.C1.p2.fg
MEQEQDEEEEEAEASPREIPFMTSAAAAATASSSSPTSVSPSATASAAASTSASGSPFRSSDGAGASGSGGGGGGEDVEVIEKEHMFDKVVTPSDVGKLNRLVIPKQHAEKYFPLDSAANEKGLLLSFEDRTGKLWRFRYSYWNSSQSYVMTKGWSRFVKEKRLDAGDTVSFCRGAAEATRDRLFIDWKRRADVRDPHRFQRLPLPMTSPYGPWGAARGRSSCRPATLFEHHRFRQGFDFRNINPAVPARQLVFFGSPGTGIHQHPPLPPPPSPPPPPHQLHITVHHPSPVVTAGLPMVVDSVPHVNNPAAASKRVRLFGVNLDNPHPDGGQSSSGHDANALSLRMPGWQRPAPLRSLELPPHMPAGAAGAESSAASSPSSSSSSKREAHSSLDLDL

SEQ ID NO: 16207 - protein, 843 aa, Oryza sativa
  Clone ID: TF_OSC401583j.C1.p40.fg
MAPPPPPQGSSTGDPLYDELWHACAGPLVTVPRVGDLVFYFPQGHIEQVEASMNQVADSQMRLYDLPSKLLCRVLNVELKAEQDTDEVYAQVMLMPEPEQNEMAVEKTTPTSGPVQARPPVRSFCKTLTASDTSTHGGFSVLRRHADECLPPLDMTQSPPTQELVAKDLHSMDWRFRHIFRGQPRRHLLQSGWSVFVSSKRLVAGDAFIFLRGENGELRVGVRRAMRQLSNVPSSVISSQSMHLGVLATAWHAINTKSMFTVYYKPRTSPSEFIIPYDQYMESVKNNYSVGMRFRMRFEGEEAPEQRFTGTIIGSENLDPVWPESSWRSLKVRWDEPSTIPRPDRVSPWKIEPASSPPVNPLPLSRVKRPRPNAPPASPESPILTKEAATKVDTDPAQAQRSQNSTVLQGQEQMTLRSNLTESNDSDVTAHKPMMWSPSPNAAKAHPLTFQQRPPMDNWMQLGRRETDFKDVRSGSQSFGDSPGFFMQNFDEAPNRLTSFKNQFQDQGSARHFSDPYYYVSPQPSLTVESSTQMHTDSKELHFWNGQSTVYGNSRDRPQNFRFEQNSSSWLNQSFARPEQPRVIRPHASIAPVELEKTEGSGFKIFGFKVDTTNAPNNHLSSPMAATHEPMLQTPSSLNQLQPVQTDCIPEVSVSTAGTATENEKSGQQAQQSSKDVQSKTQVASTRSCTKHMKFFLLVVDMLKFSFCKFLAKSQFYPLCGMVHKQGVALGRSVDLSKFSNYDELKAELDKMFEFDGELVSSNKNWQIVYTDNEGDMMLVGDDPWEEFCSIVRKIYIYTKEEVQKMNSKSNAPRKDDSSENEKGSVKRDDTRDGGSTPESCLY

SEQ ID NO: 16208 - protein, 899 aa, Oryza sativa
  Clone ID: TF_OSC417639j.C1.p11.fg
MKLSPPASADMPQALPENDGEQRCLNSELWHACAGPLVSLPVVRSRVVYFPQGHSEQVAASTNKEVDAQIPNYPNLPPQLICQLHNVTMHADAETDEVYAQMTLQPLSPEEQKEPFLPMELGAASKQPTNYFCKTLTASDTSTHGGFSVPRRAAEKVFPPLDFSQQPPAQELIARDLHDNEWKFRHIFRGQPKRHLLTTGWSVFVSAKRLVAGDSVIFIWNDNNQLLLGIRRANRQQTVMPSSVLSSDSMHIGLLAAAAHAAATNSRFTIFYNPRASPSEFVIPLAKYVKAVYHTRVSVGMRFRMLFETEESSVRRYMGTITSISDLDSVRWPNSHWRSVKVGWDESTTGDKQPRVSLWEIEPLTTFPMYPSAFPLRLKRPWASGLPMHGMFNGGGNDDFARYSSLMWLRDGNRGTQSLNFQGHGVSPWLQPRIDSPLLGLKPDTYQQMAAAALEEIRYGDPSKQHPATLQYQQTHNLNSGLNSLFASHVLGQVQFQPQQSPLQVVQQGHCQNTGDSGFLQGQLPRLQLHNTQQLLKEQELQQQQRQHVLQEQSSQEMQQQLPSSDHHVADVASESGSAPQAQSSLLSGSSFYNQNLLEGNSDPPLHLHNNFHNFSNQEASNLLILPRSSQLMASDGWPSKRLTLESAVHPEAPSMHPKIEKVNHQGISHFPGAFPPQSARGCSIVQDCRADAENRLLSSSFELQDGMTSIITDANRETDTMAIPLLRYSGADLTTENTLATSNCLGESGTFNPLNNISVNPSQGATFVKVYKSGSLGRSLDISRFSSYCELRSELERLFGLEGQLEDPVRSGWQLVFVDRENDILLVGDDPWQEFANSVWCIKILSPQEVQQLVRGGDGLLSSPGARMQQSNACDDYSASHNMQNIAGNIASVAPLDY

SEQ ID NO: 16209 - protein, 783 aa, Oryza sativa
  Clone ID: TF_OSC413089j.C1.p8.fg
MITFADLAEPAPGAERCVDRQLWLACAGGMCTVPPVGAAVYYFPQGHAEHALGLAAPELSAARVPALVPCRVASVRYMADPDTDEVFARIRLVPLRAAEDGDVEEDGAAAGEEHEKPASFAKTLTQSDANNGGGFSVPRYCAETIFPRLDYAADPPVQTVVAKDVHGVAWNFRHIYRGTPRRHLLTTGWSTFVNQKKLVAGDSIVFLRGDGGDLHVGIRRAKRGFCGGGGGAEEASLPGWDQYGGLMRGNASPCAAAKGRGKVRAEDLVEAARLANGGQPFEVVYYPRASTPEFCVRAAAVRAAMRVQWCPGMRFKMAFETEDSSRISWFMGTVASVQVADPIRWPQSPWRLLQVTWDEPDLLQNVKRVSPWLVELVSSMPAINLSSFSPPRKKPRILAYPEFPFEGQLLNPAFPPNPLAHGHHHYHHNHPSFFPFPDVSAPAGIQGARHAQFGPSLSDLHLTHLQSSLMYPGLRRPDHVGPTSIPPPRISTDLTMGSSPPARALSMGAKKPDDAKPPGLMLFGQRILTERQMSLSGTTSPAATGNSSLNWNTEKGASEGSGSGVIQNSPTDNTSSERLQWFRENSTVSELGLEPGQCKVFIESDTVGRNLDLSSLASFEQLYGRLSEMFCIDSAELRSRVLYRGATGEVRHAGDEPFSRDFNKKAQSAQVSYCSPVSFFIIINNDQLRVLVDSRVLRCKNPVTTHQRLECRGPLAQGTSACSMQTQTQRCAISDLSGGLTSRLQPPGEAIPLGSLALAASSLTHDDEICDLHRAAYPWLVES

SEQ ID NO: 16210 - protein, 917 aa, Oryza sativa
  Clone ID: TF_OSC414152j.C1.p3.fg
MRLSSSSGSVLPAQAASPEAVEEQKCLNSELWHACAGPLVSLPAVGSRVVYFPQGHSEQVAASTNKEMESQIPNYPNLPPQLICQLHNVTMHADAETDEVYAQMTLQPLSPQELKDPYLPAELGSANKQPTNYFCKTLTASDTSTHGGFSVPRRAAEKVFPPLDFTQQPPAQELIAKDLHGNEWKFRHIFRGQPKRHLLTTGWSVFVSAKRLVAGDSVLFIWNDNNQLLLGIRRANRPQTVMPSSVLSSDSMHIGLLAAAAHAASTNSRFTIFYNPRASPSEFVIPLSKYVKAVYHTRISVGMRFRMLFETEESSVRRYMGTITGISDLDAARWPNSHWRSVKVGWDESTAGERQPRVSLWEIEPLTTFPMYPSPFPLRLKRPWPTGLPSLHGGKDDDLTSSLMWLRDSANPGFQSLNFGGLGMNPWMQPRFDASLLGLQPDMYQTIAATAFQDPTKQVSPTILQFQQPQNIGGRANTLLPSQILQQVQPQFQQQQYLQNINETTIQGHAQSEFLQQQLQRCQSFTEQKPQLQTQQQQQESQQQQQQQSQCMQVPQHQQMQQQKNMTNYQSVPNALSPFSQLSSPSQSSPMTLQTVLPFSQPQSYPDTSMSSLSPSNTSTMHNALRPFSSEAPSHLSMPRPTAVPVPDPWSSKRVAVESLLPSRPQVTSQMEQLDSTAPSIPQSSALAPLPGRGCLVDQDGNSDPQNHLLFGVNIDSQSLLMQGGIPSLQGENDSTAIPYSTSNFLSPSQNDFPLDQTLSSADCLDESGYVPCSQNSDQVINRPPATFVKVYKSGTYGRSLDITRFSSYHELRRELGRLFGLEGQLENPLRSGWQLVFVDREDDVLLVGDDPWQEFVNSVSCIKILSPQEVQQMGKPFELLSSAPGKRLGSSCDDYVSRQESRSLSTGIASVGSVEF

SEQ ID NO: 16211 - protein, 756 aa, Oryza sativa
  Clone ID: TF_OSC404615j.C1.p10.fg
MAGSVVAAAAAAGGGTGSSCDALYRELWHACAGPLVTVPRQGELVYYFPQGHMEQLEASTDQQLDQHLPLFNLPSKILCKVVNVELRAETDSDEVYAQIMLQPEADQNELTSPKPEPHEPEKCNVHSFCKTLTASDTSTHGGFSVLRRHAEECLPPLDMTQNPPWQELVARDLHGNEWHFRHIFRGSPHHSLILGQPRRHLLTTGWSVFVSSKRLVAGDAFIFLRGENGELRVGVRRLMRQLNNMPSSVISSHSMHLGVLATASHAISTGTLFSVFYKPRTSQSEFVVSANKYLEAKNSKISVGMRFKMRFEGDEAPERRFSGTIIGVGSMSTSPWANSDWRSLKVQWDEPSVVPRPDRVSPWELEPLAVSNSQPSPQPPARNKRARPPASNSIAPELPPVFGLWKSSAESTQGFSFSGLQRTQELYPSSPNPIFSTSLNVGFSTKNEPSALSNKHFYWPMRETRANSYSASISKVPSEKKQEPSSAGCRLFGIEISSAVEATSPLAAVSGVGQDQPAASVDAESDQLSQPSHANKSDAPAASSEPSPHETQSRQVRSCTKVIMQGMAVGRAVDLTRLHGYDDLRCKLEEMFDIQGELSASLKKWKVVYTDDEDDMMLVGDDPWPLMRWTLTTLLQCLILLSRVLVNAALLILYIQRAVLFNGLCFQIHWINAGGFGGWKEGYSTKRASGVCREPVVDAIDVEGPQGIDMLAIALRKHSLNVAQGSNLEALPFITELIIEILVVQTQRKTYIEVLS

SEQ ID NO: 16212 - protein, 668 aa, Oryza sativa
  Clone ID: TF_OSC900189j.C1.p13.fg
MGIDLNTVEEEAEEGAAAAVCGELWHACAGPGVALPRRGSALVYLPQAHLAADGGGGEVPPAGAAAVPPHVACRVVGVELRADAATDEVYARLALVAEGEMLQRNFREGGGEDGAGEMEGCDAEKKPRMPHMFCKTLTASDTSTHGGFSVPRRAAEDCFPPLVIHLKEKLVTFNDYKTVRPSQELIAVDLHGTQWKFRHIYRGDDGQLRLGVRRAVQLRNEALFEPVNSSDSKLRILSSVASSLENKSVFHICFNPRSGASEFIVPYWRLLKSLNHPFSIGMRFRVCYESEDANERSAGLISGISEVDPIRWPGSRWKCLLVRWDDSTDSSHQNRVSPWEIERVGGSVSVTHSLSSGSKRTKLHFPQGSLDTPFLNGNGHPDSMGTENFHRVLQGQEFRGSRSHGVVCSESPGVPNFQSPDNRRFSADMRGYMMPASGPPQRNTEFTYQPIGFSESLGFPEVLQGQEMSQVVPLFRGATFGARTQNDRVVSANSVHRSAAQSGLLASTLGHPISQFTLSSSKVSSPSSVLMFNQATAPNHETVSGTNNKGMHVSQFASQEMLSETVTWPGTQRQTPSEITSNQFALARIPAPPSGAESGLPKRDAGRSSCRLFGFSLTGNMLGEDGEGLDDGAIEAGCENPPVLELFGHSHSTPGALHALCAAAPLGM

SEQ ID NO: 16213 - protein, 719 aa, Oryza sativa
  Clone ID: TF_OSC1558j.C1.p2.fg
MTGIDLNTVEEDQEEAAEEVAANGSSPAPAKAGAVCLELWHACAGPVAPLPRKGGVVVYLPQGHLEHLGDAPAAAAAAAAVPPHVFCRVVDVTLLANAATDEVYAQLSLVPEKEEVARRADHGEGEDGDGMKQRFARMPHMFCKTLTASDTSTHGGFSVPRRAAEDCFPPLDYSQQRPSQELVAKDLHSTEWRFRHIYRGQPRRHLLTTGWSAFVNKKKLVSGDAVLFLRGDDGELRLGVRRAAQLKNGSAFPALYNQCSNLGTLANVAHAVATESVFNIYYNPRLSQSEFIVPYWKFMKSLSQPFSVGLRFKMRYESEDATERRYTGIITGSGDTDPMWHGSKWKCLLVRWDDDAEFRRPNRVSPWEIELTSSVSGSHLSTPHSKRLKPCLPHVNPEYMVPRGGGCPDFAESAQFHKVLQGQELLGFKSHGGTAAATSQPCEARHLQYIDERSCSSDASNSILGVPRLGDRAPLGNPGFSYHCSGFGESHRLQKVLQGQELFRPYRGTLVDASMGSNGFHQQDSPRAPGVVNKWQAQLHGRAAFHGPPALALPSQSSSPPSVLMFQQANSKMPRLEFGHGQLDKHENDRRVRFGPSEGIERREQRIPLQPYPTSGEVIDGQVTVEKSHSPGRHGKDGPDNKAVGTNSCKIFGISLTEKVPAREELDDGDANYSLQSLKQVPKSLGNSCATMVAEYQGDGGTDDSDIFILDVGVGALIM

SEQ ID NO: 16214 - protein, 655 aa, Oryza sativa
  Clone ID: TF_OSC401539j.C1.p103.fg
MGIDLNNTASGGEEDAPAPGPVCRDLWHACAGPVVSLPRRGSAVVYLPQGHLSAAGAGGGIRGEVAVALPPHVACRVVDVELCVFERNLHGGGIEREDDMEDGDEERKSRMLHMFCKTLTASDTSTHGGFSVPRRAAEDCFPPLDHKQLRPSQELVAKDLHGAKWRFRHIYRGQPRRHLLTTGWSSFVNKKKLVSGDAVLFLRGDDGELRLGVRRATQLKNEAIFKAFSSESSKMRTLSAVADSLKHGSVFHICYNPRATASEYVVPYWKFVKSFNHPVCIGMRFKFHFESEDVNERRSGMIAGVSEVDPIRWPGSKWRSLLVRWEDATDCNSQNRVSPWEIEIVGGSISVAHSLSASSSKRTKLCPQGNLDVPALYGNGRPDSVETEKFPRVLQGQELMGSRTHRATCSPQSIDITKSKSFDAWRFLTDTRSCMLGSSTSRLPVQYSGYTHQSVSFGESIGFPEVLQGQEISQTVPPFQGMLPDACSAKSRYELKNYVCTPATMNGLSSANEGYCLSLSTVPPSPPSSLMLYQTGVPQLELASKNNDKSGNDSQPALRQHKLLSETSWDQFKIGKASTPGNATKPGNGGREVDRTSCRLFGFSLTEKIIPTDKDGEKEVSYETDCQNPRMLDLFGYNCSTPGALHALCAAPLGI

SEQ ID NO: 16215 - protein, 73 aa, Oryza sativa
  Clone ID: TF_OSC8547j.C1.p1.fg
MASMKQQQTPASSAVTAAAAASSSATAAVAACEGERKAAAINSELWHACAGPLVSLPPVGSLVVYFPQGHSEQ

SEQ ID NO: 16216 - protein, 1055 aa, Oryza sativa
  Clone ID: TF_OSC21386j.C1.p1.fg
MKDQGSSGVSPAPGEGEKKAINSELWHACAGPLVSLPPVGSLVVYFPQGHSEQVAASMHKELDNIPGYPSLPSKLICKLLSLTLHADSETDEVYAQMTLQPVNKYDRDAMLASELGLKQNKQPAEFFCKTLTASDTSTHGGFSVPRRAAEKIFPPLDFTMQPPAQELIAKDLHDISWKFRHIYRGQPKRHLLTTGWSVFVSTKRLLAGDSVLFIRDEKSQLLLGIRRATRPQPALSSSVLSSDSMHIGILAAAAHAAANSSPFTIFYNPRASPSEFVIPLAKYNKALYTQVSLGMRFRMLFETEDSGVRRYMGTITGIGDLDPVRWKNSHWRNLQVGWDESTASERRTRVSIWEIEPVATPFYICPPPFFRPKLPKQPGMPDDENEVESAFKRAMPWLADDFALKDVQSALFPGLSLVQWMAMQQNPQMLTAASQTVQSPYLNSNALAMQDVMGSSNEDPTKRLNTQAQNMVLPNLQVGSKVDHPVMSQHQQQPHQLSQQQQVQPSQQSSVVLQQHQAQLLQQNAIHLQQQQEHLQRQQSQPAQQLKAASSLHSVEQHKLKEQTSGGQVASQAQMLNQIFPPSSSQLQQLGLPKSPTHRQGLTGLPIAGSLQQPTLTQTSQVQQAAEYQQALLQSQQQQQQLQLQQLSQPEVQLQLLQKIQQQNMLSQLNPQHQSQLIQQLSQKSQEILQQQILQHQFGGSDSIGQLKQSPSQQAPLNHMTGSLTPQQLVRSHSALAESGDPSSSTAPSTSRISPINSLSRANQGSRNLTDMVATPQIDNLLQEIQSKPDNRIKNDIQSKETVPIHNRHPVSDQLDASSATSFCLDESPREGFSFPPVCLDNNVQVDPRDNFLIAENVDALMPDALLSRGMASGKGMCTLTSGQRDHRDVENELSSAAFSSQSFGVPDMSFKPGCSSDVAVTDAGMPSQGLWNNQTQRMRTFTKVQKRGSVGRSIDITRYRDYDELRHDLACMFGIQGQLEDPYRMDWKLVYVDHENDILLVGDDPWEEFVGCVKSIKILSAAEVQQMSLDGDLGGVPPQTQACSASDDANAWRG

SEQ ID NO: 16217 - protein, 206 aa, Oryza sativa
  Clone ID: TF_OSC416737j.C1.p22.fg
MEQEQDEEEEEAEASPREIPFMTSAAAAATASSSSPTSVSPSATASAAASTSASGSPFRSSDGAGASGSGGGGGGEDVEVIEKEHMFDKVVTPSDVGKLNRLVIPKQHAEKYFPLDSAANEKGLLLSFEDRTGKLWRFRYSYWNSSQSYVMTKGWSRFVKEKRLDAGDTVSFCRGAAEATRDRSSSTGSAAPTSATRTASSAYRSP

SEQ ID NO: 16218 - protein, 720 aa, Oryza sativa
  Clone ID: TF_OSC401045j.C1.p15.gm
MSVTRDRTKSPGGHPTSPEEMITFVDSAAKERERESDKCLDPQLWHACAGGMVQMPPVSSKVYYFPQGHAEHAQGHGPVEFPGGRVPALVLCRVAGVRFMADPDTDEVFAKIRLVPVRANEQGYAGDADDGIGAAAAAAAQEEKPASFAKTLTQSDANNGGGFSVPRYCAETIFPRLDYSADPPVQTVLAKDVHGVVWKFRHIYRGTPRRHLLTTGWSTFVNQKKLVAGDSIVFMRTENGDLCVGIRRAKKGGVGGPEFLPPPPPPPPTPAAGGNYGGFSMFLRGDDDGNKMAAAARGKVRARVRPEEVVEAANLAVSGQPFEVVYYPRASTPEFCVKAGAVRAAMRTQWFAGMRFKMAFETEDSSRISWFMGTVSAVQVADPIRWPNSPWRLLQVSWDEPDLLQNVKRVSPWLVELVSNMPAIHLAPFSPPRKKLCVPLYPELPIDGQFPTPMFHGNPLARGVGPMCYFPDGTPAGIQGARHAQFGISLSDLHLNKLQSSLSPHGLHQLDHGMQPRIAAGLIIGHPAARDDISCLLTIGSPQNNKKSDGKKAPAQLMLFGKPILTEQQISLGDAASVDVKKSSSDGNAENTVNKSNSDVSSPRSNQNGTTDNLSCGGVPLCQDNKVLDVGLETGHCKVFMQSEDVGRTLDLSVVGSYEELYRRLADMFGIEKAELMSHVFYRDAAGALKHTGDEPFSEFTKTARRLNILTDTSGDNLAR

SEQ ID NO: 16219 - protein, 1134 aa, Oryza sativa
  Clone ID: TF_OSC400589j.C1.p1.fg
MEMAANPGGSGTCSDALFRELWHACAGPLVTVPKRGERVYYFPQGHMEQLEASTNQQLDQYLPMFNLPSKILCSVVNVELRAEADSDEVYAQIMLQPEADQSELTSLDPELQDLEKCTAHSFCKTLTASDTSTHGGFSVLRRHAEECLPQLDMSQNPPCQELVAKDLHGTEWHFRHIFRGQPRRHLLTTGWSVFVSSKRLVAGDAFIFLRGESGELRVGVRRLMRQVNNMPSSVISSHSMHLGVLATASHAISTGTLFSVFYKPRTSRSEFVVSVNKYLEAKKQNLSVGMRFKMRFEGDEAPERRFSGTIIGIGSVPAMSKSPWADSDWKSLKVQWDEPSAIVRPDRVSPWELEPLDASNPQPPQPPLRNKRARPPASPSVVAELPPSFDVDSDQISQPSNGNKSDAPGTSSERSPLESQSRQVRSCTKVIMQGMAVGRAVDLTKLNGYGDLRSKLEEMFDIQGDLCPTLKRWQVVYTDDEDDMMLVGDDPWEKFQCFFITASCAEDATPFCLELWWYLNCKCQEVPKTGKTAWKRHSGKCMPFQIVLCFGRSLGVLVWCPDLGDSVGGGAERRRTGGVERRRREPVTRRRGGKERRRPSWRALAANRRRGEAANQRRGEAATQRGGSDPAGGLRRRGEAAKRRHGEAANRWREEAVRRGGDPSERWRTGGVERRRREPATRRTGSSGVGFFHASSSSLIAGANGGSDGGGGARTLSWGTWWRRLGRLAPTVALGWCGRWSTREEGIIDVGKRIHVGPPFGEGNRRRSTLVLPHVRSAPFHAVVPGAVGGQRRQIVAAAVAEADGNENGNKHFTCHRENANYGLKSASENKIELLRGAHSWADSNLIEDVLASVNNDVGEASALLKAMASPCFPIREDGLPDQLSSEINKTHGLPSGNGTAENNLVNDSQLLPLPMNMSSVPIEPEVEELDDDYFNHRKDALKIMRAATKHSQAASNAFLRGDHAAAKELSLRAQEERSAAEELNKKAAKEIFRLRNSNNSIWKLDMHGLHASEAVEVLERHLHRIEFQPPGNNAASSDEVARSEPRVSGPSIEPGPGKVVFVRPIQAILEVITGIGKHSKGQASLPVAVRGFLIENGYRFDELRPGHKLLTSQPEVKNHKGIKVKEEFFSILS

SEQ ID NO: 16220 - protein, 1430 aa, Oryza sativa
  Clone ID: TF_OSC32301j.C1.p3.fg
MPPRTRHGRREPTPDPVSENEDSSGDEYVQSDDDNMENVEGDEMEVSDDGDDNESGNGEDDEASDDRSPLDSTIQFVLNLRNAQQYTILRHHNQFRRPNDCNDPRFHTRFQKSVYAQVYANKAFAEHKWISWKHIGETPEFENLQEMFRTVGIDRIVTMKQPFDEDLIRQFYATVWVSGDCDAMKWMSRTLRCSINRRESKELLHIRFNNGDDLHDEHTHNPFPIDHFSQFYEEGGRHTYGKVAGLRALPSVINRIVRATILPRCGNNDDIRGVAWHVIDAIMDGRRFDVINLMMKEIAISKGTLGQGIYYAPYIMRLIQSKLGQIGHNLKEHKEYKPRLQLSSPRAPRVRQPTFDQGASSSAAPPSPQGYDPSAFFHLQYAYFGMQPNDFFNPVLGAIHTLSESIQRLSTGHEALHEDVRGLCTDVGNLNTSVGRLHTRGRSDRPHSGGLTGVPWPVVCEASQILVAHYECPKVYTLHNCTVHYTDGVCNCARCEFCPKKTAFGYNAKEKAKTGVLRNAAALLDEMQLMGETQGAKKVINSELWHACAGPLVCLPQRGSLVYYFPQGHSEQVAATTRKIPNSRIPNYPNLPSQLLCQVHNITLHADKDTDEVYAQMTLQPVNSETDVFPIPTLGAYTKSKHPTEYFCKNLTASDTSTHGGFSVPRRAAEKLFPQLDYSMQPPNQELIVRDLHDNMWTFRHIYRGQPKRHLLTTGWSLFVGAKRLKAGDSVLFISMHIGVLAAAAHAASSGSSFTIYYNPRTSPSPFVIPVARYNKATYMQPSVGMRFAMMFETEESSKRRYTGTVVGISDYDPMRWPNSKWRNLQVEWDEHGYGERPERVSIWDIETPENTLVFPSSTLNSKRQCLPGYGVSVPGMEIGSANMSSFPRAQGNPYGSLQHIPAVGSELAIMLLNQSGQTLGSPLSFHQSSYSSIIQNVKQNYIPPLTVSTSACLTKQESLPSDDAQHQFHMANMQNGDLEGSEVQPVIDSISESKLNATSRDPRNTDSYTSRSTSEQNSKGEPRGKTRRSKKGLPHKTVSEKSDLSSAPSWICDNQQVGLESKLVGCDEQVNCGNIEDSSGALTQGNFVGQPHGHQVEQKGVLSPPKVESSKSPDGGKSVNSFPNQGCFSQFIDGLDWMTQPSYYQDSNVIQPAGVSENIFSSSADIPPSMIADTMETFQASCLSDCLPNSIQEFISSPDLNSLTFLSPDMQNLEVQLQHDGSNLPSTSNSFVQMSFSEESASQSANLSGLHMESTHRSINTTSCSQPMSTGGFDAGMYSKLPRLKESQILSLPEIHTNSMGTSACSMDATEYSLDRSAKPMKPPVRTYTKVQKQGSVGRSIDVTGFRNYHELRSAIACMFGLQGKLEHPGSSEWKLVYVDYENDVLLVGDDPWEEFINCVRCIRILSPSEVQQMSENGMHVLNDCIQAA

SEQ ID NO: 16221 - protein, 863 aa, Oryza sativa
  Clone ID: TF_OSC401249j.C1.p16.fg
MSSSSAASIGPPQPPPPPAPPEEEKKCLNSELWHACAGPLVCLPTVGTRVVYFPQGHSEQVAASTNKEVEGHIPNYPNLPAQLICQLHDVTMHADVETDEVYAQMTLQPLNPVRRLGFLHDVCSAEVLMQEQNDAYLPAEMGIMSKQPTNYFCKTLTASDTSTHGGFSVPRRAAERVFPPLDFTQQPPAQELIARDIHDIEWKFRHIFRGQPKRHLLTTGWSVFVSAKRLVAGDSVLFIWNEKNQLLLGIRRASRPQTVMPSSVLSSDSMHIGLLAAAAHAAATNSRFTIFYNPRTSPHYLWEFYNWASIKIHNILMRPMHTLMKHRYMGTITEVSDADPVRWPSSYWRSVKVGWDESTAGERPPRVSLWEIEPLTTFPMYPSLFPLRVKHPWYSGVASLHDDSNALMWLRGVAGEGGFQSLNFQSPGIGSWGQQRLHPSLLSSDHDQYQAVVAAAAASQSGGYLKQQFLHLQQPMQSPQEHCNLNPLLQQQILQQASQQQIINPDAQNIQTMLSPSAIQQQLQQLQQMQQVQNDQKQKIQPDQSYQVPTSAVLPSPTSLPSHLREKFGFSDPNANSSSFITSSSSDNMLDSSFLQGSSKAVDLSRFNQPVASEQQQQQQQAWKQKFMGSQSVSFGGSVLHNSPTSKDGSVENKIGRDVQNQSLFSPQVDSSSLLYNMVPNLTSNVSDGNLSTIPSGSTYLQNAMYGCLDDSSGLLQNTGENDPATRTFVKVYKSGSVGRSLDITRFSNYAELREELGQMFGIKGQLDDPDRSGWQLVFVDRENDVLLLGDDPWEFINIYMNVSNAKKSYIMKRREYNTLVSWFPQLIAYRGKTVLPSIICVGQSLYVDAQLPKTLRESKHQT

SEQ ID NO: 16222 - protein, 749 aa, Oryza sativa
  Clone ID: TF_OSC101706j.C1.p13.gm
MATVERRGSATEDEETAATGGRNAAGRDAAGCDTASRDATGQGAAGTGTGGRGAAAGRGAGGRRDAAGRGAGERGESPGGSISSSHGNERRERQECEIGSDIRENTRPLGGVDGEGAPCAPPPSPIPAGPASSTVSAASSAPATRDYLGGITGHRLGQEDDSGGHEYTSVSGIHVPSSSGVAFVSFGQCPQEVISTDLCLGLGPIAATAPLQPPPPPAAAAAAGSPSATTPEPGHGEATPTTSSSAQFQTQAQQVTRDMWMACAAPKSGRLPTVGSLVYYFPDGHAEQCLSRPQEPLPGRIFLCKVTDVRLGAAATNEALATISLVPIAADDHAFQLQAPADPDPAPAQSQSLVSFVKPLTYTDVTKNRFMVPKDDAAAGVLPHIQLNDDVPLRIKDLSGKEWAFNYTWKAHTRMFRNGWMEFSNANGLVTGDNAVFMRRGNGEMFMAVRRTRNRPAPFSVEEVIEAVWRAARREPFEVSYCLRQDGDEFVVPRDIVDDGLRARFAPGMAVNFVWAVEDGKLPTIGPQGEDVCNACFSELEDQLVACFPETVRTSSKACRASRFLVFWADVIQGGAALTGGPRLSAHKGRRGGSGKWAPLAAAQGGRSTVDRDHAGGPPPVHGTDSPDRPEADRTARAARRPSTCRAERRRTARKAAADVRSGGTAKGGGTAKGGGARGKGRKGRGRESSPEGRRPEREGMSGGSASENGGRERRVLGKGGEGVREKRGAAARRGEMAGDGNNGELTGV

SEQ ID NO: 16223 - protein, 728 aa, Oryza sativa
  Clone ID: TF_OSC101706j.C1.p5.fg
MAQPPDAAAAAAVPPPVVIDRDVWHACAVPYSGVLPGVGTLVYYIPHGHIEQCAEDPALLLSRLPDPIHPVPCTVADLVLDVDAESGEAYATISLLPGSHDDTTARRQVPAHGEPGFRFFEKQLSPADVTSNALVLPAGAEHVLPPLDIAAYQTARLFDVRDLRGKRFEFVHIWDKKRCRYMLGDLGVNDNDGWRGFVKAKRLATRDTVVFMRRGGGDGDGDGELLVGVRRAPRARGGHHPRPGVEDNKVVSEVWLAMQGVTPFEVTYYPREGTFEFVVSRDEYIGFSFSPFYPFVPGTTVHLRMNPLQIAQSISGTVRTFDHLRPWRMLEVDWDQAASPISYRIHRQVNSWQVLRQPQPAATTSAVRIRDAIVATPQVQIMALPRPPPPTTTTGMVPSDDSYAMISLFPGDCYVTHRPLPAARDPVGGQREFCFFDKKLSPSDAAANGGGSGALFVIPKPSAAEHVLPRIPDLRVTNLQGGRWEFGHTWSDADTDRRSSSHTLAAGWSAFVKAKRLCVGDTVIFMRRRPGGEPLVGVRRKPHGGMPVGIPDKHVADAWLDASSAQPFRVTYCPWQGTAEFVVRREEVEGSPPLAPGTRVRLLMNPDDARRRSQPPVYGTVRDVHCRSEWRMLEVDWDRDSPLAPTMNRRVNSWQVQPVQLALPPQGSDEEAAAATTSTAHAGDATTSAPSLALQLQTMASSSSSSAPIIPSRGSAFRIVNPRDGSQG

SEQ ID NO: 16224 - protein, 1105 aa, Oryza sativa
  Clone ID: TF_OSC401793j.C1.p21.fg
MAAAAAAAVVGSGCEGEKTKAPAINSELWHACAGPLVSLPPAGSLVVYFPQGHSEQADPETDEVYAQMTLQPVTSYGKEALQLSELALKQARPQTEFFCKTLTASDTSTHGGFSVPRRAAEKIFPPLDFSMQPPAQELQARDLHDNVWTFRHIYRGQPKRHLLTTGWSLFVSGKRLFAGDSVIFVRDEKQQLLLGIRRANRQPTNISSSVLSSDSMHIGILAAAAHAAANNSPFTIFYNPRASPTEFVIPFAKYQKAVYGNQISLGMRFRMMFETEELGTRRYMGTITGISDLDPVRWKNSQWRNLQVGWDESAAGERRNRVSIWEIEPVAAPFFICPPPFFGAKRPRQLDDESSEMENLLKRAMPWLGEEICIKDPQTQNTIMPGLSLVQWMNMNMQQSSSFANTAMQSEYLRSLSNPNMQNLGAADLSRQLCLQNQLLQQNNIQFNTPKLSQQMQPVNELAKAGIPLNQLGVSTKPQEQIHDASNLQRQQPSMNHMLPLSQAQTNLGQAQVLVQNQMQQQHASSTQGQQPATSQPLLLPQQQQQQQQQQQQQQQQQQQQKLLQQQQQQLLLQQQQQLSKMPAQLSSLANQQFQLTDQQLQLQLLQKLQQQQQSLLSQPAVTLAQLPLIQEQQKLLLDMQQQLSNSQTLSQQQMMPQQSTKVPSQNTPLPLPVQQEPQQKLLQKQAMLADTSEAAVPPTTSVNVISTTGSPLMTTGATHSVLTEEIPSCSTSPSTANGNHLLQPILGRNKHCSMINTEKVPQSAAPMSVPSSLEAVTATPRMMKDSPKLNHNVKQSVVASKLANAGTGSQNYVNNPPPTDYLETASSATSVWLSQNDGLLHQNFPMSNFNQPQMFKDAPPDAEIHAANTSNNALFGINGDGPLGFPIGLGTDDFLSNGIDAAKYENHISTEIDNSYRIPKDAQQEISSSMVSQSFGASDMAFNSIDSTINDGGFLNRSSWPPAAPLKRMRTFTKVYKRGAVGRSIDMSQFSGYDELKHALARMFSIEGQLEERQRIGWKLVYKDHEDDILLLGDDPWEEFVGCVKCIRILSPQEVQQMSLEGCDLGNNIPPNQACSSSDGGNAWRARCDQNSGNPSNGSYEQFE

SEQ ID NO: 16225 - protein, 529 aa, Oryza sativa
  Clone ID: TF_OSC401200j.C1.p58.fg
MARPPAATAPPPPPPPPPPPPPPIDRLVWLACAAPLSRIPVVGTQVSYFPEGHAEQCPAPLPDPLPSAHRFFLCTITAVDLSADTTTGEPYATISLLPLRHDAPAPAPAPAPAAAELAEAESQEFRYYAKQLTQSDANNGGGFSVPRLCADHIFPALNLDDDPPVQSLTMGDLQGDSWEFRHIYRGTPRRHLLTTGWSKFVNAKQLVAGDTVVFMWCGAPAPERKLLVGVRRAARYSGESACNARGRVQPQEVMEAVRLAAEQAAFRVTYYPRHGAGEFVVPRVEVDKGLTTPWRCGMQVRAQVMEAEDTRRLAWLNGTLTNLRHQQIWRTLEVEWDASAASSSMKNRFVNPWQVQPVDFPPLPMGLKISNNNISAPVCNGDSLLVPPILMHPQPQPPADIQGARHNNGHAYADIPSSSTPSMVRTQQLFPRDLQILVPHTDIVTPQNGSPPDNPVNTPLSASDGMKTIQLFGVTITSPVQGDTNGAFASAQVNQVPEGVDDETATEEASDTSLPDSLTNGHNQDGARL

SEQ ID NO: 16226 - protein, 312 aa, Oryza sativa
  Clone ID: TF_OSC401166j.C1.p27.fg
MEFTPISPPTRVAGGEEDSERGAAAWAVVEKEHMFEKVVTPSDVGKLNRLVIPKQHAERYFPLDAAAGAGGGGGGGGGGGGGKGLVLSFEDRTGKAWRFRYSYWNSSQSYVMTKGWSRFVKEKRLGAGDTVSFGRGLGDAARGRLFIDFRRRRQDAGSFMFPPTAAPPSHSHHHHQRHHPPLPSVPLCPWRDYTTAYGGGYGYGYGGGSTPASSRHVLFLRPQVPAAVVLKSVPVHVAATSAVQEAATTTRPKRVRLFGVNLDCPAAMDDDDDIAGAASRTAASSLLQLPSPSSSTSSSTAGKKMCSLDLGL

SEQ ID NO: 16227 - protein, 473 aa, Oryza sativa
  Clone ID: TF_OSC400445j.C1.p23.fg
MAQFRSAPVESEAEPGADGPVDEANAVEEEKSGKGEDGIEEAADTVDSVKDSAKPEGMDAKEEAVEQEGGAAADKAKDIPVTSNGKTDAGGNEVAEMKVEKLENGDGHLKADGDSNGDNKGADGEKQLMLASAGEDVEDPVLSKLASNSFMFDYSCGGDDSGTEEEQAAFMKELERFYREKLMEFKPPKFYGEGLNCLKLVQGPLCLLWRQVTGLGGYDQLHQQVTSCKLWRQVGESFKPPKTCTTVSWTFRNFYEKALLEYEKHKIETGEFQVAASNLTERITSESQVGIHASGSGRARRESATRAMQGWHSQRLLGNGEIADPIIKDKGTVSVLKKDKTPKSSGSAKRKRTPTLEDDRIVPYKPDKLQNDSMVLDLGPPADWVKINVRRTKDCYEVYALVPGLLREEVHVQSDPAGRLIVTGEPEQLDNPWGVTPFKKVISLPSRIDPHQTSAVVTLHGQLFVRAPFEQSK

SEQ ID NO: 16228 - protein, 765 aa, Oryza sativa
  Clone ID: TF_OSC900362j.C1.p9.fg
MSQIQSFSRQNCVLLAVLCGKHAEKRAQARSGLEAKRLRPSYPFPELSSSGRLEVHTLFNPTPEQFLEAQRVVQPNFLYIQGQQLEDEKEIGSLVWGDNDVSDPQAFSCLISPPFPTIVYLEVPIGEKLAQAVHSKGIPYVIYWRNSFSSYAASHFRHALMSVVQSSVSHTWDAFQLAHASFRLYCVRNNHVQSVKLGPRLLGDAPKINITPPENEMVEEEGSSDVFPAIKIYDDDINMKFLLCGVPSTPDPCLLGSLEDGLNALLNIEIRGCKLQNRISASPPPLHAASLPRGMVTMRCDITTCSSSHVSLLVSGSAQTCFDDQLLESHIKDEIIEKSQLVHALPNNDDKLSSSVPFTSMSTACGASTFEVWMTLPKWAAQVLKHLAPDISYRSLVALGIGCINGTPVASFDRRDADRLLFFCTNQHKDLAIENGPYFHLPRWSASLTKERVKVGLESKPNLLGANGIPEDKKRLIEGPSSSSKAKLKPATMRPIPHSRKQQMHPFMGFLEATVHETSQVKPNLPAAPPVKHNSVPAAPATHRKSTSGPSHAQSIIQLNPLPLKKHGCDRLPIQMCSEEDFLKDVMQFLIQRGHNRLVPHGGLAEFPEAVLNAKRLDLYNLYKEVVSRGGFYVGNGINWKGQVFSKMRNHTVTNRMTGVGNTLKRHYETYLLEYELAHDDVDGECCLLCHSSAPGDWVNCGLCGEWAHFGCDRRQGLGTFKDYAKTDGLEYICPHCSLANYKKKPPPQKVANGFANTVSVSRNV

SEQ ID NO: 16229 - protein, 558 aa, Oryza sativa
  Clone ID: TF_OSC4861j.C1.p5.fg
MSAAAEEAAAAAAAEEVEGVEAGKKGVADAKGKGKEKVVVAEEDSAVAAGSGGSGGGRRTLVAYPARVAGYKDVVADAAVFRRALEGLHAQMGTKLKVPIIGGKDLDLHQLFKEVTSRGGIDKKYYMSLLYHFERLYLFEAQGWYQETADSRSISCIEMKAEGQASRKRKRGSNSCSSDPPINLEWTLCSTPLMKVPRYNILAPTIHFGSEKGQAGMKSTWSAQKVLALIGQKLTIKIREIKGKNSQLEHSNPGCRGNHEAIKPLDHLSACYLLYPTSLLSFLYGQRQELVPLTLSDLAASLDNDVQVIIDGKFEHGYIVTVIMGSKSTKAVLYNCTEEPAVPTAVPHVAIDSAEGIRPRRRRRRKKLSTTDPNHPKPNRSGYNFFFQDQHRKLKPEYPGQDRLISKMIGERWNNLGPEDKAVYQEKGVEDKARYQRQLALYREQRTGQPISNAVPIQQRLPQKEVTIDEVDSKVSEGDILLSNQGYSSSTSSSDETADSGEKNVEDDEEFNTETSPEPSMETTDSHGQPDPSADGERFELRRRENPKIDEKRDMPPN

SEQ ID NO: 16230 - protein, 1100 aa, Oryza sativa
  Clone ID: TF_OSC101541j.C1.p11.hg
MNGATAGSGSGSDHDDARAAEEARGEEAAGRAVEVEEEEEEEEAVPVAEERAAWGGGGTPPTPEPKSDADAEGAGSLDRVELNAGAGGGREREDDEGEDEAVGARGVEMNGEDAMSHDGHDGDEDGDDEEDGDDGEEEEEEDDDEEDDDDDSTPDASPRAEAKAEGESSTVMAGCANQPAEPDPFLDGDDSGTEEEQAAFMVELERFHREHGLEFKPPKFYGKGLNCLKLWRQVAHLGGHEQVTICKLWRQVGETFRPPKTCTTVSWSFRIFYEKALLEYEKYKVRTGQLQVPLSALPQPGGTGREEKDSVPSSSRGKNLKDDSMVTDVGEPAEWVKINVRQTKDCFEIYALVPGLLREEVHVQSDPAGRLVITGDPEQPDNPWGITPFKKGPSISSETNPVVGPIRNSPNGRDPTRPHRHRGSGSVRCRLVGGAASSASDYITKILPHPRHIVPASRRQSPSPEPTPPSYQHRTNRSAAPRRAASPAMDSDYGVPRELSEVQKKRALYQPELPPCLQICVLPDRAAPDPAPLRRPDQSISPALVVYTGTTVRVEYGDAAIAADPAGAHVISHAFPHTYGQPLAHFLRKTANVPDATVISEHPVVRVGVVFCGRQSPGGHNVIWGLHEAIKAHNPNSKLIGFLGGSDGLLAQKTLEITDEVLSSYKNQGGYDMLGRTKDQIRTTEQVNGAMASCQALKLDALVIIGGVTSNTDAAQLAETFAEAKCATKVVGVPVTLNGDLKNQFVETTVGFDTICKVNSQLISNVCTDALSAEKYYYFIRMMGRKASHVALECALQSHPNMVILGEEVAASKLTIFDITKQICDAVQARAEKDKYHGVVLIPEGLVESIPELYALLQEIHGLHGKGVSMENISSQLSPWASALFEFLPPFIRKQLLLHPESDDSAQLSQIETEKLLAQLVEDEMNRRMVLGHVCYHILAAGLNGYMATVTNLKSPANKWRCGAAPISSMMTVKRWSRGPAATQIGKPAVHMATVDLKGKAFELLRNNSTSFLIDDIYRNPGPLQFEGAGADSKPISLCVEDQDYMGRIKKLQEYLEKVKSIVKPGCSQDVLKAALSAMSSVTETLAIMTSSSTGQGTPL

SEQ ID NO: 16231 - protein, 1731 aa, Oryza sativa
  Clone ID: TF_OSC402966j.C1.p6.fg
MGISAAARGSGVGSSVPEAPVFRPTEEEFGDPLAYVARIRPLAEPYGICRIVPPPSWSPPPALDVCTLSFPTKRQPIHRLLARLAPADPDTFLLDYRRFLHRHRGRKKPKPKLPALSDGRPLDLCRLFHAVKRFGGYDGACAGKRWADVLRLVDDKAPRHAFSVSEHVIAQLYYEHLYQYEHFTNRLPSQSHDDQPPVSASSANISIRRQKKRLRKTSNTMGHCGGSTSAKTAASAPKQKRRKVDATATVVNEAMDQVCEQCNSGLHGEVMLLCDRCDKGWHLYCLSPPLESVPPGNWYCSECMNSDRNCFGFVHRRKTCQVETFRKFEERVRKRWFGHKNPSRVQVEKQFWEIVEGKVGELEVMYGSDLDTSIYGSGFPRLCDPVPSSVDPVMWHKYCSSPWNLNNFPNLPGSVLQTVRDNIAGHLMSNHRAAVSASLFHLHSYSMHVGEPKCWYGVPGAEANAFEKATLRLVMLEYLTFCDLQVMRNALPDLFDAQPDLLFHLVTMLSPSILQANGVPVYSVIQEPGLNCAEAVNFAPADWLPHGGIGAELYRLYRKAPVLSHEELLYVVAKNGVDNESLPYLQGEIERLFVKEKKCREELWITGIVKSNLMPPKNNPNFIGSEEVDLLVYRHLMSCDIDSALIPLILAKFIKSIFSFSQHWKHLCECSPEKHRLLYRHTLAELGDLVCEVSKANLPRENVKQNSLLHSDVFLPTRKDKDQYMSYTQLAEDWLSKADHILHMPFLDTAYATALEDAEQFLWGDHNMDSVRNMSAKLIEGRKWASSVRKCLSQIDGFLHCKENCSEKVNYVEIKELAAVRCKPCYEPSLAQLQVYVDKGEIMINEINNALSSRSKVDYLETLYSRALEFPVELTETSALSCEISSAKSWLKKACDCLEQNKRGIVDIDFLNELKSEELESFLLVVDGANFSIPELNILMQRYSGACSWVNHANNIVGKLLERNDYDNIVEELTGILKDGESLGVKGMLFEEFSVVEEELKKSFCRKQASEALATQTSMEVVKEVLKEASILTIEEEQPFVDLSHNLKAAITWEEKASFILEHSAALPEFENHILCSENIHVILPSELDMKAEVATAKLWMDKCQAYLRPRSDKPASGGFLNVDDLKDLIGQPASMKVILDTSAINSVLNNVIEWEHNSLSLIHSSRSLLDSNVIDSTIDPLKRKLEELQDKINAEIEKGLSLGFEFKVVHELKDSFFTLGWILNALSFCGVTPLLQDAEKLIQQAVNLPASLSDCSLAELLVRGSSWLRKALMFLPGSEMSETSRLLNVENILAEYKASISKFKLIYLIFHALVGDQEIAVPYPMMIAKLEDAINKHNSWAEQCNAFFMFPDHQSWDGLLSLRDSGQSVAFDCTEMDKVVAEIKKIEEWLTHCHCTLFPDGNNSDSLLSALLKIRGSMDNACMLYSDCNQKGLCAICSCDVGDHITPRCMICQARYHSSCVEPLPASTQVTREWTCPFCFHLESGDPLQNRLQEKISKGNRPALPALIGLRSFAKGFYSGIEELDLLEEIAEKAHKFKSYLMQILHDADSYHGEDLSVMHRSLLIALKATSAAGLYDHQISCRIESMLSRYSWKKRIHILLCGGKKIPIQQVLMLDNEGSSLEICGEDFFKLEINKIKETSLQWLAKAEKTTLDSGKLALDLVYGLIIEGESLTVHVEKELKLLRDRSVLYCICHQRPKQDLTPLRHLVKQQEEWELSSATVVANGRKHM

SEQ ID NO: 16232 - protein, 306 aa, Oryza sativa
  Clone ID: TF_OSC900124j.C1.p5.fg
MAEKLLYPPPLLSHEEVANDRAAFMDTLRRFHSLMGTKFMIPVIGGKEMDLHALYVEVTSRGGLAKVMEERKWREVMARFSFPATTTSASYVLRRYYLSLLHHYEQVYFFRAHGALLRPAASALTKTPRRKMRGTSDQSPAAAEAGKRMALPERLGGEPCSFSVTGSIDGKFEHGYLVTVKIAAETLRGVLYRVAPPPPPPAAPPPPPPPARGRRRRGRRQRDPAQPRPNRSAYNFFFKEKHPELKATHPHREREYSRMIGDAWNRLAADDKMVYYRHSAEDKERYKREMQEYNERLKLAPSTMAG

SEQ ID NO: 16233 - protein, 117 aa, Oryza sativa
  Clone ID: TF_OSC401571j.C1.p5.gp
RPRKTITNSDHLEPSVKRPRGRPRKYPLPIAKLEDSSQNDTSQEFALIDPLVSSAVVSCDVAIACPMPTVNPVESTPRKGRGRPRKKPVEIKGLSGIKLTEDLSTALSPIALTCMEP

SEQ ID NO: 16234 - protein, 118 aa, Oryza sativa
  Clone ID: TF_OSC400259j.C1.p61.gp
RPRKTITTSDDHLEPSVKRPRGRPRKYPLPIAKVEDSSQNDRSQEFALIYPLVSPAVVSCDIAIAYPMPTVNPVESTPRKGRGRPRKKPVEIKGLSGIKLTEDLSTALSPIALTCMEP

SEQ ID NO: 16235 - protein, 215 aa, Oryza sativa
  unsure (1)..(215): unsure at all Xaa locations
  Clone ID: TF_OSC406953j.C1.p3.np
PRLPASAAAGERSGGGSGGGRVAGEQAAGGGGGHRAARRPRGRPLGSKNKPKPPVIITRDSPDALHSHIIEVAPGADVAACVAEYARRRGRGVCLMGASGAVADVAVRGAAAPLPGRFELLSVTGTVLPPPAPPGASGLSVLLSAGQGQVVGGCVVGPLVAAGPVTLFAATFANAVYERLPLQAEEAGEPHAEAEQQAQPEAAAASSXLGAGLST

SEQ ID NO: 16236 - protein, 316 aa, Oryza sativa
  Clone ID: TF_OSC900202j.C1.p3.fg
MDPVTASIHGHHLPPPFNTRDFHHHLQQQQHQLHLKTEDDQGGGTPGVFGSRGTKRDHDDDENSGNGHGSGGDGGDLALVPPSGGGPDGAGSESATRRPRGRPAGSKNKPKPPIIITRDSANTLRTHVMEVAGGCDISESITTFARRRQRGVCVLSGAGTVTNVTLRQPASQGAVVALHGRFEILSLSGSFLPPPAPPEATGLTVYLAGGQGQVVGGSVVGALTAAGPVVIMAASFANAVYERLPLEDDELLAAQGQADSAGLLAAGQQAAQLAGGAVDPSLFQGLPPNLLGNVQLPPEAAYGWNPGAGGGRPAPF

SEQ ID NO: 16237 - protein, 258 aa, Oryza sativa
  Clone ID: TF_OSC24712j.C1.p1.fg
MGSIDGHSLQQHQGYSHGGGAGGSNEEEEASPPPGGGSATGSAGRRPRGRPPGSKNKPKPPVVVTRESPNAMRSHVLEIASGADIVEAIAGFSRRRQRGVSVLSGSGAVTNVTLRQPAGTGAAAVALRGRFEILSMSGAFLPAPAPPGATGLAVYLAGGQGQVVGGSVMGELIASGPVMVIAATFGNATYERLPLDQEGEEGAVLSGSEGAAAQMEQQSSGGAVVPPPMYAAVQQTPPHDMFGQWGHAAVARPPPTSF

SEQ ID NO: 16238 - protein, 259 aa, Oryza sativa
  unsure (1)..(259): unsure at all Xaa locations
  Clone ID: TF_OSC24712j.C1.p2.gp
MGSIDGHSLQQHQGYSHGGGAGGSNEEEEASPPPGGGSATGSAGRRPRGRPPGSKNKPKPPVVVTRESPNAMRSHVLEIASGADIVEAIAGFSRRRQRGVSVLSGSGAVTNVTLRQPAGTGAAAVALRGRFEILSMSGAFLPAPAPPGATGLAVYLAGGQGQVVGGSVMGELIASGPVMVIAATFGNATYERLPLDQEGEEGAVLSGSEGAAAQMEQQSSGGAVVPPPMYAAVQQTPPHDMFGQWGHAAVARPPPTSFX

SEQ ID NO: 16239 - protein, 1088 aa, Oryza sativa
  Clone ID: TF_OSC400259j.C1.p38.fg
MAAPPEATGAPPQTEGEEVKDGVEVCVFDESPEVFSRAVHAISELTTGEHEPNFPDAEVERLASSITFLREWRHFSYEPKNVSFTCDARSAPSRVDTHKINLPQFSSASVPQITHLDNGKAKTDSFCSSDFVIFAGGNVWALDWCPRLCDRPHSPINCEYLAVAAHPPGSSYHKIGMPLIGRGIIQVWCLLAPSEEGHPHQSLVACNKYNPSNQPKQRGRPRKTITTSDDHLEPSVKRPRGRPRKYPLPIAKVEDSSQNDRSQEFALIYPLVSPAVVSCDIAIAYPMPTVNPVESTPRKGRGRPRKKPVEIKGLSGIKLTEDLSTALSPIALTCMEPKKKRGRPRKYPAPSNSKHLPGTDTELGNDSVCQPGSIDFGLGPTENTGSGANITHAAVDAASPVPLSGQRGREQPEKEVIHIENSMQSGQSDIGSMLPTYILPESGNKSNSTGLRRRGRPRKKPFPSTTSCVFVPGTETPKKGSTLTNSNNLVVLAKSNCDILANDIGPSSCAIENSVHLSVGTSHAATPAQGICLAKCKEESSAKKGRGRPRKQPISTECGCSKACRGEEQKTQTIPKSSDNASLVENCKKESCPGKGRVQDKKKSVSNERSSVVLSVEAQNMDGSSASTAYTSCCTPACNFENAETNQAVSVPSENSAQVIDELKDTEVARFKESTKDDNMICSAEKTLSRVPKDISLPRVVLCLAHNGKVAWDVKWKPPSANQSEHKSCLGFLAVLLGNGSLEVIPLTVDWSPSHDMILAGCHDGTVALWKFSANLSFQGSKPFMCVTAESAPIRTVSWAPSVSKENVNTFVTAGEDGLKFWDLRDPYRHLWELTTAPRAVISLQWLKDARGVVISLEDGTLKFVSLSRIANDVPFTGRPFVGTKTQGVSTYQLSEYLIWSVHASEITGYAAYCVADGTAVCFELTPRFWEKEPGRNRVPYFLCGSLSEEGTTIKIGIALPNSPLSNVPLGTKRATKTCKDVAQLHVIEEGKLLTNSEYNGAINPSIRDGQQDEPDEGQETGAIVLAAPSMQENFDTSTSRGSESPENFEVFPPKAVALHRLRWNMNKGSEKWLCYGGAAGIIRCQRI

SEQ ID NO: 16240 - protein, 1177 aa, Oryza sativa
  Clone ID: TF_OSC400506j.C1.p9.fg
MADHAAASAAADADPSLRQGGDAADADEEEEEEEAAPSSAAGVGVGVGVEERCRAMMEVVKKDAVGGKWRVSKLVVEHNHEVEVAPCGEGEGEVAAAVPVMGMEFESVHAAKGFYYGYGERVGFKARTGSNRRSVGNGVMIMQRFLCSRGNYANRRNKANGLDELKEEEVQDGAAGKRKRGANNKRNPNPVKNNSEVIEVESSAEKGVGTAVPNNGQEARKMRGSKRGRTKKDVTEKDEKPVVELEAEKEDEVVAQDGDDVEEQKGEGEEEMEEEVQVEVQEKRGRGRPRKADAEGNALQARVLRELGLRASQYTNEERKKIVSKYLSKRQSRPVSARPAKIASHQALAERRKRGDGGRFLSSEGLTQPSERRSKRLEKQNLKKEDKGESKEDEIIEGEPDPEMEVVAGPGGEPKVGMVFLNEDKAYDCYVTYAGTVGFSVRKGWLEKTATNTTKSRAYVCSKEGFRSKSVSTDPKKPRPETRTGCLAHMTIKITVSGKYVVTEYVADHNHDLETPLVDIQVLRSHKLLAKLQQPPDPPRVVLIPNDYKNYVRTRHTKDMQLGDTQAIYEYLQRKKGEHPSFFYAIQVDEDDQLTNVFWADVKSILDYHYFGDVLCVDTRYSTSDHSRPLLLFIGVNHHKQPVIFGAALVYDESVESFKWLFETFKSAMSGKQPKTVMIDQSTAISEAVASVWPRTTQRFSLIHLYKNATKILRDAFQASETFADDFSMWLYGYEEEGDFLSSWEILSDKYNLKDNEWLGKLYADRERWALPYGRDSFCADIAAALRSDNNTDAILADLLKKETDFPSFFNNYDKLLENKRLAEQQADYLGVQMAQRVAPLRMLWQAANAYTPTLFEMFRLEFELTLTCMAYCCGEIGPISEYEVTVKNRPRDHFVRFDSSECMVVCSCKKFEFTGIPCCHVLKVLEVRNIKELPPHYILKRWRKDAQSESPRENYGFEAVDEDPRFLLSKRYSMLYRTFYKIAAKAAENIEAYTYMESQCDQFIEQVELLLQAKLHDKSSLSTILKVQQPNLFPNEASNSETRRQQSPLQSNKKKKGRQGLPEPEEAEVPLRVDPPTISNDIPNHLRTPTSQFLATSHIMQAPYIAQQFGLSSLQGFPGISPFGQLQEPAPAPLQQPHLQQPPFHSGPQIPQVIVITYTHVPFPRDFTFTDSISNY

SEQ ID NO: 16241 - protein, 266 aa, Oryza sativa
  Clone ID: TF_OSC101556j.C1.p2.fg
MGLPEQPSGSSGPKAELPVAKEPEASPTGGAAADHADENNESGGGEPREGAVVAAPNRRPRGRPPGSKNKPKPPIFVTRDSPNALRSHVMEVAGGADVADAIAQFSRRRQRGVCVLSGAGTVANVALRQPSAPGAVVALHGRFEILSLTGTFLPGPAPPGSTGLTVYLAGGQGQVVGGSVVGSLIAAGPVMVIASTFANATYERLPLEEEEEGSGPPMPGGAEPLMAGGHGIADPSALPMFNLPPSNGLGGGGDGFPWAAHPRPPY

SEQ ID NO: 16242 - protein, 1378 aa, Oryza sativa
  Clone ID: TF_OSC401571j.C1.p5.fg
MAALPEATGALPQTEGEEVKDGVEVCVFDESPEVFSRAVHAISELTAGEPEPNFPDAEVERLASSITFLREWRHLSYEPKNVSFTCDARSAPSRVDTHKINLPQFSSASVPQYLAVAAHPPGSSYHKIGMPLIGRGIIQVWCLLAPSEEGHPHQSLVACNKYNPSNQPKRRGRPRKTITNSDHLEPSVKRPRGRPRKYPLPIAKLEDSSQNDTSQEFALIDPLVSSAVVSCDVAIACPMPTVNPVESTPRKGRGRPRKKPVEIKGLSGIKLTEDLSTALSPIALTCMEPKKKRGRPRKYPAPSNSKHLPGTDTELGNDSVCLLPGSIDCGLGPTENTGSGANITHAAVDAASPVPLSGQRGREQPEKEVIHIDNSMQSGQSDVGSMLPTYILPESSNKSNSTGPRRRGRPRKKPFPSTTSCVFAPGTETPKKGSTLTNSNNLMVLAKSNCDILANDIGRSSCAIENSVHLSVGTSRVATPAQGICLAKCKEESSAKKGRGRPRKQPISTERGCSKACRGEEQKTQTIPKSSDNAALVENCKKESCPGKGSVQDKKKSVSNERSSVVLSVEVQNMDGSSASTAYTSCCTPACNFENAERNQAVSVPSENSAQVIDELKDTEVARFKESTKDYHMICSAEKTLSRVPKDISLPRVVLCLAHNGKVAWDIKWKPPSANQSEHKSCLGFLAVLLGNGSLEVWEVPSPSMIQKIYSSSSKEGTDPRFLKLKPVFSSAKVALWKFSANLSFQGSKPFMCVTAESAPIRTVSWTPSVSKENMNAFVTAGENGLKFWDLRDPYRHLWELTTARRAVISLQWLKDARGIVISLEDGTLKFVSLSRIANDVPVTGRPFVGMKTQGVSTYQLSEYLIWSVHASEIAGYAAYCVADGTAVCFELTPRFWEKEPGRNRVPYFLCGSLSEEGTTIKIGIALPNSPLSNVPLGTKRATKTCKDVAQLHVIEEGELLANSEYNCAINPSIRDGQQDEPDEGQETGAIVLAAPSMQENFGTSTSRGSESPENFEVFPPKAVALHRLRWNMNKGCTHILPSSGIGWFSSVGCVFTVVSFAGVPWFFEFIRSGNVTRSVSKPHGRNLFLQSLVEEGQNPSTSNGASNSQKSVEDKDLIDCLENGVNFWTDYSKVQYHPQSLYELHGSWTDFDKFDNYGSAQEVVSDWSQIEEMNERLRFFVEECDHIQIEMLLGNIEMKLHSLTPEISDEDEDPYSVESLVVHGALDRGGQRTSISQVKDSVCSVYEARETKPKFSHLSASLCPLPVPLPFPSIFRGNIGRHGEILSDHAEESQPKGSLDIESIPMAARLRSSSTVLPFIERRSGSLQKHGVARGAIGSLVLRDWGFGREEVDDMGEHLAKLLRPFHPEMDLTSDSD

SEQ ID NO: 16243 - protein, 1378 aa, Oryza sativa
  Clone ID: TF_OSC900057j.C1.p13.fg
MAALPEATGALPQTEGEEVKDGVEVCVFDESPEVFSRAVHAISELTAGEPEPNFPDAEVERLASSITFLREWRHLSYEPKNVSFTCDARSAPSRVDTHKINLPQFSSASVPQYLAVAAHPPGSSYHKIGMPLIGRGIIQVWCLLAPSEEGHPHQSLVACNKYNPSNQPKRRGRPRKTITNSDHLEPSVKRPRGRPRKYPLPIAKLEDSSQNDTSQEFALIDPLVSSAVVSCDVAIACPMPTVNPVESTPRKGRGRPRKKPVEIKGLSGIKLTEDLSTALSPIALTCMEPKKKRGRPRKYPAPSNSKHLPGTDTELGNDSVCLLPGSIDCGLGPTENTGSGANITHAAVDAASPVPLSGQRGREQPEKEVIHIDNSMQSGQSDVGSMLPTYILPESSNKSNSTGPRRRGRPRKKPFPSTTSCVFAPGTETPKKGSTLTNSNNLMVLAKSNCDILANDIGRSSCAIENSVHLSVGTSRVATPAQGICLAKCKEESSAKKGRGRPRKQPISTERGCSKACRGEEQKTQTIPKSSDNAALVENCKKESCPGKGSVQDKKKSVSNERSSVVLSVEVQNMDGSSASTAYTSCCTPACNFENAERNQAVSVPSENSAQVIDELKDTEVARFKESTKDYHMICSAEKTLSRVPKDISLPRVVLCLAHNGKVAWDIKWKPPSANQSEHKSCLGFLAVLLGNGSLEVWEVPSPSMIQKIYSSSSKEGTDPRFLKLKPVFSSAKVALWKFSANLSFQGSKPFMCVTAESAPIRTVSWTPSVSKENMNAFVTAGEDGLKFWDLRDPYRHLWELTTARRAVISLQWLKDARGIVISLEDGTLKFVSLSRIANDVPVTGRPFVGMKTQGVSTYQLSEYLIWSVHASEIAGYAAYCVADGTAVCFELTPRFWEKEPGRNRVPYFLCGSLSEEGTTIKIGIALPNSPLSNVPLGTKRATKTCKDVAQLHVIEEGELLANSEYNCAINPSIRDGQQDEPDEGQETGAIVLAAPSMQENFGTSTSRGSESPENFEVFPPKAVALHRLRWNMNKGCTHILPSSGIGWFSSVGCVFTVVSFAGVPWFFEFIRSGNVTRSVSKPHGRNLFLQSLVEEGQNPSTSNGASNSQKSVEDKDLIDCLENGVNFWTDYSKVQYHPQSLYELHGSWTDFDKFDNYGSAQEVVSDWSQIEEMNERLRFFVEECDHIQIEMLLGNIEMKLHSLTPEISDEDEDPYSVESLVVHGALDRGGQRTSISQVKDSVCSVYEARETKPKFSHLSASLCPLPVPLPFPSIFRGNIGRHGEILSDHAEESQPKGSLDIESIPMAARLRSSSTVLPFIERRSGSLQKHGVARGAIGSLVLRDWGFGREEVDDMGEHLAKLLRPFHPEMDLTSDSD

SEQ ID NO: 16244 - protein, 519 aa, Oryza sativa
  Clone ID: TF_OSC409220j.C1.p4.fg
MAGQGSQKKKSCDWSKRYVDHLNGKMKCFHLQMSANFGHSMTIPNKFLDHFGGTLSRTIELVSPKGIVYIVKVTEHMNKTILQCGWEAFVDAHHIEENDSLLFRHIENSRFEVLILDSDGCEKVFTCAGIKKTSSVQERNAAPVDISRSTHDETTQSSGSKKFVRCQRASDSQRGKTAKLAETSSSGESGEEGTDSSTSEDESSYELDDPQMPPGRNYVLSRWTSLSEAQEEKVDMLVQDIQPEIPVFVAIMKHSNVNSRRACLVIPKRYASAHFPLESQTITLQRQGKNKKWYPMFYIRKDGSGYMLYGCWKNFVRDNHVKEGDMCIFHLTKFTGGEFGATVHLLRETKSGSLGSFHTSHKRFDLRDGRTWPKVTGVRRVSSRPYLTADRVSLTEEQVRKVEEVVHSIQSEGPMYVSIMNKSNVGTDGLYIIIFGRQFATRYLPEGEQTLTLLMTGKSNAWQVKMRPRSGDAQMITTGWRHFVHDNHLQIEDICLFQLMNDESKLTMTVHIIRRNEKS

SEQ ID NO: 16245 - protein, 538 aa, Oryza sativa
  Clone ID: TF_OSC409221j.C1.p1.fg
MKKYCDCCKRYVDHSNGKMKCFHRQMSANFEHSMIIPNKFLDQFGGKISRTVELESPKGNVYVVKVSKHMNKTVLQCGWEAFVDAHQIEENDSLLFRHIKNSRRASGVQERNADPIDVSSSTHDDTVQSSGGERFARSESGSDSQHSKTAKLAATCSSGGSECTGEEAKESSSSEHESSYDLVDPQIAPMPGYVLSRGTNLSQAHEEKLDMLVQEIRPEIPLYVTTMKHSNVNSHHASLVIAKHYACAYFPHTSQTITLKWHGKNRKWHPKFYIRKDQVGYILHGRWIDFVRHNHVKEGDICIFHLKNFNGRKFRATVHLLRETIPHSFGALHIPKRFESRNGRMRLKMTDDRRVSSTECRRGTMEPSTTNVKKEADNEQCNNGQGKRQEPLNFDVSVGSSKPYLTADRVSLTEEQFMKVEENVHSIQSEGPIYVSIMNKSNVGTDGLYIITLGRQFAIRYLPEGEQTLTLLTTGTGKAWQVKMRPRSGDARMFTLGWRDFVRDNRLQTEDICLFQLTKNSERGLAMKVHIIRHNERS

SEQ ID NO: 16246 - protein, 737 aa, Oryza sativa
  Clone ID: TF_OSC409221j.C1.p7.fg
MAPFLASPIRLHPCPLLFSHPHLFGSDYFAFSVKGRGAHLESMRVENKRGNRSWGTDAKRTHPNSIFNQLVRYGYIGTGFPDMNCSLTWSLIGGPSTLSLPSFFPSAHLLLSLALFFFLCIQSNHRMSKSGCERCRGRGFWDTDDQDTYFFKVMIGGFRRQMTIPYKFAENFRDQIQGTIKLKARNGNTCSVLVDKCSNKLVLTKGWAEFANSHDIKMGDFLVFRYTGNSQFEVKIFDPSGCVKAASHNAVNIGQHAQNMQGDPIEILSCSDEHLRAQSLTTERQNQPEKDVIDNCNKKMKTEHASSSEDDQETPTAEVHRMKVEEMVRAIHSNHPVFVAVMKKSNVTRQPCYVAISRKYANEYFPGGDQMLTLQRHGKRWQVKFCISKRKLRMLSKGWRKFTRDNELQHWAPLALFITLFFSPHFRKMKKCGQKMRKLNTRSTARDDQEKYFFKVMIGDFHKRMTIPDKFARHFKGVISKTIKLEPRSGYTFDVQVTKKLNILVLGSGWESFVNAHDLNMGDFLVFKYNGDFLLQVLIFDPSGCEKSTSCSMENAIDHVGQGWKEHNDISTSYHDQPKGNKHWMQKDSSSKGNKIGNTRSSNTPSKFSGCILPRGTCLPVVQEKKMKEKIQAIHSKTPMYGNVMTKCNVSGSPCVLEITQLYDDAYLPFNNGQELMLRHRDKSWKVRFYRFKNKSRKLTQGWKRFVHDNYLRMGDLCLFEILKNKYTMNVHIIRKC

SEQ ID NO: 16247 - protein, 306 aa, Oryza sativa
  Clone ID: TF_OSC409222j.C1.p4.fg
MVKILKTTLRATTMLKVLVKIRLSLFLTFSVLCLMPIMYMASHKTIPNEFLHNFGGKIPKSIKLETRSGLTFDVQVTKNSGRVVLQSGWASYVSAHDLKIGDFLVFKYSGDSQLKTLIFDSSGCEKVCEKPVDMSGRSYDIAMRNSQDEKKKRKQRDISRQGTVKPSEEGLKAELVPGCILPSRTDLTRLQKNILIEKVKAINSETPIYGYVMNNSSIHGIPCTVEISKKYADVYLPFEDGTVVLQHHGKSWNVRCCLTKQNSKRFLKGWRQFAGDNKLHLGDICLFDLLKDKKKYVMDVHIIRRK

SEQ ID NO: 16248 - protein, 327 aa, Oryza sativa
  Clone ID: TF_OSC409222j.C1.p1.fg
SSLYKMRRPGARCREGHAHFNGNHIDGQYKNFFKVMIGRFRERMIIPNEFLQYFRGKIPRTIKLQLRDGCTYDVQVTKNLGKISLQSGWKAFVTAHDLQMGDFLVFSYDGISKLKVLIFGPSGCEKVHSRSTLKNATHCGEKWEEPLHISSNSHDLPVKSPQNVSKSEKQWDSSEQENDTANIEEVALQGDDLQGHPVLNCILPKHTRLTDMQKQQLESKVGAIHSEIPIYGCILRKSRVHGKSQTVDICREYADVYLPFKELNMTLQRHGKNWEVLCRTKDTRTKRLSTGWSRFAQENNLQVGDICLFELLKKKEYSMNVHIIPKK

SEQ ID NO: 16249 - protein, 206 aa, Oryza sativa
  Clone ID: TF_OSC8898j.C1.p1.gm
MAMHPLAQGHPQAWPWGVAMYTNLHYHHHYEREHLFEKPLTPSDVGKLNRLVIPKQHAERYFPLGGGDSGEKGLLLSFEDESGKPWRFRYSYWTSSQSYVLTKGWSRYVKEKRLDAGDVVHFERVRGLGAADRLFIGCRRRGESAPAPPPAVRVTPQPPALNGGEQQPWSPMCYSTSGSSYDPTSPANSYAYHRSVDQDHSDILHA

SEQ ID NO: 16250 - protein, 305 aa, Oryza sativa
  Clone ID: TF_OSC900066j.C1.p8.gm
MAMHPLAQGHPQAWPWGVAMYTNLHYHHHYEREHLFEKPLTPSDVGKLNRLVIPKQHAERYFPLGGGDSGEKGLLLSFEDESGKPWRFRYSYWTSSQSYVLTKGWSRYVKEKRLDAGDVVHFERVRGLGAADRLFIGCRRRGESAPAPPPAVRVTPQPPALNGGEQQPWSPMCYSTSGSSYDPTSPANSYAYHRSVDQDHSDILHAGESQREADAKSSSAASAPPPSRRLRLFGVNLDCGPEPEADQATAMYGYMHHQSPYAAVSTVPNYCDPHTLGYWDYQNLTHKTGCSHAGAQLKNRTYKTL

SEQ ID NO: 16251 - protein, 199 aa, Oryza sativa
  Clone ID: TF_OSC401196j.C1.p40.fg
MATIVAWESRNLQLQGGGGGHGGGGGGGGGERREYMFEKVVTPSDVGKLNRLVVPKHYAEKYFPLGPAARTSPAGTVLCFEDARGGDSTWRFRYSYWSSSQSYVITKGWSRYVRDKRLAAGDTVSFCRAGARLFIDCRKRAASVSSSSLVPPALIKVQLPPSRPVVDEEEAACGRRCLRLFGVDLQLRADASPALDLQL

SEQ ID NO: 16252 - protein, 41 aa, Oryza sativa
  Clone ID: TF_OSC32158j.C1.p1.hg
MLSASDAGRIGRLVLPKKCAEAYFPAISQAEGLPLKVQDAT

SEQ ID NO: 16253 - protein, 553 aa, Oryza sativa
  unsure (1)..(553): unsure at all Xaa locations
  Clone ID: TF_OSC401603j.C1.p6.np
IVSALSISMHCMVSRPMSSPAQPPPTRPPVAAPQAQLRNGRPRMDAKARSQLLPRYWPRITDQELQHLSGDSNSVITPLFEKMLSASDAGRIGRLVLPKKCAEAYFPAISQAEGLPLKVQDATGKEWVFQFRFWPNNNSRMYVLEGVTPCIQSMQLQAGDTVTFSRIDPEGKLVMGFRKATNLSAEQPPEANNKVVVPDSSPNAAVPRPIKVNTESKSSSPVEQALPVKLTKVHYHKRKGQEPSPLPVKRKATSVGPKIKRFHMDSEESMELKITWEEAQELLRPPPKAPSIVVVDGHEFEEYEEPPILGRRTYFVTDQSGENHQWAQCEDCSKWRKLPVDALLPSKWTCSDNKWDSERXPAILEPFSLLYAVFMISYNRKSAAKKTKGKVDTDNIDVSDGLDTLANLAILGEGESLPSQPTTRHPRHRPGCSCIVCIQPPSGKGPKHKQTCTCNVCMTVRRRFRTLMMRREKRQLREGLWGASQKRARSIQRASSTNNKRTSNKRTSSPVKNQIDLNSQPEREDDLEIVKFSSASSASGAVFTTSGTVTSTG

SEQ ID NO: 16254 - protein, 272 aa, Oryza sativa
  Clone ID: TF_OSC4900j.C1.p12.fg
MAASPPLPTSIDGGQVLDDMEVVEMKYLFGKVLMPSDVSWDTEQLVIPDEHVGKLLDMVVMNRPEGGFFVVVVEDGEVTGKLWLFRYWKRDDVHCLTKGWGCYAREKGLRAGDTVSFFHSTACGRFFICCRCTCMSFLSLPTTSHRIHGSSVLPQPRAAQEAHHPFSGHATLCLGNKASDHSAPARHATASLGCAAAQPPQVPPTPTPRRRRRSMMVHPEPPEHTTDGMPVILESMALVSTPPVAKRVRLFGVYIDVPPLRPGGEATQDFNP

SEQ ID NO: 16255 - protein, 530 aa, Oryza sativa
  Clone ID: TF_OSC100940j.C1.p8.fg
MADARGSSSSSGDGGGGEGKGGAGHGDFVGGGQHNWYHGILGAVPPPNVGRQNIVHHQYPAASLIQQHHQSPTMPLPMAQLPYVPQYTVLPTPAVLPSHHHHHGQSQISQENFQDWVPSNNVAAPHVPSAFQDWRQMCNGSAFMPFGQTAANSNVFYQNLTFNSWTSNNMPRNPVYTSFHPAAIEDHHAPLFHSNNHDIDPEFLGNRHLHGVDIAGAPPAKATSPATAGGLLTNTAPATVSQIHARCRRRQIYRCCGLLPRAPPPSDPCAFARATITAARSARGLLSHLYGGLVFWLVGKRKLGEKRERKRKVVAGMDPPIVFRRSDMESEKNDDNPDQTPVSEPPSMNQNGENLIIRFNCREYRVILRKELTNSDVGNIGRIVMPKRDAEAHLPALHQREGVTLKMDDFKFETTWNFKYRFWPNNKSRMYVLESTGGFVKHHGLQTGDIFIIYKSSESGKFVSSVPFTSTTYGESDGEDYNGDRSGPGAGEVADEDFRKPEFGWYCCAKINRKESEIREQVSKEKVNSN

SEQ ID NO: 16256 - protein, 728 aa, Oryza sativa
  Clone ID: TF_OSC400964j.C1.p49.fg
MDASAGSSAPHSHGNPGKQGGGGGGGGGRGKAPAAEIRGEAARDDVFFADDTFPLLPDFPCLSSPSSSTFSSSSSSNSSSAFTTAAGGGCGGEPSEPASAADGFGELADIDQLLDLASLSVPWEAEQPLFPDDVGMMIEDAMSGQPHQADDCTGDGDTKAVMEAAGGGDDAGDACMEGSDAPDDLPAFFMEWLTSNREYISADDLRSIRLRRSTIEAAAARLGGGRQGTMQLLKLILTWVQNHHLQKKRPRTAIDDGAASSDPQLPSPGANPGYEFPSGGQEMGSAAATSWMPYQAFTPPAAYGGDAMYPGAAGPFPFQQSCSKSSVVVSSQPFSPPTAAAAGDMHASGGGNMAWPQQFAPFPVSSTSSYTMPSVVPPPFTAGFPGQYSGGHAMCSPRLAGVEPSSTKEARKKRMARQRRLSCLQQQRSQQLNLSQIHISGHPQEPSPRAAHSAPVTPSSAGCRSWGIWPPAAQIIQNPLSNKPNPPPATSKQPKPSPEKPKPKPQAAATAGAESLQRSTASEKRQAKTDKNLRFLLQKVLKQSDVGSLGRIVLPKKEAEVHLPELKTRDGVSIPMEDIGTSQVWNMRYRFWPNNKSRMYLLENTGDFVRSNELQEGDFIVIYSDIKSGKYLIRGVKVRRAAQEQGNSSGAVGKHKHGSPEKPGVSSNTKAAGAEDGTGGDDSAEAAAAAAAGKADGGGCKGKSPHGVRRSRQEAAAAASMSQMAVSI

SEQ ID NO: 16257 - protein, 267 aa, Oryza sativa
  Clone ID: TF_OSC4900j.C1.p11.fg
MAASLPLSAAIVGAEESVDKEVLEMEYLFEKFLMPSDLCSNTEWLGIPEEHVRKFGMMLEDRDGYSVIFFQDGVVPGKLWCFRYWKSNGVHGLTKGWRCFVREKGLKAGDTISFFRGSACGRLFICCRLGTHATFASSSTLHHGFSMPPPPARPLVGLQSGMLARDVPSLGQARLHDGNQDGGGAPSRHVPSSGRRVEAQLSRVSSRRQRRTMKHSIPEPTIETPPILESMFLIAAPPAVKCLRLFGVNIYVLPVSSSGQPKQESSP

SEQ ID NO: 16258 - protein, 88 aa, Oryza sativa
  Clone ID: TF_OSC404812j.C1.p6.hg
MQRLVGGRLTWGRVGAFPWRDHAGPLGERGRSDKPSNCRHRCCPDPAGSFSTCDSSRNSSQSYVLTKGWSRFVREKGLCADELLFIDC

SEQ ID NO: 16259 - protein, 268 aa, Oryza sativa
  Clone ID: TF_OSC400044j.C1.p70.fg
MAGVTSKRRSSSASTSSSSGDGAAVSDRPRGVTRKRRSGGRCPRPAASLRPAAPRPSSSDARARTRHKSGICVLSGVISITNGGYNWCRKVNMLDLNRAILDSDHHTAGLRVILQKELRYSDVSQLGRIVLPKVLAQQQEQDVIGAKKAGDQQAATVPQVDEHISTLFPIFPIAQVDDYLSPMAPQVDISAFVPHADENHEIFDGILNSLPEIPVANVRYSDFFDPFDDGMDMANTLNANANQSASLHVTDDKSGHSLIPNPKSGPHM

SEQ ID NO: 16260 - protein, 1214 aa, Oryza sativa
  Clone ID: TF_OSC900160j.C1.p1.gm
MADEGERVCIIVDEMEREDSDNEEADDDASSDEEGDVMATNWANEDFSGLVISEGDHVPWEYKENEVIEGARYAHKDEMKEANGWDEKGLPAKWPDIRSRWCMRHMGANFYKQFKNKHLMELFKRLCAQNQEKKFNELWDKLDELTTKQTDEQSRRPQVEGDEPPIPLGALHDDPPTMRSRSGSSIRNFTQWIENEPKEKWSLLFDTDGSRKCDLRGHTYKKCPKNAEVPSGADASPSRQASDGMAYDTPALLNRGIDRNHRSFPSAVEGAQLGTFRPRTSREWLRVDPRHVPWYALVEAAADDRDPAKRWDADRSLLAALVDRWRPETHTFHLPCGEMAPTLQDVSYLLGLPLAGAPVGPVDGVVGWKEDITARFEQTDLLHPDADDYSVRRSLEAYLLWLFGWVMFTSTHGHAVDFRLVHYPRSIADAQPQDVPQWSWGSAMLAATYRALCEACTKTDAGAIIAGCPMLLQLWAAERFAIGRPVVDSAPYGVGRSTQWPEDGPTMGTYWCRRGRRYAHVQVRRGYPDFVFEFDRLQPSDVIWEPYTEEAVAARAPLGLSSLCTRDQAYWLTILPMVFDIFVEPHCPQRVMRQFGLRQVFPGNVQPTVLPADHSLTRRGQLAGALWAPRVQQYVDDWVLATEEVINELFPHTEENYRDYLRWYLPRTRARVTFTPDAPEPHVAAVTDAYPTHRDRDYFVGADAARDISADITAVQVRLNRAPWTSYLQLVRYNHGLARLPSEQDLDLRHLFRTDLVCLRAPLASEQCDLQHRTSSAFERVRRHDRRFRELRRGVRHLFGRVRQLFLSRSVDPSPTRRDLRYWGLFVSRRLEELQRRTLRSSQRSHLYRQDGLPVPYPRTDSRTPRGTLGHRELSDGEEVSDGEYQAGDDFSGYAVRGRGFVEKEHIFDKVVTPSDVGNLGRLVIPWQHAECYFPRDVPANEREGVVLRFEDDAGNSWRFLYRGSSLTLGWSHFFRKNRLDAGDMVSFYRGASEATRDRLFIHSKRRMHILPTLGYSDPQVHINRLFQLLVRVRTMVSSFGKSGSPSPPNSPLPTVQNFTYKALKDCLQDLHYYSLLSMMGRNHKSQSTSAKIRDTIPTLDALIQLRSLSDPVFRIPAAATSHCILLCRGVLGIMGFLCSDENMKEDHRMLQVPAFDDLNYSAQDKITRMKEQTMPSSLADPIYLLPTAIRNLLYLDLSNCSDIAVGFVGLSQS

SEQ ID NO: 16261 - protein, 321 aa, Oryza sativa
  Clone ID: TF_OSC400021j.C1.p6.fg
MGQMDGGDGGGGGHPYHYQALLAAVHQQTVPFPNPFPAPSSGAEPPHPHNHNHNHNHNHNIHNSHNHNHNHNAAPHPCHTPTPTPTPRGFADWSASTSAFTSLAAHSSTAPSNAVHYSFSPCYAFWTHYMLNKNAYPTSFPAPHDDHLRLANNNHPRDAPGPASSYGVESFTSPSMAPNICTHMPPIEGPISAKEDKKPEILPRVVKSSDELETRNSNVEFHSETVGTLPESKQGHDSRATKLLNSGEYQVILRKELTKSDVGNVGRIVLPKKDAEASLPPLLQRDPLILHMDDMVLPVTWKFKYRYWPNNKSRMYIGFRR

SEQ ID NO: 16262 - protein, 433 aa, Oryza sativa
  Clone ID: TF_OSC900266j.C1.p5.fg
MADTRGSTSSGGGDDRGREGHDDFTGGGQYNRYHRILEAVPSPLVRSENVVHHQYPTGLIHHPSSTMPVAPCSYVPRYTMVPTSAMLPLQHHHRQLQISQENFQDRVPSNNVAAPHLPSNFQDLRPMCNGPPFMSYGQTASNRNVLYQNLTPYSFNAWASNNMPRNPVYTSYHPTAIEDPHATPFHINNHDTDQGFFTVSTSFRVDQSFVHAPSPFPPVSSSSRSFSSAQISNGPTDAKKAKKSDIKDQPIVLRRSDTESEKNDELNQTPASEPSSMSHNSANSTIRFNCREYRVILRKELTNSDVGNIGRIVMPKRDAEAHLPALHQREGVMLKMDDFKLETTWNFKYRFWPNNKSRMYVLESTGGFVKQHGLQTGDIFIIYKSSESEKLVVRGEKAIKPNVIMPIVDCSCKNDLNNSEECGFAISLLTKKT

SEQ ID NO: 16263 - protein, 287 aa, Oryza sativa
  Clone ID: TF_OSC401138j.C1.p1.fg
MYMDLTLGGALLQVEEATEEEEEEEEEEQALGQEPAPAAAAAALVLGRRHGVVVGGGGGGVVVAAEREHMFDKVVTPSDVGKLNRLVVPKQHAERFFPAAAAGTQLCFEDRAGTPWRFRYSYWGSSQSYVMTKGWSRFVRAARLSAGDTVSLSRAADGRYFIDYRHCHRHGGRDISFASAATAMPAAAWPLFGRVQTAAPVSYGGGHGSAAAATMFLDTVAPVAAAGGHRGEVGPSGQRSFRLFGVNVECGGDVDAAAEEEDADDDVDDGDHRRGEEMELVMWTNHR

SEQ ID NO: 16264 - protein, 313 aa, Oryza sativa
  Clone ID: TF_OSC900015j.C1.p21.fg
MAMNHPLFSQEQPQSWPWGVAMYANFHYHHHYEKEHMFEKPLTPSDVGKLNRLVIPKQHAERYFPLGAGDAADKGLILSFEDEAGAPWRFRYSYWTSSQSYVLTKGWSRYVKEKRLDAGDVVHFERVRGSFGVGDRLFIGCRRRGDAAAAQTPAPPPAVRVAPAAQNAGEQQPWSPMCYSTSGGGSYPTSPANSYAYRRAADHDHGDMHHADESPRDTDSPSFSAGSAPSRRLRLFGVNLDCGPEPEADTTAAATMYGYMHQQSSYAAMSAVPSYCRHGWGGFRKHQVEKERGIEETGRELCNYAMLPFVAIQ

SEQ ID NO: 16265 - protein, 530 aa, Oryza sativa
  Clone ID: TF_OSC900266j.C1.p4.fg
MADARGSSSSSGDGGGGEGNGGAGHGDFVGGGQHNWYHGILGAVPPPNVGRQNIVHHQYPAASLIQQHHQSPTMPLPMAQLPYVPQYTVLPTPAVLPSHHHHHGQSQISQENFQDWVPSNNVAAPHVPSAFQDWRQMCNGSAFMPFGQTAANSNVFYQNLTFNSWTSNNMPRNPVYTSFHPAAIEDHHAPLFHSNNHDIDPEFLGNRHLHGVDIAGAPPAKATSPATAGGLLTNTAPATVSQIHARCRRRQIYRCCGLLPRAPPPSDPCAFARAAITAARSARGLLSHLYGGLVFWLVGKRKLGEKRERKRKVVAEMDPPIVFRRSDMESEKNDDNPDQTPVSEPPSMNQNGENLIIRFNCREYRVILRKELTNSDVGNIGRIVMPKRDAEAHLPALHQREGVTLKMDDFKFETTWNFKYRFWPNNKSRMYVLESTGGFVKHHGLQTGDIFIIYKSSESEKFVSSVPFTSTTYGESDGEDYNGDRSGPGAGEVADEDFRKPEFGWYCCAKINRKESEIREQVSKEKVNSN

SEQ ID NO: 16266 - protein, 636 aa, Oryza sativa
  Clone ID: TF_OSC401605j.C1.p26.fg
MAKEEDGGGGPEFVRWREDFVSQERGSRVVHYYLEDAAGASHLAVVGTERSLRHMLYVVSEDFREAQGADGGGPGVFARKWRSRREVVDWLASFLPAKSLASKLSKFGSHMGNDIGLDGYSEPDSFMGHNLGKACSSDIMWSGSSWTCGKQLYHYKAFCRNGTTISTHSFVLVMSEEESRYLAYLEDMYEDKKGQKKVKVRWFHQNQEFACAIPPPPPHPCEVFITPYSQVISVECVDDIATVLTPEHYEKCVNTLPNSSMVGIRFCFRQYSKNKFKRFDLRSLRGYFSQAVVLSLKLPPEQEKDDGSDIIKTFEQWTPGKTKFPKQFERLYSKCLGTKICRGPQEDSIASYQKPSSKQSPRKHLSVKFIGPQNQRMPTYNVGDRIEVLSQDSGIVGCWFRCTVLKSCTNHNKLKVQYDDLQNADDSGRLEEWVPVSTLARPDKLGLRCPERRRVRPRPQQNSLADGTNLLPGAAVDVWQFSGWWEGVLVSADNISADSLQIYFPGENFFSVCQLKNLRISKDWVKSHWVDIEMKPDVLSKIPSVGVQTRQPDNLTSVERPDSRNSAMSDQELAAIQTNSSEDKQTGADQPAEVSLTDMASAFAEDQKQTVLGKRPRDDDAEQHCNGEVGIDVGKL

SEQ ID NO: 16267 - protein, 711 aa, Oryza sativa
  Clone ID: TF_OSC2508j.C1.p1.fg
MEVEAGGRGLAVLPRFRIMENTCVTQWKPLQVSLFGSIVFNENPYDDIEFTDVAASKDVSHTSSVRNNSKEFTWLGPAWLCEKRWKHYRSFCRKGITISVHNFVYILSEEKKRLIAQVEDLYEDTNSTNVVMVRWFDKVDEVGVELPPDVGDREIFFSPGLQDLSVECIDGLAAVLSAQHFEKFQSSPKHSYWQPYICRRQIDEDGVKPFDVTQLQGYWSQEVLRTMFNAASSLKVRFKVTKGASSSDGAQKRKRDAFSETDPQQCVPSAAFGSDSLKNDLEHKTQKQLYPGSRAEVLSQDSGIRGCWFRCFVLKRRGDKIKVRYEDLQDADETGNLEEWVLLTRIAKPDQLGIRIPERPMVRPYHVHSKDPCSFDAGSIVDAWWNSGWWEGIVLQQGNDRRLQVYFPGEKQIADFCEDDLRHSREWAGGKWNSLGERKDITHLLPPTSVHEEGGLLSKPVSQEGNPSSKLESDKRCDDKSLGTKISHDQKHQKRVLADLTNALKFDNLKWRPRKRSRRSGSKRQSDTSSGSGSSSQGDMEESSPCGSFAVLNSAPDEEVCKSSGEPLFMRVSNLTTLLYGFARFFYRSLFSGEPEADDRSSRAAAKWTDGVHEWQGDYGELEVQRGNGVFYCMTVRMSIDCNGCYQRIRRALLQMQEDLDSHLIDRKQQRVSVCGAFVPQDVAIKLRKKTNRRVEILEIKEIDAGDGHRL

SEQ ID NO: 16268 - protein, 816 aa, Oryza sativa
  Clone ID: TF_OSC400493j.C1.p35.fg
MDELAAASAAARRRWVQWEEVVVSNDRGRRLVHYYLRGAAAGGGGGGEVRELAVVGRERSPRHMSYVVQGRFLRSLAAAGVGVGVGVGAAVGAVVAVPSPSRSPLPASAEGGAPRKWRSRREVVDWLSSLVSGCNYGSSSMSNRFNENPYDDIEFTDVAASKDVSHTSSVRNNSKEFTWLGPAWLCEKRWKHYRSFCRKGITISVHNFVYILSEEKKRLIAQVEDLYEDTNSTNVVMVRWFDKVDEVGVELPPDVGDREIFFSPGLQDLSVECIDGLAAVLSAQHFEKFQSSPKHSYWQPYICRRQIDEDGVKPFDVTQLQGYWSQEVLRTMFNAASSLKVRFKVTKGASSSDGAQKRKRDAFSETDPQQCVPSAAFGSDSLKNDLEHKTQKQLYPGSRAEVLSQDSGIRGCWFRCFVLKRRGDKIKVRYEDLQDADETGNLEEWVLLTRIAKPDQLGIRIPERPMVRPYHVHSKDPCSFDAGSIVDAWWNSGWWEGIVLQQGNDRRLQVYFPGEKQIADFCEDDLRHSREWAGGKWNSLGERKDITHLLPPTSVHEEGGLLSKPVSQEGNPSSKLESDKRCDDKSLGTKISHDQKHQKRVLADLTNALKFDNLKWRPRKRSRRSGSKRQSDTSSGSGSSSQGDMEESSPCGSFAVLNSAPDEEVCKSSGEPLFMRVSNLTTLLYGFARFFYRSLFSGEPEADDRSSRAAAKWTDGVHEWQGDYGELEVQRGNGVFYCMTVRMSIDCNGCYQRIRRALLQMQEDLDSHLIDRKQQRVSVCGAFVPQDVAIKLRKKTNRRVEILEIKEIDAGDGHRL

SEQ ID NO: 16269 - protein, 322 aa, Oryza sativa
  Clone ID: TF_OSC10018j.C1.p1.fg
VASDEVAICNNDGKDAKLANISTTKGSSSSTAGNDSGDFKWLGPESHSKKGKSYKSFWRRGFTFMVHDFVYILVQHGNKLVAYVEELYEDNHANKMVQIRRFRTLNSTGIQLSPGVNDREILHSDNLQDIGVECIDGLASVLNEEHFEMFQAIANNTNRQPYLCIRHIDNNSNVKTFDIAQLQGYSEQEIFRIVSGTPPVTVHPDASEGSKNTPRSSARGHHHHRTMENPTASDETNVQATTINVLARNAAPTESASALINSALEKYLEQYFSHGCLVECLSQDSGIRGCWFIGSVIRRCGDRIKVRYQHLQDPETPRANLE

SEQ ID NO: 16270 - protein, 730 aa, Oryza sativa
  Clone ID: TF_OSC900127j.C1.p10.fg
MGNDGEKASKLCKEAGGPSLDSNLAPTIVLALTTVPMGWDNRRRKQASTIMNARGRGARNGNGPNRGRGGGRAHSDVVVGANTTVLATRRWVGLEIDSVPGNEGQRDIVNYYLRCATGVGNGERELAVVGTHHSNRRVTYVVHEPFLQSLKELQVAAVVGVERLMWKSRKDVVHWLNMLISDVASDEVAICNNDGKDAKLANISTTKGSSSSTAGNDSGDFKWLGPESHSKKGKSYKSFWRRGFTFMVHDFVYILVQHGNKLVAYVEELYEDNHANKMVQIRRFRTLNSTGIQLSPGVNDREILHSDNLQDIGVECIDGLASVLNEEHFEMFQAIANNTNRQPYLCIRHIDNNSNVKTFDIAQLQGYSEQEIFRIVSGTPPVTVHPDASEGSKNTPRSSARGHHHHRTMENPTASDETNVQATTINVLARNAAPTESASALINSALEKYLEQYFSHGCLVECLSQDSGIRGCWFIGSVIRRCGDRIKVRYQHLQDPETPRANLEEWLLVTRTANPDTLRIRLSGRTRIRPHNMSERENPSTISVGTVIDGWLYDGWWEGIVLKVNDARRLLAYLPGEKKMVLFRKDQLRHSLEWIDNEWKNFAHREDIARRIPSAEDLRIRVITAREVLTREEVMKQLEGLKTNKGGSNSAKPAAEKGSSSSATKKTTPDLIRHATNDLGSLNFKHVGVPASEEIRTDNKGSQVNLENVLKSDSLKWTERKARGSFGPRM

SEQ ID NO: 16271 - protein, 557 aa, Oryza sativa
  Clone ID: TF_OSC3380j.C1.p2.fg
MKDGRDEEVATDAVGAGGVDVGGETSKLIDQDCMAILDVLARRLMSGESEPYIGKIIKIWQQNQAKKVKILWFFLPDEIRKHLSGPVMEKEIFLACGEGVGLADINPLEAIGGKCTVLCISKDERNRQPSPRELAMADYIFYRFFDVNSCTLSEQLPEKIAGVEGIFLLIPKVEQVTSCSDQEVHGVDQKMLNVPVPLPQSTVMEDESPVAAVSLPPSVFKEENVASAIPFPQPVVKEESAAAAIPPPHVALKKESVSKSTENITKPAQKVLPGERPPKRVKFSENVTVQNVPLDVPERPSRTGPLELAGRQADRSKWFKIPWDTRLRNADEQGTLVYIQNLDIQFAAADIEELIRDALQLNCIAKPINHPTYDDPNNGKAYAIFKTKSAADSAISKINSGLVVGGRPLYCSKGLLKVPKPSETLLGHLTINNIRMGIRQREEQVLMLSYEVCSISFLCLNIFAQPLFFLQKKAVSTSHCSQPNTMEYDLALDWMLVRAKQETKFRTLHKLLNAATGLGRLKIDTANSGDRLVGIVGIAKDDHVFVLDALGEPYAGS

SEQ ID NO: 16272 - protein, 557 aa, Oryza sativa
  Clone ID: TF_OSC4791j.C1.p11.fg
MKDGRDEEVATDAVGAGGVDVGGETSKLIDQDCMAILDVLARRLMSGESEPYIGKIIKIWQQNQAKKVKILWFFLPDEIRKHLSGPVMEKEIFLACGEGVGLADINPLEAIGGKCTVLCISKDERNRQPSPRELAMADYIFYRFFDVNSCTLSEQLPEKIAGVEGNLLLNSKVEQVTSCSDQEVHGVDQKMLNVPVPLPQSTVMEDESPVAAVSLPPSVFKEENVASAIPFPQPVVKEESAAAAIPPPHVALKEESVSKSTENITKPAQKVLPGERPPKRVKFSENVTVQNVPLDVPERPSRTGPLELAGRQADRSKWFKIPWDTRLRNADEQGTLVYIQNLDIQFAAADIEELIRDALQLNCIAKPINHPTYDDPNNGKAYAIFKTKSAADSAISKINSGLVVGGRPLYCSKGLLKVPKPSETLLGHLTINNIRMGIRQREEQVLMLSYEVCSISFLCLNIFAQPLFFLQKKAVSTSHCSQPNTMEYDLALDWMLVRAKQETKFRTLHKLLNAATGLGRLKIDTANSGDRLVGIVGIAKDDHVFVLDALGEPYAGS

SEQ ID NO: 16273 - protein, 719 aa, Oryza sativa
  Clone ID: TF_OSC26838j.C1.p4.fg
MAPSSPSSAAAPTRTFTRKRAASAFAFAKATDEPSTKRTRRPKAETKPRKKKDEVKEEEKPPMEDDACGEEPDAEEMALGEEAEAEEAEAEQKQLDAPAPGVARKRVAQPSRVRHGSDGDHDPEFVGDPFPAKEARDKWPQRYQRNAATRRPDEEEDIKARCHYSSAKVDGTLYCLHDDVYVKAEEDKADYIGRITEFFEGTDHCHYFTCRWFFRAEDTVISSIMMENADDEKHDLKRVFLSEEKNDNVLDCIISKVKIVYIDPNMESEAKARRLADCDLYYDMSYTVAYSTFANIPLGKVVSDSEASSVGKATLLDLYSGCGGMSTGLCLGAALAGLNLETRWAVDFNSFACESLKYNHPRTEVRNEKADEFLALLKGWHSLCDEYVKKDIDFSSAGASENEEDDDEPLEKDEFVVEKLAGICYGGSGREDGLYFKVQWKGYGREEDTWEPIENLRDCPLKIKEFVQEGYRRKILPLPGDVDVICGGPPCQGISGFNRFRNRKEPLKDEKNKQMVTFMDIVAYLKPKYVLMENVVDILKFADGYLGRYALSRLVAMKYQARLGMMVAGCYGLPQFRMRVFLWGALPTMVLPKYPLPTHNVVVRGGAPNAFSVNNHQPNEVMEYGSSPKTEFQRYIRLSRKEMLDSSFEGKDGPDLGKLLDHQPLKLNKDDHERVQQIPVKKGANFRDLKGVRVGANNIVEWDPDVPRVYLSSGKPLAP

SEQ ID NO: 16274 - protein, 842 aa, Oryza sativa
  Clone ID: TF_OSC400269j.C1.p65.gm
MAPSSPSSAAAPTRTSTRKRAASASASAKATDEPSTKRTRRPKAETKPRKKKDEVKEEEKPPMEDDACGEEPDAEEMALGEEAEAEEAEAEQKQLDAPAPGVARKRVAQPSRVRHGSDGDHDPEFVGDPFPAKEARDKWPQRYQRNAATRRPDEEEDIKARCHYSSAKVDGTLYCLHDDVYVKAEEDKADYIGRITEFFEGTDHCHYFTCRWFFRAEDTVISSIMMENADDEKHDLKRVFLSEEKNDNVLDCIISKVKIVYIDPNMESEAKARRLADCDLYYDMSYTVAYSTFANIPLEASSVGKATLLDLYSGCGGMSTGLCLGAALAGLNLETRWAVDFNSFACESLKYNHPRTEVRNEKADEFLALLKGWHSLCDEYVKKDIDFSSAGASENEEDDDEPLEKDEFVVEKLAGICYGGSGREDGLYFKVQWKGYGREEDTWEPIENLRDCPLKIKEFVQEGYRRKILPLPGDVDVICGGPPCQGISGFNRFRNRKEPLKDEKNKQMVTFMDIVAYLKPKYVLMENVVDILKFADGYLGRYALSRLVAMKYQARLGMMVAGCYGLPQFRMRVFLWGALPTMVLPKYPLPTHNVVVRGGAPNAFSVNNHQPNEVMEYGSSPKTEFQRYIRLSRKEMLDSSFEGKDGPDLGKLLDHQPLKLNKDDHERVQQIPVKKGANFRDLKGVRVGANNIVEWDPDVPRVYLSSGKPLVPDYAMSFIKGRSLKPFGRLWWDETVPTVVTRAEPHNQARVLTVRENARLQGFPDYYKMFGPIKEKYIQVGNAVAVPVARALGYSLGLAYQRESEGSSPLFVLPDSFTEVGRQAAPARASSVGIPVGEVVEQ

SEQ ID NO: 16275 - protein, 227 aa, Oryza sativa
  Clone ID: TF_OSC402051j.C1.p12.fg
MAKTKQGKRDVDSYTISGTNKVVRVGDCVLMRPVDSDNQPYVARVEKMELDGRGSVRVRVRWYYRPEESKGGRRQFHGAKELFLSDHFDMQSANTIEGKCVVHSFKNYTKLDNVGPEDFFCRFEYKAATGAFTPDRVAVYCKCEMPYNPDDLMVQCDDCKDWFHPSCMSMTIEQAKKLDHFVCSDCVKENGAKRPSHAYAGSTKYEPKWIQGFSLSTGISLLLFPFL

SEQ ID NO: 16276 - protein, 625 aa, Oryza sativa
  Clone ID: TF_OSC400543j.C1.p17.fg
MGRRRRFAQLATTSDDDDDDAPAADAPPKAKPPPPPSSSSGPKKPKQRRLSSAAADDDDDVEEDDLELEEEEEDEKDLEEMRRNEEEERREETQTRRRRRRRGRKPKRPAEESEEDEEEEEEEAKAEEAREEENTEAVPIGEPVKITGRGKKQRKHYTSFEYEGNTFELEDPVLLTPEDSKEKPYVAILKDITETEGSLSVTGQWFYRPEEADKKGGGSWKASDTRELFYSFHIDDVPAESVMHKCVVHFIPQHKKIPSRKEHPGFIVQKVYDTVAKKLWNLTDKDYEDNKQHEIDLLVKKTIDRIGQLSDIEPADAPGDNNDQLSNKRGLRKRPVLPIDVSRDDALAGKSEQFGKAETPGSDKLKNYATLVKYKAVTGDQYRDRWLDKLVDTIPLTSKESAGASHADPGGATKSSTNGSSAKEDNEKSYSPDVIVSIMASLERSTYEALGSDFQKYNQKLRQLLFNIKNSPVLRNRLMNKELDPPVLLTMSPDELKVGLTAAERTSEPEESRKLQMTDARCVRCAEKEVGVSDIIHAGHGDRYQKVVASRRENEVVNVGGDRTLRLARLVASGKILRVCDVLKESFQRWRWPRMSLIDLVGQHRMEWEVVASGLDVRVELVRAW

SEQ ID NO: 16277 - protein, 59 aa, Oryza sativa
  Clone ID: TF_OSC27144j.C1.p1.fg
MAKTKQGKKDVESYTIKGTTKIVRVGDCVLMRASDTEKAPYVGRVERLETDGRGSVRVR

SEQ ID NO: 16278 - protein, 844 aa, Oryza sativa
  Clone ID: TF_OSC400897j.C1.p16.fg
MDLSATPSRSKSGLRSSPRKPVAAPAVAQMDLSTPSKPTPRRKPKAPPVAAPMSPVTPSSVRRSSRLLETPTKVTSETPVKPTPTPKRKRAAPSPSPKTPTQSEPKRQRQRQRQRQQPKKPKKRAYYRKVVYDGGEFAAGDDVYVKRRDGAESDAEDPEAEECRVCFRAGAAVMVECDVCLGGFHLRCVRPPLRRVPEGDWACPYCEAERAGKAIERPKPPEGKRIVRTAKEKLLSSDLWAARIESLWREPDGIFWAKVRWYIIPEETAAGRQPHNLRRELYRTNDLADIEMETILRHCYVMSPKEFKDASDQGDDVFYCEYEYDIHWHNFKRLADIDDEPETKEDPGDEPYNAGNDYVSDSDEDSEYDEEEEPTKCSSARTHQSHALAANLRKGRTYGLQKIGIRKIPEHVRCHQKTNLEKAKATLLLATLPKSLPCRDKEMEEISAFVKDAICNDQCLGRCLYIHGVPGTGKTMSVLAVMRRLRSELDSGNLRPYSFIEINGLKLASPENIYKVIYEQLSGHRVGWKKALHYLTEHFSGGTKIGKQANQPIILLIDELDLLLTRNQSVLYNILDWPTRPNSNLVVIGIANTMDLPEKLLPRISSRMGIQRLCFGPYNYRQLQEIITSRLKGIDAFEDQAIEFASRKVAAMSGDARRALEICRRAAEFADYRVKQSGHTSVNRGKNVVCMGDIEAAIQEVFQAPHIQVMKNCPKFGKIILVAMVHELYRSGLGEVMFDKLAATVLSWCHVNRELLPGYDTLLKICCKLGEGKIILCEEGTKHKLQKLQLNYPRNPQIFHGCPSTCEVYTCSGCTFPAFHSSTPGVGEQRSQLLALDQQSLKAI

SEQ ID NO: 16279 - protein, 236 aa, Oryza sativa
  Clone ID: TF_OSC101747j.C1.p25.fg
MAKSRPPKRILESYTIKGSDKVIKREAPPPTSPTDYGSSVSGDCVLMRASDTSKPPYVARVEAIEAAGSRGTNVRVRVRWYYRPEESMGGRRPFHGAKEVFLSDHYDVQSADTIEGKCNVHSFRSYTKLDSVNAEDFFCRFEYKSATGSFVPDRIAVFCKCEMPYNPDDLMIQCEECSDWFHPSCIGMTIKDAKKLEHFFCQSCTAENGKMAENSHEATAQSEEKVSFDVMEKLKV

SEQ ID NO: 16280 - protein, 248 aa, Oryza sativa
  Clone ID: TF_OSC16028j.C1.p4.fg
MAKSRPPKRILESYTIKGSDKVIKHYGSSVSGDCVLMRASDTSKPPYVARVEAIEAAGSRGTNVRVRVRWYYRPEESMGGRRPFHGAKEVFLSDHYDVQSADTIEGKCNVHSFRSYTKLDSVNAEDFFCRFEYKSATGSFVPDRIAVFCKCEMPYNPDDLMIQCEECSDWFHPSCIGMTIKDAKKLEHFFCQSCTAENGKMAENSHEATAQSEEKLTNFQYLMTQSTSWETVPIYSYGSTKSGVILQL

SEQ ID NO: 16281 - protein, 226 aa, Oryza sativa
  Clone ID: TF_OSC423524j.C1.p14.fg
MAKSRPPKRILESYTIKGSDKVIKHYGSSVSGDCVLMRASDTSKPPYVARVEAIEAAGSRGTNVRVRVRWYYRPEESMGGRRPFHGAKEVFLSDHYDVQSADTIEGKCNVHSFRSYTKLDSVNAEDFFCRFEYKSATGSFVPDRIAVFCKCEMPYNPDDLMIQCEECSDWFHPSCIGMTIKDAKKLEHFFCQSCTAENGKMAENSHEATAQSEEKVSFDVMEKLKV

SEQ ID NO: 16282 - protein, 1407 aa, Oryza sativa
  Clone ID: TF_OSC101037j.C1.p10.fg
MEASVSQIRRSPPRIEKRKKKNHNSLSGKAPPTRGNCDSLPPVWNAKSASECHWTRRLTSNYLSLVVVVVGEELPPCFAPPPMETPPPDPVSPPPPAADEGSPGGDDGAEDAGGFSAGLDSLWTALFGSPEELEPMWSPPRGFGVGAEFAAAEVEPEIMDVAGGPWDGAPWRSSGVVAGEGAATALVPPTAAAGFAEFEPAAPIDSYPAGAAAASLGDVPEVSALDSGVDCSPDPPPSSSPPVDFDARGFDPVADSAPAMESPLPPSVASSEANLDGRMLDCTLNSVPSPPLASPYEVGLGAEDPIKDSSPSVAWGTTMDAKDPEVDATCANGTALRRSRRIMKIKSAASSMPLNQNGDSSRASKRRVADSRKSRSSEGSKLPAFTGPISVNTVDLINGVKVQGLQEIVAVENVSSSYDNNQKAGGLYNQVVVALPAASNSLLKDKGASVLPRRKTRLASKVLVNSDRVSAISPVVNGGPPVQKSDVCIPTKKHKLAVEECLTSLDGVDGGGIVLCNSKLKSAKSRVVSKTPQGRGRRSPQPPKTQRARTLSVKYLEKLKRAENNNNNGSMSKSPRVPMIPENNGSMSKSPRVPIIPELSTKHELVLDKHMVDSVMLETDDGSCFFVGDAVPDDEARKQWPHRYEINDQIMKKDKRTSSQTFAKLVTVSFCVVFMYVYLQMLDFRGPEGKPNYIGRLLEFFETKTGECYFRVQWFFTAEDTVIGEQAQSHDPRRLFYSDLTDDNLLDCIVSKVTIVQVPPSVDGKSKSVPSSDYYYDMKYSIDYSTFSTIEMEDTDDLMQSCYTSRINDKMKKIDVNKKHKSPVLEKMELSLLDLYCGCGGMSTGLCLGARGGGVNLSARWAIDDDEIACESFRNNHPETRVRNETTDDFLELLKEWEKLCKTYVKHSRTKACVDSTTESNNETPDCSTVPPEEFEVWKLVDICFGDPNKVSKHGLYFKVRWKGYGPHHDTWEPVEGLRNCKEAIRDFVIEGHRQRILPRPRRNIAVFLLRPSKFPLGDVDVVCGGPPCQGISGYNRNREFEAPFKCEKNKQIIVFMDVVQFLKPKYVYMENVLDILKFADATLARYALSRLVAMHYQARLGIMAAGCYGLPQFRMRVFLLGCHSKEKLPPFPLPTHEAIVKNGCPLAFERNLVGWPNDTPMQLARPIVLEDILSDLPEVANGESRDEMLYVKGPQTEFQRYIRSFNVEVHGPRAHVTKDSKSSKLYDHRPLVLDNDNYQRILQIPKRKGANFRDLSGVIVGPDNVARLDPTKERVLLPSGRPLVLDCILAYENGKSLRPFGRVWWDEVVGTVLTVPNARMQALIHPAQDRLLTIRESARLQGFPDNYRFRGTVKDRYRQIGNAVAVPVGRALGYALAMAYLKKSGDDPLMLLPPNFAFSHDLRGFA

SEQ ID NO: 16283 - protein, 260 aa, Oryza sativa
  Clone ID: TF_OSC419703j.C1.p6.fg
MAKTRQPQKRVLESFTIKGPDGVIKREDPFLDPFIYLSRFLLFWGKFWIVESRYYLRFRSIVEMNTGDTVLMMAPDSSKKPYVARVEEIEATGPQASQVKIKVRWYYRPEESIGGRRPFHGSKEVFLSDHYDSQSADTIEGKCYVHTFRDYTKLRSVSAEDFFCRFEYKSATGSFVPDRIAVFCKCEMPYNPDNLMIQCEDCSDWFHPSCVEITIKEAKKLEHFYCKSCIAENGKDLQKSNGATVQSEEKGFRFYPYFFK

SEQ ID NO: 16284 - protein, 1544 aa, Oryza sativa
  Clone ID: TF_OSC101706j.C1.p3.fg
MTGKKRCRAKPQKKDEDTTDKGKLDEGPLDATKEMNGVGKGDSRAACKRPRRAAACSDFKEKSVRLSDKSSVVATNGNKMEEEEMDAVKLTKLGPEVQRPCRKLIDFILHDADGKLQPFEMSEIDDFFITALIMPMDDDLEKDRQKGVRCEGFGRIEDWAISGYDEGTAVVWVSTEVADYECVKPAGNYKSYYDHFYEKAQVCVEVYRKLARSVGGNPNLGLEELLASVVRSINAIKGYSGTLSKDFVISNGEFVYNQLIGLDETANTDDEKFATLPVLLALRDGCKSRVEVSKLQPNISNGSLKINDAECKEVSEDDDEKLARLLQQEEEWKMMKQRGKRGTTSQKNVYIKISEAEIANDYPLPAYYKPSSQEMDEYIFDSEDSFYSDVPVRILNNWALYNADSRLIPLELIPMKAGAENDIVVFGSGFMREDDGSCCSTAESAKLSSSSSSNHQDAGVSIYLSPIKEWVIEFGGSMICITIRTDVAWYKLRQPTKQYAPWCEPVLKTARLSVSIITLLKEQSRASKLSFADVIKKVAEFDKGSPAFVSSNVALVERYIVVHGQIILQQFSDFPDETIRRSAFATGLLMKMEQRRHTKLVMKKKVQVMRGENLNPSATMGPASRRKVMRATTTRLINRIWSDYYTHHFPEDSKDADVNEAKEIDDELEENEDEDAEEEAQIEEENVSKTPPSTRSRKLVSQTCKEIRWEGEAIGKTPSGEALYKCAYVRELRINLGRTVALEDDSGELVMCFVEYMFQKLNGAKMVHGRLLQKGSETVLGNAANERDLFLTNECLEFELEDIKELMSVNLQSLPWGHKYRKENAEADRIERAKAEDRKKKGLPMEYLCKSLYWPEKGAFFSLPHDKLGLGNGFCSSCQQKEPDCDELQILSKNSFIYRNITYNVNDYLYIRPDFFSQEEDRATFKGGRNVGLKPYVVCHLLDVHEPAGSRKIHPASTKISVRRFYRPDDISSAKAYVSDIREIFLLTLALILFLDQVYYSENIVKVPVDMIEGKCEVKKKIDISNSDVPVMVEHEFFCEHFYDPATGALKQLPPNVKLMSVQQKATGALKKNKGKQICESDQVDSDKCTKVSKENRLATLDIFAGCGGLSEGLQQAGVSFTKWAIEYEEPAGEAFTKNHPEAAVFVDNCNVILKAIMDKCGDADDCISTSEAAEQAAKFSQDNIMNLPVPGEVEFINGGPPCQGFSGMNRFNQSPWSKVQCEMILAFLSFAEYFRPRFFLLENVRNFVSFNKGQTFRLTVASLLEMGYQVRFGILEAGTFGVAQSRKRAFIWAAAPGETLPDWPEPMHVFASPELKINLPDGKYYAAAKSTAGGAPFRAITVRDTIGDLPKVENGASKLLLEYGGEPISWFQKKIRGNTIALNDHISKEMNELNLIRCQRIPKRPGCDWHDLPDEKRNVNHYERVQVKLSSGQLVDLIPWCLPNTAKRHNQWKGLYGRLDWEGNFPTSVTDPQPMGKVGMCFHPDQDRIITVRECARSQGFPDNYQFAGNIQSKHRQIGNAVPPPLAFALGRKLKEAVDAKRQ

SEQ ID NO: 16285 - protein, 1861 aa, Oryza sativa
  Clone ID: TF_OSC419704j.C1.p1.fg
MVRRASVAACLTCPLCGRLLRDATTISECLHTSYGIFNCVLFRVDHSMQFVRSRIFPFKRRKVENPEIICPVASPVKRKERSLSSLTIPAPQVSIQKCLTKRRTKASCLRNFPLHSTSRGSKDTSKKLGGWRPLGCQLKLGKDKKSLKSSVKDTNRTKSKSGDTDDGAPASKAKAREPFTRYGRAAKRTGRKKLLMLKNKKKRFKAKQPSKKRRFRALWFYLLAAFDQRGVPTLPQLPAKYLRIKDVDLPASIIQKYLAQKLNLSSETEVEVLCGGKVVNQGMTLHDLADCWLEKGPKSRMRSSFCLCLGCLWGFVADRGVVGRADRGRVMRGAMAKSPRSVVTTGTKRRRAKVHKEDEPVENENLESEFDVSKKESNGATEPGNEPVASKRPKRAAACSNFKEKSLDLSEKDSIITIKESRVEEKEIEAVNLTRTGPEDGQPCRKIIDFILHDGDGNLQPFEMSEVDDIFITALIMPLDDDLEKDRGKGICCSGFGRIENWAISGYDEGAAVIWVSTETSDYKCVKPASSYRSYFEHFSEKARVCVEVYKKLARSVGGNPQVDLEELIAGVVRSINSNRSFNGTVTKDFVISSGEFIYKQLIGLDHTAGNDDEMLATLPVLVALKDECKSRAGFTHLPAMPSNGTLRIKDGQDKGLTEDEDAKLARLLQEEEEWKMMKQRGKRGTSQKNIYIKICETEIANDYPLPAYYKPYNQEMDEYIFDSDIGMYSDDVPVRILDNWALYNSDSRLISLELIPMKAGAENDIVVFGSGFMREDDGSCCSTAELAQLHSSSSKSGREDPGVPIYLSPIKEWVVEFGGSMICITIRTDVAWYKLRQPTKQYAPWCEPVLKTARLAVSIITLLKEQSRASKLSFAEVIKKVAEFDSRHPAFISSKAPTVERYVVVHGQIILQQFADFPDESVKRCAFITGLLAKMEESRHTKLAIKKKSQQMRGENLNPSAKMGPILRKKLMRATTTMLISKIWGEYYATYFPGDTKEEDQNEPKEIDDDQEENEDNDAEEEVNVQDEKATRTPPSTRSRKSSADTRKEIKWEGQTAGKTVSGEVLYKCVIVQDLSISVGATVTTEDDSGETIMCFVEYMYEKLDGKNMIHGIILQEGSQTVLGNAANDREVFLTNDCLEFEASDIKELVTVNIQSLPWGHKYRKENSEAKRIEKAKAEERKRKGLPVEYICKSLYWPEKGGFFSLPYDKIGNGTGICSSCERKPVGNEFKLLSESSFVFENITYNIHDFLYIRPEFFSQGEGHETYKAGRNVGLKPYAVCHLLSVHGPAGSRKANPESTKVKVRRFYRPDDISSTKAYSSDIREVYYSEDIISVPVVMIEGKCEVRLKDDLPNSDLPAVVEHVFCCEYLYDPANGALKQLPPNVRLVTLTRKVPASKKNKGKQICDIELGGSDKPKDGQSENCLATLDIFAGCGGLSEGLQRSGLSLTKWAIEYEEPAGDAFGENHPEAAVFVENCNVILKAIMDKCGDSDDCISTSEAAERAAKLSEDKIKNLPVPGEVEFINGGPPCQGFSGMNRFNQSPWSKVQCEMILAFLSFAEYFRPRFFLLENVRNFVSFNKGQTFRLTLASLLEMGYQVRFGILEAGAYGVAQSRKRAFIWAAAPGETLPEWPEPMHVFASPELKITLPDGKFYAAVKSTAAGAPFRSITVRDTIGDLPAVENGAGKPTIQYGSGPVSWFQKKIRSDMASLNDHISKEMNELNLIRCKHIPKRPGCDWHDLPDEKVKLSTGQMVDLIPWCLPNTAKRHNQWKGLYGRLDWEGNFPTSVTDPQPMGKVGMCFHPEQDRIITVRECARSQGFPDSYRFAGNIQNKHRQIGNAVPPPLAYALGRKLKQAIDAKR

SEQ ID NO: 16286 - protein, 1614 aa, Oryza sativa
  Clone ID: TF_OSC400546j.C1.p3.fg
MVRRGAGGRRGGIGGGDDARLCMGGAKAADGREFRVGDCALFQAVEVPPFIGLIRWIEKKEEGFPKLRVSWLYRPADIKLNKGTQLCAAPNEIFYSFHQDETSAVSLLHPCKVAFLRKGVELPAGISSFVCRRVYDIDNKCLWWLTDQDYINERQEEVNRLLHRTKLEMHAAVQSGGRSPKRLNGPSSAQQKSGSDGAQNCGLSKGKKRDRGEQGTDPAKRDRERPLKAEDGESGNFKVENLKSEITKITEKGGLPHAEAVEKLVHLMQLDRTERKIDLPGRVILADIIAATESPDCLGRFVQLRGLPVFDDWLQEAHKGKSGEAGSPKETDKPMEDLVLALLRALAKLPINLTALQSCSIGKSVNHLRSHKNPEIQKKAKCLVENWKKRVDAEMKSNDVKPVVSGQAVSWPGKPGFPEISSAGNRRSGSSESSLKSPVSQLSSSKALTSKPVAADAAAKSSPVISGSSKLQHMQPGNAVTNLKEQPSKSTGGTCGSELPAVKEEKSSSSSQSLNNSQSCSSEHAKTIGSSKEDARSSTAASGVAYKTSGSSSRVHRRTNNGLLGSGIQKEAAVARSSSLDHSSVQEKVSQSGTACEKGADIQSDQGNSHRLIVRFPNPGRSPARSASGGSFEDPSFTGSRASSPVADKHEQSDRRVKMKTENSNPHLGNDTNAESWHSNDVKGASVSEEGDKSPRAMLTDDSKTTEGAGRDVPVSRVACSSYANEKGICSSETGLTKLFNPMNALIEIKYSEASHSLQAGDDTAMNLLASVAGEISKSELISSSPSPRNSSANEQGCEGDNIGKLKVECDVSLPQHAGPSNEVEKVISEKSEKSGVGLVGKELHREDVNMLSVNNLLSQGDKGTTSAGSSPLPEIDSKAKTENREVEDTDKCSHPPSRGDDGVKSNAKQPIGFKIDTNSNIKSSTTSEYRSAFTVRGKVEDGCTTSSDVGSTLGDQCKLAVSNRKMLPAEEPLCGGDKQAHGLLKPTDQKHLLGLPYYSEHIDKSGDSTANKLKLKPSFSSSTVEVNKADGLLVGSNTVLKEDEKKEHPADVTKLAVATGVKHGPENGISSKESKDNSSESSSHTRPGGTVSQETEHSAQRSSKKSSDDAGGKDDLVSSDDGSSFSAKTRSNATAKLDFDLNEGIPGDEGHLSEPATSPAVCSSAIHLPRPSPFVSPISSGLPAPIAAPAKGPFVPPENLIRLKSETGWKGSAATSAFRPAEPRKIFEMTLSASGILVSDAAGKNRPALDIDLNVADEQFLEEDVSQSSVQTTGSESGNTRRSNGPVRSVGFELDLNRADEVAENGQIVSNTNHRVEVPLLSRPLPGVFSSSDANSSRDFDLNNGPTLDEAGTEHAPRSLSSKNTSSIPFLPQVASMRMNSAEMSNISPWFASANACAPVAIKSFLPSRGEQPHPVETAAGSGTQRIITSMADGVQHGSDPSRTPVISTSPTMMFHPPAYQYAGFPFTPSVHLQAPGFSIGSTSYANSAPGGIPYFPTIAPTLVGPAGALPAQHTRQYAINLPEGSSTVGHDNNRKWGRQGLDLNSGPGSVDVEVKDDRVTLPVRQNFIAPPHAFVDEHTRMYQMPPGVGIKRKEPEGSWDAERSSYKQLSWQ

SEQ ID NO: 16287 - protein, 211 aa, Oryza sativa
  Clone ID: TF_OSC900107j.C1.p10.fg
MAKTKQGKKDVESYTIKGTTKIVRVGDCVLMRASDTEKAPYVGRVERLETDGRGSVRVRVRWYYRPEESKGGRRQFHGAKELFLSDHFDTQSAHTIEGKCVVHSFKNYTKLDNVGPEDFFCRFEYKAATGAFTPDRVAVYCKCEMPYNPDDLMVQCEGCKDWFHPSCMGMTIEQAKKLDHFLCADCVKENGTKRPSNSYPASSNSDSKVII

SEQ ID NO: 16288 - protein, 1761 aa, Oryza sativa
  Clone ID: TF_OSC401817j.C1.p11.fg
MEAEAEAVADLDEIDREMSRAESRKRQRRTAKEKPGARKGATEWKPEDVEKAAAAEGVAELDEIDREMPRPELRKRQRRTAKEKPSAHEGATEWKPEDVEKAAAQEPEGTELDSGLSPAESRGKRQRGVEKVKRRTRKKTAKEKTKETTEKSAAQAPEKMKVNDAGGALAEDVCADEPDAEQMAMEEEEEAADVLEAEERMGKCVGEGSAEKAATRKRVARPSTARRVEDSDDHFVGDPVPDDEARQRWPVRYSRKGSDSLLKQEPDEDEEMKARCHYLAANVDDEIYHLDDDVYVKAGPDEENYIGRITEFFEGVDRGSYFSCQWFFRTADTVISSKLLKVHDHRHNHKRVFLSKEKNDNLIECIVSKVKIAHVDPNMTPQARAHAISDCDLYYDMSYSVAYSTFANLPADNDGALGSEATSNISCDDADNSSKGKLSADIVAPYSEQTETASLLDLYSGCGAMSTGLCLGFAFSGINLETRWAVDINKYACACLKHNHPYSQVRNEKTEDFLALIQQWDALCRKYVVHKNDTLEPSIDMPLNDADDVNEPLPEDIFDVEELLEICYGDPSNTGKNGLWFKVRWKGYDPSYDTWEPIDGLSDCPERIKEFVEKGHKENILPLPGAVDVICGGPPCQGISGFNRFRKHNDPLEDEKNKQLVVFMDIVKYLRPKYVLMENVVDILKFADGFLGRYAMSCLVAMNYQARLGMMAAGYYGLPQFRMRAFLWGALPSMVLPKFPLPTHDAVVRGIVPTTFSQSVVAYNEVDTRCLRKALLLADAISDLPKVGNDQPKDVIEYSVAPKTEFQRYIRNNRKDIQDYSFRGDDPSEEGKLFDHQPLKLNKDDYERVQRIPVKKGANFRDLKGVIVGPDNTVRLDPNISRERLSSGKPLVPDYAISFVKGKSTKPFGRLWWDETVPTVVTRAEPHNQIILHPSQDRVLTIRENARLQGFPDYYRLIGPLKEKYIQVGNAVAIPVARALGYALGLAYRGESDGDRAVLKLPESFIYADQETVVKSSAGTPGSEIADSEQLFEYFINPNFFCMMFAFLKVNVVIPLILDSKMGLSRRGAEEGEARRAVPFQNILSWEGWNRLDHRRGEIRLDVRREMDDSPLDNLFDGNGLDSSAGADSSSSTGSPPSSTSSSPPSSQSPPPGSSPPPASPPPSTPSAPPTNSSGSAPSPPSPSQSAPPANTGGGGSPPPSHGSPPAPKAVQSQPAPKRSGDGGSSSDSGSSKEGGSSSDRGKSESNGNRPGPEAAIIAGMVIGFFTFALLLAIVACVCCSKKKKRPPHMHMPYYTDENGKVYYANSMPRWQNSVDQGGGWHAQYSPGQAPPSSEMSGSHGAGPLPPPSPGMALGFSKSSFSYDELALATGGFSSANLLGQGGFGYVYRGVLAGSGKEVAVKQLKAGSGQGEREFQAEVEIISRVHHRHLVSLVGYCIAGSSQRLLVYEFVPNDTLEHHLHGLHIFPALFPAIVTRHSEGRAGDGLDDEARHRARLSQGPRVPSRRFLQGQILSVRPSNDLICCIVVVTYEGHPRIIHRDIKAANILLDENFDAKVADFGLAKLTTDTNTHVSTRVMGTFGYLAPEYASSGKLTDKSDVFSFGVMLLELITGRRPVDPTNYMEDSLVDWARPLLARALSEDGSFDELIDQRLENKFDRLEMERMAACAAAAVRHSAKRRPKMKQIVRALEGDASLDDLNEGVKPGQSMMFSTGSEYDSGNYASDINRLRKVAFESSIEDSSEYGTHSSADSGEPPRRQQHR

SEQ ID NO: 16289 - protein, 1536 aa, Oryza sativa
  Clone ID: TF_OSC400546j.C1.p2.fg
MDGREFRVGDCALFRAVDVPPFIGLIRWIEKQEEGYPKLRVSWLYRPADIKLNKGLQLDAAPNEIFYSFHQDETSAVSLLHPCKVAFLRKGAELPAGTSSFVCWRVYDIDNKCLWWLTDRDYINERQEEVNRLLHRTRQEMHTAVQQGGRSPKRLTGPSASQQLKAGSDGAQNCGSSKGKKRERGEQGIDQIKRDRDRTLKTDDTEPGNLKGDNMKSEIAKITEKGGLPHAEAVEKLVHLMQLDRTERKLDFAGRVMLADVITATENPDCLGRFVQLRGLPVFDDWLQEAHKGKSGEGGSPKETDKPMEELLLALLRALAKLPINLNALQSCSIGKSVNHLRSHKNPEIQKKAKCLVENWKKRVDAEMKSNDAKPVVSGQAVSWPGKPGFAEISSAGNRRSGSSEPNLKSPVSQLSSSKALTVKPGASDTTVKSSPLISGSSKLQHIQPGNAVTNLKEQPCKSSGGTCSPELHTVKEEKSCSSSQSLNNSQSCSSEHAKTIGSSKEDARSSTAASGIAGRTSGSSSRVHRRTNNGILSSGGQKEATVARSTSLDRSLLPEKASQSVTACEKGTDTPSDQGNGHRLIVRFPNPVRSPARSASGGSFEDPSFTGSRASSPVLADKHEQSDRRVKMKTENSNPHLGNDTNAESWHSNDVKGASVSEEGDKSPYAMLTDDRSRTTEEAGKDACASRVVCSDANEKAACSSENGGRNSFNPMNALIEIKYSEASHSLQAGDDTAMNLLASVAGEISKSELISSSASPRNSPGNEEGCEGDNIGKLKVQSDMGLSRHAGPTNDAEKIISDKGEKIGAGLVAKEEQHLGDAKDNKVTSSGLPSPPGIDVKAVESPAKTENHEVRTTDKGGDGDKSVTKQPVDIKIDAKLNIYPSTTSELRGGDKQSHGLLKSTDQKNRQCLPDNSEAIDRSGDSAAVKLDVEPSFSSSTVEVNKADGLLVGNAVLREDEKKEQPSSTSADATKLAVPAGVPFGPENGISSKELKDNSSESSSHARPGTTVSQDTERSARRSSKKSSDDASGNEDLVSSDDGSSFAAKIRPSATAKLDFDLNEGIPGDDVHQSEAETSPAVCSSAINLPCLSPFISPMSSGLPAPIKVAATAKGPFVPPENLLRFQPETGWKGSAATSAFRPAEPRKIFEMTLSAPGIPVSDAADKHRPALDIDLNVADEQFLEEDISQSSVQTTGSESGNTRRSNGPVRSVGIELDLNRADEVAENHFVSNTPHRVEVPLLSSRPLPAIFSSADTNGSRDFDLNNGPTLDETGTEHAARSLSSKNTSSIPFIPQVAGGRMNSAEMSNISPWFASAHPYAPVAAQPFLPSRGEQPHPVETAAGSGTQRIITSLADGVQRGSDPCRAPVISTSPTMVFHPPAYQYAGFPFTPGVHLQAPGFSIGSTSYANSAPAGVPYFPSIAPTLLGPAGALPAQHTRQYAINLPEGSSTVGHDSNRKWGRQGLDLNSGPGSVDAEIKDERVSLPVRQNLITPPHAFGEEHTRMYQMPSVGIKRKEPEGSWDAERSSYKQLSWQ

SEQ ID NO: 16290 - protein, 720 aa, Oryza sativa
  Clone ID: TF_OSC420016j.C1.p9.fg
MESGGGSHVAEMPRVPKSARGKRSIRKKESQGQVMCAFDLLATVAGKLLDEGEGSLGNASSGTPAVDASPKDVRVKQEQCDEEAKHFKNEVMDQDSCNESALVSHIAFQRPVNHHGRKGEDPEGSHAVIEDPKAKSEALDKESSMISCTKAELGCNFAAIADRWSPESVESGAFTGDAAAIAMPATTSGFHKNAPDMYNLLDPMDVDVKPPPLVSSDSTGEMPLYGNKIRRSTSFPRVPKGGAGFTVDRDEDDDDKSSGCTHPSTATNRGFRPNCTAGHSRVKKLLACKHRKVAPARMHKGDLSYSGEHCEIPFTFSFFEEHCIDGTHIQTCLLYSYLSSLILLDVDRKPSFRNKKMYYTRQRTQRSTFKRRKMFDRHSAQVSEEYAKANTKFAARDSHAVSLEANKGTNSTAFQKSQESSDCHVKLRIKSFKVPELLIEIPETATVGSLKKTVLEAVNAILGGGLRVGVLHHGKKVRDDNKTLMQAGISHDEVLDNLGFSLEPNCAPHPSQLSPPEDNEFMETVDTTEPLARIAPADSSSKHGEVDASQELALAPLSANYQGSDHDFVHSPGGMSSPDKASTNSRAIVPVTPADSNAGAIVPANKAKRSPEQGQRRIRRPFSVAEVEALVLAVEKLGTGRWRDVKLRAFDNAKHRTYVDLKDKWKTLVHTASISPQQRRGEPVPQELLDRVLAAQAYWSQQQAKLQPKTPPLAEALLLT

SEQ ID NO: 16291 - protein, 658 aa, Oryza sativa
  Clone ID: TF_OSC400887j.C1.p25.fg
MVLQKRLDYGSHGHRAPIKPRVATLAPVKRSTRIRKKQMYALDLLATAAEKLLADQDNLSSGPNINETPEGYVTSMKPVKAEQFDEAFPLRSVAVKKDDCKGCTVGCAGICGFLRQANMCLAENSSTQNLADSVLESLTAKPDVLAKDSFVSSKKSCRLGFGLGTIPEYGSVGVCQPWSTRSAEVKQVHRARPTAIRSQEDSDAAALCALVETMDLDTKPLAEASSGSNSGVHICGPDRGHNSHPSCLAKVQHAADRDDDENSSGCVHPSTSGNNRGYIPHYIGDRRIRRLFASRLRKAARNRICGEMSCKGNKLSLCEKKMPTTRRRVQQTTLKRKRLAQLYSEKSSDEVKLTIKSFNIPELLIEIPENATVGSLKKTVSDAVTTIIERGLRVGILLQGKNIQNDNKTLRQAGICRGKKLNDIGFTLECEAGQDSHPGVIVPEEMDFVGASVVDKSATSFGNYTTIDFCCMWSSKGFNIPFPGVKCEEPAENQQLMQDFPGCSLSDPGSVDYPVEWSTQETSASSQAIVPFADPNSLALANVPLSRSKRPDFGQRRIRRPFTVAEVELLVEAVEHLGTGRWRDVKFRAFENVHHRTYVDLKDKWKTLVHTASIAPQQRRGAPVPQELLDRVLAAQAYWSEQQAKLHGDPPVPEICPT

SEQ ID NO: 16292 - protein, 31 aa, Oryza sativa
  Clone ID: TF_OSC24168j.C1.p1.gm
NMNEHPDAWPFKEPVDSRDVPDYYDIIKDPI

SEQ ID NO: 16293 - protein, 558 aa, Oryza sativa
  Clone ID: TF_OSC19148j.C1.p1.fg
MSGKGKRRSARLLKLEEQKNDDTTATGCLLDPWQIIRNSIAGVRGKRKRNEEIQHLQGEASSSQALCATTDINNLSSKSSAVQIIEYILDTLEMRDTHELFAMPDDIQVTDYAERVNRPGDFATLRQKNKDGMYNTLEQFENDVYMVFQKAMSINSEDTIPYREAMSLLHQAKQVFLSLKSNQMYSESELAAWRQKNLVSQSPAKLNGKFDGSKVGSGSGAGGAAPTTPQRPSAPARKKIAAKTGAVAAATSVKSTTRQRAARESNGAPGRRARKAASVTPGTAEHGGAGASATVEQRRLAYADEADHGGWRPVPVVSTGQHATLVYRPQTAAHTYQDSLRRFVRHAGLKARVAAEFRNLECDVRARQARPAPGYCRTVVSLPAPAPARPAGRSSRNGRCPPPSPPSAAFGGGGAAAASSADAAGNKAPPRCRLKTDEVLKLLVLIGRPAFMERARRVLGHERQESSSKQGHDQKPAVTRAGDDDGGAKAGVTAAKPGKKKGSASKPAAVEFGPFAPPKLVIPGRQLGFSQFAGSSSQPFKVTPTTPNVPDKKKKKRG

SEQ ID NO: 16294 - protein, 2233 aa, Oryza sativa
  Clone ID: TF_OSC401731j.C1.p13.fg
MQPGEAPPSSGGSPATSPRPPPAVAQGQQQLGFRNQAMMHHHDQQQQQQQGYPSGAPHGMMGGGGSSSFPPSSGPMPPFQGQRNMPLPGGPQGLAGGQQHNPTAMQQAYLQYMMQQQQQKAHGMLLQQQQQAKMNMAGPSTRDQDVAANTAKMQELMSLQAQAQAQMFKRQQSEHLQQAEKQAEQGQPSNSEQRSGDMRPPSMPPQGVPGQQLSSAGMVRPMQPMQGQAGMSNAGANPMAMAQLQAIQAWAKEHNVDLSNPANVTLISQILPMLQSNRMAAMQKQNEVGMASQQQSVPSQMNNDAPGHSNFPSQGAPSKPRQPLPPSTSVSGGAEPKMMNMSNMQMQQQLAAHNRDSSNDRAARPAMSMGNGGQMMHMPQSSGHANKIPEQPNPKNANSEAMQMQYARQLQQANRATAPSANSGETGGSQAPNQAARPPMGFTKHQLHVLKAQILAFRRLKRGDKKLPPEVLDLIMSGPPPDSQAQQVSGPPVTNRERSATSSADEHGRPVESGGIAPERSSLLKAPCLPKVEVSAPEDKTIPASGPMQVMKASPKEPLRIGPVSMPEQTNTTLIKSEQDPERGIQRTPGRSDYNGERGKSLPAESGSADAEQAKRAASSSSVPTPNRDVSRKYHGPLFDFPSFTRKHDSMVSANYNSNLALGYDVKDLLAQEGMIVLGKKREDNLKKISGLLAINLERKRIQPDLVLRLQIEEKKLKLLEFQARMRDEVEQEQQEIMAMPDRVYRKFVRQCERQRVELTRQVQQMQKASREKQLKSIFQWRKKLLEAHWAIRDARITRNRGVAKYHERMLREFSKKKDDDRNKRMEALKNNDVERYRQILLEQQTSVPGDAAQRYNVLSSFLTQTEEYLYKLGGKITAAKNHQQVEEAANAAAAAARAQGLSEEEVKAAAQCAGQEVMIRNTFSEMNAPRENTSVNKYYTLAHAVNERVTRQPSLLRAGTLRDYQLVGLQWMLSLYNNKLNGILADEMGLGKTVQVMSLIAYLMEFKGNYGPHLIIVPNAVLVNWKEVLAVKFNVLVTTYEFVMYDRSKLSRIDWKYIIIDEAQRMKDRESVLARDLDRYRCQRRLLLTGTPLQNDLKELWSLLNLLLPEVFDNRKAFQDWFSKPFQRDVPTHSEEEDDWLETEKKVIIIHRLHQILEPFMLRRRVEDVEGSLPRKVDCSALVTLSDAICHSALFVCYIVNSSCHLQESIVLRCRMSGIQGAIYDWIKSTGTIRVDPEDEKARIQRNAMYQAKTYKNLNNKCMELRKVCNHPLLSYPFMNYYGKDFIIRSCGKLWNLDRILIKLHRSGHRVLLFSTMTKLLDILEEYLQWRQLVYRRIDGTTSLEDRESAIVDFNRPNSDCFIFLLSIRAAGRGLNLQSADTVVIYDPDPNPQNEEQAVARAHRIGQTRDVKVIYMEAVVDNISSYQKEDELRNGGSGDLEDDLAGKDRYMGSIESLIRNNIQQYKIDMADEVINAGRFDQRTTHEERRMTLETLLHDEERYQETVHDVPSLQQVNRMIARTEEEVELFDQMDEEFDWTGDMMKHNQAPKWLRVSSTELDAVVASLSKKPLRNMAAGGISLDTNEKLEKRRGRPKGSGKYSIYREIDDDDFEESDDDSEERNTSSLPEEGEIGEFEDEEDNDDSVPDNKDQSEEEEPINDEGYDFSHGMGRRKAHRSEEAGSTGSSSGGRRLPPPAPSSSSKKLRSLSALDSRPGALSKRTADDLEEGEIALSGDSHLDLQQSGSWNHERDDGEDEQVVQPKIKRKRSIRIRPRPNAEKLDDRSGDGTVPQRGVHLAFQGDGDYDSQFKSEQAFADPASRQQDTVHRTVKQKRNMPSRKAPPATKAGKMTQLSGSGEGSAEHSKENWSNKVIESAGPNSSGTKMSDSMQRKVNLDCYLLALAKEPSMTPLISCGVFTLFYNHNNCKNVINKLWRRIDKEGHQIIPNISSWWRRNENSSFKGLASSTLDLQKIEQRVDGFEYGGVNEFIADMQQMLKSVVQHFSYRHEVRVEAETLHNLFFNIMKIAFPDSDFREAKGAMSFSNPGGGASGSAAQSTKQSASGQKRRSSTSEAEQHGSSTSRHNQHAPVGEVSGRAHTSKSEKDSRHSGPGSREQFTDSAGLFRHPTDMFIVKKKRDRRPSLGSPSSSGRTGPLSPTNAGRMGPAPSPRGARTPFQRDPHPSQQSMHSAGWGAHSVQQSDRGGSSSPGIGDIQWAKPTKRSRTDSGKRRPSHM

SEQ ID NO: 16295 - protein, 2210 aa, Oryza sativa
  Clone ID: TF_OSC411283j.C1.p10.fg
MALGFEFFLCGLGAMMHHHDQQQQQQQGYPSGAPHGMMGGGGSSSFPPSSGPMPPFQGQRNMPLPGGPQGLAGGQQHNPTAMQQAYLQYMMQQQQQKAHGMLLQQQQQAKMNMAGPSTRDQDVAANTAKMQELMSLQAQAQAQMFKRQQSEHLQQAEKQAEQGQPSNSEQRSGDMRPPSMPPQGVPGQQLSSAGMVRPMQPMQGQAGMSNAGANPMAMAQLQAIQAWAKEHNVDLSNPANVTLISQILPMLQSNRMAAMQKQNEVGMASQQQSVPSQMNNDAPGHSNFPSQGAPSKPRQPLPPSTSVSGGAEPKMMNMSNMQMQQQLAAHNRDSSNDRAARPAMSMGNGGQMMHMPQSSGHANKIPEQPNPKNANSEAMQMQYARQLQQANRATAPSANSGETGGSQAPNQAARPPMGFTKHQLHVLKAQILAFRRLKRGDKKLPPEVLDLIMSGPPPDSQAQQVSGPPVTNRERSATSSADEHGRPVESGGIAPERSSLLKAPCLPKVEVSAPEDKTIPASGPMQVMKASPKEPLRIGPVSMPEQTNTTLIKSEQDPERGIQRTPGRSDYNGERGKSLPAESGSADAEQAKRAASSSSVPTPNRDVSRKYHGPLFDFPSFTRKHDSMVSANYNSNLALGYDVKDLLAQEGMIVLGKKREDNLKKISGLLAINLERKRIQPDLVLRLQIEEKKLKLLEFQARMRDEVEQEQQEIMAMPDRVYRKFVRQCERQRVELTRQVQQMQKASREKQLKSIFQWRKKLLEAHWAIRDARITRNRGVAKYHERMLREFSKKKDDDRNKRMEALKNNDVERYRQILLEQQTSVPGDAAQRYNVLSSFLTQTEEYLYKLGGKITAAKNHQQVEEAANAAAAAARAQGLSEEEVKAAAQCAGQEVMIRNTFSEMNAPRENTSVNKYYTLAHAVNERVTRQPSLLRAGTLRDYQLVGLQWMLSLYNNKLNGILADEMGLGKTVQVMSLIAYLMEFKGNYGPHLIIVPNAVLVNWKEVLAVKFNVLVTTYEFVMYDRSKLSRIDWKYIIIDEAQRMKDRESVLARDLDRYRCQRRLLLTGTPLQNDLKELWSLLNLLLPEVFDNRKAFQDWFSKPFQRDVPTHSEEEDDWLETEKKVIIIHRLHQILEPFMLRRRVEDVEGSLPRKVDCSALVTLSDAICHSALFVCYIVNSSCHLQESIVLRCRMSGIQGAIYDWIKSTGTIRVDPEDEKARIQRNAMYQAKTYKNLNNKCMELRKVCNHPLLSYPFMNYYGKDFIIRSCGKLWNLDRILIKLHRSGHRVLLFSTMTKLLDILEEYLQWRQLVYRRIDGTTSLEDRESAIVDFNRPNSDCFIFLLSIRAAGRGLNLQSADTVVIYDPDPNPQNEEQAVARAHRIGQTRDVKVIYMEAVVDNISSYQKEDELRNGGSGDLEDDLAGKDRYMGSIESLIRNNIQQYKIDMADEVINAGRFDQRTTHEERRMTLETLLHDEERYQETVHDVPSLQQVNRMIARTEEEVELFDQMDEEFDWTGDMMKHNQAPKWLRVSSTELDAVVASLSKKPLRNMAAGGISLDTNEKLEKRRGRPKGSGKYSIYREIDDDDFEESDDDSEERNTSSLPEEGEIGEFEDEEDNDDSVPDNKDQSEEEEPINDEGYDFSHGMGRRKAHRSEEAGSTGSSSGGRRLPPPAPSSSSKKLRSLSALDSRPGALSKRTADDLEEGEIALSGDSHLDLQQSGSWNHERDDGEDEQVVQPKIKRKRSIRIRPRPNAEKLDDRSGDGTVPQRGVHLAFQGDGDYDSQFKSEQAFADPASRQQDTVHRTVKQKRNMPSRKAPPATKAGKMTQLSGSGEGSAEHSKENWSNKVIESAGPNSSGTKMSDSMQRKVNLDCYLLALAKEPSMTPLISCGVFTLFYNHNNCKNVINKLWRRIDKEGHQIIPNISSWWRRNENSSFKGLASSTLDLQKIEQRVDGFEYGGVNEFIADMQQMLKSVVQHFSYRHEVRVEAETLHNLFFNIMKIAFPDSDFREAKGAMSFSNPGGGASGSAAQSTKQSASGQKRRSSTSEAEQHGSSTSRHNQHAPVGEVSGRAHTSKSEKDSRHSGPGSREQFTDSAGLFRHPTDMFIVKKKRDRRPSLGSPSSSGRTGPLSPTNAGRMGPAPSPRGARTPFQRDPHPSQQSMHSAGWGAHSVQQSDRGGSSSPGIGDIQWAKPTKRSRTDSGKRRPSHM

SEQ ID NO: 16296 - protein, 437 aa, Oryza sativa
  Clone ID: TF_OSC11640j.C1.p1.fg
RRQLASELDQVRGLSKRLKAAAEAIAAESAAALALPVVVPPPQLPVGYAHSQFALADPVTPIPGQVAGAIVPVRSVMQRGPLTVSVTHTESFEKEKRTPKANQLYQNSEFLLAKDKFPPSDSHGRKKPKHHKKKHRSLASHGAGYDAEQRLYSHAFKKSMSLLSRLMKHKFGWVFNKPVDAVALGLHDYFAIIKHPMDLGTIKTRLTHGQYRNPREFADDVRLTFHNAMTYNPKGQDVHFMAEQLLGIFEAQWPEIEAEVQYLASCPPLPNKFPPPPIDVRFLDRSDSVKHHMVLDSKSRPLSHTPTYSARTPSMKKPKAKDPDKRDMTIDEKRKLSNNLQNLPPEKLDVVVQIIKNKNLSVRQHDDEIEVEIDSMDTETLWELDRFVANYKKNLSKQKRKAERAMLARQDAELHAQHVAPQQPSQEPNIGVKSPKQ

SEQ ID NO: 16297 - protein, 656 aa, Oryza sativa
  Clone ID: TF_OSC401036j.C1.p32.fg
MASSPPGAGAGGEERPAASPAAPAVAEAVEEGPVTSRWAPEIRVYRRKYPRKNPKPPPNPSPSSSPLAQTLASIRRSIRRPEDGPAAPRPDPPAAPASSPHPPPPSAPVAPAQQGEPAAPASDDVSAGPNRDGGAVPNGHGDVRAAAEEKARKRRARSELRRQLASELDQVRGLSKRLKAAAEAIAAESAAALALPVVVPPPQLPVGYAHSQFALADPVTPIPGQVAGAIVPVRSVMQRGPLTVSVTHTESFEKEKRTPKANQLYQNSEFLLAKDKFPPSDSHGRKKPKHHKKKHRSLASHGAGYDAEQRLYSHAFKKSMSLLSRLMKHKFGWVFNKPVDAVALGLHDYFAIIKHPMDLGTIKTRLTHGQYRNPREFADDVRLTFHNAMTYNPKGQDVHFMAEQLLGIFEAQWPEIEAEVQYLASCPPLPNKFPPPPIDVRFLDRSDSVKHHMVLDSKSRPLSHTPTYSARTPSMKKPKAKDPDKRDMTIDEKRKLSNNLQNLPPEKLDVVVQIIKNKNLSVRQHDDEIEVEIDSMDTETLWELDRFVANYKKNLSKQKRKAERAMLARQDAELHAQHVAPQQPSQEPNIGVKSPKQNLIVDEKLATSVPEQADNNGQNASRSSSSSSSSSDTGSSSSDSDSDSSSSDGSDAANSS

SEQ ID NO: 16298 - protein, 456 aa, Oryza sativa
  Clone ID: TF_OSC400239j.C1.p45.fg
MASALLAGRGGVNHHHHHHQWGETRAPLAPVAPNSDPNHPLQQRANGSATRPPPSSYVALRPGAMAHREARALRDRLAGELGQVRALIARIDTWQQGQVKRHGSPRRDLPTPPAKLRAAMRKRCEQILAKLRKDKRSIWFNAPVEVDRLGLHDYHAVIKCPMDLGTVRANLAAGRYPSHDDFAADVRLTFSNALRYNPAGHEVHTFAGDLLASFEKMYKASMSWFEQELKLLEPPMPVPPPELPPATAPVQVKPRAANVKMRKPKAREPNKRDMTLEEKNLLRVGLESLPEEKMHNVLQIVRKRNGNPELVGGEIELDIDEMDVETQWELDRFVNNFKKALNKSRRAAIVNGENADVIDASVANDSDMLVNGSTATMVDNGDVTMAIESKDPDKITTQAEQLDEYVDIGDEMPTATYQSVEIEKDTEAASSGSSSSSDSGSSKDSVSESGNAHSLV

SEQ ID NO: 16299 - protein, 1239 aa, Oryza sativa
  Clone ID: TF_OSC400938j.C1.p9.fg
MPRSPSPPPDRHHHHHHPARRRGPAGAAAPPPRSLRPRRAAAPSSRPLVDDFFPFPSSPSSSPSRPPPPQQQQQRRPSPEPSSSDSDGHGGGGGGGGGGSSASDRRRRKLKLVVKLSQLAPDQNHHRRGPPPPSYSDSSGGEQEQEEEEEAGGNGGDDVSGGEERVKPPKKRRIEPRGDRSRHREVRGETANPKLVGGRSDAASAPRTKRLPVPGMARTTPLPDRKALDMILDKLQKKDTYGVFAEPVDPEELPDYHDVIEHPMDFGTVRRKLARNAYRSFEQFELQPNRCNGIALYQINHRFTITSVDFVFLLDDVFLICSNAMQYNAPDTIYFRQAHSIHELARKKFQELRDEGIPTENLIKSEQKIRPHPSNREPIKKPVLRYSDDDLGFMSHKEQVSRPNSKDLEDDRKFKDQVKKTISRNSEDVLSSSFQKERVKKSSVRNSDDDLSSSFQKEQVKRPISRNSGDDISSSFHKEQGRKVISRNSENDRVASFHKQHDKRPTSRSSKDELPSQKKHIRKPVCTNGEEPDFSSHRDSVENPVCTNGEHVGVLSPKRLVEKPICRNRDDLGHSHKKGLNNKSICGDGQDDMGYSCNGETVKKPVRMNSQDALGSDVSAATIASAGDDSNGLSMSQANAVEPQDCIAANGFMDKDISSPLDEIRSEKPDDISARESSVKPSYKSIVVDETRRKTYDTYEEQPSSESDTIFDVFCEEPKELVNVGPHSEHSYARSLARFAGSLGTQGWRLASERIQRVLPTDVKFGRGWVGEYEPPLPPILFVQNQPRSLVSSEANVQRSASMTRNNERIRPTESVNPKDMSLSLLNRITTGNNVVGVPGPLESPEIKPRLFGVTAEPQQRSTEAPSLHENHRAPGSVAKTKRAPSEQTRKGSSSSSSRPLQKQPQRPEISKGASNVLDMPSLNKMTGQPRPFFQPAEAAITQQMRKSETPKSSHPLEMAHQRLECAKGASGVHDMPSLNNTSGQPKPFFQSQEAAVPQPRNENTWVYHGRPGDGKYGTTDKSRPMSSMGFITKNQQVNAASFAMNLNGQKNVNDNVKSVGSTVMPVQVNTTNRGPDSSRNIFSAFPPAVRENQSIPSAPVAQSWISFGASSESKPTIVSPTFHDSNSGWKMPFANARPDEAKMTAVPQFFRQPVQMVRESPGQNKGLVIFPQLVQTDFSRSQGQPQWQGLVPPMQQKPNKDMLRPDLNIGFPSPGSPPARQSSGINLEAQQPDLALQL

SEQ ID NO: 16300 - protein, 751 aa, Oryza sativa
  Clone ID: TF_OSC24127j.C1.p1.fg
MGKTQKFSKGHPLGFVPDYRHGVETVGESKGCIGSPERIVSGSSCAVPKRKCGILKTEDGGELPGFNVPRDVFMLPRMSPSDKKDLEMRLRKELEQVKALQSRLFLRPAAVSMNGGAASASGDVVAKRNDAKLKRSNSVQSGRGVPPSAATPVVRSANYAEAFKQCGNLLKNLFKHQWAGPFLAPVDVVQLNIPDYFDIIKKPMDLGTIEKKLNAGMYSTPWDFAADVRLTFDNAVTYNPVGNDVNLMGKALTCIFETRWKFIEKKLPSLDDRFSVRREPSQKGAVKKDTIEKDYPSEKKHSTKGVHKKDMFKKEDASTKPALQPKKRKASPLVQGSLEIPVVEADKVIDDAQVVQPSKVIDDAQVVQAFKVIDDAQVVQASKEIMTDRQKYELSVRLQSYGGLIPNHVVDFIRSHLPDDNEGDEDELELDMNVLSDSTLFELQKLLDDYDRVNQSGNPTKDEHREVEFESEYGLSNSSMHHEEGNELVEEDVDIGGNDLPPLTYPPAVFESETAERSSKHSTSSSSSSDSESSSSDSDSSSSSGSDLDVNVPPSTSGAKDNTQSAVRLDQENDPLSSTNLPQQSSDPVPISAEDEGENVSEKQVPPAKQYRAAVLLNRFADTIFKAREKTLDQRARIQAEAKAAEDARKRAEAAAAAEAAAEAKRQREREREAARKALQQMEKTVDINEGNLFLKDLEMLGTVTSGEQFPSSVGETSPTHTPEGLGFQLGSNPLEQLGLYMKNDDEEDEE

SEQ ID NO: 16301 - protein, 167 aa, Oryza sativa
  Clone ID: TF_OSC12766j.C1.p1.fg
VTDYAERVNRPGDFATLRQKNKDGMYNTLEQFENDVYMVFQKAMSINSEDTIPYREAMSLLHQAKQVFLSLKSNQMYSESELAAWRQKNLVSQSPAKLNGKFDGSKVGSGSGAGGAAPTTPQRPSAPARKKIAAKTGAVAAATSVKSTTRQRAARESNGAPGRRARK

SEQ ID NO: 16302 - protein, 505 aa, Oryza sativa
  Clone ID: TF_OSC400795j.C1.p14.gm
MGAASERKCTACGGTGGDEVQIDIDRRRTSHWCSSWSTSSARPPRPRSSSSPAPTGSTTPPAPPAFRLEMGVVGLAENYHACVGGGGSVLEVSYHGMAVAMGRVPRFCVHGKRAGGERADGVASAEATSVREELRGLIRSERQIVGAAEFSVEGEIKGFGYLRCKALCVVGRRGLGRRERQVGAVRAAPADLTRMHRERMAFISSRGRRRVAETASAFVMLLSSGVYTGTGQSHPATSSPTMPRPKRRRSPLPPPAPPGFPTERKHHLPELQPPAVAAASPGVAGVPADLGDALLRCGKLLDKLLEHEDGWVFAEPVDARALRLVDYYLRISDPMDLGTVRRRLERRRYADPWAFAADVRLTFNNAMSYNSAGDPVYESAAELSEIFEAGWPSVLAAPPRPPDAERKRRLSGLLPRLPVGAQVTVAEIMKKRDGCLREVNGMMEVDLDRADSATLDELDRMVAEHGAALAGVVKVKQGALVITDQEHNANFSGWTISLFTVGLLG

SEQ ID NO: 16303 - protein, 341 aa, Oryza sativa
  Clone ID: TF_OSC400239j.C1.p49.fg
MRKRCDQILAKLRKDKRSIWFNAPVEVDRLGLQDYHAVIKCPMDLGTVRANLAAGRYPSHDDFAADIRLTFSNALRYNPAGHEVHTFAGDLLASFEKMYKASVSCAAPELPPAKAPAQVKPRAGNVKMRKTKAREPNKREMTLEEKNLLRVGLESLPEEKMHNVLQIVRKRNGNPELVGGEIELDIDEMDVETQWELDRFVNKFKKALNKSRRAAIVNGENADVIDASVANDSDMLVNGSTATMVDNGDVTMAIESKDPDKITTQAEQLDEYVDAVADPEFLSWPWVRPCVDVGDEMPTATYQSVEIEKDTEAASSGSSSSSDSGSSKDSVSESGNAHSLV

SEQ ID NO: 16304 - protein, 358 aa, Oryza sativa
  Clone ID: TF_OSC404150j.C1.p1.fg
MRKRCTQILTRLRKQKISVWFNSPVDVERLKLHDYHAIIRNPMDLGTVKENLAFGRYPSHEAFATDVRLTFSNALRYNPADHHVHRYASNLLATFEGLYKEALSWFEQECQRLEPPMPLALPPPPQPPVPMPMQAPPRIGGGGRRPKPKAREPNKREMSDEEKHKLRVEIGNLPEEKMGNVLQIVQKRNTDPALMGEVVELDFDEMDVETLWELDRFVVNCKKALSKSRRTVAMNGDAVDATAIVPTEDDTVQENDTPEKRVSEVDMVDEYVDIGDEMPTANYQSVEIERDAQVTEVHFGNVFLVAWYRKLDGFLFKLLVIHSNCYGTYTFWVEGVFPYADSIVIATKPNILIFCLDS

SEQ ID NO: 16305 - protein, 616 aa, Oryza sativa
  Clone ID: TF_OSC900093j.C1.p5.fg
MSAPPRKRKKKGRPSLLDLQKRTLRLEKLQEPPPPPPPPQPRRSTRRNPAGVDSGDEGTAPGGRREKKLRLVMGLPDGSAKGEKTRKATDGSEEPSDSGPTTPLPDKKLLVFVLDRLQKKDTYGVFSDPVDPEELPDYHDIIKHPMDFSTIRKKLNKGAYGNLEQFEVSVRAYGDFCWPFLCCFDFPSLTVSTYSSHTQKKSQVLNMKMLLSANTSTVIKCVEPQDDVFLLTSNAMCYNSPDTIYYRQARAIQELAKKDFENLRQDSDASEPEPEPEIKPDPEPKPQPRRGRPPNKNTIKQKVGKPPVERATADFSGATLASVGNNGHRTQPPFDLQRQVMNGSFIADVLRASFASRNNGYNWSNERKLERIEDYSGSIGKWSAKSGRKPILTEESSRSTYCQPQPSSSIYELPVGVQLQQSYPRSLARFAAQLGPVAWEIASKRIERALPPGTKFGRGWVGDGEAPNATQPPVLTTSSTALIHPSSTETSSEQPTHNGTASTSHSAGPQPSSAPYASSTITTHRVNCQSLPSQQHGSVPQVSAERGEHGAEVKGNHNNLHERPAIQHTVNGFSAVSEKGIFYPVSISNRIYTAIEIGNLAPQTTQSEIRSIEDLN

SEQ ID NO: 16306 - protein, 616 aa, Oryza sativa
  Clone ID: TF_OSC900155j.C1.p11.fg
MSAPPAKTEKKGRPSFLTSKSGPFGSKSCRSRRRRPRPPQPGRSTRRNPAGVDSGDEGTAPGGRREKKLRLVMGLPDGSAKGEKTRKATDGSEEPSDSGPTTPLPDKKLLVFVLDRLQKKDTYGVFSDPVDPEELPDYHDIIKHPMDFSTIRKKLNKGAYGNLEQFEVSVRAYGDFCWPFLCCFDFPSLTVSTYSSHTQKKSQVLNMKMLLSANTSTVIKCVEPQDDVFLLTSNAMCYNSPDTIYYRQARAIQELAKKDFENLRQDSDASEPEPEPEIKPDPEPKPQPRRGRPPNKNTIKQKVGKPPVERATADFSGATLASVGNNGHRTQPPFDLQRQVMNGSFIADVLRASFASRNNGYNWSNERKLERIEDYSGSIGKWSAKSGRKPILTEESSRSTYCQPQPSSSIYELPVGVQLQQSYPRSLARFAAQLGPVAWEIASKRIERALPPGTKFGRGWVGDGEAPNATQPPVLTTSSTALIHPSSTETSSEQPTHNGTASTSHSAGPQPSSAPYASSTITTHRVNCQSLPSQQHGSVPQVSAERGEHGAEVKGNHNNLHERPAIQHTVNGFSAVSEKGIFYPVSISNRIYTAIEIGNLAPQTTQSEIRSIEDLN

SEQ ID NO: 16307 - protein, 563 aa, Oryza sativa
  Clone ID: TF_OSC401369j.C1.p14.fg
MASGPPSSPSSKAFSRKSHAHASGPNSSKAAAAGGGGGGVAAAFDAHNGTHVRTVTFSLSSSPAARRELRRRLTAELAQVRATCKRLSSLPAPAPSSALSATDPSTPLPPHPPVSKHKSKKGNPSSNPGLSAEARRKLYAPVFKSCGALLARLMKHKHSWVFNTPVDASALGLHDYHTIITKPMDLGTVKSRLAAGHYKSPREFAGDVRLTFQNAMRYNPKGQDVHFMAEQLLNMFEEKWPEIEAEVAQLSPQPPTPSSAAPRKPKEIDNSKVLERSDSTVHAAGMEATPKQNTGRPPVLKKPKAREPNKREMTFWEKQRLSNNLQELPPEKLDNVVQIIKKRNLSLSQHDDEIEVDIDSFDVETLWELDRFVTNYKKSISKNKRKAENPVAGQDEMNHDIELEKTEHARLDEVEQDQMPPVQETLHNPEPESIDIEPPKENTADDNERYVGSSSPVHLEDQKGENAGRSSSSGSSSSDSGSSSSGKCSHPLQKFILAAFLFAINSIKDIFIYICITYEIYREKHMQIQTQIVHQQMALMLHSHPERNIYRPGDGFGTVYLVF

SEQ ID NO: 16308 - protein, 525 aa, Oryza sativa
  Clone ID: TF_OSC3556j.C1.p1.fg
SLQSKVKRLKEEREKSISGETKPPPAAAAVKEEEEDVRKGSPEEAGAVEDRVSGHESGRSCKESNSSDLKRPENDPAVADDDDREAEEEEEAAAAPAAGDIAVKEEASGESVAGSKEADVEKESSDVQSSASPSRRRRRKGGGGGEEAEAASPSVSVPLPAAEAEPLVAFLESVRTSKAGAVFERRLDSQDGERYSGTIRRHVDLETVRSRLVGATAAAAAAACYASASEFYRDMMLLCANALVFFPRGSPEHAAALQLRALVSKQVSKDRQPHAGAKAPAAAAEEEEKKKPAKADADIAGPLLEKAPIIVCRKRSSIAKAAAAAAKGEKAEKAETDKKEKDGSEEKKKAAAAATTATAAATAKDKKARGMRTNKSRGPARNQKTAKLSETGEGTKKSDKKGGGGGGSSSAGAAAGEVAKKRNAVDFLNRMNQNGSPSTERVSLLETLKLSAAATEQQETVVVVVIREGRRPEGGRRLRLQEGRRASTPPGRRIGRPPKRAAAPQTPPRSKRAKDDKPTRKRGKK

SEQ ID NO: 16309 - protein, 604 aa, Oryza sativa
  Clone ID: TF_OSC407198j.C1.p1.fg
MQSRCPSAAVFTPTTCRLRFRVLHRRFSGGVTAENEDADGGEEEEEADAAAVAGWVEELRELRVAELRREVEKYDLSIGSLQSKVKRLKEEREKSISGETKPPPAAAAVKEEEEDVRKGSPEEAGAVEDRVSGHESGRSCKESNSSDLKRPENDPAVADDDDREAEEEEEAAAAPAAGDIAVKEEASGESVAGSKEADVEKESSDVQSSASPSRRRRRKGGGGGEEAEAASPSVSVPLPAAEAEPLVAFLESVRTSKAGAVFERRLDSQDGERYSGTIRRHVDLETVRSRLVGATAAAAAAACYASASEFYRDMMLLCANALVFFPRGSPEHAAALQLRALVSKQVSKDRQPHAGAKAPAAAAEEEEKKKPAKADADIAGPLLEKAPIIVCRKRSSIAKAAAAAAKGEKAEKAETDKKEKDGSEEKKKAAAAATTATAAATAKDKKARGMRTNKSRGPARNQKTAKLSETGEGTKKSDKKGGGGGGSSSAGAAAGGVAKKRNAVDFLNRMNQNGSPSTERVSLLETLKLSAAATEQQKKSSSSSSGKGDGRKEAGGSGSKKGAAASTPPGRRIGRPPKRAAAPPTPPPSKRAKDDKPTRKRGKK

SEQ ID NO: 16310 - protein, 734 aa, Oryza sativa
  Clone ID: TF_OSC402265j.C1.p12.fg
MEFGQQRQIKRGYDEMAFRGMASAAPRGYAETVGESEGAAGSPVRVDSEDSSAPKRKCISLNSDGFDVKREIFVPAKMSSSERRHLRKRFRTELDSVRNLLKKPEFAVPVPVNRAPALSSSAAPRGKKGQRGNHVVRGAKGRFLPTKPRPEASTVLTEDAIFKQCDAILKKLMTQKCSNIFDSPVDAVKLNIPDYFQIIKKPMDLGTIRNKLDSGSYTSPSEFAADVRLTFSNAMTYNPRGHVVHDYAIQLNKMFESRWRTIEKKLASIATEAHVEVDRADSKRRKTPPVDCSEVSTECVRPTESVRPTESVKPKMTFEEKESFGNCLASLSEDPEVPSHIIDLLQQCIDNNTDQLGDGEIEIDIHAVSDDLLFELKKHVDKYLQEREQSQQAKSEPSENEAANVSGLSHSSTNPCKGGDPVEEDVDICGNASPILIEKDAHNNPNKCGSPSSSSSDSGSSSSDSESGSDSESEQEKGGSPGKPKGSKRSEQLVEQEKSDVISPVDAIRPADDVELREQDNESKPAPEGENSKPDRQVSPDKLLRAALLRSRYADVIVKAQGILSQGGDKQEELEKLQKEEKARLLAEGNAAMEARRAEAEAEAKRKRDLEREKARQALQEASEKNCIYWCRAFFFPLKFEWFNLMQMERTVEINDNLHLKDLEMLGTATTEHIVSSVDETSPEHSQDGMPSFLPGSGNPLEQLGLFMKADEEEEEEDPSSVPSTKDAEEGEIN

SEQ ID NO: 16311 - protein, 1824 aa, Oryza sativa
  Clone ID: TF_OSC22451j.C1.p20.fg
MGDGERREDENPTTSAADDDDDEDYDEPGGGNHFLGFMFGNVDDSGDLDADYLDEDAKEHLFALADKLGPSLKDIDLIKPSAAPTDPSEQDYDAKAEDAVDYEDIDEEYDGPEVEAATEEDHLLSKKDYFSSNAVYASVNSKVSVFDEENYDEDEEPPNDNDLPSDNIVQNCTSASAEQLDMAPSNDNLAVEKMSSSLSEPEESFESEAFQKEMVAEEQLESKTATSLPVLCIEDGSVILKFSEIFGAQEPVRKAKMDRHKRPVNKELQITNFTDIVEEDEEVFLRSTIQNLSALKHIKTNDNFVESDSDESTSDVALRLKDSCLSEQPMKDKDIPTAVQSPVFPDFYPLEHENWENDIVWGNSPTTAIQPCLTSCAISKESLDDHNEDQAEGYVSGCWDVQNKFHSSSVMADPFGHTEIPDSTSYRSPENSYSPLRKETAQENNSLDEPNNITQPVKIDTTRHLNKLSLLNKELLEGSWLDNIVWDPSEDVPKPKLIFDLKDDHMLFEILDEKNGDHLRSHARAMIVTRPMKTSAVENVDHNNQAIALSGRFNISNDKFYSNRKMSQQARSHAKKRATMGLKLVHSVPAQKLQTMKPKLSIKEIANFHRPKAKWYPHENKLTARFQGDECSHGPMTAIVMTLGGKGVKFLVNAEETPLSVKSKASKKLEFKPSEKIKLFCSGKELQDDISLAMQNVRPNSILHVVRTEIHLWPKAQRLPGENKPLRPPGAFRKKSDLSVKDGHVFLMEYCEERPLLLANAGMAARLCTYYQKTSPSDQTATSLRSNSDGLGTMLAIDPADKSPFLGNIRSGSHQSCLETNMYRAPVFPHKVATTDYLLVRSPKGMLSLRRIDKLYAVGQQVKKSVSWIYHRLTRRATNFKILFSWQEPHMEVFSPGTKNMQNYILNRILVYVYREFRAREKPGIIPQIRADELPIQPPITEAIKGPKGHLFYIQRPDFRIPSEEELRRLLTPENVCCYESMQAGQYRLKHLGIEKLTQPVGLASAMNQLPDEAIELAAAAHIERELQITSWNLTSNFVACTNQDKENIERLEITGVGDPSGRGLGFSYVRVTPKAPVSNSTHKKKSAAAKGTTVTGTDADLRRLSMDAARELLLKFGVPEEQIDKLTRWHRIAMVRKLSSEQAASGVTMDEIPVSKFARGQRMSFLQLQQQTKEKCQEIWDRQIQSLSAMDGNENGSDTEANSDLDSFAGDLENLLDAEEFDDEDVGNTDIRSDKMDGMRGLKMRRCHTQSQINEEIQDDVAEAALVEKLLEESDSDMKRKKQPVETTNYSTPMYNQGNKMKQGKAGQMIKSSVYAGALTPKESIPREAKEVENFAEGSLPSKLRTKTGFDANDDIILVKRKNIPGKDGFKEKRQGARGDTLVCGACGQLGHMRTNKLCPKYGEDPETSEMDVNSIRSHPPDIVSNAQIKTSNKRLVAKVSSEAFETEGPESIEKAKPVPVKFKCGAPEKSLDRNMSISASLVSDKRMMDATDSKSTGKVNKIKISNKIKYDDYPPDTPKPSVVIRPPAEVEKDLPRKKIIIKQPKVLGDQQRPTELRSGQEPRKTRKIVELSSFEKRDREDDNGFSGQPIQINSSHDRGWGLVGKRSKGIMESSESWRAFEEQRERQEQRLIEARIYDARREDELQKAKKKNKKKKKHEFRDDDLLDPRPYKNDRRVPERGRAAKRRTPADMTEYTPPAKRHRGGEVELSNILEKIVDHLRTMSCSFLFRKPVTKKEAPDYFDIIERPMDLGTIRDKVRKMEYKNREDFRHDVAQIALNAHTYNLNRHPHIPPLADELLELCDYLLEESADVLDDAEYAIED

SEQ ID NO: 16312 - protein, 281 aa, Oryza sativa
  Clone ID: TF_OSC400632j.C1.p1.fg
MRKEKIPHQAPFAIQAAQLLGRAIGAGLFAITPAGERGMCCKAIKLGNARINSSHDRGWGLVGKRSKGIMESSESWRAFEEQRERQEQRLIEARIYDARREDELQKAKKKNKKKKKHEFRDDDLLDPRPYKNDRRVPERGRAAKRRTPADMTEYTPPAKRHRGGEVELSNILEKIVDHLRTMSCSFLFRKPVTKKEAPDYFDIIERPMDLGTIRDKVRKMEYKNREDFRHDVAQIALNAHTYNLNRHPHIPPLADELLELCDYLLEESADVLDDAEYAIED

SEQ ID NO: 16313 - protein, 722 aa, Oryza sativa
  Clone ID: TF_OSC417054j.C1.p1.fg
MAKTRKAAAAPPPPPPPPPAETPARRKGKKKGRPSLLDLQRRSLRLQAQNPSPAPSPSRRDANPSDEDDDGVGSGGRRRQKRLKSVLSSSGGGEVGRAPPLLPVAPIFRNLPEVFGGLPEERRGGFLPWDTRRCGCRSGWICDFGIFLRGVGFVDDEAPAAAVVVKVEVEEKKKKVSSKATGKGDAASDGGPTTGTPLPDKKLLLFILDRLQKKDTYGVFSEPVDHEELPDYHEIIEHPMDFSTIREKLLNDSYTTLEQFENDVFLLTSNAMSYNSDDTVYYRQARSIEALAKKDFENLRQASEPEEEQQPKTVPRRGRPPKYAKKIEKTENDVSPDLSNAKTKSADHAETIRKRLTGDRTRNANITTRDSPFLQHNTPGSFAGKRTDRFGDYSGPSKYGKKTTPTISDDERRSTYDQQYFHSSPLFSALGGERKVLVPVGLQQQHAYARSLARFAAKFGPVGWDIAAKRIRRLLPSGTNFGPGWVVDGEPPENSQWPRVPMLSDPSIQSTGVPASNVISKNDESNQKSGLTSNEDSGEEHLARTEPVASTSACVNTNSVSATKLATKCENGANVSCDGVGSTGQTPPLQQHSHSREIHSNMNGFTALPNTISQYAGQGFLGQMQLTHAQVLGMFSGVNGRTNGFIHGHPLVANSIKAPQNGDVGKVATNPSPDAGHDSEAALSQTMTSSAPSLSAGVQPSGSMPSEKLANPKKHPDLALQL

SEQ ID NO: 16314 - protein, 583 aa, Oryza sativa
  Clone ID: TF_OSC410643j.C1.p12.fg
MDGLAAPSPSHSGATSGGGASHRKRKLPPSSLSDATADEDDDTTAPSSPSTSPSSPSRPSSPSSSHSDDDDDDSLHTFTAARLDGAPPSSSGRPPKPESSTVSAAAAAAAAAAAPKPDSASAAAGDGKEDPKGLFTDNIQTSGAYSAREEGLKREEEAGRLKFLCYSNDGVDEHMIWLVGLKNIFARQLPNMPKEYIVRLVMDRTHKSMMVIRNNIVVGGITYRPYTSQKFGEIAFCAITADEQVKGYGTRLMNHLKQHARDADGLTHFLTYADNNAVGYFVKQGFTKEITLDKERWQGYIKDYDGGILMECRIDQKLPYVDLATMIRRQRQAIDEKIRELSNCHIVYSGIDFQKKEAGIPRRTMKPEDIQGLREAGWTPDQWGHSKSRSAFSPDYSTYRQQLTNLMRSLLKASLLSSQIFLYDMQPFGLTSLDKPVLCLLPFEFFAPFLFQAYFLKPDQLDGLFNGSMIEMATFYKFNIQIFLNMNEHPDAWPFKEPVDSRDVPDYYDIIKDPIDLKTMSKRVESEQYYVTLEMFVADMKRMFSNAKTYNSPDTIYYKCASRLESFFSNKVASQLAQASTKN

SEQ ID NO: 16315 - protein, 176 aa, Oryza sativa
  unsure (1)..(176): unsure at all Xaa locations
  Clone ID: TF_OSC34007j.C1.p1.np
NASSRSSXHISHLISTCTTIYLNXRNRSPPKKKKPQIKQKHGSGGRKAGRKDSSLSKGMPDLMRQFGTIVRQITSHEWAEPFLKPVDVVGLQLDDYYKIITKPMDFSTIQKKMEGKEYNNVREIYSDVRLIFANAMKYNDERHDVHIMAKSLLEKFEEKWLQLLPKVENEVNECLX

SEQ ID NO: 16316 - protein, 494 aa, Oryza sativa
  Clone ID: TF_OSC12509j.C1.p3.fg
MVVVVVGGGGGGGGGGGVKKEEGEEEARGRGGGGGVVGGWGTWEELVLGSAVIRHGGVAWGAVAAEVRSRSPCAFSPEECEAKFSEIQARYSACDAWFEELRKRRVAELRNDLKKSENFIGSLQSMIKSLSNSKHDDGNSECHTSHTESCSNNENTADNNSSSKALSKDRSSAASFTEEASNSQKSEKVQHCDTDSIQVNNTSAEALVKPLVEKKVCAEDGLLWGSRKKRAVRDRRTFLMADNSCRAGENTSTSHIQTDGSSEGYAKKGLKTPNLESGVSVVEKAKPNLAEILKTISTQSDCYMLQRRLDVQRKRTRYKKMIRRHIDFRILHSKIKSGATSSTKELLRDILLFVNNVLAFYPKATLEHMAAIELRNIAFRTVQESASMPSKSCGVTGAATAPLVKKNTRPVQPGSHGPHDAKRSKVSLKGTGSTVKQGEAKGSRGGSSVTANVKTMQRNPPAKKRGVGRPPKNGQKRAAAQQDSPNKGRKRTRR

SEQ ID NO: 16317 - protein, 67 aa, Oryza sativa
  unsure (1)..(67): unsure at all Xaa locations
  Clone ID: TF_OSC7812j.C1.p1.gp
PRFPVQFSIEVIRIRLENNYYRTLEAIRHDATVMLANAQSYFSKSTDMTKKIRRLSDWIEQTFSSLX

SEQ ID NO: 16318 - protein, 516 aa, Oryza sativa
  Clone ID: TF_OSC400755j.C1.p21.fg
MALAQPTLTLTQRCGPARYGESLPLSESSGPEKKLKLFFFVKTKKYLFKPNTMTTQACKKRRAVYISSESEDSGTDSEVEGSKLSKKDGVTSVYTCGHQPTSKNKVDPMNTSKSRQCGSILKKLMDHKSGWIFNTPVDPVVYGIPDYFDVIRNPMDLGTVKRKLTSKQYSNPYEFAADVRLTFSNAMKYNPPGNDVHGIADQLNKIFDSEWKLLERKWKDRNLVQEQPSLKVLKAQPAVTPKPVLPKGVTAGTNSAVSKTLATALSSKVKIKFSVRGSELTSSKDTPLQAVGRRDGTINQSLPCTKDNAKTPRIQSSEDRSESTEEEYLPEEPLSPSKALRAAMLKSRFAGTIVKAQQKALLDHGKKIDPAKLQLEKERLEKRQQEEKARIEAQVKAAEAAAQLKLDEEMRMKREQERRAARLALHMMKKTVDIDNSDFLKDLENLSKKWELNPPGKLIVDFVDGIDLPPGLGSPLERLGLFMKKDLEEEVEHEMEDSVSPSTEIDVEEGEISFCQ

SEQ ID NO: 16319 - protein, 99 aa, Oryza sativa
  Clone ID: TF_OSC11395j.C1.p1.fg
NMNEHPDAWPFKEPVDSRDVPDYYDIIKDPIDLKTMSKRVESEQYYVTLEMFVADMKRMFSNAKTYNSPDTIYYKCASRLESFFSNKVASQLAQASTKN

SEQ ID NO: 16320 - protein, 791 aa, Oryza sativa
  Clone ID: TF_OSC401282j.C1.p16.fg
MGKTQKFSKGHPLGFVPDYRHGVETVGESKGCIGSPERIVSGSSCAVPKRKCGILKTEDGGELPGFNVPRDVFMLPRMSPSDKKDLEMRLRKELEQVKALQSRLFLRPAAVSMNGGAASASGDVVAKRNDAKLKRSNSVQSGRGVPPSAATPVVRSANYAEAFKQCGNLLKNLFKHQWAGPFLAPVDVVQLNIPDYFDIIKKPMDLGTIEKKLNAGMYSTPWDFAADVRLTFDNAVTYNPVGNDVNLMGKTLKCIFETRWKFIEKKLPSLDDKFSVRREPSQKGAVKKDTIEKDYPSEKKHSTKGVHKKDMFKKEDASTKPALQPKKRKASPLVQGSLEIPVVEADKVIDDAQVVQPSKVIDDAQVVQAFKVIDDAQVVQASKEIMTDRQKYELSVRLQSYGGLIPNHVVDFIRSHLPDDNEGDEDELELDMNVLSDSTLFELQKLLDDYDRVNQSGNPTKDEHREVEFESEYGLSNSSMHHEEGNELVEEDVDIGGNDLPPLTYPPAVFESETAERSSKHSTSSSSSSDSESSSSDSDSSSSSGSDLDVNVPPSTSGAKDNTQSAVRLDQENDPLSSTNLPQQSSDPVPISAEDEGENVSEKQVPPAKQYRAAVLLNRFADTIFKAREKTLDQVAKKDPEKLQHDMEELERLRREERARIQAEAKAAEDARKRAEAAAAAEAAAEAKRQREREREAARKALQQMEKTVDINEGNLFLKDLEMLGTVTSGEQFPSSVGETSPTHTPEGLGFQLGSNPLEQLGLYMKNDDEEDEEGESADEPTIDVEEGEID

SEQ ID NO: 16321 - protein, 590 aa, Oryza sativa
  Clone ID: TF_OSC400140j.C1.p16.fg
MKRKRGRKMGKKGKLKASITADASPMSPSSPSTVDASSKSPSSPSTEENGTSPAHHQADNAPVIAPPPVPEPAPPEPEKPAVSTDVQNAKPKVYSRVRLKFKSAKVLETHQGPSEAKAPVDGGGGKPASAAPEASKEVAEKAIVSPDGQKDAQAAELSGSDKDKMARKVASINIKSVGLSSVEDKNQDRKADSVSEPLPSKQETVLENVESETALEPRSSQELEVKQATPERQRDDRELTAALEAIKKVMKMDAAEPFNTPVDPVALGIPDYFDIIDTPMDFGTICQNLERGDKYMNSEDVYKDVQFIWDNCTKYNSKGDYIIELMKRVKKGFMKNWLAAGLYSDAQENGGNDNTGDEDVKGSKGKSKQKRRRLGNDRHKNDCACAVCQVTRRKKEKDEILAVIENDTAAVNSNISDQQIMEVDSGINNAGSHDTTSSQEQPPQTDMYRRTVVADDSGTLIENHVKFFNNQPLPHDYEDEGSRPYFDEKEEVDYTDLISQEEHTSSQPNDGSEIAQHQHKEPTETSQEIEMEDYPIQKENQSFLQLCARLFPSNQSSVFRGRHSLFRQQQRQVSMKGSPLHAAITAIMKR

SEQ ID NO: 16322 - protein, 344 aa, Oryza sativa
  Clone ID: TF_OSC34011j.C1.p25.fg
MAAAETAATAAAAGERAPGTEVDAFRRQVEDLVSKTDQLERRVNEVVGFYDGKKHGSGGRKAGRKDSSLSKGMPDLMRQFGTIVRQITSHEWAEPFLKPVDVVGLQLDDYYKIITKPMDFSTIQKKMEGKDDNKYNNVREIYSDVRLIFANAMKYNDERHDVHIMAKSLLEKFEEKWLQLLPKVENEERKQKDEESNGVPKVNISPEEAIAKLAKDTDNELIEINKQLEELRQMVVQKCRKMTTYEKRKLGAGLCHLSPEELTKALEMVAQDNPSFEAKGDELELDMDAQSETTLWRLKFFVREALERQANVASGRTDENAKRKREICNALARTASKRVKQQPN

SEQ ID NO: 16323 - protein, 649 aa, Oryza sativa
  Clone ID: TF_OSC407196j.C1.p12.gm
ISMQPLLVSSHAWSFTSLCEGARIGRRRKMKRKRGRKMGKKGKSKASTTADASPMSLSSPSTVDASSKSPSSPSTEENGTSPAHHQADNAPVIAPPPVPEPAPPEPEKPAVSTDVQNAKPKVYSRVRLKFKSAKVLETHQGPSEAKAPVDGGGGKPASAAPEASKEVVAEKAIVSPDGQKDAQAAELSGSDKDKVARKVASIKIKSVGLSSVEDKNQDRKADSVSEPLPSKQETVLENVESETALELRSSQELEAIKKVMKMDAAEPFNTPVDPVALGIPDYFDIIDTPMDFGTICQNLERGDKYMNSEDVYKDVQFIWDNCTKYNSKGDYIIELMKRVKKGFMKNWLAAGLYSDVQENAAGEEDGATGGRGRVGILVNVAANPWLSEVALRRVGTSAAMVDRLVEMLTWNGRDKPAARRGRAPTARSGTRSGAIESVSSLLFVADEECNLLGLLFAMQVGPGHLASLHGGRRTVAGVDRRLGGQRRASALRLGGVRLATNGGGWPATSGGTATGVRRAAVGGGSVLLVFLFGGGGRVGRRLPPPPRLRFRSARTPPPPAASSRPRSPPRRDRVPLHPPVRPFANSLLAASSSMESQTRPTGARRERRSGRRRGDGPRRPPLVQLLPLRLRPPARCSAVRGPWRRERER

SEQ ID NO: 16324 - protein, 188 aa, Oryza sativa
  Clone ID: TF_OSC405157j.C1.p1.fg
METLVQGRWRRPVHSLRHLHRRRLRLVHLLLPGGPGRGGGDREHVSVKLRLVTRCATATAFYELRLLDQDTGRAADVDRASGAPRVFASSNPGTACFGRRAFMERSKLEASPACLRGDSVVIDCAVRVVVHDPVVSAVRRREAPDDVPPSNILRQLVAQVESEGADVTFPVQGETFTAHRLMLAARSP

SEQ ID NO: 16325 - protein, 475 aa, Oryza sativa
  Clone ID: TF_OSC400305j.C1.p20.gm
MRCYGRKRPWKRASFYGRVRNVNEGVIVAELVEQDGVRSSCRHGKEKLAGGSKMTTHGLGGTERHGMKQFTQGHDSEPQPCVAHEKQAQGRFRVTARFLELERQKLKRMGSKKRMSRYAKKHEEATLKFDVVGYSLNEGMAAGEFIRSPAFAVGATTGQSASTPTAPRCPKPQRSNPMQRYRLEKEESGYIKDDCLKIELRRTRACSPVFKAELYGGMKEREARSVTVDDTQPDVFRALPHFMYTDSLPDMDGVEDADYVEMIRLLLVAADRYAMDRMKLLCESVLDDLLDAETVGTTLALADQHSCNNLKDVCVKFMATSKGMDAVMATEGYDNLKRNCPYVLIDVLEKHASVANSGENVVDPLVNLSLPFISPAFIAGSPPPPLFSTARPTVPHRHRRRLVADHRREPFRSRHPIVTADGEEDEHHVELQRLGDALVGHEAAPASMGRSQPRGREKRGGGGEPAMNARGDEGQ

SEQ ID NO: 16326 - protein, 156 aa, Oryza sativa
  Clone ID: TF_OSC400049j.C1.p21.fg
MEPQVFKSLLTFIYTDSLPELEDEEETESDRDEEEDQESEADGVHGEDYDDDDDDDDDDNGGDEMWSPLLVAADRYDLQRLKLICAKKLCERIDASTVADNLGLAEKQHCRLLKEACLEFLKAPANLKVVLASDGLDHITATCPSVLKELLAKFAS

SEQ ID NO: 16327 - protein, 277 aa, Oryza sativa
  Clone ID: TF_OSC415318j.C1.p6.fg
MSTHSTELVKGSHEFTVAGYSLQKRNGTGHFVRSGSFEVGGYSWAIRFYPAGSTKEEERHVSVFLELGSTVVEKVTARFRFRVNGATASSWGQFNDFTLSSKTWGYQKFMEIEPVESEYLINDCLTMHCDVEVVKELKTGATMSRFITVPPPAICCHLEQLLESKEGCDVTFQVERSDYDAHRVVLSARSPVFRAQFFGPMADTGGGDRPTQTVFIPGRNIIGVVILHETLYELHRKGIPMHFRKHSNKYWKVIEERIEKKLSSWKDRIIITMVGSR

SEQ ID NO: 16328 - protein, 122 aa, Oryza sativa
  unsure (1)..(122): unsure at all Xaa locations
  Clone ID: TF_OSC405123j.C1.p1.np
AMDDLDDDDDDKAHMIHLLEAADRYDVERLKLICELMLCKSIAVDTVAATLAMADQHHCQKLKEACIEFLATSKKMEGVMESQGYEKMKLSCPSFMVDLWEIIGRKNYKVLSDSXHKQQVFI

SEQ ID NO: 16329 - protein, 347 aa, Oryza sativa
  Clone ID: TF_OSC400964j.C1.p15.fg
MCEGVRAAGDAAAAADVDVITSSGRRRIPAHSTVLASASPVLESILQRRLKKERDAAAGGGKVRRAVVLIRGVTDDAAAAFVRLLYAGSSGDEEEIDEKSAAQMLVLAHAYRVPWLKRRCEGAIGSRLTAESVVDTMQLAALCDAPQLHLRCTRLLAKEFKAVEKTEAWRFLQENDPWLELDILQRLHDADLRRRKWRRKRAEQGVYVELSEAMDCLSHICTEGCTEVGPVGRAPAAAPCPAYATACRGLQLLIRHFSRCHRTSCPRCQRMWQLLRLHAALCDLPDGHCNTPLCMQFRRKEEEKAAAKAKAKAGDDDDKWGLLVKKVRVARAMSSLGKRRQMSCSQC

SEQ ID NO: 16330 - protein, 102 aa, Oryza sativa
  Clone ID: TF_OSC547j.C1.p8.fg
MAQHLLAAADKYGLHRLKMICLEILSSHIDANSVATILVLAEKHYCYGLKEACFEFLNSLAVLSAIAARGKESVGATADAGVRGNAENMQVARDQGTLLIND

SEQ ID NO: 16331 - protein, 370 aa, Oryza sativa
  Clone ID: TF_OSC400305j.C1.p28.fg
MGTEPLPMSRKLSSGGGWFDGEDPVEEGVLGDDAAKADAGGVGGGEELYSAASACVNITRNLSLPIKTNPEHDISSCEQGLLSEPHGKIPFLFSEIFSHHFKLFNSSPLSPFLPPPLLSFALSFSPLFASSPSATRDDYGTNDGGQAGGRPAGGGGGSGRPASGSATPVLESDGGARICFTQPQECRQREWETSAWIRRLPANGDEQICSPRPRSDRGVRICRPQPREQATYLAPPPSGAITATATPGWIYQQQEQLEQVMDSSMNPSPLMWFDNTTHNLLRAADCYGLERLKAICETKLCLDIDVKSVMVILLLADQHQCDMLKQACFSFIANPNTLETVTGTPEYHQFKSLYPILLIEVLENVCILRK

SEQ ID NO: 16332 - protein, 797 aa, Oryza sativa
  Clone ID: TF_OSC900178j.C1.p15.gm
MGDLSSSDSLLGWANDELDLFASYGASLFPNTRKPLICSEHQPIQSVPPSCRVPNVAIVYVLADVPGGVELAARAAAPAPAAAIGEAVRVMERVRRRIRVRIGVGEAGGAGAAGGEELGGARHGGVAAVRKEQRKKGKWGSSKHKPFGTDSIHKPPYELPLCGVQPPRGSNGNRGSIRRVPHLRHSLHPILSQELPSDITIKVDDAAFNLHKLPLASRCGYIKKQVSGVGGNKATHLEIAGMPGGSKSFELVVKFCYGVNFEITVDNVAMLRCAGEHLEMTEECRPGNLVGRTEAYLEEVALASLEGAVAVLRKAEELLPASEEKARLVARCIDAVASIVCGGDGQFSMSLGTPGGGGGGGYNGVGAAASREVDDWCADELTALRIDTFQRVMIAMKARGFKGIAMGTLIMLYAQKSLRRLDMHGRDRKKMGARQEHEKRVVLETIVSLLPRERNTLSVSFLSMLLRAAIHLDTTLACRLDLEKRMAAQLGQAVLDDLLIPSSSPDAAAATTAYDIDAVQRILAGYLDLDYTTDPPPRLDYTTDDDFSSAASPPHSDVAQVGRLMDSYLAEIASDENLSVDKFTALAELIPERARFNEDGMYRAIDIYLKAHPSLAEGERKKVCRAMDCQKLSREACAHAAQNDRLPVQTVVQVLYHEQRRLRAPSQPPSAAPSYAGGESPALSYRPTPSFNGRHRPGVPDEVSRLQRENDELRMELLRMKMRLRDPSVAFSAGGVPPSGRPPLPKKPGGGGGGSSGGFMNSMSKKLGRLNPFLRSDVLGGGRVRTKPPKDRRHSIS

SEQ ID NO: 16333 - protein, 886 aa, Oryza sativa
  Clone ID: TF_OSC404491j.C1.p1.fg
MRKLFFSELTSCKETKLHSAPHSWLPLEKGKLSKFAGHSTSSIESLMKMPEPVVLPHFKPADYVDILAQIHEELESCPPDEKSCLYLLQFQVFRGLGEVKLSRRSLQSAWEKASTIHEKLIFGAWLKYEKKGEEPISDLLSSCGKCSQEFKLLDFVSQISTGSHEISYDDESDVFWGSPVVHFRIRDDMIACDRRKLAALSTPLYAMLNGGFRESHLEVIDMSRNGISSIGMRAISKFSLTGRLPYLSADAILEMLDFANKFCCNGLKDACERKLASFICSRQDAIDFMECALELGCSILAAACLQVLLNELPECLNDEQVVRIFSCASKQQRSTMAGNASFSLYCLLSEVSMSINATSDVTVTFLEKLVDSASDSRQKQLALHQLACTRLLRKDYAEAERLFNAAFTAGHLYSVVGLARLASMRGNKHFSLKLLDSVMSSRWPLGWMYQERALYLEGDNKLENLNKATELDPTLTYPYMFRAASLMKRQSVEAALMEINRILGFKLVLECLELRFCCYLALEDHRAALCDVQAILTLAPDYRMIGGRVSAKQLRMLVMENVEQWTTADCWMQLYDRWSSVDDIGSLSVIYQMLESDAAKGVLYFRQSLLLLRLNCPEAAMRSLQLAREHAASQHEQLVYEGWILYDTGHCEEGLQKAEASIAIQRSFEAFFLKAYALADSSLDPSTSATVVSLLEDALRCPSDRLRKGQALNNLGSVYVDCGKLDLAAECYINALKIGHTRAHQGLARVHFLRNSRTGAYEEMTKLIEKARSNASAYEKRSEYCDRELTKSDLQMVTKLDPLRVYPYRYRAAVLMDNHKEKEAIAELTKAIAFKADLNLLHLRAAFHEHVGDISSALRDCRAALSVDPNHQEMLELHHRVNSQEP

SEQ ID NO: 16334 - protein, 578 aa, Oryza sativa
  Clone ID: TF_OSC402104j.C1.p34.gm
MMTRRQDAYYRYPTTSTIVASAPMPTGHHVLRIDGYSLTKAKFAAGEECDESCSFVVGGHAWRIRYYPNGAVVSGSGGFVSLMLSLDHQPGAALPAAVVKARFAFSLLDMDGEPVPSRTYASDGVVSFSANSSSTFGAERFIGHGELEASGHLTGDRLAFRCDVTVVKRDGPPTMSTLCPVEHDMFRCLLDTGDDADVAFRAAGGETIAAHRRVLERRAPELAKLCRRRGGASCFMGLVGRHIDVGDMDAAAFKALLHFVYTDTLPETMAPREVPAMAPQLIAAARKYGLDWERLRLLCEDKAWGWRVDDTSMDTTAAAAPATGDDPKRSQRPPRASFTAAAASLFRHPASPAGRKVSTTPARPRRLAPFPSPPLPQAGGGALYVVFPVAGGGAPSPATSSYHSFSFAPVASTGPPPAPDPAGGNALYFRMVGAKATLYCYKIGVFSPHVLSISVVATYTQLLFLARKGVAMRAFESFTGRHDDRRLAFIKDGVELRAGLPPGPAGTVRTVRLPSFFFHTEPLKSQCRPWPPPPPVGDPESGGLRRRLLSLLDGTDVTFRVGGEAFAAHSSVVAAWSP

SEQ ID NO: 16335 - protein, 355 aa, Oryza sativa
  Clone ID: TF_OSC401213j.C1.p7.fg
MTQWADLDALRPAVAADVQVVTSDGKSIAAHSFVLGTASPVLERMIERARRGWNAECTIRVLGVSSDAVFAFLQLLYASRVTPEDEEVVTAHGPQLLALSHAYRIGWLKRAAEASVTARLTPEHAVDMLKLARLCDAPRLYLRCARLAAKDFAAVERSEGWRFARRHDAALELEILQLLEDADQRRERWARERASREAYRQLGEAMDSLEHIFSDDGCSCADADADADTDAPPCRGLRLLMRHYATCGARKAAPGGGCTRCKRMVQLFRLHASVCDRAAPHDDGDRPCRVPLCSHFKGKMRAEKADKTWRLLVKKVTRARAMSRLAAGREREVVPEVVAASWARYSSSGGAARLR

SEQ ID NO: 16336 - protein, 253 aa, Oryza sativa
  Clone ID: TF_OSC401965j.C1.p36.fg
MKQISPPHHDFNPVSATGCKDYISFYLFLEDAVDEPVMGQVTFSLLDQDGKPVLSRTHTTRMFSFSLNSSFGFHKFIRREDMEQSKHLKDDCFAVSVHLVITKGAPSVKVPPSNLHSHYGDLLSSKQGADVEFMMFEALLIFIYTDMLPKMDQEDEVAMAQHLLVASDTYGLQRLMLICEDRLCNHINTDSLAIMLVLAEKHHCIRLKEVCFEFLSSSTALVEFMESSDFLYFIRSCPTVLKDLIYNVAAHGK

SEQ ID NO: 16337 - protein, 637 aa, Oryza sativa
  Clone ID: TF_OSC9665j.C1.p1.fg
MAASSSAAASTSCAVAAEANGSTSTIVATTKPTGHHILKIDGYSRTKAMVAAGDSIDSSRFHAGDHAWRIRYYPNGTDRSNQNPDAISVMLELQDAAAGRNNGAAAAAAVKAKFVFRLLNKDGEPVPSRTYRSSVHSFPSSDGFKNWGFLRFITHGDLEKSGHLADDGFAVRCDVTVMGGIELRVEPASSLAVPEPDMHRHLGRLLSAGDGADVTFRVAGGEAFTAHRCVLAARSPVFKAELYSRGGFLRPAAAGRPGTRVIDVDDMDAGAFGALLHFVYTDTLPEMASADVPAMARQLIAAADKYKVERLKLVCEDKLSRRVVADDTSMTPTPMSTPTTMTDSTTTACRWGAKFQTLRQRPCQRECQDQLLDLAGERVARYSQSGDKCSISKKTDRWVCNSFIKRDELEKSGHVVGNRFAIRCDLTFNVQDLRVRGLVAVQLPPPVLGCHLAERLLFDDETADVRFRVRGETFPAHRAELLGSSMKEHAARTIRVDDMKVPVFAALLYFVYTDELPEMEDDERTVIMAPHLLVPADRYDMDRLAEEGVRGQDGEAPRRRHGGDVAGVGRAPWLPAAQGGHLEVPRRVAAGEVEDGHGERGVPTCDHGFPLHSHGDCSCHARRKFGLASELTVEMRR

SEQ ID NO: 16338 - protein, 404 aa, Oryza sativa
  Clone ID: TF_OSC412646j.C1.p19.np
KTTTQQIDRHIQKSIDTTNRFSYYGNTEIGVLDYSATNASAIGDPINSDLFTAGGLTWRVNCYPRGDKADNNGDYISLYLELISKSKNIKAIFDAFMVDEHGNPSDGSNRLVQVYPPAGYAWGWPRFVKRSNLSSVFVVDGKVRIMCVVGVTGGHLDGGLLPGVTGGHLDGGLLPLPPPNIGVHLGGLLDSEDGADVTFAVGGETFHAHRAVLAARSPVFRAELLGSMAEATMPCVTLRDIEPATFRALLHFVYTDVLQIEGSSSTSTTDLLQRLLAAADRFALERLKLMCAQKLWESVSVETVIATLCCAEMHSCPELKNRCIDLVVTKDNFMEVAVTKDYFHLGQSFPSVIEEITGNLPRTMQRGPWGQTWRQHRVSGSLGGVTSSSRVIYSRIMSATKARS

SEQ ID NO: 16339 - protein, 430 aa, Oryza sativa
  Clone ID: TF_OSC415148j.C1.p5.fg
MEDEGAGGGGIGGDASPVHVGSATEVGVGRDIVPSPTSSRSVMQTVNGSHMFVIQGYSLAKGMGIGKYIASETFTVGGCQWAIYFYPDGKNPEDNSAYISVFIALISDGIDVRVLFELKLLDQSGKAKHKGHSQFDRSLESSPYTLKNRGSMWGYKRFFRRTALETSDFLKDDCLKINCTVGVVVSTMDYSKPHSIHVPESDIGYHFGTLLDNQEGVDVICNVAGEKFHAHQLVLAARSSFFRSELFEHESDEEKNEVDTSNEIKEIVIDDMEPKVFKAVLHFMYRDNLVGDDELSASSSDCSIFDTLAGKLLAAADRYELPRLRLLCESYLCKHISVNSVATTLALADRHHAMELKSVCLKFAAENLSAVIRTDGFDYLKDNCPALQSEILRTVAGCEEECSSGGKSQSVWGQLSDGGDTSGRRVRPRV

SEQ ID NO: 16340 - protein, 386 aa, Oryza sativa
  Clone ID: TF_OSC400305j.C1.p21.fg
MPSSSSAAAAACGPPEFTPGWKTVSTCAPDVVGEGVHVFDIFGYSDHKGMGAHEPIRSGAFSVAGLDWVACLYADGYGVAGIDDVSAYLRLLGDAPTPRVWVSCEVKLVDQRTGVASTPQPFLRYALAFGDKCKALHCMMIPRGQIEVEPYLVDDRLTMEFHVVVRRDPRVSRTARFPRILVPPPDIKRQFANLLQSKEGADVTFDVAGEPFSVHKLVLAMRSPVFKAELCGLLREPGTQPITIVDMQPAVFRALLQFIYTDQFPVTRGFERRDNCEMIRHLLVAADRYAVDRLKLLCQGILCKNLNVHNVATTLALADQHQCDKLKDACIEFMSCSKKMKGVVASKGYEDLQRMAPSVLADAVAQMSKLNKMSRGSVPQDESKSC

SEQ ID NO: 16341 - protein, 343 aa, Oryza sativa
  Clone ID: TF_OSC400049j.C1.p16.fg
MSPPVAEESEGGGGRMPESMDHPPVVEESEARRQQRRPGDGKLHQHGQIDGAVDVEWRADEKSNADFSVQAKYQISFANQVKMQPSLKYIMVRTFIRGCSWTWGYKKFIKREDFEKSDDLRDDSFTIRCDILILRKIRAEETTEILPAAESFVSVPPSDMNQQFGDLLETEKGADVVFEVGGQTFAAHRCVLAARSPVFRAELYGLMKEGDTAGVVRVEEMEAQVFKVLLRFLYTDSLPEMKEEDVMCQHLLVAADRYNLERLKLICEEKLCKYISVGTVSNILALADQHRCDGLKKACFNFLGSPANLSAVVAGDGFKHLSKICPSLMEELVVKLALPATQA

SEQ ID NO: 16342 - protein, 422 aa, Oryza sativa
  Clone ID: TF_OSC400049j.C1.p54.fg
MKATAGLVEAQRRPARSKAVRRRQGSCGGLDVYGQASVEVEASAPTSPSDVGLDAGMTTTTTAAAAALTSSVGDGPPPSRSTTTITAGRTYHILKIEGYSSTLKAGRGQALRSSPFSAGGRTWYISYYPNGGRETNKHCISFFIHLDDDTVNDDVMAQVTFSLLDRHRNPVRSHTVTTTLYNFSVASSNALGFENFIRRDDLQRSEYLNDDCFAIAVRLVITEESPSFTVPPSNMHMDYGDLLSSKEGTDVEFVVGGETFAAHRLVLAARSPVFKAELFKPMEEGTTDVIKIDNMDAQVFKALLVFIYTDTWPEIGQDETTMVQQLLVAANKYSLSRLKIMCEDKLCSYIDTSSVVTMLMLADKYQCHGLKKVCFNFLASSRALSLVMKADNFWCLIQSHPTMLKDLIYNIVTHQLEIKLSV

SEQ ID NO: 16343 - protein, 413 aa, Oryza sativa
  unsure (1)..(413): unsure at all Xaa locations
  Clone ID: TF_OSC401668j.C1.p22.np
SDVSFSVGGETLIHAHRAVLAARSPVFRAELLGSMAEATMPCVTLHDIEPATFRALLHLVYTDALPASSTSSSTAAVLAAADRYALDRLKLMCAQSLWEIVSAETVAATLACAEMHSCTELKTRCIDFLMKDSNFKKAAVTDDYLHLYAELPVSDQRERHGSRLETXNSRHSGQPTNKQKRRWTHRSFSLPSFFFLPSSLFILPDRNSPPCRDGVGRICKESXIINHYFLKLYSPSIAVPPPNLGGHLAAMVGSADGSDVSFSVGGETLIRAHRAVLAARSPVFSAELLGSMAEGTMPCVTLHDIEPATFRALLHFVYTDALPHILSPSFFKKLFAAADRFALDRLKLMCAQKLWESVTVETVAETLACAEMHSCPELKSRCLDFFVEENNFRKVVVTGGYLRLMQGFPSVID

SEQ ID NO: 16344 - protein, 370 aa, Oryza sativa
  Clone ID: TF_OSC401879j.C1.p9.fg
MASRSISSCTTETAKGIHRFEIFSYSMMNTEAEDDSIRSGVFNVGGFDWALLYYPDGIDDDSKGYIGVYLELISKNGEPWALVDVNLINQLQPGQPRQLFTKTDVPTPFRSSSFQESTLGSLKCMKRSDIESTPGFIVNDCIVIECNVTVIYEPKVSKTRALCDAETSSALREIEVPPMEISSDFAKMLKDGVGADVTFRVGEDTFRAHRAVLAARSPVFHAQLCGPMKEKKETQMQEITIQDMQPSVFEAFLYFIYTDCVPRMDDLGNGEKMHLMMHLLKAGDRYGLERLRIMCERFLATNLDTEHVSAILGLADLLDLKKLKEACMEFMVPSERMDAVAASQGYQQLKRAFPSLAFEVWERRSRVRRN

SEQ ID NO: 16345 - protein, 350 aa, Oryza sativa
  Clone ID: TF_OSC405158j.C1.p3.fg
MASRSISSCTTETAKGIHRFEIFSYSMMNTEAEDDSIRSGVFNGYIGVYLELISKNGEPWALVDVNLINQLQPGQPRQLFTKTDVPTPFRSSSFQESTLGSLKCMKRSDIESTPGFIVNDCIVIECNVTVIYEPKVSKTRALCDAETSSALREIEVPPMEISSDFAKMLKDGVGADVTFRVGEDTFRAHRAVLAARSPVFHAQLCGPMKEKKETQMQEITIQDMQPSVFEAFLYFIYTDCVPRMDDLGNGEKMHLMMHLLKAGDRYGLERLRIMCERFLATNLDTEHVSAILGLADLLDLKKLKEACMEFMVPSERMDAVAASQGYQQLKRAFPSLAFEVWERRSRVRRN

SEQ ID NO: 16346 - protein, 136 aa, Oryza sativa
  unsure (1)..(136): unsure at all Xaa locations
  Clone ID: TF_OSC100059j.C1.p1.gp
FRALLQFIYTDQFPVTRGFERRDNCEMIRHLLVAADRYAVDRLKLLCQGILCKNLNVHNVATTLALADQHQCDKLKDACIEFMSCSKKMKGVVASKGYEDLQRMAPSVLADAVAQMSKLNKMSRGSVPQDESKSCX

SEQ ID NO: 16347 - protein, 120 aa, Oryza sativa
  unsure (1)..(120): unsure at all Xaa locations
  Clone ID: TF_OSC9673j.C1.p2.gp
MDADAFRALLHFIYTDTLPDDDDDDDAMARRLLAAADAYGMERLRLICEDRLRRRVAMGNVAVTLALAEQHHCRALKEACVEFLSSPGNLKAAMATDGFEHLKATCPSVLTELVMKQLVX

SEQ ID NO: 16348 - protein, 213 aa, Oryza sativa
  Clone ID: TF_OSC33617j.C1.p1.fg
FPPIFTLLKYILYAGDDDGTIPIPWLNLNGQLGDIVDRADGSDVPFSVGGEMFHAHHAVLAARSPVFKTELLGSMAESAMPCVTLHNIDPATFKALLHFVYMDALLSPTRGGASSTSTTTGFFKSLLMAVDMYALKRLKLMCAQKLWGSVSVETVATTLGYAETYHCPELKSKCLSFLMAESSFKKVAFTDGYFHLRQDFPLIIEEIKKRIES

SEQ ID NO: 16349 - protein, 182 aa, Oryza sativa
  Clone ID: TF_OSC14613j.C1.p1.gm
KAVLERSEYLRDNRFTIRCDITVMKNPEAKDTGGRRVTLPPSDLARHLGGLLATGVGADVTFEVDGKTFLAHRNVLAARSPVFHQELFSLTEKGNAATGGAGVIIRVDDMEAQDFEALLHFIYTDSLPEMKGGDAVAMLPTWSRRLTAMLAFAGEHQCPELEKKCLQLLEDPANLRNIVETE

SEQ ID NO: 16350 - protein, 1765 aa, Oryza sativa
  Clone ID: TF_OSC34061j.C1.p19.gm
MGNSLFSMASSTASPSDGRSPRLPETLSRCVTASVAAAHNFEVTRYSLLAGVGAGEFVTSGTFSIDGHNWNIQVYPDRWKQEMNAGYVSVFLCLCGGATGVRAKYTLSLSENGGESVQRSLTHRFDTVGAFWGFPRFMERPRLRQWLLRRGPGGGDDCVTFRCSLTVIREPRTEGVAAVAVPPSDMRRHMANMLRGGDGADVVVLVRDQPFRAHRCVLAARSPVFRAELFGGGHMRERRTSCVVVDDMEPSIFSAFLHFIYTDSLPENPDTPGDDQDCMAMQHLMVAADRYGLDRLVLICEEKLCRGIDVQTVATTLALAEQHQRVALKDACLGFIVSRGVLGAVARTDGFKHLLTTCPSIMVDILDKVASVMSNPDQKWANLVGPPSQTHERPRGTCFVRAHPWITGLVAGVSVVRTVEYRSAGSQVMDIGPHSIQLIAPPSLYHAASAAAMGDHRDPAFPAAAGGCRLPKTSSVSVTESVTAVHDFKVTGYSLIEGLGIGRYVSSSTFTVGGVDWAVRFYPDGSTVTCLGNASAFLYYCGREKEVRTRFTLNLLGKDGKLSQVTNSYMKHTFSPASDNWGFIKFAEKSKLQSSPFLHNDCLTIRCLLTVVRESHTKDVEVNSVVVPPSNLHTDFENMLQDGEGSDVTFTVGGQEFRAHKCVLAFRSPVFKAELFGPMKENGTQCIKIDDMEPEVFEALLHFIYTDRLPDSCRDGKAAAMQHLLVAADRYGVDRLRLICERRLSETIDVETVATTLVLAEQHHCSQLRQACIGDSLTEIAPMEEFFITHRISCGEIDARSFVEVEDEADRDDGEAAVWGAEGRQPQIEEAVVDVRAPPGTAPPPTPARKRTAAASPLGATPAPAPERKGMAAASLPGATPTPTPVTKRKGTTAASPRGTQSTTPARKGLAVASPPGKPLPTPGRKRNFVAGDWRGGREKERGNNFPPTRARQRRPRLGRKNGSLQMSNDIYGYGNMDYWDVVADMLTSSAARTSSRSVWEGITGTHDFEVVGYSLMDGFGAGRHVCSGDFSVAGHDWYVAFYPDGLDQDSAGYASACLAYRGKERLVRAKYSLSLVARDGRASPLAGDTLRSHYFTPTSRSADVLKFVEKSNLSSSPSSSSYSCLDDDTLTIRCVVTVVTGPRVVSVAPAKERGPRVTVPPPSLHEHLARMLRDGRGSDVAFRVGGRVLRAHRCVLAARSPVFDAELLGPMMETTAPCIEIHGVEPAAFEALLRFVYTDSWPLAGVDVAATVRLLSAADRYGLERLRLMCEEKLHEGIDVDNAADVLAMAELHHCSQLRDACVAFIASPSTLGPVLASSGFEDLIMATGASVTKEILHKQPPSQPQPGMGGPPPPPQGAAGQPPQWGAIPPPMPPHQYGAPPPQQPPAMWGQPPPQAHYGQVPPPQPYYAAPPPQAMPAPAAADEVKTLWIGDLQPWMDESYIYNCFAATGEVQSVKLIRDKQSGQLQGYGFVEFTSRAAADRILQTYNGQMMPNVEMVFRLNWASAGEKRDDTPDYTIFVGDLAADVTDYLLQETFRVHYPSVKGAKVVTDKMTMRSKGYGFVKFGDPTEQARAMTEMNGMLCSSRPMRIGPAANKKTTGVQERVPNAQGAQSENDPNNTTIFVGGLDPNVTEDVLKQVFAPYGEVVHVKIPVGKRCGFVQYVNRPSAEQALAVLQGTLIGGQNVRLSWGRSLSNKQPQHDSNQWGAGAGAGGYYGGYGQGYEAYGGYAQPQDPNMYGYGAYAGYPNYQQQQVAQQQPPQQDK

SEQ ID NO: 16351 - protein, 637 aa, Oryza sativa
  Clone ID: TF_OSC419840j.C1.p2.fg
MAGSEAAAAQEAEMDPDFSGGGGGGPSFEFAFNSVNFSDRVLRIEVVAGDDDDDDDHAPGSSRDGGAGSLSDWARHRKRRREELLKEKGRWIIGDARDTIVQPRNFGRTCNLVLIDYTCRMIWHTRLGLRGQCGQLFEIKLQLLVSCADHDLNACFVLLRSCSKVEPESEAVMPDQINCKVEPEECDAYEENQEEPVAMMDDSPPSVGPDGDDGPSMDSPWSGGVSTPVLRVKNIYISSAILAAKSPFFFKLFSNGMKESDERQATLRITDSEENALMELLSFMYSGKLTSTDPTLLLDILMAADKFEVISCMRYCSQLLTSLTMTTESALLYLDLPCSISMAAAVQPLTDAAKEYLSNKYKDLTKFQDEVMNIPLAGIEAILSSNDLQVASEDAIYDFLIRWARAQYPKSEERREILSSRLLPLVRFSHMTCRKLRKVLICTDLDHEQATKCVTEALLYKADAPHRQRALAADVTTCQKFAERAYKYRPLKVVEFDRPYPQCIAYLDLKREECSRLFPSGRMYSQAFHLAGQGFFLSAHCNMEQQSTFYCFGLFLGMQEKGSMSVTVDYEFAARTRPSGEFVSKYKGNYTFTGGKAVGYRNLFAIPWSTFMADDSLFFLDGVLHLRAELTIKQPTV

SEQ ID NO: 16352 - protein, 368 aa, Oryza sativa
  Clone ID: TF_OSC401762j.C1.p40.fg
MPTATGSRTPVRSASAVIAGTESGQHHLKIDGYSRIKDELPTGSDIKSRSFRAGGHSWHLRYYPNGFNSDCAECISIFLQLDYNVMKGVKAQYKFSLLDRARKPSYSRSSGKADVFLNTGWGYRTYIERGLLESSEYLRDDCLTIVCDFTVFKDLRTEDIDVDDAMPPPQSPPTVVVPPSDLHRHLGGLLATGEGADVTFEVEGKTFAAHRWVLAARSPVFRVALFGATTGGADDVVRVNIDAMKVQDFEALLHYMYTDSLPEMKGGEAAAMLPDLVAAANRYKMERLRLVCEHKLCEYVNGRTVVAMLAFAGEHQCNGLKEKCLRFLDDPVKLRLIVQAEGVENLSKSYPSILKDVIAKFVATPVDS

SEQ ID NO: 16353 - protein, 349 aa, Oryza sativa
  Clone ID: TF_OSC412646j.C1.p21.fg
MLDGGFIELKLRYEDLAAGDFVRSDDIYAGGHTWRVLCYPRGGGAMNSNGQRIGGEYLSIKLDLVTRSTNVRAIFAAFLVHLDGHPSPVHAKSFVAVYPLGAGGRGGGKAAAGWMYFASRSELEKKFVSGDGWVTVVCGVLIPSDSPQALSPPPPPPPSSGGGGGHIGRLLYGAADDTADVALVVGGETFRAHRAVLAARSPVFKAALFGSMAEATAPSVALRDMDPAAFRAVLHFIYTDALPDDIDELAGFSPVDMFQHLLAAAERYELGGLKLLSTKKLLDNVTPENVAGIIVCAETYGCPELKKKCLDYLAREDEHFRKAATTQGYLRLLQDFPSLMDEIRAVIER

SEQ ID NO: 16354 - protein, 795 aa, Oryza sativa
  Clone ID: TF_OSC2852j.C1.p4.fg
MLTSSAARTSSRSVWEGITGTHDFEVVGYSLMDGFGAGRHVCSGDFSVAGHDWYVAFYPDGLDQDSAGYASACLAYRGKERLVRAKYSLSLVARDGRASPLAGDTLRSHYFTPTSRSADVLKFVEKSNLSSSPSSSSYSCLDDDTLTIRCVVTVVTGPRVVSVAPAKERGPRVTVPPPSLHEHLARMLRDGRGSDVAFRVGGRVLRAHRCVLAARSPVFDAELLGPMMETTAPCIEIHGVEPAAFEALLRFVYTDSWPLAGVDVAATVRLLSAADRYGLERLRLMCEEKLHEGIDVDNAADVLAMAELHHCSQLRDACVAFIASPSTLGPVLASSGFEDLIMATGASVTKEILHKVSESWSGPARASRRIDAAAAVAAAARHGRPASAATGRGGAAAAVGRDPAADAAAPVRRAAAPAAAGDVGPAPAAGALRAGAPAPAVLRRAPPQAMPAPAAADEVKTLWIGDLQPWMDESYIYNCFAATGEVQSVKLIRDKQSGQLQGYGFVEFTSRAAADRILQTYNGQMMPNVEMVFRLNWASAGEKRDDTPDYTIFVGDLAADVTDYLLQETFRVHYPSVKGAKVVTDKMTMRSKGYGFVKFGDPTEQARAMTEMNGMLCSSRPMRIGPAANKKTTGVQERVPNAQGAQSENDPNNTTIFVGGLDPNVTEDVLKQVFAPYGEVVHVKIPVGKRCGFVQYVNRPSAEQALAVLQGTLIGGQNVRLSWGRSLSNKQPQHDSNQWGAGAGAGGYYGGYGQGYEAYGGYAQPQDPNMYGYGAYAGYPNYQQQQVAQQQPPQQ

SEQ ID NO: 16355 - protein, 605 aa, Oryza sativa
  Clone ID: TF_OSC22376j.C1.p7.fg
MDPDFSRASRGPSFAFAFNSVNFSDRVLRIEIVAGDDAAGAKGAAGEGCSSLADWAHQRKRRREELRREKAVAFDFRSYPKFESKKKWATNRNSCFPLRGIALGRPHCRLGASAVRYFRRARSRECESGKYTDLETCKVEAEECDTYEENNEEPVAMIEESPPDIGQDGEDGDSCDSSWSMECTQVLRVKSIYISSAILAAESPFFYKLFSNGMKESDQRHATLRITASDSFYLIIVCLSETEENALMELLSFMYSGKLTTNQPTLLLDILMIADKFEVVSCMRHCSQLLRSLPMTTESALLYLDLPSSISMAAAVQPLTDTAKAFLANKYKDLTKLQDEAMNIPLAGIEAILWSNDLQVASEDAIYDFVIKWARSQYPKLEERREILGTRLLPLVRFCHMTCRKLRKVLACNDLDHEQATKCVTEALLYKADAPHRQRTLAADVLTCRKYAERAYKYRPLKVVEFDRPYPQCIAYLDLKREECSRLFPSGRIYSQAFHLAGQGFFLSAHCNMDQQSAFHCFGLFLGMQEKGSTSVTVDYEFAARTRPSGEFVSKYKGYYTFTGGKAVGYRNLFAIPWSSFMADDSLFFIEGVLHLRAELTIKQP

SEQ ID NO: 16356 - protein, 394 aa, Oryza sativa
  Clone ID: TF_OSC415318j.C1.p8.fg
MAAAAASTVPQSSSTSSTPQNTISTHSTELVRGSHEFTVAGYSLQKRKGAGHSIRSGSFEVGGYSWAIRFYPAGSTKEEERHVSVYLELRSTVVEKVTARFSFHVHGASASSLHMRGSFDDYTPTSKSWGYPKFMEIETVESEYLINDCLTLLCDVEVVKTVKTGATISCFITVPPPAICRDLELLVGSKEGSDVTLQLEQSEYDAHRAVLAARSPVFSAQFFGPMADEDAAAAGSRRNVRIHDIKPAVFEAVLHFVYTDTLPPATTSWSASHRDKRPKLSDVAAASCSEEEVRVMIGERLAAADRFDLERMRLLCEDALWETIDVANAAATLRLADRHHCPQLKELCMEYIASAGVLAAVMTTEGFRELKLDCPSLLIEILENFGKRSEADEE

SEQ ID NO: 16357 - protein, 394 aa, Oryza sativa
  Clone ID: TF_OSC900359j.C1.p12.fg
MASSSSPCKLVSCGDNRHFMFRVDGAAIRRPVGRIVKETCEIGNGYTCEASLFVPSLLGERKVMMILAVTVNSDRAQSLARAHKVFIDMALLDDTKSPVLPPFARSVMSPSAAAGSSPKLPPPVAGSNLAASCKLVASRDHLLANCVKGGILAALCWVVFVPSSPRSPYSLLAHCLATMSNGRDLTDVCFDVDGKSFHAHRLIMARQSEVFRAELLGSMAESKMECITISDMSASTFKHMLHYIYCNDLPTCVKDTDDQSSWIFELQHLLVTADRYGVDTLKDLCEDTLCADITTDTVTSTLELAETRSYPKLRTSCLVFLSNTQNFAEVATTKEYYNLIQSYPSVLSEIRNRFKRPRPSLMLAPSTVTENQNKRPRLSPKLTPSADTKDENNP

SEQ ID NO: 16358 - protein, 290 aa, Oryza sativa
  Clone ID: TF_OSC400305j.C1.p24.fg
MARAKTVSKCITETAEGSHVFSITEYSQKRGMGVGKGVEVHASSDLRLLDHTTGLSTSVTKTLPKASAYLRDDRLDIECVVTVMKEPRVSQTKSSPKVAVPPSDIAAHLGKLLESKEAADVTFYVGEDTFAAHKVVLAMRSPVFKAELFGPMREAGAQVLPIKDIQPDVFKALLHFIYTDSLSIIDDLVGDDRGEMIRHLLVAADRYAMERLKLICESDLCENLNVQTVAATLALADQHHCASLRDACIEFMSSSSMDDIVATQGFVDLKTNCPSVLVDAFVNMSMLNKR

SEQ ID NO: 16359 - protein, 267 aa, Oryza sativa
  Clone ID: TF_OSC934j.C1.p1.fg
MASMYRLPRNAICAACYEGAKAIIAFFNDDDDEHADADQGSVKPSRLTKLNSTTKGLRDAWEEVKQMRCREEETKQRASFLQQGFAAAWKDGIHTDIAVRPGTGPPIQAHKAILATRSEVFRHILAGDDDCKAPAGDSLSLPELTHDELSHLLAFLYTGSLATCTEERHLHALLVAGDKYDVPFLRRACEARLAAGVEAGNVLRTLEVAELSSSAALKERAMGAVVEHAEEVVFSPEYEEFAVRNAALCVQITRALLANKAFPAKTP

SEQ ID NO: 16360 - protein, 401 aa, Oryza sativa
  Clone ID: TF_OSC400049j.C1.p25.fg
MSFAGVSFICDGVHVCSSPANGAAGSAAYGYHLLVINNYTRTKQAIPNGFRIKSGKFKLGGHTWHIKYCPNGDRSTISGFVSFHLVLDCDGGDGAVAAEPVNAKFEFSFADQVAKHQATRLRATKVCEFSRDCSAWHVGRFVRREALERSRYLVDDCFTVRCDIMVVHAGAGANGVAAATAAPSMAGAVESFGRLLDTKLGADVAFEVGGETFAAHRCVLAARSKVFDAELFGPMKEGTAASVVRIDDMDADLFRGLLSFIYTDELPEREDHGGEKETSSDDDDDDDDDDNGAQSDQKHKQFTWLQQLIVAADRYDLQRLKLLCEEEMYDHIGEKTVETMLILADHHHCRVLKDACLGFLGSHGNLQKMMAADGLDRVIKNFPSLTKEIIGRFAVVMANKS

SEQ ID NO: 16361 - protein, 395 aa, Oryza sativa
  Clone ID: TF_OSC569j.C1.p1.fg
MSTATPTPNVVDGDCGGTPPSRSASTIIAARTLHVLTIHGYSDTLKSNVDPSQHLLLSSPFSAGGHTWCIRYCPIGCTEESKDFISIYLVLEDTITDVVSAQVTFSLLDQQGNPMPSHTLTTPLLKFSLQGTLPKALGYNSFIRRDDLERSGHLKDDCFAIGVHVVVTKEAEPSSITVPPSDMHLHYGDLLSSEERYATDVEFLVGGETFTAHRLVLAARSPVFMVELFGPMKEGTTVNKIHIFDMEAQVFRALLKFIYTDMLPEMDQEDETAMVQHLLVAADKYGLHRLKMICVEILSNHIDAYSVATILVLAEKHYCYGLKEACFEFLNSSAILSAIVNTSDFLYLIQSCPDVLEDISFNIVARQLERAIFLSENQEGQINSVEIRINSVMTN

SEQ ID NO: 16362 - protein, 357 aa, Oryza sativa
  Clone ID: TF_OSC569j.C1.p2.gm
EGMSTATPTPNVVDGDCGGTPPSRSASTIIAARTLHVLTIHGYSDTLKSNVDPSQHLLLSSPFSAGGHTWCIRYCPIGCTEESKDFISIYLVLEDTITDVVSAQVTFSLLDQQGNPMPSHTLTTPLLKFSLQGTLPKALGYNSFIRRDDLERSGHLKDDCFAIGVHVVVTKEAEPSSITVPPSDMHLHYGDLLSSEERYATDVEFLVGGETFTAHRLVLAARSPVFMVELFGPMKEGTTVNKIHIFDMEAQVFRALLKFIYTDMLPEMDQEDETAMVQHLLVAADKYGLHRLKMICVEILSNHIDAYSVATILVLAEKHYCYGLKEACFEFLNSSAILSAIVNTSPNLGEVRACQSI

SEQ ID NO: 16363 - protein, 246 aa, Oryza sativa
  Clone ID: TF_OSC401835j.C1.p31.fg
MWCQSCKEEYEEEDAGTCKECYEEASETEEELKREIDDLRSRLHFLRLPSPSLDASSLSHSDLLLHAIPADAPARPDTPAVPAHRVILASRSPVFRAMLENEMEESRSGIIKIYDVSYDVLRAFVHYMYTAEALLDEQMASDLLVLAEKYEVKNLKAYCEKFLTSKVSNDNAITHYAFAHRHSAKQLLETSLAAIMDNMSTLADREEYKELVEKDPRLVVEIYEAYLNRQVNTAAGKETDSSSRKG

SEQ ID NO: 16364 - protein, 588 aa, Oryza sativa
  Clone ID: TF_OSC401916j.C1.p9.fg
MDYFTGTGTIVVSDDSLYAAFGYGDPFGFAPRARPPIRSLPFAAGGYQWCLWFHPTTFAGFFGFGVELLTAGAKARASFEFGPVDAASHNVIVRMPPFLFDHPHHPMVIMVWPKAMLAEEATLFVRDHAVVFRVDVTVVPDEPLPPDAGVGDDDVLPPSDMLAQLGNVYDTKEGADVTFSVDGELFAAHRVILAMRSPVFRAAVYGEMRESGRGGGPIAIDDMRPDVFDALLRYIYTDALPAAADDDDMEATWSDLLVAADRYGVERLKLICERALRGRLDAGNVADMLALADRQHCETLKDACIKFMATSGKMEEVKASQGLIKMVADRETGAKDQIGVYLELITKGTKARASYKLRLLNHVTACPCLWYTCPLKIYDSIDDNKSFTWGTKKFADRSKLEVASEYLQDVRLVIECDVMPLVRIEAIAEIIRSPSSPWSQLSEDIGKLLEMETGRSRRELQGQRSTLNTIDRVASTIRRANEREEKYLGEEERKELIKHLLITVDRYAIEGLKTMLEDGLCKVLSLGNVKEMFALTDQHDCSILKDVCFEFITSSSVHGLGDVALSEGYESLRESCLAAIVDALQRVQ

SEQ ID NO: 16365 - protein, 369 aa, Oryza sativa
  Clone ID: TF_OSC400049j.C1.p7.fg
MSPAVGRGNPPSRSASSSTIVAETATGYHLLKINGYSLTKATTPTGSFLPSSPFTVGGHRWNIKYYPNGDDVKTADYISFFLVLEEEETNMGLTVQAKFKFSFANQVKKQPSLKYRPIKTFNLEDSCGWGYVEFIKRVDLEKSDDLRDDSFTIRCDIVVVREIRTEETTEILPVESFVPVPPSDMDQQFGDLLETEKGADVVFEVGGQTFAAHRCVLAARSPVFRAALYGSMKEGDTDGVVHIEDMEAQVFKLLLRFVYTDSLPEMETEEDVVCQHLLVTADRYDLHRLKLMCENRLCKYIGVSTVSNILALADQHHCDGLKKACFSFLGSPANLSAVVASDGFKHLSRSCPSLMEELVVMLALPPSHA

SEQ ID NO: 16366 - protein, 120 aa, Oryza sativa
  Clone ID: TF_OSC405157j.C1.p3.gm
MASLYGSMREHRAPRIAVDDMEPEVFDALLRFVYSDTLALPGDLGEGEYKEMVRQLLEAADRYAMDRLRVICELILSRSLDAKTVAATLAMADQHSTTATRSRMFVFSSWPLGWMTTIND

SEQ ID NO: 16367 - protein, 500 aa, Oryza sativa
  Clone ID: TF_OSC400049j.C1.p3.fg
MATAACGESPSRLGSASAIVADTETRYHLLKIGCYSRTKATTPTGSFLSSGQFTVGGHRWRINYYPNGESADSADYISLYLLLDDKATNSSVKVQAQFKFQISSTDQVKNTPSLASTNVNTYGEDSSWSWGHRKFIKREDFEKSNDLRDDSFTIRCDVAVIGEIRTEKTTEIPSATTFVTVPPSDLNQQLVDLLETEKGADVVFEVSGETFAAHRCLLAARSPVFSAELYGLMKEGDTAGVVRIEDMEAQVFKLLLRFMYTDSLPKMEEEDVMWQHLLVAADRHDLQRLKLICEDRLCNYIGVSTVLNILVLADQHHCDGLKKACFSFLGSLENLSAVVTGDGLEHLSRSYPSLMKELFVVMALPPNHVLNLSHQVYYENQNFNVLLLLIKNSDLTGVNLKKTGWQGPSLVSEYDVSYSSGDPGKLPPIERVTVENAQGVDHCPVSASGREWCSACGLVADGKERNARIFEQRSRTAGQLFSGIREIMIWKEAGIFRQCD

SEQ ID NO: 16368 - protein, 324 aa, Oryza sativa
  Clone ID: TF_OSC401879j.C1.p6.np
RRRVASTLALADRHGCRGLREACGLVDEEILAAVVGGDEAEPLGGVEPLHSPSPSPTPSRPRPRPLAAAAAATQNPRNPRSSQAFPAWGHLRFMRRRELEEMGFVRDDRLTIECVVNVVLDPVVTAGDAPELDHPSNILGHLAGLLGDKGTADVTLVVRGEEFAAHRAVLAMRSPVFKAALYGPMKESTDANAGRVAIDSVEPAVFRALLHFIYTDTTAAMDDLDDDDDDKAQMIMHLLEAADRYDVERLKLICELMLCKSIAVDTVAATLAMADQHHCQKLKEACIEFLATSKKMEGVMESQGYEKMKLSCPSFMVDLWEIIG

SEQ ID NO: 16369 - protein, 345 aa, Oryza sativa
  Clone ID: TF_OSC31366j.C1.p2.gm
MGQCAMSHTRSTTAGAAGGKPPIAPPPTSSASAIVADTASGYHLFKINDYSRTRDIFPTGSALKSRAFTIGGHQWRIHYYPNGNTEECGEYISLFLHLDEIVTDKNVYAQHGFRLFDEFAGDNDDDDELQPSSIADLGQVSTFGGNNIGLGRLRFIKREELEKSKYLKNDSFTVRCDVVVTKRIRSEETPLVVRTSPKPKVARLVTVPPSDLHRHLQDLLCAEKGADVVFEAGGETFTAHRCVLAARSPVFSAELFGSMKESDTTVVIRIDDMEAQVFRALLRFAYTDSLPEMKEKDEGAMCQHLLVAADRYAMERLKLVCEEKLCERIDVSSVATVLALAEQHH

SEQ ID NO: 16370 - protein, 129 aa, Oryza sativa
  Clone ID: TF_OSC400299j.C1.p36.gm
MVAAAEFPSYVSVPPSDLHRHLGKLLTSGDGTDVTLEAGGETYKAHRSVLAARSSVLKAELLGPMAQPRSTAAATPTRINDIEAPVFRAMLHFIYTDHLSSTMATDGFEHLTTSCPAILKELMSKLVVH

SEQ ID NO: 16371 - protein, 466 aa, Oryza sativa
  Clone ID: TF_OSC400294j.C1.p19.fg
MTYKPVRDELSMPGVHPSHQGDRVSGHEKDDLQSSGVWRSSSLLNMLSIAQTLKIARDRSSLTHHASTIKHCKTFRMLHPSPESHPTFRMTDNCNTFSTIVAEAVSGSHVIKIAGYSRIKVLLRNGESLTSIPFSVAGHSWTIRFYPNGDSAESQDYLSFYLILDSANSYDVKVIFSFELLGKNGRSVSSYSFTTDLRTFSYKGSLWGYNKFIHQTVLEESSAHLRDDSFSIRCDIKVFKEIYSQETKGVHSKFVEVPPSNLHQHLGNLLDSMDGSDVVFEVGEERFSAHRCVLAARSSVFKAELLGTMKEKADGAIQVDDMEPGVFKSLLHFIYTDSLDTMAQEDQSRDEASEEEDLVMAQHLLVAADRYNVERLKLICEEKLCESIDSSMVATSLALAEQHNCNGLKEACFEFLASPSNLLEMMASDGYDHLKTSCPAVLKELTTRFLPPETKASEEITIGLYN

SEQ ID NO: 16372 - protein, 613 aa, Oryza sativa
  Clone ID: TF_OSC900305j.C1.p6.fg
MTSHGELKDMFVKILHFSQKVISNDKILKAMTSNGKLKDMFAKILHSLPANYGKEKHNNVENGITLVGASREILIDVVWKKVIFNDKILEAMTSNGKLKDMFAKILHSLPANYGKVKMKSTIMWRMKSLIIVTIQGSKYKYLEPLSLIMDQLSTMFYWAEDRLHPRQGDRVSGHEKDDLQSSGVWRSSSLLNMLSIAQTLKIARDRSSLTHHASTIKHCKTFRMLHPSPESHPTFRMTDNCNTFSTIVAEAVSGSHVIKIAGYSRIKVLLRNGESLTSIPFSVAGHSWTIRFYPNGDSAESQDYLSFYLILDSANSYDVKVIFSFELLGKNGRSVSSYSFTTDLRTFSYKGSLWGYNKFIHQTVLEESSAHLRDDSFSIRCDIKVFKEIYSQETKGVHSKFVEVPPSNLHQHLGNLLDSMDGSDVVFEVGEERFSAHRCVLAARSSVFKAELLGTMKEKADGAIQVDDMEPGVFKSLLHFIYTDSLDTMAQEDQSRDEASEEEDLVMAQHLLVAADRYNVERLKLICEEKLCESIDSSMVATSLALAEQHNCNGLKEACFEFLASPSNLLEMMASDGYDHLKTSCPAVLKELTTRFLPPETKASEEITIGLYN

SEQ ID NO: 16373 - protein, 596 aa, Oryza sativa
  Clone ID: TF_OSC412646j.C1.p23.fg
MEDKVLPEWYSKEDNGEYLSLFLELVRESTSNNVRAIFDAFLVEKDDEPSSTHADRGVHVHPTNGYTAWGWPQFVKRSDLESSSSSYVVDGKVRIMCVVIVIRDNTVPVPPSDIGAHLGGLLDRGEGTDVSFLVDGETFPAHRAVLAARSPVFRAELLGSMAESKMSSITLHDIEPLTFRALLRFIYTDKLPADDGGDQLKMAAMATDELFQKLLAAADRYDLSRLKLMCAQKLWEAVSVDTVATTLIHAEMHGCPELKSSCLDFFVQDKNFKETVLTEGYVQLVQRFPSIKDEIRGRTERKKGGGCLLAGRRARRGNHRVGKLASMRGEREEAGRPMNGTGRPARGRGGRRVGWGGRRACEEREKAGKRAEGDSHRVGRPMNGTGRSACARGEGEGGEKGGGRQPSLHGGGGGGEALSASILVASTPRVFTRDAAGSLHPDNSDAAGVHPTASATPLIMGARKLCVALVFGLLAADVMVTSILKGSFVLMLVPKSFESDHARVRGQQQPKVCQGLMAGNTATGDCQTGDGERRVRLREAWAFRRWRLEDRGGPGVPVASRPLGQAPGDLAPSTRRAGEETRRGRGVRESLVEAES

SEQ ID NO: 16374 - protein, 370 aa, Oryza sativa
  Clone ID: TF_OSC410511j.C1.p2.fg
MASNSPATSDAATGDVPEPSRSSSVVKAMSGYHVLKMEGYAAGVKGLGVGKFIDSGSFDVGGHRWCIRYYPKRSPASPGDGDWISIYLNLCSTAAAIGDANASFTISLLDQDDDEHQPVAAHSRSCSSTVTFSSAATKAWGFPRFVERKTLEESPYLRDDSFVLRCDVTVFKETIIEPAAPTPLVAVPPPDMHRHLGSLLSGGHGADVTLQVGDETFAAHRCVLAARSPVFMAELFGPMATSRHNDRETIRVHDMEPRVFEAMLHFIYNDSLPKVDDDEVVAMAQHLLVAADRYGMERLKLMCEDTLCSHVDASTAATALTLAEQHHCEGLKDACFKFMADPDNLKVVMESDGYLHLTRSCSYVLKKLAT

SEQ ID NO: 16375 - protein, 280 aa, Oryza sativa
  Clone ID: TF_OSC401965j.C1.p5.fg
MATTTATTLAASAGDGSSPPSRSTVMTIAAQAYHVLKINGARGFKNFIRRDELERSEYLNDDYFAIAAHVIIPKEKPSVVVPPSNMHLHYGDLLVSKEGTDVKFLVGGEMFAAHRLVLAARSLVFKAELFGPTKKGTIDAIQIDNMKARVFKALLGFIYTDIWPEIGHGKDNVAMAQQLLAAADRYGLQRLKFVYEDKLCNHIDTYSVSTMLVLVEKHHCCKLKEACSTFLSSMSPPIVEDPNSSIFGSELKKTVSSSENHGSQINRTDIRIQLWQNADV

SEQ ID NO: 16376 - protein, 354 aa, Oryza sativa
  Clone ID: TF_OSC401879j.C1.p12.fg
METVRGTHRFTFHGYSLCKGGGAGRCIRSGTFTVGGYDWCICFYPEGQGGGGGDREHVSVKLRLVTRCATATAFYELRLLDQDTGRAAAVARASGAPRVFASSNPGTACFGRRAFMERSKLEASPACLRGDSVVIDCAVRVVVHDPVVAAVRRREAPDDVPPSNILRQLVAQVESEGADVTFAVQGETFTAHRLMLAARSPVFKAELYGAMKEKDADHVIAIVDVQPAVFKALLHFIYTDDMPPDLGLAAADDDDTDRIDMARHLLVAADRYAVERLRVICERVLRRSLGVETVIDTMALAEQHSCGELKEACLEFIDSHSKRIVESDGYKNLKRACPLLVADMWERIVLSRLE

SEQ ID NO: 16377 - protein, 696 aa, Oryza sativa
  Clone ID: TF_OSC900182j.C1.p6.fg
MSLLENSVDSNLQIHRTTNNRKAALAREVRTQVDALHRCFSWRHADRAAAKRATHVLAELAKNEEVVNVIVEGGAVPALVCHLKEPPAVAVLQEEQQPRPFEHEVEKGAAFALGLLAVKPEHQQLIVDAGALPLLVNLLKRHKNATNLRAVNSVIRRAADAITNLAHENSNIKTCVRIEGGIPPLVELLESQDLKVQRAAAGALRTLAFKNDENKSQIVDCNALPTLILMLRSEDAAIHYEAVGVIGNLVHSSPNIKKEVLNAGALQPVIGLLSSCCTESQREAALLLGQFASADSDCKVHIVQRGAVRPLIEMLQSADVQLREMSAFALGRLAQRSSFVSQDTHNQAGIAYNGGLVPLLKLLDSKNGSLQHNAAFALYGVADNEDYVSDFIKVGGVQKLQDGEFIVQATKDCVAKTLKRLEEKINGRVLKHLLYMMRVGEKSVQRRVALALAHLCAPEDQRTIFIDNNGLELLLDLLVSVSLKHQLDGSVALYKLANKAAALSPMDAAPPSPTPQVYLGEQYVNSSTLSDVTFLVEGKRFYAHRIALLASSDAFRAMFDGGYREKDARDIEIPNIRWNVFELMMRFIYTGSVEVTSDISQDLLRAADQYLLEGLKRLCEYTIAQDVNVDNVSDMYDLSEAFHAMSLRHTCVLFILEQFEKICVKSGSSQLIQRVIPELRNFFAKALRPSHRNAQP

SEQ ID NO: 16378 - protein, 382 aa, Oryza sativa
  Clone ID: TF_OSC423269j.C1.p4.fg
MATECTTSTSTTATVEGRHRFRVAGYGATKGAAPGHRVASGTFTVGGFDWAVVFYPEGVTAADMDFVSVYLELKNAAAAAGGGGGGAVARAFYDLRLIHPATGEPRSVRWPMDGSTSRVFSQAFPAWGHLRFMRRRELEEMGFVRDDRLTIECVVNVVLDPVVTAGDAPELDHPPSNILGHLAGLLGDKGTADVTLVVRGEEFAAHRAVLAMRSPVFKAALYGPMKESTDANAGRVAIDSVEPAVFRALLHFIYTDTTAAMDDLDDDDDDKAQMIMHLLEAADRYDVERLKLICELMLCKSIAVDTVAATLAMADQHHCQKLKEACIEFLATSKKMEGVMESQGYEKMKLSCPSFMVDLWEIIGRKMTSYSVIPNIYARDKD

SEQ ID NO: 16379 - protein, 402 aa, Oryza sativa
  unsure (1)..(402): unsure at all Xaa locations
  Clone ID: TF_OSC100059j.C1.p4.np
PDRSRANRKIPTKKKSAKNSVTVSTVVPNTAEATHVFDIVGYSQMKGRGREEHVTSGTFVVGGLHWAILLFPDTHVILLDDEEDNVTAFLELQSQGGSKVRACCDVRLVDQTRPRLLCCAGAAGCQDIQGVQCRXIQQGQRLKMKRTEFEAPPYLVDDRITLECVVTVKKEPTRARPVPRIKVPPSNMMQQLGDLLESKEGADVVFDVAGETFPAHKLVLAMRSPVFKAELCGPMRESGTEPISIVDMQPVVFKALLQFIYTDWLPSIRDLEGDDNSEMIRHLLVAADRYAVDRLKLLCQSILCKNLRVGNVATTLALADQHHCGMLKDACIEFMSCPNMLDDVVASQGFVDLENTAPSLVAXAKEKMGRFKKMSRMTKSNAPEDEPNSNSFSLXVIWISVY

SEQ ID NO: 16380 - protein, 404 aa, Oryza sativa
  unsure (1)..(404): unsure at all Xaa locations
  Clone ID: TF_OSC100059j.C1.p5.np
PSTSDAAAAAXSGTRWSRCRTVSTVVPNTAEATHVFDIVGYSQMKGRGREEHVTSGTFVVGGLHWAILLFPDTHVILLDDEEDNVTAFLELQSQGGSKVRACCDVRLVDQTTGLASSAAPAQPDAKTFKVFNADESNRVSCLKMKRTEFEAPPYLVDDRITLECVVTVKKEPRVSRARPVPRIKVPPSNMMQQLGDLLESKEGADVVFDVAGETFPAHKLVLAMRSPVFKAELCGPMRESGTEPISIVDMQPVVFKALLQFIYTDWLPSIRDLEGDDNSEMIRHLLVAADRYAVDRLKLLCQSILCKNLRVGNVATTLALADQHHCGMLKDACIEFMSCPNMLDDVVASQGFVDLENTAPSLVAXAKEKMGRFKKMSRMTKSNAPEDEPNSNSFSLXVIWISVY

SEQ ID NO: 16381 - protein, 355 aa, Oryza sativa
  Clone ID: TF_OSC400305j.C1.p22.fg
MKRHQMESVPRTVSTVVPNTAEATHVFDIVGYSQMKGRGREEHVTSGTFVVGGLHWAILLFPDTHVILLDDEEDNVTAFLELQSQGGSKVRACCDVRLVDQTTGLASSAAPAQPDAKTFKVFNADESNRVSCLKMKRTEFEAPPYLVDDRITLECVVTVKKEPRVSRARPVPRIKVPPSNMMQQLGDLLESKEGADVVFDVAGETFPAHKLVLAMRSPVFKAELCGPMRESGTEPISIVDMQPVVFKALLQFIYTDWLPSIRDLEGDDNSEMIRHLLVAADRYAVDRLKLLCQSILCKNLRVGNVATTLALADQHHCGMLKDACIEFMSCPNMLDDVVASQGFVDLENTAPSLVA

SEQ ID NO: 16382 - protein, 300 aa, Oryza sativa
  Clone ID: TF_OSC405158j.C1.p2.fg
METAPSSSMSPASGTYVLDVHGFSGLRRQHCGGGGCIVSPTFTVAGLEWAIRYHPEGDADEVTDDVAVFVVLVTKDATAWAHVEFRLLDQAAGEMVTFFGEKDPILFDSGSEDLSTWGTGELTARSFLDGSPYVAGDCLKIECAVDVCRDRLTFHHDTPPSGEPFRQYPADDEPADVTFKIAGETFPAHVSVLAARAPGLLTNTTSQAATITIDDDDDDTPAAAAAFGALLHFAYTDTLPVASGLDGAGHTALLGRLLVAAGRYGMARLGAICERAMCRSLDAGTAADTLAMADGTASTR

SEQ ID NO: 16383 - protein, 344 aa, Oryza sativa
  Clone ID: TF_OSC401879j.C1.p11.fg
MASSRPISESTITRSTCATRTARATHQFEIVGYSLKRCLAAGEFVRSSAFAACGYRWSVRVYPGGFGPAHREFVSVFVKMMTNRGKAAARFDLRLIDRATGLPRSVFRAAQPVVFDYSVKHKKCKGKRGTRAFMRRRDLESSAFVRDDRLIVECVIDVVVANGGDDDTAAAASPLAGVPAPDLSRHLGELLERADGVGADVTFDVRGQPFAAHRIVLAMRSPVFMASLYGSMREHRAPRIAVDDMEPEVFDALLRFVYSDTLALPGDLGEGEYKEMVRQLLEAADRYAMDRLRVICELILSRSLDAKTVAATLAMADQHSTTATRSRMFVFSSWPLGWMTTIND

SEQ ID NO: 16384 - protein, 331 aa, Oryza sativa
  Clone ID: TF_OSC400239j.C1.p24.gm
MDIGPHSIQLIAPPSLYHAASAAAMGDHRDPAFPAAAGGCRLPKTSSVSVTESVTAVHDFKVTGYSLIEGLGIGRYVSSSTFTVGGVDWAVRFYPDGSTVTCLGNASAFLYYCGREKEVRTRFTLNLLGKDGKLSQVTNSYMKHTFSPASDNWGFIKFAEKSKLQSSPFLHNDCLTIRCLLTVVRESHTKDVEVNSVVVPPSNLHTDFENMLQDGEGSDVTFTVGGQEFRAHKCVLAFRSPVFKAELFGPMKENGTQCIKIDDMEPEVFEALLHFIYTDRLPDSCRDGKAAAMQHLLVAADRDSLTEIAPMEEFFITHRISCGEIDARSFV

SEQ ID NO: 16385 - protein, 718 aa, Oryza sativa
  Clone ID: TF_OSC400049j.C1.p33.fg
MSSPSSQQPASAIKAPTTSGYHRLRIDYYRSLGSPTGWALSSRDFVVGGRQWRISYYPNGNRPENAEFISVFLCLDSSSPKPAMLQVTITFDDEAKKQSQLRKAPVITIAPGACWGYHRFVKRDDLARSKRIRPDGFFTIRCDVSLIDHFTAQEDEPVFVSVPPSELRRDLGGLLDTGSGGDVVFQVGGEAFTAHRGLLAARSPVLAAALYGPMMEGGGLQGGVAIKIDDMDPLVFKALLRYAYTDSLPPQMQQGELEEEGRAMAQHLLAAADRYGMERLRLLCEAQLCKHIEVASVASILILADQHGCSGLKNACFEFLKSPGKFAAAMATQEYDYLKTNHCALADEVVKGNQAKWMLATVETFMRHRLNSKSILETATREIALHASTSNETPPVFLDLEESLRAKGDMTLREEATLKVLKVVATLGKAISTGAIAAVGYYVPGIVGAKFGEPSLPRLPRFAMAAVTSWFAGKVMYYAILQGSTEFILKHGEERMKMELSNIILNKHSDDKTLVEAVKTQFFAEHLFSDQYQDRTLFRWHLRRTYVDSAFMERVKEIEVKSSNDGPGLISGQRIISTRPFGDLMEDPLACILGSPDSNMESNKSAEHTGTIVKRREIACPPAVLVEPIRLQPNVPICSLLARSRTGSNLEVNPVILDLEESLLAKGNMTLEEEVTIRVSKMTASVFKVFATAAFGASSYYALGLGELSLHARARLDL

SEQ ID NO: 16386 - protein, 598 aa, Oryza sativa
  Clone ID: TF_OSC9666j.C1.p2.fg
MPFHSSATINLRTSYLEPVASRTYGGNVHRFPSPRGSSSWGFHKFIRHDELERSGHLTGDRFAVRCDVTVMRATELRVEPACLAVPEPDLRAHLRRLLSTGDGADVTFRVGGGETFAAHRCVLAARSPVFKAELCGRGGAAAGRCVDVDDMGAGEFGALLHFVYTDTLLEMASRDVPAMARRLIAAAGKYQVERLKLVCEDMLRRRVDTSMAMATTTDSAATTDDQLSQRPWLTQLFFKFASRMVGGMVVDAFTPEPPTAAEKSGDASPSLSPSPSCSTVAVSEASGHHVLRIEGYKRTKMMMATGEHLNSGEFHVGGYTWRLRYYPNRYDQEFSSSISFALVRTGRDDDDVVVRARVKISLLDVAGEPVTRYSHSDNKCTFYEGHDLWAIKSFIRRVDLEDSGHLDDGGGGGDSFAVRCDLTFNVPDIRVDVDDAAAVTVPAVPPPLLHRHLGDLLASEAAADVRFNVDGEAFAAHRCILAARSPVFRAELFGSMRERAARAIVRVDDMDADAFAAFLHFVYTDELPEMDDDGEEAAAVMAKHLLVAADRYGMERLKKVCEDVLFRHVVVATAATSLALAEQHDCPELKDAILRFKL

SEQ ID NO: 16387 - protein, 307 aa, Oryza sativa
  Clone ID: TF_OSC34061j.C1.p16.fg
MASSSTSSRCLTASVTGTHNLEVTSYSLLEGMGVGKFVSSTTFSVAGYDWNLRFYPDGITDNDRKEGYGAVWMLASVYQISIAKEHAIRRIRFTGNDSFKIECSLTVISESRAEDVSTIPVPPSNLHQHLAGMLHGVEIADVEFSVGGEPFRAHACVLAARSPVFRAELLGPAAARSIKIDDDDDMEPATFKALLHFIYTDHLPNDSGFGKDAAMQRRLLVAADRYGVDRLRAMCGVKLYKSVSVGTVVDSLEFAEKHHCAQLKDACLGFMASPNVLGVVRKTDGFKRLVEGCPWVLKEILDKVPRF

SEQ ID NO: 16388 - protein, 382 aa, Oryza sativa
  Clone ID: TF_OSC401668j.C1.p19.fg
MEHRGTRGEHSPVRMKHLAANREGDVRAIGAAHHDAELVPQVGRWHCNRFVVVAQNDEATYECNHIARVKFTQLDEAPPGIKAEALGCLAYQQTPLGMLHGWYSTLCSMKLETRSITHGWVGTPKAGVGDREMRIVTGQRRRLGMLLVGERRSRGGGQPCEPPKTREERWGGEISLEMKKRSSGGGGGWGVRMASSARCRRRARGLGDGAAAIHMCRVDHLNGSDVFFFVGGETFHAHRALLAVCSPVFKALLLSSTAEAAACSITLNDIKPAMFEALLHFMYTGDFLPAGAHSSSPDSSDTNTDTLHRLLAAAHEYKLDRLKLMCARKLEESLSVETVARTLGYAKMCGCSELKSKCLDLLLLGEEEHQSIGHTWLLLALA

SEQ ID NO: 16389 - protein, 424 aa, Oryza sativa
  Clone ID: TF_OSC400432j.C1.p4.fg
MDDDAGDASPPPAAAGVGATAAQSRDMAASPTSSRSVTETVNGSHRFVIQGYSLAKGMGVGKHIASETFSVGGYQWAVYFYPDGKNPEDNSAYVSVFIALASEGTDVRALFELTLLDQSGKGKHKVHSHFDRSLESGPYTLKYRGSMWGYKRFFRRTALETSDFLKDDCLKINCTVGVVVSTIDYSRPHSILVPDSDIGYHFGTLLDNHEGVDVVLSVGGERFHAHKLVLAARSTVFRSKFFDDEDGEKNEPGENDDVQEIVIDDMEPKVFKAMLHFIYRDTLVDDNELGGSSSEGSIFDTLAAKLLAAADKYDLARLRLLCESYLCKAISVATVASTLALADRHHAMELKAVCLKFAAENLSAVIRTEGFDYLKDNCPSLQSEILRTLAGCEEECSSGGKSQSVWGQLSDGGDTSGRRVRPRT

SEQ ID NO: 16390 - protein, 405 aa, Oryza sativa
  Clone ID: TF_OSC400049j.C1.p10.gm
MVVEQRPNHQRLGRIHGAKDGAPLAPRMLLQVLGPKGFRPCRPPPAARRLSPPRSDSTSTIVAGTAAGSHLLKIDGYSLTKGTPNGSFLISSQFTVGGHRWRIRYYPNGFSSSSADFISLFLVLDEKVKVQAKSDFQISYTGQVDEPPWLATMKADTFDGAGFRSFGYEKFVRRCDFEKLIRDDSFTIRCDIVVIDEIRAEESTEITTTTAAVVTVPPSDLNQQLGDLLESEKGADVVFEVGGQTLAAHRCVLAARSPVFKAELYGLMKEGGTAAGAVHIEDIEPRVFKVLLRFMYTDSLPEMEEEDVMCQHLLVAADRYNLERLKLICEEKLCRHISVGTVWNILPLADQHHCDGLKKACFDFLGSLANLSAVVASDGFKHLCRSCPSLMEELVVTLALPGSHA

SEQ ID NO: 16391 - protein, 358 aa, Oryza sativa
  Clone ID: TF_OSC9665j.C1.p2.fg
MSTKKSGAADVQPSPSSCSTIVVTEASGHHVLKIDGYTRTTMMVATGEHLDSGEFHVGGYAWHLRYYPNGYDQEFSSSISFALVRTAGAGDNVRLHARAKISLLDLAGEPVARYSQPVDKCSTSKASDPWVCKSFIERDELEKSGHVVGDRLAVRCDLTFNVQDRLVRELVAVPPPLLRRHIGELLGDARTSDVRFKVGGETFPAHRCVLAARSPVFRAELLGPMREHAATTIRVDDMDASVFAALLRFVYTDELPELDGGSAAAMAQHLLVAADRYDMERLKKVCEDRMVRHLDVGTAATSLALAEQHDCPELKKAILRFMASPARLKAVMASDGYEHLVTSFPSIATEILAMFAAH

SEQ ID NO: 16392 - protein, 418 aa, Oryza sativa
  Clone ID: TF_OSC401824j.C1.p49.fg
MERVLMACLELDSSQFLLNGDGSVIGSPFDIQLECNSFTGSKAVQDHSRYTLPSQCTNAPDPPPLPGTSYGTHRTSRNAKACRCVPEEIQDFWDRMFFEAYQYDLRVLTEDGNEIMSHSCVVGIKSPVLRAMLEEAKVQGGIRHILIPGVPSEAVHVFIRFLYSSRFEQYQMKRYVLHLLVLSHVFSVPSLKRVCINQLETSLLSPENVVDILQLARLCDAPRLSLVCTRMIIGDFKAITQTEGWRVMRQANPSLEQELLESLVEEDTKRQERARRLEENKVYLQLHEAMEALIHICRDGCRTIGPRDQTLKSSQAVCRFPACKGIELLLRHFSACKMRVPGGCANCKRIWQLLELHSRMCSALETCHVPLCRHFKEKMQHLSRKEEAKWNLLVSKVLESKATTSSISERRKFPSLKT

SEQ ID NO: 16393 - protein, 235 aa, Oryza sativa
  Clone ID: TF_OSC401315j.C1.p10.fg
MDGTDVTFDIGQDIFSAHKCILAARSSVFKAEFFGAMSAKAHRTIKIEDMEAGVFRSLLHFIYTDALPETALDVVMTQHLLVAADRYNVERLKLICEEKLSKHIDSNMVATTLALAEQHSCHGLKEACFKFLSSDANLERMKASEGYEHLKVSCPFVLKELIARFISPEMEAAREITMDLQNLKIWVETFDSLCYNFENYKKFWRSNKDTRKGKEMVFCTHGRIYSRKAGVRRHR

SEQ ID NO: 16394 - protein, 365 aa, Oryza sativa
  Clone ID: TF_OSC400305j.C1.p15.fg
MGTGSKKKKTVSWCTTEVSEGTHAFKIVGYSLNKGIGVGTFIRSGTFAVGGHDWAIRLYPDGVTEDSMDYVSVYLELMTENAKAMAFYTLGLVDPVTGGIRCNWSRSSPRLFDSSDSSRFGPRSPLFIPRSDLEMEESGYIVNDRLTVECEVTVTKGPQVSRTIGCSEIGVPPSELSEHFGKLLEEEEDVGRDVVFSVEGESFAAHKLVLAARSPVFKAEFYGEMIERGTFSIDIKDMQPSVFRALLHFIYTDVLPADIGDLEGDDYVEFIRHLVVAADRYAMDRLKLMCQSILGKYVDVKNVATTLALADQHNCDKLKDVCIQYICSLDEVDAMVRTKGYANLKRSCPSVLADLFEKTSKFRAS

SEQ ID NO: 16395 - protein, 300 aa, Oryza sativa
  Clone ID: TF_OSC401879j.C1.p10.fg
METAPSSSMSPASGTYVLDVHGFSGLRRQHCGGGGCIVSPTFTVAGLEWAIRYHPEGDADEVTDDVAVFVVLVTKDATAWAHVEFRLLDQAAGEMVTFFGEKDPILFDSGSEDLSTWGTGELAARSFLDGSPYVAGDCLKIECAVDVCRDRLTFHHDTPPSGEPFRQYPADDEPADVTFKIAGETFPAHVSVLAARAPGLLNNTTSQAATITIDDDDDDTPAAAAAFGALLHFAYTDTLPVASGLDGAGHTALLGRLLVAAGRYGMARLGAICERAMCRSLDAGTAADTLAMADGTASTR

SEQ ID NO: 16396 - protein, 371 aa, Oryza sativa
  Clone ID: TF_OSC23856j.C1.p1.gm
MANHCNNTSSVTVAEVARGSHVIKIDGYLRTKELMENGKYVSSIPFSVGGHSWFITYFPNGVNTESKDYLSVFLTIDFACAGGVKATFSFALLDKNGRSVQLYSKLYPLHTFTEKGSDWGHSKFMKKTDLERSVHLSNDSFSIMCDLTVMKDICSKETTQKQFVVVPPSDLHQHLGDLLLKNMDSTDVTFNVGQDIFSAHKCILAARSSVFRAEFFGAMSAKARRTIKIEDIEAGVFRALLHFIYTDSLPETAQNIVMAQHLVVAADRYNVGRLKLICEEKLSKHIDSNMVATTLALAEQHSCYGLKEACFEFLASRSNLERMMASDDYEHLKISCPSVLMELVASRAPPPLWSSSSLGKAAVGFAKSSPS

SEQ ID NO: 16397 - protein, 353 aa, Oryza sativa
  Clone ID: TF_OSC401315j.C1.p11.fg
MANHCNNTSSVTVAEVARGSHVIKIDGYLRTKELMENGKYVSSIPFSVGGHSWFITYFPNGVNTESKDYLSVFLTIDFACAGGVKATFSFALLDKNGRSVQLYSKLYPLHTFTEKGSDWGHSKFMKKTDLERSVHLSNDSFSIMCDLTVMKDICSKETTQKQFVVVPPSDLHQHLGDLLLKNMDSTDVTFNVGQDIFSAHKCILAARSSVFRAEFFGAMSAKARRTIKIEDIEAGVFRALLHFIYTDSLPETAQNIVMAQHLVVAADRYNVGRLKLICEEKLSKHIDSNMVATTLALAEQHSCYGLKEACFEFLASRSNLERMMASDDYEHLKISCPSVLMELVARFLPQQEK

SEQ ID NO: 16398 - protein, 361 aa, Oryza sativa
  Clone ID: TF_OSC400049j.C1.p28.fg
MGASASSSAGRSKPPPPPPCSSSGVAVSTSRGYHLFEIRNHSRIKSMTPLGRGETAEAADYAAVYLDYVIDSYPPKSVTAYFLLRLVDKVSNDLMDPPPDDDVRAAAVHEFSAGQNSWGYYAFWKKDELESSGRIVDDVLTIRCDVGVVGRYATAKTDAAAAAASVASSVHVPPADLGHQLGALRSRAVGADVTFQVGAGSGARRFGAHRCVLAARSPVFEAELYGPMVERDAGRVIRIDDMDPQVFDALLDFMYTDALPGMRKRDAVAMSQQLLVAADRYDLKRLRLLCEHELCKHVNKGTVASMLALVEQQRPSCQGLKKACFEYLRKTPKVLREIMATEAFDHLVNELLLSNKLAIRE

SEQ ID NO: 16399 - protein, 381 aa, Oryza sativa
  Clone ID: TF_OSC18902j.C1.p3.fg
MAAASTTDQGVAVINDSPLCKLLSSGDGRHVTFRVDYAGARRPAVAGRTLCTTCAIGDSGAYRCEAFFRLLIGRRKLVAFSVGVSGPRYRDVHKVVVDLVLVDNARSVALQPPTRSMAIQAAAGSNQGGCGLLVSKDYLEENCVQDGVLVAVCSVLFLPELPPCLWLDSLGHRLAAMSNKKDSTLTDVCFDVDGERFNAHRLVMAAQSEVFRSLLFGSDDAETKTETAVVTIDGISATTFKHMLHYIYCNQLPPPATGDGDDDDGEADHVTRIAELQRLLVAADAYGVEALRQACEDTLCAGINMDTVASTLALTEKGSYPKLRGSCLEFLSNTQIYSVATNDECYEVVQSYPDVLTEIRDSCLIYYRYATFVVVTELEDL

SEQ ID NO: 16400 - protein, 381 aa, Oryza sativa
  Clone ID: TF_OSC900359j.C1.p10.fg
MAAASTTDQGVAVINDSPLCKLLSSGDGRHVTFRVDYAAARRPAVAGRTLRTTCAIGDSGAYRCEASFRLLIGRRKLAAFAVVVSGPRYRDVHKVVVDLVLVDNARSVALQPPTRSMAIQAAAGSNQGGCGLLVSKDYLEENCVQDGVLVAVCSVLFLPELPPCLWLDSLGHRLAAMSNKKDSTLTDVCFDVDGERFNAHRLVMAAQSEVFRSLLFGSDDAETKTETAVVTIDGISATTFKHMLHYIYCNQLPPPATGDGDDDDGEADHVTRIAELQRLLVAADAYGVEALRQACEDTLCAGINMDTVASTLALTEKGSYPKLRGSCLEFLSNTQIYSVATNDECYEVVQSYPDVLTEIRDSCLIYYRYATFVVVTELEDL

SEQ ID NO: 16401 - protein, 631 aa, Oryza sativa
  Clone ID: TF_OSC547j.C1.p9.fg
MATASIASNVAGGGCPTPSRSAAASTVVTTQAYHVLKIDGYSRTLQVHCYRSLSSFPFNAGDRTWYICYYPHGKNDISKDFISIYLVLYDAIAEAVMVQATFSLLDQHGKPVPSHTHATRLLSTSNQDDMANNLGFETFIAKGDLEKSGHVQDDCFAIGVHVVITKETPPPIIAVPPSSDMHLHYGDLLSSKRCADVEFLVGGETFAAHRLVLAVRSPVFVAEHFGPMKEGVNVNDVIEINDMDAQVFKALLNFIYTDTLLEMDQEEDATMAQHLLVAADKYGLERLKVKCEERLSNHIDADSVATLLVLTDKHNCRGLNKACIEFFSSPTALAKIIETDEFQYLTQSHPNILEDIISNIVASQLEKAIFSPENEGGKINKVDIRIQPWQNSNARCGKAAGADCRGRQARRERGGRRRDLAAEREDVDTADVDAVEEHSTRRRLPEAVERAEQRGLAAAAGPDDTDDHPSRHVQVLTVRYYDLRTVNTRPPRRHHRRPFFPDAVHDQEVLPDIMLFNSIVDRTCQQHVHWNTKLTQKRRGVLAHLKLSPSERQRRRSKQESGEERKTKIEKTEIAGVDCSIVVLLSAPSAGEDERGIDASEKNPHHTEHPGSTDRKRPGWSSTADDEDLQP

SEQ ID NO: 16402 - protein, 447 aa, Oryza sativa
  Clone ID: TF_OSC413709j.C1.p6.gm
MSDGARVEAAPRLAQWRVDVLPCYTYRKSEPFRIGLWNWYLSVERNNKQTCVKKTIVHPGIFDKPLKHEGFVWAIDSTVTGRFVIEIEFLDLKIADPSYNSLTGSNSAFQGGEPASIWASHQIKKSSDNTALSSLARMLQEGILTDITINATDGSIMAHRAILASRSPVFRSMFSHDLKEKELSTVDISDMSLEACQAFLNYIYGDLRSEEFLTHRLALLRAADKYDISDLKEACHESLLEDIDTKNVLERLQMAHLYRLQKLKDGCLRFLVDFRKVYEMHDDFKVFLQTADRDIIAEIFQGTGATTAAVLGLSSTASSPMATHARRAAEARVWRGGLRATETREWRRAPTRRDGPISLDGRLAGIVLRARSRNSSPHRLNPRSSSGSGVYGSGGGGGRADETAGLKGDPYAVGVDAVMEFPGSPSYGPDRVIYLRPLSGEFPGYYG

SEQ ID NO: 16403 - protein, 359 aa, Oryza sativa
  Clone ID: TF_OSC400049j.C1.p17.fg
MSPAACRGNPSRSASASAVVVDTATGYHLLKIEGYSLTKGIPTSLSLKSSQFTVGGYRWRIDYFSNGDCADSADYISLFLSLDERANKDVKVRASWRFQIGYTGNVDKPPSLSTAKACTTFGVGPDGSWSWGYDRFIRREDFEKSDNLRDDSFTIRCDIAVVRRFRAEETTEILPVEAFVSVPPSDMNQQFGDLLETEKGADVVFESPVFRAELYSSMKEGDTAGVVRIEDMEAQVFKLLLRFVYTDSLPEMGNDDEDVMCQHLLVAADRYNLERLKLIYEEKLCSYISVDAVSNILALADQHHCDGLKKACFHFLASPGNLNAVITSDGLKHLSRSFPSLMEELVAMLAPLLSHALVI

SEQ ID NO: 16404 - protein, 392 aa, Oryza sativa
  Clone ID: TF_OSC415318j.C1.p9.fg
MAAASNVPPSSSTSSSSPHNTTSTHSTELVKGTHRFTVAGFSLQKRNGAGHFAKSGSFDVGGYSWAVMFYAAGEKEEDQGHVSVFLELQSTGVEKVTVKYTFNISGSSLLSAGWGDFKPSSKCRLGFNKFMEIETVEDVYLMNDCVTIHCAVEVVREKKARATVSRRIAVPPPAICRHLEQLLESKKGSDLTVQVGESKYDVHRAVLAARSPVFRAQFFGPMAAANRRASGGGGRCVRVHDMRPAAFEAVLHFVYTDTLPPVKEEEGFLTNNSASRRHLVNLRDAAAGCSKGEVRVMVREWLAAADRFGLERMRLLCEDALCESIGVANAAATLRLADRHHCALLRALCMEYIASPGMLAAVMATKGFKELKVACPSLLIEILEKVGCCRSE

SEQ ID NO: 16405 - protein, 371 aa, Oryza sativa
  Clone ID: TF_OSC401762j.C1.p46.fg
MATAPTVAGGKLLRSASAIVGGTESGQHLLEINGYSSIKDAVSIGNCVQSRHFRVGGHDWYIRYYPNGFNSNVSDCISIYLVLDGHEAHDYYYGRSIVRAELTLSLLDQEREPVTSYIYSHGLQIFDGYGRYRGSLRFIQKAVLERSEYLRDNRFTIRCDITVMKNPEAKDTGGRRVTLPPSDLARHLGGLLATGVGADVTFEVDGKTFLAHRNVLAARSPVFHQELFSLTEKGNAATGGAGVIIRVDDMEAQDFEALLHFIYTDSLPEMKGGDAVAMLPDLVAAANRYKMERLRLVCEDKLCEYVTVRTVAAMLAFAGEHQCPELEKKCLQLLEDPANLRNIVETEGLEHLTKSYPFVLKDLIAMFATKP

SEQ ID NO: 16406 - protein, 274 aa, Oryza sativa
  Clone ID: TF_OSC2852j.C1.p2.fg
MGDHRDPAFPAAAGGCRLPKTSSVSVTESVTAVHDFKVTGYSLIEGLGIGRYVSSSTFTVGGVDWAVRFYPDGSTVTCLGNASAFLYYCGREKEVRTRFTLNLLGKDGKLSQVTNSYMKHTFSPASDNWGFIKFAEKSKLQSSPFLHNDCLTIRCLLTVVRESHTKDVEVNSVVVPPSNLHTDFENMLQDGEGSDVTFTVGGQEFRAHKCVLAFRSPVFKAELFGPMKENGTQCIKIDDMEPEVFEALLHFIYKPPIGCQIAAEMARLQQCSTC

SEQ ID NO: 16407 - protein, 570 aa, Oryza sativa
  Clone ID: TF_OSC9673j.C1.p1.fg
FKALRVLDLESSVKLQNSDLNNVVDLFQLSYLTESEKCNLYRNCQELYIPKCCFQRIPDWMASMNNLYRLCIRSKQVTKQILQILGDLPALLDLELRSESDDPMEILIISKCIFRCLKIFRLYGSFVGLIFEDGSMQKVREISVVVRAHKAKSAFADHPDLGIRNLTSLMDLNVWINCEGARVQEVKVLEAAIADATALLPNHPTPHFFRENEENMVKDYLPNHPTPHFFRENEEKMYVPNSRLMSCASLLSAAIRRGVAGCRASPPSASAIVSRPATGSHILRIDGYTNTKSILATGESATSRRFAVGGHSFVMRYYPNGLDDGCADSISLFVDVAGGGGCGRSGIAGHARFSVLDHAGSPARRTDDASSEALAAGADAGVVVPPSDLHRHLAELLWSKEGADVVIELDGGDGETTTFHAHRWVLAARSPVLKAKLSASPSSPATLRLAAMDADAFRALLHFIYTDTLPDDDDDDDAMARRLLAAADAYGMERLRLICEDRLRRRVAMGNVAVTLALAEQHHCRALKEACVEFLSSPGNLKAAMATDGFEHLKATCPSVLTELVMKQLV

SEQ ID NO: 16408 - protein, 353 aa, Oryza sativa
  Clone ID: TF_OSC3760j.C1.p3.fg
MGCCFSVIDDDGYEHDDAVSGSVNEVPRVTGVHQFTIRQYSGVKGKGVGNSVLSRNFTVAGREWFVRFYPDGYNSDTSDHVAFFLQSLYRPSCGSVYHVEFSFALLGGGGGGGAVLHDVRIDRPCRFDNRNNSWGIRKYIAREQLEGAALGAIHDDALTVRCTMHVIQRRRGAGRPVVTGAGGPVRVPVPPSCHARNAMEFLLSGDAPFDLEIHVGDATFGAHRLALAGQSLYFRKLLYGQVGNEASSPAIRLREMSPEAFGAVLHYVYHDSLPPEANKGRNAAAMAREVFEAADMYAMERLKLMCASNLCRFIGDDTASGIMELAKAHSCDPLKKACENYMKRRRIPFNPDS

SEQ ID NO: 16409 - protein, 239 aa, Oryza sativa
  Clone ID: TF_OSC31354j.C1.p1.fg
PKFIRREDLEKSEYLRDDSFTIRCDIIVVDNYRAEDASSGAAGFVSVPPSNLHSHLGDLLKNEKGTDVVFEVAGQRFTAHRCVLAARSPVFNAELFGMMMESDTTTNDAIQIGDMAAPVFKALLHFVYTDSLPETMEEREDTMCEHLLVAADRYNLERLKLICEERLCKYIGIGTVMDILALADQHHCKGLKKACFDFLRSPANLSAVTGSESFEHLSRSFPSLMKELVDILGTSHNYA

SEQ ID NO: 16410 - protein, 154 aa, Oryza sativa
  Clone ID: TF_OSC900229j.C1.p20.gm
MGNWSGGCREKFREVFEWKDADVAFEVGGGGGVRFAAHRCVLAARSKVFKAELFGAMKEGDAACVVRIDDMEPQVFRTLLFFVYTDSLPEMRKEEEEAICQRLLVAAEVYGMERLKLICESKLCKYIDVGTVASIMALVDQSCPFITEELIGML

SEQ ID NO: 16411 - protein, 360 aa, Oryza sativa
  Clone ID: TF_OSC402103j.C1.p15.fg
MAGSSPSAAASGGGCEAVPSTSTIVAEMATGSHVLTVDGYSGTKGLAVGVHVKSGTFVAGGHSWHIKYFPNGATDETSEWTKGAAATVKARCKLTLLLDGRDGRAALPPPPPFTKSCELRTFSSGKGGSDQWGHKKFVRRKELEDPSKRLLRHDRFSVRCDVTVAVGIRTDDTTAKLPPPSDLHRHLGRLLKTNAGADVTFDVAGHKFAAHRCVLAARSPVFMAELLGPMKEEDTESHVVAIRDMDARAFKAMLHFIYTDSLPNVDDGGEAAAMAQHLLAAADRYDIERLKLICEDKLSGGVDATTAATTLALAEQHGCCRLKEACLRFMASPANLKAAMASDGFEHLAKLPFSPQRISC

SEQ ID NO: 16412 - protein, 365 aa, Oryza sativa
  Clone ID: TF_OSC405423j.C1.p13.fg
MAGSSPSAAASGGGCEAVPSTSTIVAEMATGSHVLTVDGYSGTKGLAVGVHVKSGTFVAGGHSWHIKYFPNGATDETSEWTKGAAATVKARCKLTLLLDGRDGRAALPPPPPFTKSCELRTFSSGKGGSDQWGHKKFVRRKELEDPSKRLLRHDRFSVRCDVTVAVGIRTDDTTAKLPPPSDLHRHLGRLLKTNAGADVTFDVAGHKFAAHRCVLAARSPVFMAELLGPMKEEDTESHVVAIRDMDARAFKAMLHFIYTDSLPNVDDGGEAAAMAQHLLAAADRYDIERLKLICEDKLSGGVDATTAATTLALAEQHGCCRLKEACLRFMASPANLKAAMASDGFEHLARSCPSLLKELVANLAV

SEQ ID NO: 16413 - protein, 374 aa, Oryza sativa
  Clone ID: TF_OSC900390j.C1.p2.fg
MYSITAAPATVSHLVRIDGYSRTKNLRRGRFIEAMNFTVGGHRWFIRFYPNGHGPRDVGVVSVYVGIAGAYRRGGGDAKPVIADARFSLVDRDGRPAPPSFVQGMPAVDFSGNDFGMNIKRAELETSGFLKDDGFLVRCELGFVNSAGDGDGRRGVQIKEGIKVPPPNLHRHLADLLWKNQSSGDVFIEVQGKTFTAHRWMLAARSPVMAAELSSSDSDDAAYTDADATKNTMMTLRVDDDMDAETFRALLHFIYTDALPPPPQPRARDTKEKEDEAAAAEAARRLHAAAARYGMERLQLMCEDALCRSLSVLTVASTLVFAEKHGCRVLKAACLDFLSCKRKLRQVTRLDDDFRLLTTTCPSVIKELFAQVLK

SEQ ID NO: 16414 - protein, 359 aa, Oryza sativa
  Clone ID: TF_OSC547j.C1.p6.fg
MTTTTITSSVCAGPPPSRSTTTITAERTYHIIKIPGYSSTLKVGHGQALRTSPFSAGGRTWYISYYPNGGRETNKHCISFFIHLDDDTVNDDVMAQVTFSLLDRHRNPVRSHTITTTLYNFSVPNSSALGFENFIRRDELQRSEYLNDDCFAIAVRLVITEEPSSFTVPPSNMHLDYGDLLSSKEGTDIEFVVRGETFAAHRLVLAARSLVFKAELFRPMEGGTTDVIKIDNMDAQVFKALLVFIYTDTWPEIDQDETTMVQLLVAANKYSLSRLKIMCEDRLCSYIDTSSVVTMLMLADKYQCHGLKKVCFNFLASSRALSLAMKADNFRCLIQGCPTMLKDLIYNIVTHQLEIKLSV

SEQ ID NO: 16415 - protein, 1805 aa, Oryza sativa
  Clone ID: TF_OSC400049j.C1.p26.fg
MSFAGVSFISDGETTPCSSPANNGAAAGSTYGYHLLVISNYSHTKETISTGDSIESGQFMLGGHTWHAEYCPNGDDSTNSDCVSFWLVRDDDDDDDDDGDDAVKVQPLKVKFEFSFAEQAAKHEARRVLVSMACDFSGTSGWCDTRFVRREVLDVSSNLVCHGLATVRRSLGKFLTIGIRARFRKWTRDRALEGVFMPRRRSSSPIVRTPHDSGGRATGSGGGDRGLVIHRVVKEGGGSVNYPLLTKTNYNDWALLMKIKLQARCLWAAIEPDGVDVPLHEDRMALDAICSAVPPEMIGTLATKASAREAWECIKTMRVGNDRIRKASAQKVRSEYESLAFRGDETVEDFALRLTTIVNQLATLGDPEPADKVVEKYLRVARPRFNQLILSIETLLDISTLSMEEVTGRLKAAEDSGQSSLHTADGKLYLTEEEWAERQKKKDQEAKRGDSGSSGGRGKRRGGRGRTGGGGTASPESTNSGSARKGDKCRNCGKLGHWAKDCRSKSKREEQAHVAQEDEEEHTLMLLTGGCVDTVDAAAPEGDTPTPPHQAVVELVEMKVFAALDDAADHDPGRWIMDSGASNHMTGSRMAFADLDTNITGNVRLGDGSVVRIAGRGTILFACKNGEHRTLSNTYYLPRLTANIISIGQLDETGFKVLAEDGIMRVWDEQRRLLARIPRTPGRLYMLDINLARPVCLAAHADEDAWRWHARLGHINFRALCKMGKEELVRGLPCLSQVDQVCEACLAGKHRRSPFPRQALCRSDEPLALLHGDLCGPITPATPSGNRYFLLLVDDYSRYMWVALLSTKDAAPAAIKRIQAAAERKSGRKLRALRTDRGGEFTSTQFAEYCAELGMRRELTAPYSPQQNGVVERRNQSVVGTARSMLKAKGLPGMFWGEAINTAVYLLNRSSSKGIGGKTPYALWNGVPPAVHHLRTFGCVAHVKTTTPNLKKLDDRSRPMIFVGYKPGSKAYRAYDPATRRVHISRDIVFDEAAQWDWDAEAAADLDTDFVVEYTTVYHPGSLSGTRQDAGEPPARSSSSPRTPSDSPTAGRTPSVHGDALAVEFVSPPTGAAANLDADHDDAPLRFRTMDNVLGPAMLPGLANREVQEELMMVSGEEPATFGQAERDEDWRRAMLDEISSIEENKTWRLVDLPSGHRPIGLKWVYKLKKDAQGVVVKHKARLVAKGYVQRAGIDFDEVFAPVARLDSVRLLLALAAQEGWMVHHMDVKSAFLNGELIEEVYVVQPPGFEIDGQENKVYRLDKALYGLRQAPRAWNTKLDCTLKKLGFKQSPLEHGLYARGDGSGRLLVGVYVDDLVIVGGDSGMIKGFKEQMKAEFKMSDLGPLSFYLGIEVHQEAGIITLKQAAYVSRIVEKAGLTGCNPCATPMEPRLKLSKESAGSLVDATEYRSLVGSLRYLVNTRPDLAYSVGYVSRFMEKPTDEHLAAVKRIIRYVAGTIHLGCRYVKEGEGGLQGYSDSDMAGDIDTRKSTTGVIFFLGKNPVSWQSQKQRVVALSSCESEYIAAATAACQGIWLARLLGDLRNAATEVVDLRVDNQSALALMKNPVFHDRSKHIQTKFHFIREAVENGEITPSYIGTEGQLADILTKPLSRIKFQELREQIGLATVRRSLGKFLTLERSRYLVDDCFTVRCDIVILAGAAAAPPPSSSLFGAVESFGRLLGREEGADVTFEVGGETFTAHRCVLAARSKVFEAELFGPMREGAAASVVRIEDMDAEVFRGLLSFIYTDVLPDQGDLGDEAHEWHDDDDDDEGGGDCDMAAETDRSRGQIRSPEAEAAVRGGDVRLH

SEQ ID NO: 16416 - protein, 305 aa, Oryza sativa
  Clone ID: TF_OSC400049j.C1.p18.fg
MPSSANGHGNSSTRSTSAIVVDRVTGHHLFKIDGYSFTKETPTGTPIASGEFTVGGYRWRIEYYPNGRGKKSADYIPLYLSLDKNTSGEVKVKYQIELADRVKKKKKQPSLISKPFMRRRKFEKSKYLRDDCFTIRCDIVVMREIRTEEATFVSVPPSDLKQQLGDLLETGKGADVVFEVGGGETFAAHRFFGSMKESDAAAGGVVRIEEMEAQVFKLLLRFVYTDSLPKMKEEDVMCQHLLVAADRYNLKRLKLICEKKLCKYIGVGTVASILALADQHYCDGLKKACFNFLGSSENPPVASII

SEQ ID NO: 16417 - protein, 824 aa, Oryza sativa
  Clone ID: TF_OSC401547j.C1.p15.gm
MATRLRWWRRRATRLRWCVKFGCSTTTAGSFPADGLVGLSGDAVSHVTQLGGEASLDRRFSYCLVPHSVNTSSALNFGTLANVTELGAASTPLVAGDVDTYYTVVLDFVKVGNKTVALAASSRITVDSGNAKISFVTPANCKKQTEQAIPDLTLEFGGGGGRAAVALKPENASVTVQEGTLCLAMVATTKQQSVSILGNLAQQNIHVGYDLDAGMVTFATADCAGNGRPTEQTSGGQARCGRGRWRRRGGGRGERGCRRRRRPWPQFSRPRRQRRRRRECVSAGQRRAKQAVEGRAGTTPKTASSRAGATGRLSLLKRRRRRRLPYLVSSSSSPPPQPPPGPLRGSDPEVARAATGCRTSSPPASRPAERREVRGRDEEGREEEEEMTWHSDMWGPHGSHADSATTSDKTGVKTPEDLNTVAFHGNPSKPGDPPSYTSPYLPSASHPIQTRDAGTLNPSSNAFGGVSRVGEEGVAGAEGEELSKMGPEAARETKGSLAAAFGFLGTSGGEPRAAPPRRRLPLGAPLHRQPHRRLQPLGRPQARPPRRADVKAALRCRLISNSATTSAAVDGHVSHAFKRAGESSAWVLILRRSALEASGAIVDDAFTVECTITVITEIPDNVAAAAPAAPANVLPPFSGRGLSLSHHLGELLRRGTGADVTLVVSGKCFPAHRAILASRSPVFMASLFGDMKEKSSRSVEIRDIEPQVFGAMLGFIYTDSVPELDQQDGVVVAQHLLAAADMCGLDGLKIMCEEKLIAGATVETAATTLALAEQHGCPRLKARCVEVVAANLDAVMATEGYKHLMASSPLVMNDLLRAVRGRKS

SEQ ID NO: 16418 - protein, 458 aa, Oryza sativa
  Clone ID: TF_OSC412646j.C1.p22.fg
MAEAKMSRITIHDVEPVTFRAMLRFIYTDELEEKDSMATDLLQNLVAVADRYDLSRLKLMCAQKLWEKVSVENVATMLIYAEMHGCPELKTSCLDFFVQEENFKVAVLNEGYAQLVQHFPSVIDEIKGRPVGGPGGLVDESKANNIVDVLAISARFNAAAEPKRRGSGDRRAQRKPREITAAVTITREIKLLLILMTNKENYCYSKLEEFDHTVLITLISVYNQDYGSWILFESIDRYISDSIPLAIAFWFAAPYAGMPDSGSLELILDYEATNHCAILVDGETFPAHRAVLAARSPVFRAELLGSMAEAKMSCITLHDIEPVTFRALLRFVYTDELPADDGGELNTTAMATERKKGGGCLLMGRRAGSGNHQAGKLASVRGEGGGGEADEQDGEPTSGTGRGGRRAGWGGRRAREEREKVGKGAEGDSHRAGRPMSLRGEGGGGEALSPSISLSWWP

SEQ ID NO: 16419 - protein, 404 aa, Oryza sativa
  Clone ID: TF_OSC400049j.C1.p6.fg
MSSSAAGNSSRSASTSTIVADTETGYHLLKIDGYSRTKGTPNGTAIASSQFIVGGHRWRIYYYPNGDHTDNADYMSFYLLLDEKKNTKTKSVKVWTLFQICFADQAKALPTLTSKTVRTFGDGSSWSWGYSKFIKREDFEKSKDLRDDSFTIRCDIAIVREFLVETTEVLPPKSFVSVPPPDMNLQLGELLETEKGADVVFEVAGERFAAHRCVLAARSPVFGAELYGLMKEGNAAVVVRVEDMEARVFKLLLRFVYTDSLPEMKKKDEGIMCQHLLVAADRYNLERLKLICEEKLCKHISTGTVSNMLLLADQHHCSGLQKACCNFLGSSANLSPVSRGWLFVMKQLVLGCCNAWRLAVVHPVSVSWLVLSLSGRAAEVYDLSNSMKFTSHEHHPKEARGAIA

SEQ ID NO: 16420 - protein, 181 aa, Oryza sativa
  Clone ID: TF_OSC31360j.C1.p1.fg
QLVDLLETEKGADVVFEVSGETFAAHRCLLAARSPVFSAELYGLMKEGDTAGVVRIEDMEAQVFKLLLRFMYTDSLPKMEEEDVMWQHLLVAADRHDLQRLKLICEDRLCNYIGVSTVLNILVLADQHHCDGLKKACFSFLGSLENLSAVVTGDGLEHLSRSYPSLMKELFVVMALPPNHG

SEQ ID NO: 16421 - protein, 348 aa, Oryza sativa
  Clone ID: TF_OSC423270j.C1.p1.fg
MGTVEGHHRFAIRGYSRLRALLAAGEYVRSAAFTVGGYDWAVVFYPRGATHADRDHAAVYVQLLTDRAAAAATFDLRFVRADSGRPLSVHPPLAAPRTFSTVLRSSSAAMYGVKVEAIQALQANYVRRDRLTIDCAVRVVGKPRVSAAAPLTAADVPPPDLAAHLGRLLDLKSHADVTFDVRGVQFAAHRVVLAMRSAVFAAELFGPMRNNAGGAIKVGDMQPAVFKVLLGFIYTDTLAAMDDLDADEDDRRELARHLLVAADRYDMGRLKLICADMLARSLTAQTVASTLALADRHGCRGLREACVEFVIAMGMNDEVVISRHPDQLSCISLFKYFFYQIGSLLKIH

SEQ ID NO: 16422 - protein, 384 aa, Oryza sativa
  Clone ID: TF_OSC401916j.C1.p2.fg
MVASASRLRPSSTTRTASSCKPETARGTHVFTIHGYSLQAVDGAGSNKASFIRSAAFDVGGFDWCLRYYHNGNIESDDDYISVFLELMTKDAEVRTIFDIRMLDQYTDDSSCVLVSTTNNTRRVFGTTNFKSKCLVWGSKNFIRRSELEGSVYLRDDRLMIECNLTVIKTPLVKTEERAAMPGDIIHFQVPPTNLSRDLGKLLEDNVGADLSFEVGGDVFPAHSVVLAARSPVFMAELYGPMRAKRGERIAIQDMQPVVFKALLHFMYTDSFSPAINDDLSRDERQELAKHLLVAADRYAVEGLKTICEKALCMSLSVDNVATIVALADQHNCGRLKEACVKFIASSNRLDDVVETEGYGRLKTSCPSILLDVIEMATKSRKIN

SEQ ID NO: 16423 - protein, 352 aa, Oryza sativa
  Clone ID: TF_OSC418633j.C1.p5.fg
METPTNLTNTISAVHLLKINGYSVTRALGCSEYISSRRLAAGGYDWEVLYYPRYYEHGVYWIALRLMFMSKECKHEVKAALKCQLVHEAQIYLPSGSKSVSSKYTGQRDCGPALLLVKQDDLPGSNYFIGDSFVVECTITVLREPQEAVTNVSPNVSNPCCDLQMHLGELLLSEKGADVTFVVAGESFLAHKIILAARSPVFMAEFFGPMKESSSQCVEIKDIEASVFKAMLHFIYTGTSPELDQQHVVSDSEQDITTMTQHLLVAADRYGLDRLKLICQDRLHDDINVETVATTLAFAEQHSCTQLKDRCIEFIISSRANLDAVMATEGYKLVIASCPSVLSTLLRAAVGR

SEQ ID NO: 16424 - protein, 614 aa, Oryza sativa
  Clone ID: TF_OSC400049j.C1.p53.fg
MATTTTMTLAASAGDGSPSSRSTVTTIAAQAYHVLKINGYSNTLEAGRHHALSSCPFSAGGHTWHVSYYPNGGRDSNKNCISIFLVLKDIVTEEDVMAKVTFSLLDRYGNPVPSYTYHTQLRNFSTSPSRAKGFENFIRRDELERSEYLNDDCFAVAVHVIVPKEKPSIVVPPSNMHLHFVDLLVSKEGTDVKFLVGGEMFAAHRLVLAARSPVFKAELFGPTKKGTIDVIQIDNMEARVFKALLDFIYTDIWPEIGHGEDNVAMAQRLLAAADMYGLQRLKFVYEDKLCNHIDTGSASTMLVLAEKHHCCKLKEACFTFLSSMSPPIVEDLNSSIFGSESEKTKYRYLRNEKRAHTYLERNSGAGDKVFLDKCILVSVYKGVKLMFGKRGGTTCALAQWLHRMGLEIQQEKGPAGRSSYVRRAPASSSYAGCCCYDATGQRNALAFWKVRFDRARGHVVRVIDADHGSGRDGWFSIEVARHTVKDEIVGLRRHVCCRSPLVGSAGWPRTSRARTTYYDVRADKFTYARASDTSPTARQLHALPPANRRTGPRTDDEERRRPGHHAPTRTASPYVRGQKSRRLVAVRGGNEQYTWELELEQLVWHDNGLAANSY

SEQ ID NO: 16425 - protein, 316 aa, Oryza sativa
  Clone ID: TF_OSC900229j.C1.p24.fg
MASRSASIVQANVTSGYNLLTIDGYMATTPIPTGVYMTSSAFAIGGHQWRISYYPNGKNSGCADYISFDLILDENVAAPLHERERGEGPSRFVKRRILERSRRRHLKNDSFIVRCDVVVTEFRPAEVAPGSVDVDGPPSDLHRHLGDLLRGETGADVVFEVGGERFAAHRCVLDARSSVFDLELFGATTAKEVVVGQSTGIVRVDGMEARVFKALLFFAYTDSLPEMMTTTKKKMEEQAAGDGDDRYDIDAFTVGKVIALAEQHDCRVLRKLASISSCVVLDFRRMYCWAPATAAPSAAPFLLDKSCLKASSKSGS

SEQ ID NO: 16426 - protein, 137 aa, Oryza sativa
  Clone ID: TF_OSC31363j.C1.p1.fg
MKEGDTDGVVHIEDMEARVFKLLLRFMYTDSLPEMEEEDVMCQHLLVAADRYNLERLKLICEEKLCRHISVGTVWNILPLADQHHCDGLKKACFDFLGSLANLSAVVASDGFKHLCRSCPSLMEELVVTLALPGSHA

SEQ ID NO: 16427 - protein, 390 aa, Oryza sativa
  Clone ID: TF_OSC595j.C1.p1.fg
MSHTRSTTAGAAGGKPPIAPPPTSSASAIVADTASGYHLFKINDYSRTRDIFPTGSALKSRAFTIGGHQWRIHYYPNGNTEECGEYISLFLHLDEIVTDKNVYAQHGFRLFDEFAGDNDDDDELQPSSIADLGQVSTFGGNNIGLGRLRFIKREELEKSKYLKNDSFTVRCDVVVTKRIRSEETPLVVRTSPKPKVARLVTVPPSDLHRHLQDLLCAEKGADVVFEAGGETFTAHRCVLAARSPVFSAELFGSMKESDTTVVIRIDDMEAQVFRALLFFVYTDSLPETKKEDEYAMCQHLLVAADRYNMERLKLMCEERLCSYIGVGTVTTILELAEQHNCDGLKKACFDFLSSQENLKAVTAGEGLEHLSRNCPSLVNELIGTLGNLIQ

SEQ ID NO: 16428 - protein, 236 aa, Oryza sativa
  Clone ID: TF_OSC1353j.C1.p1.fg
MAKHEHVSSKRLTVAGYAWEIHYTPGHDAHWHYWVAFKLVFLGIGEQAQRAGGDDDDNDAGAIKAELEASGFITGDSFAVRCTITVLSKNTINSAEPSPDLHLQLGELLRSGRFADVEFIVSGVSIAAHRCVLAARSPSLAAAVLKGGTRKKDGSVRVEVKDDMRAGVFRALLHFIYTDTLMELDWREDGSDPLLPRTMVMSLNEAAGRYGLERLKQICENMLGFDDACSADCAVM

SEQ ID NO: 16429 - protein, 112 aa, Oryza sativa
  Clone ID: TF_OSC400049j.C1.p20.fg
MNQQLGDLLETGKGADVVFEVAGQTFAARSPVFSVELYGPMKESEPTGVVCVQDMEAQVFKALLRFMYTDSLPKMEEEEGVMCQHLLVAADRYNLERLKLICEEKLCKGKLF

SEQ ID NO: 16430 - protein, 349 aa, Oryza sativa
  Clone ID: TF_OSC567j.C1.p1.fg
MATTAPNVVDSDCGGTPPSRAGGHTWCIHYCPIGSTEESKDFISIYLVLEDTTADVVSAHVTFSLLDQQGNPVPSHTLTTPLLKFSLQGTLPKGLGYNSFIRRDDLERSGHLKDDCFAIGVHVVVTKEAIPSSITVPPSDMHLYYGDLLSSEERYATDVEFLVGGETFAAHRLVLAARSPVFMVELFGPMKESTTVNKIQIFDMEAQVFRVLLKFIYIDMLPEMDQEDEAAMAQHLLVAADKYGLHRLKMICVEILSNHIDANSVATILVLADKHHCYGLREACFDFLNSSAILSAIVNTSDFQYLIQSCPDILEDISFNIVARQLERAIFLSENQAGQINSVEIGIRS

SEQ ID NO: 16431 - protein, 458 aa, Oryza sativa
  Clone ID: TF_OSC26652j.C1.p3.gm
MGQTTSKSAGDGKPKPKTTSAAAAAAAVVSETATGSMTMRIAGYSQTKGIGVGNSINSSKFHAGGHTWYIAYYPDGDREEYSDWVSVYLCLARPAAGAAADDVVEAKFTLSLLSGTYGAVVEEKICTAKKFSFANGYWPSWGHTRFIKRKKMDSRLWSCLHLDGQSFYIRCNITMDIIRCEAATTAVAVPPPDLHRHLAALLGSGVGADVRIRVGGKLFAAHKNVLAARSPVFMAELFGNNGGKDQKEAKAAAAATGNGVIRIDDMDLRVFRAMLQFIYTDTLPKIDKGDTAFMAQNLLVAAHRYGIERLKSISVDMIRKAARTMNLIAMIIRNNDEGIATQLRTRGRLGLHLPDAPEKPHRCRRLFELTLCYLSLDSTLLIQAAGDASTRSCDLAEMPDVLDLQASPHWSGLTMEEVIGKPPCRSAPRIAGAATDCQDFYPFPCRRSSITHGVETSG

SEQ ID NO: 16432 - protein, 342 aa, Oryza sativa
  Clone ID: TF_OSC401965j.C1.p35.fg
MATTLASGAGDAPGLEWYIPGLEIELCSRGGCSEWLGLYNRGLSGPPVIFSSGCDTWHINYRRLGSSDSSRDYISFYLVLEDQVVEDDTVTAQITFILLDQDRKKPFILRKDLAESEHLKDDCFAIGVDVVIVTKDEVSSVKVPPPSDMHRHYGDLLSSKLGTDVEFVVGGETFTAHRLVLAARSPVFKIELFRTTEERTTPNAIPINDTDAQVFRAMLSFIYTDTWPKIDQENEAAMAQHLLIAAERYGLDRLKLMCEDRLCNGIIDMGSVTTNLVLAENHYCHSLKKACLELLGPWTTLAEFMATDDFRYLTKSCPGILNDLICIVAARERERTIFFLGE

SEQ ID NO: 16433 - protein, 277 aa, Oryza sativa
  unsure (1)..(277): unsure at all Xaa locations
  Clone ID: TF_OSC401315j.C1.p1.np
NLNFIKFIWCSSKRRRGGKVVKGRCGXSLGRGGSDHPSVRSTLQTTNWGYSRFIKKRDLEQSEHLIDDSFTIRCDLTVMKGFSSKGSHCKPSVEVPGRLDLHLGNLLSNKKMNGKDVTIYVGKERFRAHKCILAARSSVFRALFFGAMIAEPRTIEIEDMEAGVFRLLLHFMYNDSLPETWSQDAMMAQHLLVAADWYNVGRLKLICEEKLAKHIDCNMVATTLALAEQHSCQGLKEACLEFLASPTNLERMMRTDGYKHLKISCPIVLNELSEIAA

SEQ ID NO: 16434 - protein, 218 aa, Oryza sativa
  Clone ID: TF_OSC411533j.C1.p1.fg
MDRVDTALPCFSSQCMNISLRTLFPPIFTFLKYILYAGDDDGTIPIPRSNLNGQLDDIADRADGSDVLFSVGSETFHAHRAVLAARSPVFKMELLGSMAESTMPCVTLHNIDPATFKALLHFVYMDALPSPTEAVRIGEVEADVCTEAVGECVGGDGGDDSRLRAYAERYHCPELKSKWLSFLMAEINFKKVAVTDGYFHLRRDFPLIIEEIKKRIES

SEQ ID NO: 16435 - protein, 257 aa, Oryza sativa
  Clone ID: TF_OSC416369j.C1.p3.fg
KFDDKLSNMRIGRRPGRPQGVRVGRFINAAGTTGFPTGKRARVDTALPCFSSQCMNISLRTLFPPIFTFLKYILYAGDDDGTIPIPRSNLNGQLDDIADRADGSDVLFSVGSETFHAHRAVLAARSPVFKMELLGSMAESTMPCVTLHNIDPATFKALLHFVYMDALPSPTEAVRIGEVEADVCTEAVGECVGGDGGDDSRLRAYAERYHCPELKSKWLSFLMAEINFKKVAVTDGYFHLRRDFPLIIEEIKKRIES

SEQ ID NO: 16436 - protein, 270 aa, Oryza sativa
  Clone ID: TF_OSC31365j.C1.p1.fg
MATAVSRGTASSIVADAVTGYHLLKIDGYSRTKGTPNGAALTSDQFVVGGHRWRIRYYPNGDIAMFADYISFHLMLDENATSTKGVKVKAQFQICFADQKLGKLLDTEKGADVVFGVGGETFAAHRCVLAAQSPVFSAELFGPMKDSDRAGVVRIDDMEAQVFKALLRFMYTDSLPEMEEEEDTMCQHLLVAADRYNLERLKLICEDRLCKHVGVGTVVNILTLAGQHHCDGLKKACLHFLGSPANLSAVLAGDGFEQLSRSCPSLVNEL

SEQ ID NO: 16437 - protein, 284 aa, Oryza sativa
  Clone ID: TF_OSC594j.C1.p3.fg
MATAVSRGTASSIVADAVTGYHLLKIDGYSRTKGTPNGAALTSDQFVVGGHRWRIRYYPNGDIAMFADYISFHLMLDENATSTKGVKVKAQFQICFADQKLGKLLDTEKGADVVFGVGGETFAAHRCVLAAQSPVFSAELFGPMKDSDRAGVVRIDDMEAQVFKALLRFMYTDSLPEMEEEEDTMCQHLLVAADRYNLERLKLICEDRLCKHVGVGTVVNILTLAGQHHCDGLKKACLHFLGSPANLSAVLAGDGFEQLSRSCPSLVNELVAMLAPPIPPSSHA

SEQ ID NO: 16438 - protein, 373 aa, Oryza sativa
  Clone ID: TF_OSC400049j.C1.p22.fg
MSFAGVSLVRDGRLQSPSSSAITSGATSGYYLLVVEGYSRTKDTVPNGDFIRSRPFRVGGYRWVIDYYPNGESSDDADSISVSLQLDQDSERPFMAHYEFSFIDETERQKSTHICSEALFDFSDDNRWGYTNFIRREELEKSKHLKDDCFTIRCDIILKKDGSNTTGDDVAAPLVAVPPSDMHRQFTDLLLTKVGADVTFQVGGETFAAHRCVLAARSTVFMVELFGPMKEGATTASVHISEMVPEAFKAMLAFIYNDTPPPETEEDEDGKVAMWQHLLVAADRYDLPRLKLICEEKLCGHIGVGTATTILLLADKHHCRGLKEACLEFLSSPANLEEVMEHGGLEDVVGTCPSVLVELIAKLALLRTQRDYK

SEQ ID NO: 16439 - protein, 694 aa, Oryza sativa
  Clone ID: TF_OSC400992j.C1.p38.fg
MAAPPVSGDGAAAAAPVVALGAAGAVGGPRPYEVAVAAAELRPVDCNLAALCDHVQAEGFGSGAFSDVVVEAMGATYRLHRLIISRSAYFRNMLHGPWREAGAPTVVLHIDDPNIDSEAIAIALAYLYGQPPKLNDNNAFRVLAAASFLDLQDLCTICTDFIISELWTSNFLQYQLFAESQDYGSHGERVRNACWGYLCQSATLELREVLPKLSSQTLHALLTSDELWVPNEEKRFELALYALLAKVTLSDVEVSGNENLNLTSSSANSDHSMRKGKSPMNEAGEEQLMGSELQNLKLHDNTETISAHNTSDIPDMVIPQDSTAYSIEQNAEASRRKMLLCHRVQAIVADTCTNCCLTGNSCACKQAHVSSHHHYRQEHDRSSASGTVGNIYLTDAHGEGNAVFGPVRVNVRGAVDGLAGIGRGNSNVPGAAWAPTRYVFSRVPYGLGSRNGQQPFANDESEPRVDYNGDISGDGLTALVNLSQESSASHHQTESIFETGIQVRYSGAASVSTPGGSSLQMQESKEHELGSNLETTENTTISLDMKTPLSHFPPFRFGVEFEDVHRLADSQVKHSTEVFYAGSLWKVSVQAFNDEDPHGRRTLGLFLHRRKAEPLDPLRKANMYVDHREKVTARYQLICPSKREVMIFGSLKQAGTLLPKAPKGWGWRTAILFDELGDLLQGGSLRIAAVVQLV

SEQ ID NO: 16440 - protein, 363 aa, Oryza sativa
  Clone ID: TF_OSC400049j.C1.p13.fg
MSPAAACRGNPPSRSAIVADTATGYHLLSIHGYSRTKGTPTGSPLKSTRFTVAGHRWRIHYYPNADRADSADYISMYLFLDEKSNATRSVKALFQIRFADQVKAQPSLALHAVRTFGDGSWSWGYAKFVRREVLEKSKDLRDDSFTIRCDIVVVREFVAEEATEILPAGSFVSVPPSEMNRHFGDLLETEKGADVVFEVAGESFAAHRCVLAARSPVFGAELYGLMKEGDTAGVVRIEDMEAQVFKMLLRFVYTDSLPEMEAEEDVMCQHLIVAADRYDLQRLKLICEEKLCKYIGVCTVSNILALADQHHCDGLKKACFSFLGSPANLSAFVADDGLDHLSRSCPSLMKELVVELALPPSHA

SEQ ID NO: 16441 - protein, 316 aa, Oryza sativa
  Clone ID: TF_OSC400305j.C1.p11.fg
MVSKKKKTVSRHTTESEEGRHSFEIVGYSLKKGIGVDEFVESATFAVGGYDWCIRFYPDGKGDGAKDYISVYLELLTKDCAVRAAYDLRLVNLATGLPKSVYSETTHRMFNSEDSSKFAPHYATFMHRSQLEMEASGYIKDDRLTIECFVTVVVQESMASNTVKAHELIKVPPSDILENFGELLEKGEGADVTFVVGGEKIAAHKIVLAARGLLHFIYTDSLPDMDDLSDDDYYEMIRLLLVAADRYAMDRMKLQCESILGEHLDVQTVATTLALADQHNCNGLKDVCIEFIATQNKMDDVVATEGYAEDLPFCLS

SEQ ID NO: 16442 - protein, 186 aa, Oryza sativa
  Clone ID: TF_OSC2852j.C1.p1.fg
MANMLRAADGADVVVLVRDQPFRAHRCVLAARSPVFRAELFGGGHMRERRTSCVVVDDMEPSIFSAFLHFIYTDSLPENPDTPGDDQDCMAMQHLMVAADRYGLDRLVLICEEKLCRGIDVQTVATTLALAEQHQRVALKDACLGFIVSRGVLGAVARTDGFKHLLTTCPSIMVDILDKVASVMSK

SEQ ID NO: 16443 - protein, 407 aa, Oryza sativa
  Clone ID: TF_OSC401762j.C1.p64.gm
MAVAEVETAALGDGGSGGGGGRRRGRGGGGRSGGGGARGRRRRSATWTGRGGGQGEGEGEAEAAREGAEAALGDVDGARGRGAEAAARGRKPVRSASTIIAGTESGQHLLKIDGYSHTKDKLPTPGSNVKSRSFRVGGHSWHISYYPSGNDSDKANCISIFLNLDDDVDVKAQFNGWGFVSFIRRDVLEKSEYLRDDCLTIVCDLTVFMELQTEDIDVDTATPPPPPPPTVVVPPSDLHRHLGGLLATGEGADVTFEVSGKTFAAHRLVLAARSPVFRAELFGPSKELGATTGGAVDHTAIRIDDMEARDFEALLRYMYTDSLPEPETTKGGGDAAAMLPDLVAAASRYKMERLRLVCEHKLCEYVNGRTVVSMLAFAREHHCDGLKEKCLRFLDDPVKVREIVKAR

SEQ ID NO: 16444 - protein, 271 aa, Oryza sativa
  Clone ID: TF_OSC400049j.C1.p4.fg
MSCSAIVADGVTGYHLLKIDGYSLTKGTPTGTAIKSNPFTVGGYRCSSKPRISRSPTTSGTTRSPSGVTWSLSARSVPRRGRLTHLAETFVSVPPSDMNRQLGDLLETEKGADVVFEVAGERFAAHRCVLAARSPVFGAELYGLMKEGDAAVVVCIEDMEARVFKLLLRFMYTDSLPEMKNKDAGVMCQHLLVAADRYNLERLKLICEEKLCKHISMGTVSNMLVLADQHHCAGLKKTCCNFLGSSANLSPISRGCLSVMKELVLGCWCIH

SEQ ID NO: 16445 - protein, 261 aa, Oryza sativa
  Clone ID: TF_OSC401315j.C1.p8.fg
MANDCNTISSAIVAEAVSGSHVMKIDGYSKTKALIKNEECLSSTPFSVAGYTWTIRYYPNGQSTECREYLSLYLFLDSFARDVKAIYSFKLLDKNGRPLLLNSIASPVKTFKLRGTGWGYPMFIKSKDLKASESLRDDSFSIRCDVTVMKPICSKETPAMPKPSVEVPPGDLHQHLGDLLKNMDGADVTFDVGQERFSAHKCVLAARSSVFEAMFFGATRAKPRRSNIKIEDMEAGVFRSFLHFVYTDLLPDTSQDVVMAQ

SEQ ID NO: 16446 - protein, 341 aa, Oryza sativa
  Clone ID: TF_OSC401180j.C1.p17.fg
MMISSSFAELKLEYPGTTTTTNSFAVGDGEQSWVIRCYPRGYREEDNGEYVSLRIGVPARSNTVRAIFHTFLMRRDGGVGAPSIICSDRAFPMSVPGHPRGYGGAFRHLVRRSDLEPLYAVDGVVTIVCGVVVFADAGGGGGDDDDGGPIPVPRSNLGGQLGGIVDRADCSDVSFSVGGETFHAHRAVLAARSPVFKAELLGSMAEAAMPCVTLHDIDPATFKALLHFVYTDALPSPSTSSSSSSTTTGFFESLLVAADRYALERLKLMCAQKLWESVSVETVATTLGYAETYHCPELKSKCLNFLMAESNFKKVAVTNGYFHLRQDFPLIIEEIKKRIES

SEQ ID NO: 16447 - protein, 364 aa, Oryza sativa
  Clone ID: TF_OSC407812j.C1.p18.fg
MGKLTDVTRSNDIQLKIVGHSLTMAMDDGEFFSSRRYCVGGHDWEIRLRPKDPWVGRRDRPLTLKLVLRGAPRTGSGSVKAQLSCCLVDPTQKLRPSEMKTVSHKFHKPGDYSPRAVFMARDELEASGYLTDDSYVVQCAITVLREQPEIAAAAAAAGDSANAAVAPSSELHAYLGALLESKTGADVTFVVSGESFAAHKAILASRSPVFMAELFGAMKVKASERVEVKDMEAPVFKAILHFVYTDTVPELDHRDGEETEAASTATAMAQHLLAGADRYGLERLKLICESKLAERIDVDTVSTTLALAEQHDCSHLKAKCVEFIAAGTAENLDAVLATDGFKHLEASCPSVLTDLVKVARGRKN

SEQ ID NO: 16448 - protein, 323 aa, Oryza sativa
  Clone ID: TF_OSC900305j.C1.p3.fg
MANDTNNTSSSVIATETTSASHVIKIDGYTVTKDLMENGEFVSSIPFSVGDFLWNVRYYPNGNCSKNADYLSFSVFLESHWAEDVKAKFSFKLLDTNNKPVRSRNFISNTHNFSRRGSNWGYSRFIKKRDLEQSEHLIDDSFTIRCDLTVMKGFSSKGSHCKPSVEVPAGRLDLHLGNLLSNKKMNGKDVTIYVGKERFRAHKCILAARSSVFRALFFGAMIAETPRTIEIEDMEAGVFRLLLHFMYNDSLPETWSQDAMMAQHLLVAADWYNVGRLKLICEEKLAKHIDCNMVATTLALAEQHSCQGLKEACLEFLASTNQS

SEQ ID NO: 16449 - protein, 429 aa, Oryza sativa
  unsure (1)..(429): unsure at all Xaa locations
  Clone ID: TF_OSC101916j.C1.p11.np
WQQQLQPHDQQAASCSVTAGMMMQASGYDMAELDIFLYLNSQDASAAIQEQPRKPHIYMHLLLSPNLQTLNIFPSQPMHAGEPSPKGSSSHHGGASSAAASEHEGPKTPDAKTLRRLAQNREAARKSRLRKKAYIQNLETSRIRLSQLEQELVQRSRTQHVSTXGAILGGGAFSAGIGGQSPGIYNQAAWFDGEYARWVESHERMMAHMRAAVEEQPQHGGLRQLVDAAVAHHGVLVELRQLVDAAVAHHGVLVELKAAVASADVFHLVSGTWLPAAERCFLWIGGFRPSELIKMMARHAEPLTEQQAAGVYGVQQSAREREEALDRDLHATHHALSDAVSSDSLPSLPAPVPPHTPTSMAHLSLAISNLSSLEAFVRQADALRLQTLYKLPQILTARQSARCFLAIADHSHRLRALTSLWLSRPRHPD

SEQ ID NO: 16450 - protein, 300 aa, Oryza sativa
  Clone ID: TF_OSC401607j.C1.p25.fg
MADASSRTDTSTVLDTDDKNQMAHHFDINFVKNLIVKVDGQSGAIVPSNSSDRSDRSDKPMDQKVLRRLAQNREAARKSRLRKKAYVQQLESSKLKLASLEQEINKARQQGIYISSSGDQTHAMSGNGAMTFDLEYARWLEEQNKQINELRTAVNAHASDSDLRLIVDGIMAHYDEIFRLKGVAAKADVFHILSGMWKTPAERCFLWLGGFRSSELLKLLVNQLEPLTEQQLLGLSNLQQSSQQAEDALSQGMEALQQSLADTLAGSLGPSGSSGNVANYMGQMAMAMGKLGTLENFLRQ

SEQ ID NO: 16451 - protein, 519 aa, Oryza sativa
  Clone ID: TF_OSC401001j.C1.p21.fg
MEGGRLGGAAASASAAAAADARGGMSGFAAPQHAIVKHGPGSVTHCGGKWTFAELCQSEQIWVLDCYCMQWACKFATNATECHTNLNNVQPTQVTDFGALAQSAGFRIEDLANLSTNGLFNLKSNAHTIINDPLQFENYVKSISPSNITTTATVTVVDPQTLVPQKGAQLNLVTIRTGNVENWGESTIADTSPRTDTSTDPDTDERNQMFEQGQLAAPTASDSSDRSKDKLDHKTLRRLAQNREAARKSRLRKKAYIQNLESSRLKLTQIEQELQRARQQGIFISTSSDQSHSASGNGALAFDMEYARWLEEHNKHINELRAAVNAHAGDNDLKSTVDSIMAHYNEIFKLKGVAAKADVFHVLSGMWKTPAERCFMWLGGFRSSELLKLLAGQLEPLTEQQLAGIANLQQSSQQAEDALSQGMEALQQSLAETLASGSLGPAGSSGNVANYMGQMAMAMGKLGTLENFLRQADNLRLQTLQQMQRILTTRQSARALLAISDYFSRLRALSSLWLARPRE

SEQ ID NO: 16452 - protein, 475 aa, Oryza sativa
  Clone ID: TF_OSC404032j.C1.p1.fg
MGGSREEDRQHHNHLPSELPLGFRSSSPTTMIASSSMSKESSNYDMADFDQASLFLYLDSHDQQSIQEQRQTLNIFPSQPMHVADPAHEAKSAGVAMAMLPNGNQLQVLPSHPSKKPDQQGGQKINSSVPTNPPGPNLPLPNSAKDNKNSSLIKGPKKCGLQKEGSSSGKGATTSNDPEREGRRTLDPKTLRRLAQNREAARKSRLRKKAYIQQLESSRIRLSQLEQQVHVARVQGAMLGAGDQHQGLPSGPSAASLFDLEYGRWVEEHSKLIFQLRAALNEQMADSQLQVFVNGAMAQHDELLSLKGAIARADIFHLLCGVWATPAERCFLWLGGFRPSEAIKVMLKQVEPLSEGQLMSIYELQQAAKGTEDALSHAMDGLQQSLSDTVAAPDVAAAGGFMGHMSLAMNKISAMEDIVRQADGLRQQTLHKLQHMLTIRQAARCFVAISDYFHRLRALSTLWVARPRPEEGPAM

SEQ ID NO: 16453 - protein, 362 aa, Oryza sativa
  Clone ID: TF_OSC400216j.C1.p4.fg
MANAKLPKQALLPPRSPFPTAAAAAGPYAGDHGPIARPQGAPHHRHGHGHGHHQRTSSESFIEEQPSWLDDLLNEPETPVRQHGRAGHRRSSSDSFAMFDGGAAAGAYANGFEGMGGGGGGGQAAPWGGVQEYYAKPSSFGRHQGRPWEQGMNNLVNYRQSGGPPMPAKEKVGGHHGSPSVLRDHDHGMDRRSSDESGHDQKVGPERKEGVPPKHAQSEADTKRAKQQYAQRSRVRKLQYIAELERKVQALQSEGIDVSAEMEFLSQQNIMLDLENKALKQRLESLAQEQLIKRFQQEMFEREIGRLRSLYQQQQQQQKQPQPTTTLSRSNSRDLDSQFANLSLKHKDPNSGPLRTQSSSIL

SEQ ID NO: 16454 - protein, 346 aa, Oryza sativa
  Clone ID: TF_OSC401539j.C1.p89.fg
MAQLPPKIPVAAPGHHQHWASAGGAGDAAWADEFAEFAASRRGAHRRSLSDSVAFVEVAPAGCGAGGEFDRLDDDQLMSMFPDEGGSSAPGSDNGGSDSDGGGDKHAAAQSDDGQHAAGEPTQEQAAATSPTELIRDPKRVKRILANRQSAQRSRVRKLQYISELERSVTTLQKWRQFETDRWTQPHWLAGNSTQCGEEMSESNEVSVLSPRVAFLDQQRTILTVGNSHLKQRIAALAQDKIFKDAHQEALRKEIERLRQAVLACYRLTAPDLLCMIWFPLLGERNHRRRKTCAAYRYRGTPLLLQFQGQVAQRAIQHLHYSEFAVYGSGSAMINHATCGVLVSRY

SEQ ID NO: 16455 - protein, 171 aa, Oryza sativa
  Clone ID: TF_OSC402026j.C1.p13.gm
MAEQLGGVGSPQLSLSSCSSFLSISSAGTSAADGAPHLSLGVGGAEELDLLLQVGIGGGGGGGGDEEEEERKTIRMMKNRESALRSRARKRELEKEVRRLVNENLKLKRHCKQGQHKSGAGYDAIKTYQQRPFSESPSSSLRPGRPYLAGLLPLPFTSLCLRHHDQPTARY

SEQ ID NO: 16456 - protein, 347 aa, Oryza sativa
  Clone ID: TF_OSC403288j.C1.p1.fg
FSTTATAAATARPPPTLDIFPSWPMRSLHTPKEGSNVTADTTDSESSSKNNSNQNASSDQHVLVGDMAGQFDQIPQQEQHKKMATNSPTHSSKTGKALDPKTMRRLAQNREAARKSRLRKKAYIQQLESSKLKLAQMEQDIHRARSQGLLLGAPGGNTSSGAAMFDVDYARWLEEDSQRMAELHGGLHAHLPDSDLRAIVDDTLTHYDHLFNLKGMAAKADVFHLITGMWATPAERCFLWMGGFRPSELLKTLTPQLDPLTEQQVVGICNLQQSSQQAEEALSQGLDQLHQSLAETVAGGSPLDDPNVGSFMGHMAIALGQLSNLEGFVIQIKIGVALSLCVTQLHK

SEQ ID NO: 16457 - protein, 480 aa, Oryza sativa
  Clone ID: TF_OSC8883j.C1.p9.fg
MASMAPPCPTPWLLQTSYHSGQQIYSQQVVDLMLHVLISLLNLHWPDTDSEQGGGGGGGAAYFGELEEALVHQVATLRRRAQQTATTTTSHHGHTTPFSTAAAAATATATARPPATLDIFPSWPMRRSSLPTPKDGCSNVTADTTDSESSSKNNGDQGAAAADMASQFDQIPQQQQKQHKKMAASSTHSDHRMTKTLDPKIMRRLAQNREAARKSRLRKKAYIQQLESSKLRLAQMEQDLERARSQGLLLGGSPGGNTSAGAAMFDAEYGRWLEDGGRRMAELHGGLHAHLPDGDLRAIVDDALAHYDELFRLRAAAAKADVFHLITGTWATPAERCFLWMGGFQPSDLLKTVAPQLDPLTEQQVVGICSLQQSSQQAEEALSQGLEQLHQSLAETVANGGSVVNEASLGSFMGYMALALGKLSNLEGFVIQADNLRQQTLHQMHRILTIRQAARCFLAIGEYHNRLRALSSLWASRPRE

SEQ ID NO: 16458 - protein, 365 aa, Oryza sativa
  Clone ID: TF_OSC400765j.C1.p13.fg
MASSSDEQPKPPEPPAAAAVAGTAVATAAAAVPTHAEWAASLQAYYAAAGHPYAWPAQHLMAAAAAGAPYGAPVPFPMYHPGAAAAYYAHASMAAGVPYPTAEAMAAAAAAAAGAVPEGKGKGKGAAASPEKGSSAAPSGDDASRSGDSGSEESSDTRDDDTDHKDSSAPKKRKSGNTSAEGEPSQATLVPYAAVESPYPLKGRSASKLPVSAPGRAALPNATPNLNIGIDLWSTPPALAVPAGQGEASPGLALARRDGVAHLDERELKRERRKQSNRESARRSRLRKQVGYLYGSGSRWQTWKETLILLGAAIFLAGGIECMLDAGRGIWYDVSTSPDVGLSAHGQYAQQAMLQETDKQHAPRP

SEQ ID NO: 16459 - protein, 150 aa, Oryza sativa
  Clone ID: TF_OSC420547j.C1.p6.fg
MSYAFNKLLPTTHFRQYAQRSRVRKLQYIAELERRVQALQTEGVEVSAEMDFLGQQNIMLDLENKALKQRLESLSQEHLIKRFQQEMFEREIGRLRSLFQQQQQQQHIPQQQGPTHSRSNSRDLDSQFANMSLKHGDPNSGRDAVPGLRI

SEQ ID NO: 16460 - protein, 857 aa, Oryza sativa
  Clone ID: TF_OSC400302j.C1.p17.fg
MAAAVAMRGSSSDGGGYDKVSGMDSGKYVRYTPEQVEALERVYADCPKPTSSRRQQLLRECPILANIEPKQIKVWFQNRRCRDKQRKESSRLQAVNRKLTAMNKLLMEENERLQKQVSQLVHENAHMRQQLQNTPLANDTSCESNVTTPQNPLRDASNPSGLLSIAEETLTEFLSKATGTAIDWVQMPGMKPGPDSVGIVAISHGCRGVAARACGLVNLEPTKVVEILKDRPSWFRDCRNLEVFTMIPAGNGGTVELVYTQLYAPTTLVPARDFWTLRYTTTMEDGSLVVCERSLSGSGGGPSAASAQQYVRAEMLPSGYLVRPCEGGGSIVHIVDHLDLEAWSVPEVLRPLYESSRVVAQKMTTAALRHIRQIAQETSGEVVYALGRQPAVLRTFSQRLSRGFNDAISGFNDDGWSIMGGDGVEDVVIACNSTKKIRSNSNAGIAFGAPGGIICAKASMLLQSVPPAVLVRFLREHRSEWADYNIDAYLASTLKTSACSLTGLRPMRFSGSQIIIPLAHTVENEEILEVVRLEGQPLTHDEALLSRDIHLLQLCTGIDEKSVGSSFQLVFAPIDDFPDETPLISSGFRVIPLDMKTLELIEAFGFKYSLGKIKQDGASSGRTLDLASSLEVGSATAQASGDASADDCNLRSVLTIAFQFPYELHLQDSVAAMARQYVRSIVSAVQRVSMAISPSQTGLNAGQRIISGFPEAATLARWVCQSYHYHLGVELLSQSDGDAEQLLKMLWHYQDAILCCSFKEKPVFTFANKAGLDMLETSLVALQDLTLDRIFDEPGKEALFSNIPKLMEQGHVYLPSGVCMSGMGRHVSFDQAVAWKVLAEDSNVHCLAFCFVNWSFV

SEQ ID NO: 16461 - protein, 71 aa, Oryza sativa
  Clone ID: TF_OSC401928j.C1.p5.fg
MSAARGGGRASSSAVEEELRALMEKRRAKMMLSNRESARMRKQRHLDDLTAQVAHLHRENVHVATALGLTT

SEQ ID NO: 16462 - protein, 855 aa, Oryza sativa
  Clone ID: TF_OSC400500j.C1.p14.fg
MAAAVAMRSGSGSDGGGGGYDKAGMDSGKYVRYTPEQVEALERVYAECPKPSSSRRQQLLRDCPILANIEPKQIKVWFQNRRCRDKQRKEASRLQAVNRKLTAMNKLLMEENERLQKQVSQLVHENAYMKQQLQNPSLGNDTSCESNVTTPQNPLRDASNPSGLLTIAEETLTEFLSKATGTAVDWVPMPGMKVDCQLLRFTLPASNDPGPDSFGIVAVSHGCRGVAARACGLVNLEPTKIVEILKDRPSWFRDCRSLEVFTMFPAGNGGTIELVYMQMYAPTTLVPARDFWTLRYTTTMEDGSLVVCERSLSGSGGGPSTASAQQFVRAEMLPSGYLVRPCEGGGSIVHIVDHLDLEAWSVPEVLRPLYESSRVVAQKMTTAALRHIRQIAQETSGEVVYALGRQPAVLRTFSQRLSRGFNDAISGFNDDGWSVMGGDGIEDVIIACNAKKVRNTSTSANAFVTPGGVICAKASMLLQSVPPAVLVRFLREHRSEWADYNFDAYSASSLKTSSCSLPGLRPMRFSGSQIIMPLAHTVENEEILEVVRLEGQALTHDDGLMSRDIHLLQLCTGIDEKSMGSCFQLVSAPIDELFPDDAPLISSGFRVIPLDMKTDGTPAGRTLDLASSLEVGSTAQPTGDASMDDCNLRSVLTIAFQFPYEMHLQDSVATMARQYVRSIVSSVQRVSMAISPSRSGLNAGQKIISGFPEAPTLARWICQSYQFHLGVELLRQADDAGEALLKMLWDYEDAILCCSFKEKPVFTFANEMGLNMLETSLVALQDLSLDKIFDEAGRKALYNEIPKLMEQGYVYLPGGVCLSGMGRHVSFEQAVAWKVLGEDNNVHCLAFCFVNWSFV

SEQ ID NO: 16463 - protein, 390 aa, Oryza sativa
  Clone ID: TF_OSC900303j.C1.p8.fg
MSRSPHLPPRCPPLGPQITRRDDSLFTQSCRFPSEDPFVGEPPCWLDDLLADSGKSHTLPPLRRACSDSDAILDVLTSFQSPIYPIDEGDPQPVGEAGESFNAAAEGGGSGAGIEGSCVYGPNSPRQKTRLTSSESSMVNAVLENVPSNPLQYLMIDATSGVNCNVGAANGTGDTGDAVCHADQEKSLKRKKVARRESHGVRLGGAKRQWEDGEGGAVLQEVKQRNGDESLTPIPEVVSEAGWWAVTGRSMGWRRSGQRSRVRKLQYIADLERTVDSLQNIGADLAVRVASLFQLRNALSMENKQLRRQITSLQQAKLIKDGQTQMLKKETERLKQLSVRHRRSRSVTSCFEANSFGGGDPSAINWQMLDMSKLSLNGGAVVPPRGGYGM

SEQ ID NO: 16464 - protein, 682 aa, Oryza sativa
  Clone ID: TF_OSC400397j.C1.p26.gm
MSQLKMLMDVTLHGMMWMKLLVRHTIFEVTMFQGELTIVLGINKLEPGQLALAAASDSDRSKDKHEDQKTLRRLAQNREAARKSRLRKKSRTVPSNSGQLQGIFISSSVDQTHSMSGNGALAFDMEYARWLEEHNRQINELRSAVNAHAGDNELRGVVDKIMSHYEEIFKQKGNAAKADVFHVLSGMWKTPAERCFLWLGGFRPSELLKLLSTQLEPLTEQQLSGIANLQQSSQQAEDALSQGMEALQQSLAETLAGSLGSSGSTGNVANYMGQMAMAMGKLGTLENFLRQVTLIWLSTPQWQYIGFFTVMPAYGLTCTGDPITSIGLWCDWLGYGECAGDDWHVIDCGADCHTSELVIENLKPRCISNARRRAVLRASSSPQWARPSHEKEQQRTDCIVTQKLQEYGTKLADGDELGRKMPQHQGREKMLALRREPTPPGYLPDGVYPVMASEKNIKVFQMGTHVEASIPFQTRAAAEHAWKLNGRAIYDGCCWLNIQWAQPSSSTPAAATPLVGITKELIANVLELKAMLKESNASKEVEDGRTKQKVAAVDLAVMAPVAMPLTQMSPPADSLVEQEMATQQKTVEGTTRTLPAVVPSSQFPPSEAGFSNSKEQEAAPAWSSEAGGMAWHEGGSAFCVKVEHSDGACCAQPGFASSHVLAVGLAGSTIAEDNGDLQMVLV

SEQ ID NO: 16465 - protein, 115 aa, Oryza sativa
  Clone ID: TF_OSC401427j.C1.p4.fg
MEANADADERRLRRKIFNRESARRSHARKQWHIDKLRARAGRGRGRRRLGAAGAEAVVWRAPEERPEAGAEASDGGREGKASCKPPGPAPPPLVARWRGQAPHPQSGARFSVWML

SEQ ID NO: 16466 - protein, 523 aa, Oryza sativa
  Clone ID: TF_OSC20620j.C1.p14.gm
MATNLRFASISFRTCPKMLFGNSENYSLGLQWLVFEGLGNAYSSLPLDDIKVLSIGIRARSLIPGFTVLREDVDKRAMGPNIERVVDVSISPPNDMELSFEEEEKCTHLNAQATNVLFSALSEDVFKTIMPLEDAYLIWTTLKERYDKSKCDGEDALRETSFGDCSTLSSHHDKSQVIISSDQEDHVFMGDDDDDDSVVDHLNKDTTMVIKLMRVIEKQQACLIKKNEEIKDLADEHKKLKGYNSSLIMRYEQLENEFACATNSIACVASLKKENQELKSQLEEITSKEKHMDHGLMGNAQPSQDNHESMVKKLEKGSTVACTKFYQENKSNNKRTPVAAASPPTGSGGGEDAAAAGPPGRHRLSFSPTRSGGGQESPLHATSRRRSLLMGRGSPAPPPRGRRGHEGETTGRGAGARPLDGGALTHGRRHAAVELELSLGGVISPNVTSFDLKAAVCSHGLFMIAPNHWDRTSRALVRPLRVTFDRTTFIAVCISRHPHVPLRCVPRFCRQCARCPLPARPDC

SEQ ID NO: 16467 - protein, 471 aa, Oryza sativa
  Clone ID: TF_OSC418822j.C1.p4.gm
EDEAEMASTRLSLELGKVGIQSSPPCSSSSSAGHPAMQPAAAATAAPGYGPRPRHMLTEAEKEAKRLRRVLANRESARQTILRRQAIRDELARKVADLSSQNETMKKEKDVVAIRTIKKAAVAEPMDTAPPAQQQAETAAAVAPPTTATPPSTAPQPSFLYTAAPAGVAPVPYVWGSWPPCGPTGYEPPPPLCLPPCAWYYPVVADPRVSSPPTSTYPQSYQEQPTSSPGGGTAEEDTDDDPCSLTLAIDVDKRSAPGAGGSAAGAGQHASISDREKATAAAEARKRRKELTKLKQMHGGGGGSRPGGGGEHCACPSLRGMPPPPPPQPQPTTTATTSANGGKVTPNLTMDAEGTRLLNLTVLQRLDPAVEDILITAAHVTLYDFNIDLNQWSRKDVEGSLFVVKRNTQPRFQFIVMNRRNTDNLVEDLLSDFEYELQPPYLLYRNAAQEVNGIWFYNQHDCEAVASLFGR

SEQ ID NO: 16468 - protein, 182 aa, Oryza sativa
  Clone ID: TF_OSC401058j.C1.p53.fg
MASPGVVCTTVTPTSSAGSDQVVAGGGEAARRPVAPAVMEERKRKRKESNRLSAQRSRARKQQQLDELAGQVAALRARNGALGLAAREAARRCAAVRAENELLRARSVELAARLDSLTDLAQCLHDAAAASSFAAAPPMMMAGAATAFPTGAVGAAAGFMMPQLPPPLLDATTMGMHCNYYY

SEQ ID NO: 16469 - protein, 366 aa, Oryza sativa
  Clone ID: TF_OSC401001j.C1.p60.fg
MASKAGGGGVARRGGGRMRSLGRQGSMYSLTLDEVQSQLGEPLHSMNLDELLRSVFPDGLAIADGAGATTSSQQHQPGSGLLRQGSITMPPELSKKTVDEVWKGIQAAPKRNAETGGGGGGGRRRRERQPTLGEVTLEDFLVKAGVVTQGSLKELSDVGNVDPVGRGVTATGTVDLAPGSHWIEQYKQQIASTDAHHHGQQGVQGAYFPNRLVPQPLNVGPGAILEPSYSDGQTSSGMIGGMSDSQTPGRKRGMSGDVADKLMERRQKRMIKNRESAARSRARKQAYTNELENKVSRLEEENVRLKRQKESDYLHYTRSNLVMENIEIHRSLINSNIIIWYDELYYFIGSVSSYNQEVFVMVIVCV

SEQ ID NO: 16470 - protein, 153 aa, Oryza sativa
  Clone ID: TF_OSC12168j.C1.p2.fg
MSSGTSSGSSQGTRSSRSEDDLNLQAQMEKKRKRRKESNRESARRSRMRKQQHLDELTSQVNQLKNQNQQLSMALSLTTQNLVAVQAQNSVLQTQELELQSRLCALTDILMCMNNTSATPTPTIPATTTSACDIFGASSWNQPPIDLYQYQCF

SEQ ID NO: 16471 - protein, 156 aa, Oryza sativa
  Clone ID: TF_OSC401981j.C1.p10.fg
MPLMHLLAPPAQAFVVAPPRVAPAFDGAAAPPREDDPAADQPPEREADADERRLRRKISNRESARRSRARKQRHLDELRARAERLRRCNRELAARGHAARGRAGLVRLANAWLRAEAAALTRRLAAARRAIALGQLYRPAAAAAAASGRSSRRSPR

SEQ ID NO: 16472 - protein, 548 aa, Oryza sativa
  Clone ID: TF_OSC411383j.C1.p7.fg
MGFFRRIAGMFGISRDDADHHPHHHHHDGAAGDSAAAAEVPQDKVVAAAAAAAAAGNVQRRGFSVQVPVPVERPGPGPVLVPCPQGDGGVQGFRWYTRKLRIDEDGDVADEFLDEVVPEISINNDSTPAGRYQVKYNTKSAALAMRKQISVIDGDICHSLEYQGRLRWNCQSLLAKGLQEFDMRVCLGASQECGSVEFLVDASFLNLSVLGCLMGTNDPGTPSKATKASEPEQSPATTSGTTAPVYPEWPGFQAYSAIPPHGFFPPPVAASPQAHPYMWGAQGVHPFNHYPMLANGNVETAGTAPGASEINGKNELGRTSGPSANGITSHSESGSESESEGSDANSQNDSHSKENDVKEDGSSQNGISHTALNQNMSMAPTQTGVVIGGVAPTTNLNIGMDYWGAAGSSPVPAMHGKASSGSVRGEQWDERELKKQKRKQSNRESARRSRLRKQNIMDSLIEAPKYLFQAECEELSVRADNLRAENSSLRAELERIKKEYEALLSHNASLKEKLEGNSDSIPYMNEQNDTNGTHQKQQDSDAQPNDAP

SEQ ID NO: 16473 - protein, 322 aa, Oryza sativa
  Clone ID: TF_OSC401520j.C1.p23.fg
MTPLPLARQGSVYSLTFDEFQSTLGGVGKDFGSMNMDELLRSIWTAEESHAVGAATTTTATTASVAAAEHAAVGAPPVQRQGSLTLPRTLSQKTVDEVWRDMMCFGGGGASTAPAAAEPPPPAHRQQTLGEITLKEFLVRAGVVREDMSVPPVPPAPTPTAAAVPPPPPPQQQTPMLFGQSNVFPPMVPPLSLGNGLVSGAVGHGGGGAASLVSPVRPVSSNGFGKMEGGDLSSLSPSPVPYVFKGGLRGRKAPGIEKVVERRQRRMIKNRESAARSRQRKQAYMMELEAEVAKLKELNDELQKKQDEMLEQQKNEGLGGSI

SEQ ID NO: 16474 - protein, 322 aa, Oryza sativa
  Clone ID: TF_OSC420174j.C1.p9.fg
MTPLPLARQGSVYSLTFDEFQSTLGGVGKDFGSMNMDELLRSIWTAEESHAVGAATTTTATTASVAAAEHAAVGAPPVQRQGSLTLPRTLSQKTVDEVWRDMMCFGGGGASTAPAAAEPPPPAHRQQTLGEITLEEFLVRAGVVREDMSVPPVPPAPTPTAAAVPPPPPPQQQTPMLFGQSNVFPPMVPPLSLGNGLVSGAVGHGGGGAASLVSPVRPVSSNGFGKMEGGDLSSLSPSPVPYVFKGGLRGRKAPGIEKVVERRQRRMIKNRESAARSRQRKQAYMMELEAEVAKLKELNDELQKKQDEMLEQQKNEGLGGSI

SEQ ID NO: 16475 - protein, 945 aa, Oryza sativa
  Clone ID: TF_OSC8882j.C1.p13.gm
MKFGRITPVVKFWYGKFYRGHTKDIIDVDLFWRSTVKEKDSELLGYKFRYKEGIKSKISLGSQISSAGFNLGFGHLALVLKVMAAAEGGGDQGTINAIVAHPKPSGASSLPPGSRLESELQAVLVLNQSVDGIHDQATGSRVLPSSGNHDGGLASNNLSSQGPTVFTEGEVVDEEEDAVEIEIEENEVQKAGQWTILARFYSLKFPNQSALFEDMRRAWRLRAEMSYKSLKDNLFIVSFNAEGDYNFVLQGDPWLHRGDALLVAEFNGLLNPSMVNLDTVPIWVRIYDLPLVMMNRARAGIRQDAKRYEDQPTRVDAFDGFDIREGKGEDSIDSQLADQTNMLHVSEVSSLGQKKGKDLVSKETSSIPSMEMIPAIRDLNVQQVSFGDGSTEEFGSPTKRKALPTTKSSGIVQQAVLEYGQRGAEETASSTRAMKRLKKGVEANTGVEDMEATSLGAAVKDPHQLRQKCLHYEIVWEREPEATQVIEEAWVVAGEKADLGDINKALAKVMTALRSWSRAKVKNVGRELEKARKKLAELIESNADRTDVYTADPNLNPETVTRLIQEKVTDIMNEKLCEDFTEDEISQAIFQIGPLKSPGPDGFPARFYQRNWGTIKADIIEVILNICISSRSEEDFIAWHPDKNEYEQAMFLMTLWRNWYVRNELIHGKSAPPTETSQRFIQSYVDLLFQIRQAPQADLGIGRDFSVLANIIHEARHLLVGERAAPPLAAALACPHGEQPDAKILPAATPPMSDDHSGGGGEQRQCRRGFAVDVVELGAALALADMAGAAVKPAMQLQLQPTAAQEEDEEMATTRLSLQLGNNVGSIIQSSSCSSSGSSAGLPAPPPPPPPATAYGTKPLHMLTEEEKEAKRLRRVLANRESARQTILRRQAIRDELARKVADLSTQNESMKKERETVMQEYLSLKETNKQLKEQAQHHLSLSLF

SEQ ID NO: 16476 - protein, 242 aa, Oryza sativa
  Clone ID: TF_OSC401982j.C1.p6.fg
MMKKCPSELQLEAFIREEAGAGDRKPGVLSPGDGAHDPKPTTSANHAPESDSDSDCDSLLEAERSPRLRGTKSTETKRIRRMVSNRESARRSRRRKQAQLSELESQQSIYDQVEQLKGENSSLFKQLTESSQQFNTAVTDNRILKSDVEALRVKVKMAEDMVARAAMSCGLGQLGLAPLLSSRKMCQALDMLSLPRNDACGFKGLNLGRQVQNSPVQSAASLESLDNRISSEVTSCSADVWP

SEQ ID NO: 16477 - protein, 278 aa, Oryza sativa
  Clone ID: TF_OSC900405j.C1.p4.fg
MDIEAFIHGGSGGGDADADHPLGIFSAADLSGFGFADSSTITGGIPNHIWPQSQNLNARHPAVSTTIESQSSICAAASPTSATNLNMKESQTLGGTSGSDSESESLLDIEGGPCEQSTNPLDVKRVRRMVSNRESARRSRKRKQAHLADLESQVDQLRGENASLFKQLTDANQQFTTSVTDNRILKSDVEALRVKVKMAEDMVARGALSCGLGHLGGLSPALNPRQACRVPDVLAGLDYAGDDPFTAGLSQPEQLQMPGGEVVDAWGWDNHPNGGMSK

SEQ ID NO: 16478 - protein, 383 aa, Oryza sativa
  Clone ID: TF_OSC401400j.C1.p16.fg
MGKGEVATRSKSQKSSATQNEQSTPTNPPTAYPDWSQFQAYYNPAGTAPMTPPGFFHPNVAPSPQGHPYMWGPQMMPPYGTPPPYAAMYAQGTPYQQAPMLPGSHPYNPYPGQSPNGTVQTPTSAGGTETDKSGKSKRKTPLKRSKGSLGNLDVVATKNKKAPAKPSASSSNEGSSHSESGSGSSSEGSSTNSKSGSRTKDGSEHGQGNDASNKGATAQSSAVEPVQASTGPVVLNPMMPYWPVPPPMAGPATGVNMGMDYWGTPTSVPMHNKVIAAPASAPSSNSRDVVLSDPAIQDERELKRQKRKQSNRESARRSRLRKQAEWEEVANRADLLKQENSSLKEELKQLQEKCNSLTSENTTLHEKLKELEGEKSNGNWYKE

SEQ ID NO: 16479 - protein, 174 aa, Oryza sativa
  Clone ID: TF_OSC420956j.C1.p1.fg
PPHHRRARSEVAFRFPDDLGLGGGADGGGFDEIGSEDDLFSTFMDMEKIAGADRDRAAETSSPPRPTKHRHSASFDGFAFGAGAGGPGPGLGKQQDGAGGVFSEVMEAKKAMSSEQLAELAAIDPKRAKRILANRQSAARSKERKARYITELERKVQTLQTEATTLSAQLTLFQ

SEQ ID NO: 16480 - protein, 154 aa, Oryza sativa
  Clone ID: TF_OSC401748j.C1.p3.fg
MANYHHQEYYQMAAAAAVAWPREPDSPQLSIMSGCSSLFSISTLRDDDDGGGVRLAGAALPATPVSLAGIAGGASTPGGDEVDMEVRQQSGGSGDDRRTIRMMRNRESALRSRARKRAYVEELEKEVRRLVDDNLNLKKQCKEGSGMREDIVCR

SEQ ID NO: 16481 - protein, 380 aa, Oryza sativa
  Clone ID: TF_OSC413557j.C1.p9.fg
MAHDEAVATQKIGKTTSPPKDQPTPCPFPDWSAVQAYYGPGVLPPTYFAPAIASGHAPPPYMWGPQPIMPPPFGTPYAAMYPHGGAYPHPLMPMMANPLSMEPAKSASSKEKGSNKKLKEVDGAAVSTGSGDSKKTMTSSGDYSAEGSSDVNDLKVGKTGRKRRLDDGAGAETSAAAKMENALPPSHILGSTAILPNHSFPAQVIRPSATNVANSRALGTPISPPPGVIVPSHTGVSTELLIKDERELKREKRKQSNRESARRSRLRKQAETEDLATQVESLTAENTSLRSEISRLSESSEKLRLENSALMGKLKDPAASTQAETSLQKTTTASSPRVVENFLSMIDNTNKTSVRHTEHAEPKLRQLLGSGPATDVVAAS

SEQ ID NO: 16482 - protein, 192 aa, Oryza sativa
  Clone ID: TF_OSC400718j.C1.p72.gm
MEIQLNTISAKDLARLVAPAQVPAKHFQMPARDVEAAAAGDEELGAASPLPLGGGDGRGHRAAAALPPDAEAAAAGDEELGVAFTPPSLSVACTRGGRGHQPPEREAEADADADERRFRRKISNRESACRSRARKQWHLDELRARAGWLRHCNCELAARGHAARGRAGLVHLTNVQLRAKAATPASPSPACR

SEQ ID NO: 16483 - protein, 189 aa, Oryza sativa
  Clone ID: TF_OSC400608j.C1.p15.fg
MALPPQAYFVPAAPPPPFQEATAALAAGDDATAALAVFELERILEEAAAAGGGGGNGSPSSGSDGCCYGLQGVAPAAEEERRRRRMVSNRESARRSRMRKQRQLSELWAQVEHLRGANRRLLDELNRALRGCADVRRENSRLRDEKAELAGKLQLLLPRQPAPEKNAADDQSSCSSEPCKNSTTTTAAE

SEQ ID NO: 16484 - protein, 400 aa, Oryza sativa
  Clone ID: TF_OSC400445j.C1.p27.fg
MTWHIQALPLAMPRHHPAWAPPPPFAETFPSSFLPKQNPSISDESAIFKHTHERQPTARDKNISIAISMDVEFFADLDLDALLASFSSSAAAAGSGVSGLFAPSPPHDAEAGSPESVSSRRPSPSREAALSEIERFLMEEGPAAEEGVGAEDFFDALLVDGGEEEEEEEGKGSEAGGSTDGDSGKENEVATPDAEKEDVEAEVDGDDPMSKKKRRQMRNRDSAMKSRERKKMYVKDLETKSKYLEAECRRLSYALQCCAAENMALRQSLLKDRPVGAATAMQESAVLTVCLSHNPDAPTVYLCHKPDAKGNLFLFAETLPLVSLLWLVSIVCLLPVPGLPNRNPVARSSAGRDLATVTGKKTSSEQQLEETLLLHGRRCKGSRARIKLDTGPFRLAAAAC

SEQ ID NO: 16485 - protein, 191 aa, Oryza sativa
  Clone ID: TF_OSC401980j.C1.p7.fg
MPLDFGLPDMDVGFGLFGVDAAAFGYDGVASDAAAGLSPVVGAGDGSGGGGDVLLYCDGGGGGGGGGEDGEEERRRRLRRKISNRESARRSRARRRQRVEELERAADELRAERRALASRLDATARRALAVRGANARHHAEAGVLRRRLGEAQRNAAVLIGLSRLLRSTANGAHGGAAPAQLSNGGVASLMT

SEQ ID NO: 16486 - protein, 270 aa, Oryza sativa
  Clone ID: TF_OSC422806j.C1.p2.gm
MGRSELRCTQSPRYSSPGLAALSAPSVAIRIPRLCRLVCFLSRIVRLGADECGGVRASDDLEQEFWRSLIAAMLSLHDAMPLDFGLPDMDVGFGLFGVDAAAFGYDGVASDAAAGLSPVVGAGDGSGGGGDVLLYCDGGGGGGGGGEDGEEERRRRLRRKISNRESARRSRARRRQRVEELERAADELRAERRALASRLDATARRALAVRGANARHHAEAGVLRRRLGEAQRNAAVLIGLSRLLRSTANGAHGGAAPAQLSNGGVASLMT

SEQ ID NO: 16487 - protein, 163 aa, Oryza sativa
  Clone ID: TF_OSC400354j.C1.p25.fg
MASSSGSGGSAVSAATAAAGGSSSAAEEELRALMEQRRAKRMLSNRESARRSRMRKQRHLDDLTAQVAHLRRENAHVATALGLTTQGLLAVDAENAVLRTQAAELAARLASLNDILSCINTNGAAAAAAAALTVAAATDPLLAFDSAAFDDLFRSSPELFQLC

SEQ ID NO: 16488 - protein, 164 aa, Oryza sativa
  unsure (1)..(164): unsure at all Xaa locations
  Clone ID: TF_OSC400354j.C1.p26.gp
MASSSGSGGSAVSAATAAAGGSSSAAEEELRALMEQRRAKRMLSNRESARRSRMRKQRHLDDLTAQVAHLRRENAHVATALGLTTQGLLAVDAENAVLRTQAAELAARLASLNDILSCINTNGAAAAAAAALTVAAATDPLLAFDSAAFDDLFRSSPELFQLCX

SEQ ID NO: 16489 - protein, 426 aa, Oryza sativa
  Clone ID: TF_OSC401664j.C1.p14.fg
MEGEPSRRLSLLDRCDDGSEDPVVPPRVPTILNLTSHHRLDRSKFLPLIHPTPARFISSTGSSFPPYSEPPPSAPMLELGSGFGPEDLYSFFPNHFFLMESISLPPYDVVDVPPVIPVALRSGRSNQGLPSKLPLIEGHRRSHSDIPFGYSQEHPQMPPVASVKPEVTTIKGHQLEDVAAAALKDMGIQAWSPSGSIDKEVKSSGAGSTTHHCRSLSVDSFMMGNLNFGVVGQQMSSPPLLTTEVNVGGGEPIGSTASPFAAELANVKFTEDEKKKIVMDKSLSEIVLTDPRRVKRILNNRASATKSKEKKMKHVGELQRKLQVLQSETTTLGAQVTVMQRNNNELVSQNNELKTRLQAMDQLAQLGDALTSRLAAEAQHLRAVVSEISDPNLPSGSHQQLSSDIDQLQQLLTQRQTSQIQHNQPQ

SEQ ID NO: 16490 - protein, 1809 aa, Oryza sativa
  Clone ID: TF_OSC401949j.C1.p30.fg
MDGRFPLPPASGGGRGHHRRAHSETFLRLPDADLLLDPEGDFSFSDLDFPSLSDDSPAISDPTPPPPPPMAATPAPAPRPPGGAHMRSLSLDTAFFEGFSLQGGGGGGGGGGSGGSGGHKRSGSMDGVNSPFEGESALSGGLPDYAKKAMPAERIAELALIDPKRAKRILANRQSAARSKERKIKYTSELERKVQTLQTEATTLSAQLTLLQRDTSGLTAENRELKLRLQSMEEQAKLRDALNEALREEVQRLKIAAGQAPNMNGNPFNGGLQQQIPPYYTQQQQQQQQMPYLGGHHAQQRHPSHQQSSSNGGQSLSGDSRCRESICGDGPRVSLRIRRRPWWSEIMRDTKARVQYTCGLTGGTSAVRPVAPRRCKGGQTGVSDKRQELISAVRPEIQSRSDRRQPGDQTGATPSVRLRSVEFEGTNNIKELRRDLFKKEYIKFEMKPGEALDDYLSRFNKILSDLRSVDSSYDVNYTQYEISHHFLNGLDMSIWKMKVTSIQESVDMSTLTLDSLYTKLKTHEMNILSRKVDSNSSVLVSSSTSLDVDSSSSKSSAFALFNAMSDDQLEQFVEEDLVLLSNRLSRAVTNLGRARGEDNGDEKTNDNKPKGTFKGRKIKENLKKAFDQVYTAFEPLSDVDGESGDEDKGNNISGVCFMARGELDSECEDNEVSALEEAINILSAKNMKCEKLYRKQEFIIESLNSEIARLKYLIPNDDDCTNCEVLMNEISKIRDVNAAHDLKNRSSLALSFALHTRTLDELCLTKKLLQKYQIAFHASLMFNMICAKKLKQPHDVLDCSTCTLNKLKLKDALGRVGYMEDVVKTNEVLSCPKCGKSKGVMVDSENCANLEKEVSYLKNSLQRFSDGVGARSGEILVKPDTNKTVFKSAGFVKVNEKFELKNVALVEDLKYNLLSVSQIVDEDFEVHFKKTGSKVFDSCGDSVLNISRYGRVFKADFDNPVSPVITCLVAKFDKDVMFWHRRLGHVGFDYLTRLSSLDLVRGLPKLKKDLDLVCTPCRHAKMVASSHAPIVSVMTDAPGHLLHTDTVGPARVQSVGGKWYVLVIVDDFSRYSWVFFMATKDKAFQHFRGLFLRLNLEFPGSLKRIRSDNGGEFKNSSFEQFCNERGLEHEFSSPRVPQQDGVVERKNRVLVEMTRTMLDEYHTPRKFWAEAVQGEDGHIFEYESDNDDDEVGSAGQTGRQADRTAGTPPVRPAHDVRSDRPGSSGSGTIDADQDGPPEITTSTSTDTERESTSEVAAPLHIQRRHLPEQIIGNIGERTTRSKVMTHDVCANSAFVASFEPKDVSLALTDESWINAMHEELENFEINKVWTLVEPPSRHNIIGTKWIFKNKQNEDGLIVRNKARLVAQGFTKVEGMDFDETFAPVARIEAIRLLLAFAASKGFKLHQMDVKSAFLNGFIQEEVYVKQPPGFENSDFPNHVFKLSKALYGLKQAPRAWYDRLKNFLLTKGFTMGKVDKMLFVLKHGDNQLFVQIYVYDIIFGCSTHTLVVKFAETMRREFEMTMMGELSYFLGLQIKQTPQGTFVHQTKYMKDLLRRFKMENCKPISTPIGSTTVLDPDEDGEAVDQKEYRSMIRSLLYLTASRPDIQFAVCLCARFQASPRASHRQAVKRIMRYLNHTLEFEIWYSTSSSICLSGYSDADFGGCRIDRKSTNGTCHFLGISLIAWSSRKQSSVAQSTAESEYVVAASCCSQILWLLSTLKDYGLTFGKVSLFCDNISAINIAKNPVQHSRTKHIDIRFHVLRDHVEKGDVILQFLDTKLQLADIFTKPLDSNRFAFLRGELGIIHPFGMI

SEQ ID NO: 16491 - protein, 281 aa, Oryza sativa
  Clone ID: TF_OSC401563j.C1.p10.fg
MQAYYAAAAAAAGGHPYAWPPPQSVPPMAGCAVPSAAAEGKSKRKTSGGPSGEDSSGSGDGGSEDSSERRDDADEKGLSPAKWRKLGHPDIEGETSQAAAMSEQNPVKAAPNLNIGMDIWSNSTMAAMPSGQVEVNAGTHLRRDKALSQMDERELKRERRKQSNRESARRSRLRKQERPTSFCHPPNYPVTFYGLTNQECEELSQKVTELTAVNSTLMTELDKLKKDCEDMEAENSQLMDEMVQSEGSSVIATLSVKIDTSKDRHGSSSQLNKHTNDDSKG

SEQ ID NO: 16492 - protein, 374 aa, Oryza sativa
  Clone ID: TF_OSC401580j.C1.p21.fg
MGNDEAVVTQKMGKAPSPPKDHPALSPYLDWSNMQAYYGPGILPPTFFSPGIAAGHTPPPFILGPQPLVPSAFGKPYAAIYPPGGAFSHPFMPLMVSPLSMEPAKSVNSKDSCSNKKMKEIDGAAVSTGSGNSEKTSGDCSLEGSSDGNNQKASGTPKKRSIDDRPKSGVETGGALTPNDRPSEQAALPNLCIPVTAIKPDVSTASDFRVIATPVTEVPTKDDKESKRERRKQSNRESARRSRLRKQAETEELARKVELLTAENTSLRREISRLTESSKKLRLENSALMEKLTETGPDEAQEVPPVKTKAQQARGVENFLSMIDKTGTPRSSGHMDHAIATPKLRQLLGSGLATDAVAARKPSNFDLLPLPAFG

SEQ ID NO: 16493 - protein, 469 aa, Oryza sativa
  Clone ID: TF_OSC401841j.C1.p34.fg
MAESRIFGGLKPTKSRLLGPTIRGPPPNGAATHAPRRILFSFSPESQWLGQSSTRACLPPLRSPCLPAPSAASPAYPRLASSAASASAPARLRSRITLPGGRSPVPPMDPAASAAESSSLSSRDVAAMPDSPPRRAARHRRAQSEILLGAALPDDIAFDADLGVVGEVGGGGGDDYEEEEEDDEEEEMEGAGGSRMFEMFLEAGGKLETPEPAAPLPPPPARPRHQHSMSMDGSTSLASSAAGVAGRMGADAKKAISDAKLAELALVDPKRAKRILANRQSAARSKERKMRYIAELERKVQTLQTEATTLSAQLSMLQRDTTGLTSENSDLKIRVQTMEQQVRLQDALNDRLRDEIQQLKVATGQVNANCGKVGNFGLSSFGGANPQGYQRSHIQSLLAAQQLQQLQIHSQHQQQQMHLQQHHHLSTVQQQLLQEGLPLPGDLKMKGIVAASHAQNAGASESHALRSEP

SEQ ID NO: 16494 - protein, 935 aa, Oryza sativa
  Clone ID: TF_OSC400123j.C1.p14.fg
MAEPDLLAPFADLPFPPGDDFPDFPTLGDDAFALEDFDLDDLDFDFDVDLFPPDAPPPVTTSSSSSAAGSPEAGTSSAGDGGSKNEESADSSSPSRSGSDGGGGKDGKDDEAKRRARLVRNRESAHQSRQRKKQYVEELEGKVKVMQATIADLTARISCVTAENAALKQQLGGAAGAGAAAPPPPMPMYPAVYPLPMPWIHPAYAMRGSQVPLVPIPRLKTQQPASTPEPPAKKARKTKKVAGVSLLGLLFLMMVCGCLVPAVNRMYGAAYTGEGAAIVPSHHGRILAVEGPQNSVSNGVDPKVPQNGSETLPALLYLPRNGKHVKINGNLVIKSIVASEKASSRLSNYGEKGSGNQGKEETSLAIPGYVAPLEAGEVMDSAKGMNELMALAPGDGSIYREDDGMLPQWFSEAMSGPMLNSGMCTEVFQFDLSPTTADANGIVPVYSGSVTNTSQNYTENLPSGPVQKVKNRRISYSEAIPLRGSTSNDTDHFKAPPKNHSQSHAGRKPVSSVVVSVLADPREASDRDGEGRISSNSLSRIFVVVLIDSVNVFAGWNTLLSVRLLEEIAALLARMQIVCWTAPAVGVTDMWVPPTSGPLHPYSLKSSKGAPFPPRPILVFLIAIFGFYVCYISFNQITLENRSEENSGEVQAEIHCRKPHLPHEELRYVHFPKPESYSRGECSCNLVRSFVLVSMQRSGSGWFETLLNSHPNISSNGEIFNRVDRRENISSILQTLDKLYNLDWFTSAAKNECTAAFGLKWMLNQGFMDHHDDIASYLNKKGVSVIFLFRRNTLRRLISVLANDYDRDAKQLNGTHKSHVHSKEEAEILAKFKPVLDVSNLIPNIRNAEKYIRDCLDHFNTTRHMILYYEDIVRNRNALFQVQEFLGVPVRKLVSRQVKIHTSPLPGLVRNWDDVSNKLNGTQYAHFLDGADYVR

SEQ ID NO: 16495 - protein, 165 aa, Oryza sativa
  Clone ID: TF_OSC1203j.C1.p11.gp
MDDGEIELSSQMMFPNPEIPTSLDDFLPSIRTTCTHTHTCNPPGPSATEHTHTCYHTHTRVFSSDDDSCGGDKAKPKKSRKPLGNREAVRKYRQKKKAHTAHLEEEVKRLRVINQQLVKRLQGQAALEVEVVRLRSLLVDVRSRINGALGSCPIQAQCGVDNVLG

SEQ ID NO: 16496 - protein, 748 aa, Oryza sativa
  Clone ID: TF_OSC1203j.C1.p5.fg
MPRRTDNAASANSVEPEKSEECLEFDDDEEEEVEEEEIEYEEIEEEIEEEEVEEDEDVVEEVEEVDEEEDEEEEEESDETEGVSKTKGVHQKDVTEKGKHAELLALPPHGSEVYVGGISSDVSSEDLKRLCEPVGEVVEVRMMRGKDDSRGYAFVNFRTKGLALKAVKELNNAKLKGKRIRVSSSQAKNKLFIGNVPHSWTDDDFRKVVEEVGPGVLKADLMKVSSANRNRGYGFVEYYNHACAEYARQEMSSPTFKLDSNAPTVSWADPKNNDSASTSQVKSVYVKNLPKNVTQAQLKRLFEHHGEIEKVVLPPSRGGHDNRYGFVHFKDRSMAMRALQNTERYELDGQVLDCSLAKPPAADKKDDRVPLPSSNGAPLLPSYPPLGYGIMSVPGAYGAAPASTAQPMLYAPRAPPGAAMVPMMLPDGRLVYVVQQPGGQLPLASPPPQQAGHRSGSGGRHGGSGGRYGGGGGSSGSSRPEECVSETRLYMRILPVSQSAESDGALYRQFTPVSHMDYEISGPESEVDSEVWLGWVAQRQIPTSLDDFLPSIRTTCTHTHTCNPPGPSATEHTHTCYHTHTRVFSSDDDSCGGDKAKPKKSRKPLGNREAVRKYRQKKKAHTAHLEEEVKRLRVINQQLVKRLQGQAALEVEVVRLRSLLVDVRSRINGALGSCPIQAQCGVDNVLGCDGMAQCFAGKPELGVRQSCAPSTVNCHISSDSGQNLVVPHALSPSDVIGSFMVSSTSKDE

SEQ ID NO: 16497 - protein, 478 aa, Oryza sativa
  Clone ID: TF_OSC900200j.C1.p21.fg
MEFGNGGSSSSERRAAAEGATLARQGSVYSLTFDEFQSALAGGGGGGGGGSGFGKDFGSMNMDELLRSIWTAEESQAMASASGSAAGVGVAVGAPPTSLQRQGSLTLPRTLSAKTVDEVWRNLVRDEPPPVGAADGGDMPPQRQSTLGEMTLEEFLVRAGVVRENPPAAPPPVPPPMPPRPVPVVPKTTAFLGNFPGANDAGAAALGFAPLGMGDPALGNGLMPRAVPVGLPGAAVAMQTAVNQFDSGDKGNSDLSSPTEPMPYSFEGLVRGRRNGGGVEKVVERRQRRMIKNRESAARSRARKQAYTLELEAEVQKLKEMNKELERKQADIMEMQKNEVEEMIKDPFGRRKRLCLRRTLTGPWPFTVLHPGLVLWDGTLDFCCRGARTRVSSRNLVSMLSDAGLRQNDVASRGEDWRHARCGRRGFAHACPRSEIQGRNPRYALQIHSHHSKIQGGLAISSDGTAAATRVPDEQGGA

SEQ ID NO: 16498 - protein, 389 aa, Oryza sativa
  Clone ID: TF_OSC22910j.C1.p1.fg
MELPADGSALARQGSIYSLTFDEFQSALGSAEKDFGSMNMDELLRNIWTAEESQAIAPAAAAASAAAVVGDAQQQQQPIQRQGSLTLPRTLSQKTVDEVWRDIMGLGGSDDEDPAAAAAAAAPAQRQPTLGEMTLEEFLVRAGVVREDMGQTIVLPPQAQALFPGSNVVAPAMQLANGMLPGVVGVAPGAAAAMTVAAPATPVVLNGLGKVEGGDLSSLSPVPYPFDTALRVRKGPTVEKVVERRQRRMIKNRESAARSRARKQAYIMELEAEVAKLKEQKAELQKKQVEMIQKQNDEVMERITQQLGPKAKRFCLRRTLTGPCCCICSVCCCCVDMSSRLQFSDSVLYPSLRGFSFSDLHFKDKEERLISQMGEKRGNGLAKNIFGRL

SEQ ID NO: 16499 - protein, 224 aa, Oryza sativa
  Clone ID: TF_OSC416339j.C1.p7.fg
MDDVPSQLLFSHPEVPDSFDDFLNNITTCTHTHTCNPPGPSATMHTHTCLHTHTQVFASGSGEDDIKEDLTKTRRPLGNREAVRKYREKKKAHAAFLEEEVKKLRAANQQLLKRLQGHAALEAEVIRLRSILLDVRGKIDMEIGTFPYQKPCSVGSVACTDPGMCFNGNSEIGGVWEECSRPVGADRMIDKDGSMSQEIDIPGPVHSISMDVVGSLVTSASLSE

SEQ ID NO: 16500 - protein, 269 aa, Oryza sativa
  Clone ID: TF_OSC400505j.C1.p8.fg
MSCHGGGGGGGEGALSRQGSVYSLTLNEVESHLGEPLRSMNLDDLLRTVLPAAAAAAETAGRKTVDEVWRDIQGASTGRHHATPMGEMTLEDFLSRAGVAVDGAASAAGAHWLRGHYPPPPPPTTTTLQYVGGSGAVVDGVYNRVDGHGVAGFLSQVGVAGRKRGGGVDGVVEKTVERRQKRMIKNRESAARSRARKQAYTNELENKISRLEEENQRLREHKAVADFSTFPSCVDFLKAFLTQKLEPVMQIVPQPEPKQQLRRTTSASF

SEQ ID NO: 16501 - protein, 722 aa, Oryza sativa
  Clone ID: TF_OSC403595j.C1.p10.fg
MPRTDNAASANSVEPDKSEECLEFDDEEEEVEEEEIEYEEIEEEIEEEEEVEEDEDVVEEVEEVDEEEDEEEDEESDETEGVSKTKGVHQKDVTEKGKHAELLALPPHGSEVYVGGISSDVSSEDLKRLCEPVGEVVEVRMMRGKDDSRGYAFVNFRTKGLALKVVKELNNAKLKGKRIRVSSSQAKNKLFIGNVPHSWTDDDFRKAVEEVGPGVLKADLMKVSSANRNRGYGFVEYYNHACAEYARQEMSSPTFKLDSNAPTVSWADPKNNDSVSTSQVKSVYVKNLPKNVTQAQLKRLFEHHGEIEKVVLPPSRGGHDNRYGFVHFKDRSMAMRALQNTERYELDGQVLDCSLAKPPAADKKDDRVPLPSSNGAPLLPSYPPLGYGIMSVPGAYGAAPASTAQPMLYAPRAPPGAAMVPMMLPDGRLVYVVQQPGGQLPLASPPPQQAGHRSGSGGRHGGSGSRYGGGGGSSGSSRPEEFVSETRLYMRIYQYFPISQIAESEEALYRQFTSVSHMEYEISGQESEVDSEVWLGWVAQRQTPTSLDDFLPSIRTTRTHTHTCNPPGPSATAHTHTCYHTHTHVFSSDDDSCGGDKAKPKKGRKPLGNREAVRKYRQKKKAHTAHLEEEVKRLRAINQQLVKRLQGQAALEAEVVWLRSLLVDVRSRINGALGSYPFQAQCGVNNVLGCDGMAQCFAGKPELGERRICTPSVMNCHISPDS

SEQ ID NO: 16502 - protein, 426 aa, Oryza sativa
  Clone ID: TF_OSC400780j.C1.p52.fg
MNGGIGDALMQPQHVQVMSSSLPMVASTFVAEPAAAANKPRAAGLPPTPPQVFAAQRAAAAAGGDVCMEESAQGGGGGLPPRKAHRRSSSDVPFGYLAGQHQLLPPKVEAGWGHLGAGAGGAAAADDLFNAYLNLEGLDGLNSSDDRHDEGDSRGSSIKTNGADSSENESEECADDTRGGIRLWSADGGERREGVKRNAAGEPATAPLARHARSLSMDSLIGKFNFTAGTAAAAGNGVALGPNRFSLEFGSGEFTPSEMKKIMADEKLAEMALADPKRVKRVLANRQSAARSKERKMRYIAELEQKVQILQSEATNLSAQLTMMQRDSAGLATQNNELKFRLHAMEQQAQLRDALNEALTTEVQRLKLATAELGDSCSSSSLAQQIQLNAQNQMFQLQQQQATQIPFYQLQQSQQNGAAKNNESKE

SEQ ID NO: 16503 - protein, 390 aa, Oryza sativa
  Clone ID: TF_OSC417322j.C1.p2.fg
MGSSGADAPTKTSKASAPQEQQPPASSSTATPAVYPDWANFQGYPPIPPHGFFPSPVASSPQGHPYMWGAQPMIPPYGTPPPPYVMYPPGVYAHPSMPPGAHPFTPYAMASPNGNADPTGTTTTAAAAAAGETDGKSSEGKEKSPIKRSKGSLGSLNMITGKNSTEHGKTSGASANGAISQSGESGSESSSEGSEANSQNDSHHKESGQEQDGEVRSSQNGVSRSPSQAKLNQTMAIMPMTSSGPVPAPTTNLNIGMDYWANTASSTPAIHGKATPTAAPGSMVPGEQWVQDERELKRQRRKQSNRESARRSRLRKQAECEELAQRAEVLKQENTSLRDEVNRIRKEYDELLSKNSSLKEKLEDKQHKTDEAGVDNKLQHSGDDSQKKGN

SEQ ID NO: 16504 - protein, 274 aa, Oryza sativa
  Clone ID: TF_OSC400189j.C1.p8.fg
MASSRVMAAAAASSSSSPPPPPPAAAAAGGAADLARFRSTSSGIGSMNMDDILRNIYGEAAPPPGAAGSAPAPPPAGEAAGAPVAEVAARRTAEEVWKEISSSGGLSAPAPAPAAGAAGRGGGPEMTLEDFLAREDDPRATAVEGNMVVGFPNVTEGVGTAGGGRGGGGGGRGRKRTLMDPADRAAMQRQKRMIKNRESAARSRERKQAYIAELEAQVAELEEEHAQLLREQEEKNQKRLKEKWHVFMQIKEQAVAVVIRKKTQDLRRTNSMEW

SEQ ID NO: 16505 - protein, 163 aa, Oryza sativa
  Clone ID: TF_OSC400993j.C1.p66.fg
MASGENNVEEELRKTRKPLGNREAVRKYREKKKAHAAFLEEEVKKLRTTNQQLLRRLQGHISLEAEVVRLRALLFDIRGKIDAEIGTFPFQKQCSFGSVTCTDHSPCFNTSTEVAVREESSRPTIVDCGIDGTGIISHELDIPKMVNSVDVIPSFVNSASLTE

SEQ ID NO: 16506 - protein, 629 aa, Oryza sativa
  Clone ID: TF_OSC414158j.C1.p8.gm
MEDGTEDAGAAGCRCGIPERKWRGGLLSLTARQKSLFSLRHATIKYVHSSARNRVDRARPCAQQNATTTTTASPTPHLTSLHHRRACVMNTTSANELMMHRHVQAAPYAAAPQQQGGKQRAPGLPPTPPPPPAAASSHSSHGDVCMDDTARGGLLPPRKAHRRSRSDVPFGYFQPLPPPSPKMEAGGGWALPGCGGAGDVDLLNAYMSLEGMGGADGLNNSDGDSRGSSMRTNGADSSENESEDYVGADSQALLWGGAGGGEAAGKKRRNNAAGEKAARHARSLSMDSLMGKLSFAANGEPAKFSLEFGSGEFTPAEMKRIMADEKLAEMALADPKRSAARSKERRMRYIAELEQKVQILQTEATTLSAQLTLLQRDSSGMATQNNELKFRLQSMEQQAQLRDALNEALTAEVQRLKLAANEVCDTSSSSNLAHQIQLRCQNQMLDLHKQQQQQSPAPPSPSPSLLLNLLAATVPPLDDRADNDEKAVLAPTLSCADLVRGDGSRAAAGGDARGGGGGGRVAGSSPLLSGSGAGGQAPAPGSEAAGARGAGRRWRKAAGTELAEGAAAAAAAVPPRSAPLGRIWRVAAVGNGGGGVATMVATVGRRQVAMAVSAGSGRRQQLATTTVVW

SEQ ID NO: 16507 - protein, 146 aa, Oryza sativa
  Clone ID: TF_OSC412577j.C1.p14.fg
MERAAGTGSGGDDDELVLPPASFQDGLPSSRSYPSCIGGGSAAAASASLERELLYRAELHQQQLGGGGGVERRKRRAMKNRESAERSRARKQAYLQELEQEVRLLRAENAALRHQCHQLKAAAAEAEAEAAAAAAAAKKPTSSATF

SEQ ID NO: 16508 - protein, 324 aa, Oryza sativa
  Clone ID: TF_OSC18922j.C1.p1.fg
MAQLPPKIPTMATAWPEFGGGHHHHAAHGHHHQRSPSMGAFLAAPLPPFPLPPPAPANGGAQQQQQQQQHQPSWVDEFLDFSATKRGAHRRSVSDSVAFLDPVSDDNAGVGAHDFDRLDDDQLMSMFSDDLQPPPPQQQPAAPAASASSPSDHNSMNDEKQDKGETDEAQSECDGATPGQPASPATVDPKRVKRILANRQSAQRSRVRKLQYISELERSVTSLQTEVSALSPRVAFLDHQRSLLTLGNSHLKQRIAALAQDKIFKDAHQEALKKEIERLRQIYHQQSLKNAESQPADAAPVRGRDNADLIGSEGAAAAAPCPHS

SEQ ID NO: 16509 - protein, 612 aa, Oryza sativa
  Clone ID: TF_OSC400710j.C1.p6.fg
MDLKDGGGSERRGAAAGAGAGAAPLARQGSIYSLTFDEFQSTLGGMGGGLGKDFGSMNMDELLRSIWTAEESQAMASASAAAAAAEGGLQRQGSLTLPRTLSVKTVDEVWRDLEREASPGAAAADGGGGGGEQQQPRRQPTLGEMTLEEFLVRAGVVRENTAAAAAMVAAAAAPPVAPRSIPAVNNSSIFFGNYGGVNDAAAAAAGAMGFSPVGIGDPTMGNRLMSGVAGIGGGAITVAPVDTSVGQMDSAGKGDGDLSSPMAPVPYPFEGVIRGRRSGGNVEKVVERRQRRMIKNRESAARSRARKQAYTMELEAEVQKLKEQNMELQKKQEEIMEMQKNFFPEMQKNQKLFSVGRDGVHYSATKCTKYTISTEKVMITLIHGKQVLEAVNNPYGQKKRCLRRTLTGPCFWFDSEGCIMSEEFMPKMINMGSHLTRKNKPDQSDTTVEFHPRPDVLLQGAGEGLVFLLGGQVNCIGLQDSTESRPENDTVLVQIQGPATVSSGSVTVQAGPNCRAKEEPIRDTNHWRQHPGVPYAPGHGEPTPSLLGLRDTQHCPFHGQFQKQFFPPRSSSGNQRRPMADLSPDWGRFGLDWDCGVTSARTFGNDRDGTAF

SEQ ID NO: 16510 - protein, 423 aa, Oryza sativa
  Clone ID: TF_OSC401035j.C1.p16.fg
MQLKCSERLVSLKASVLHTVDDTMWLKLHRRRNPEGYDMPSDLDQALLLYFDGQEQDKPSTQEEPHKPLNFVKETLNIFPSQPMDGEPTPTPKKEGGSGSGGAMAASASSELKGPKTPDPKTLRRLAQNREAARKSRLRKKAYIQQLETGRIRLAHLEQEIQFTRAQGAFCGAGILSPDAALFNLEYERWQEAHHQVISRLRAAVEEHRPDGELQPHVDEAMSHYGVLMAHKARLVGADPLHLLSGLWKGAVEQCFLWIGGFRPSELIKVVVRHVEPLTEQQLAAVYSAQQAARQEEDALDGGLQALLRSLSDVVSSSDAPSSSQQTPPVMYHPSAAAAMAAASFMGQYGSYSNLQLAMDKLANLAIFLRQADEERMRTLHALRRMLTVRQAARCFVAVDDYFGRLRALALFWTTTRPHPAAG

SEQ ID NO: 16511 - protein, 195 aa, Oryza sativa
  Clone ID: TF_OSC5587j.C1.p1.fg
TLNIFPSQPMDGEPTPTPKKEGGSGSGGAMAASASSELKGPKTPDPKTLRRLAQNREAARKSRLRKKAYIQQLETGRIRLAHLEQEIQFTRAQGAFCGAGILSPDAALFNLEYERWQEAHHQVISRLRAAVEEHRPDGELQPHVDEAMSHYGVLMAHKARLVGADPLHLLSGLWKGAVEQCFLWIGGFRPSELIK

SEQ ID NO: 16512 - protein, 354 aa, Oryza sativa
  Clone ID: TF_OSC900100j.C1.p15.fg
MNREKSPIPGDGGDGLPPQATRRAGPPAAAAAAEYDISRMPDFPTRNPGHRRAHSEILSLPEDLDLCAAGGGDGPSLSDENDEELFSMFLDVEKLNSTCGASSEAEAESSSAGAAAAVAAAEELVGASPGTEGMSSAEAKKAVSAAKLAELALVDPKRAKRIWANRQSAARSKERKMRYIAELERKVQTLQTEATTLSAQLALLQRDTSGLTTENSELKLRLQTMEQQVHLQDALNDTLKSEVQRLKVATGQMANGGGMMMNFGGMPHQFGGNQQMFQNNQAMQSMLAAHQLQQLQLHPQAQQQQVLHPQHQQQQPLHPLQAQQLQQAARDLKMKSPMGGQSQWGDGKSGSSGN

SEQ ID NO: 16513 - protein, 301 aa, Oryza sativa
  Clone ID: TF_OSC900383j.C1.p7.fg
MKRGGAGVGGGGGGGDPGAYAAVLKTKLDLYCAAVAKSMEAKLQESSLGYLNLQASDTSQLVSQDSFNGYGSTRVTNSNAIHEDDDQGKPANSGTSKEQSDDDGDLEEDTDPVNAKRTRRMLSNRESARRSRKRKQAHLNDLESQVSQLRSENASLQKRLSDMTQKYKQSTTEYGNLQDDMNAMRRKVNIAEEAVRRVTGIGLQLFTTSEMPASSMPVSSGVSDAASAAAAAALVEDDWTNCSLPDEAIPVPSAAMALRSPSVRRVASLENLQKRIHAGDVTHFEAASALSLPEATACDNK

SEQ ID NO: 16514 - protein, 283 aa, Oryza sativa
  Clone ID: TF_OSC3436j.C1.p5.gm
MGGCEVNLERHGLVPVGTGSGRDTLCDVSSFTVRLHRLFGVIFLNDCRDCVTVFVSSASSRTLLPDFGYNDHGYSTHGFINYGSLAPFALATLTTQRAGNHLFKYGDLMVTVTEATYGDLMVTVTEATATSKKVQVQGAAMANYHHQEYYQMAAAAAVAWPREPDSPQLSIMSGCSSLFSISTLRDDDDGGGVRLAGAALPATPVSLAGIAGGASTPGGDEVDMEVRQQSGGSGDDRRTIRMMRNRESALRSRARKRAYVEELEKEVRRLVDDNLNLKKQCKE

SEQ ID NO: 16515 - protein, 409 aa, Oryza sativa
  Clone ID: TF_OSC402805j.C1.p29.fg
MASHAGGSGGGGGGSGRDAGSAQRGPMQGLARQGSLYGLTLNEVQSQLGEPLLSMNLDELLKSVFPDGADLDGGGGGGGIAGQSQPALGLQRQGSITMPPELSKKTVDEVWKGIQDVPKRGAEEGGRWRRERQPTLGEMTLEDFLVKAGVVTDPNDLPGNMDVVGGAAAAAAGTSDLNAGAQWLQQYHQQALEPQHPSIGAPYMATHLAPQPLAVATGAVLDPIYSDGQITSPMLGALSDPQTPGRKRCATGEIADKLVERRQKRMIKNRESAARSRARKQAYTNELENKVLRLEEENERLKKQKPTFILSSKVSRKQVTKAMRSATICVLCICILMILQCFASISAVDLGDAAASASGGEGLIRPRKLLQNAPAARSPPSRSAAAVEVEVNASLGKQKPSSKSNPRQN

SEQ ID NO: 16516 - protein, 425 aa, Oryza sativa
  Clone ID: TF_OSC419671j.C1.p6.fg
MERVFSVEEISDPFWVPPPPPQSAAAAQQQGGGGVASGGGGGVAGGGGGGNAMNRCPSEWYFQKFLEEAVLDSPVPNPSPRAEAGGIRGAGGVVPVDVKQPQLSAAAAAAATTSAVVDPVEYNAMLKQKLEKDLAAVAMWRASGTVPPERPGAGSSLLNADVSHIGAPNSIGGNATPVQNMLSGPSGGSGSQLVQNVDVLVKQPTSSSSREQSDDDDMEGEAETTGTARPADQRLQRRKQSNRESARRSRSRKAAHLNELEAQVSQLRVENSSLLRRLADVNQKYNDAAVDNRVLKADVETLRAKVKMAEDSVKRVTGMNALFPAASDMSSLSMPFNSSPSEATSDAAVPIQDDPNNYFATNNDIGGNNNYMPDIPSSAQEDEDFVNGALAAGKIGRTASLQRVASLEHLQKRMCGGPASSGSTS

SEQ ID NO: 16517 - protein, 461 aa, Oryza sativa
  Clone ID: TF_OSC400878j.C1.p1.fg
MEHVFAVDEIPDPLWAPPPPVQPAAAAGVDDVGAVSGGGLLERCPSGWNLERFLEELDGVPAPAASPDGAAIYPSPMPAAAAEAAARWSRGYGDREAVGVMPMPAAALPAAPASAAMDPVEYNAMLKRKLDEDLATVAMWRELLGHIPLEDEIILVEKKKLLYWNLASGAIHSESPLGNKTSLSIVGSILSSQKCIEGNGILVQTKLSPGPNGGSGPYVNQNTDAHAKQATSGSSREPSPSEDDDMEGDAEAMGNMILDEEDKVKKRKESNRESARRSRSRKAARLKDLEEQVSLLRVENSSLLRRLADANQKYSAAAIDNRVLMADIEALRAKVRMAEESVKMVTGARQLHQAIPDMQSPLNVNSDASVPIQNNNPMNYFSNANNAGVNSFMHQVSPAFQIVDSVEKIDPTDPVQLQQQQMASLQHLQNRACGGGASSNEYTAWGSSLMDANELVNMELQ

SEQ ID NO: 16518 - protein, 170 aa, Oryza sativa
  Clone ID: TF_OSC900418j.C1.p13.fg
MQHDAISNIAYHPSMDFTSFFLPQTDAYSHDLSALLDMAVVDPYISCNGSSITMIPVTEDEANAQPMNHGNDERKKRRLVSNRESARRSRVRKQRRLDELSSQVSELRDTNQRLLVELNHMISKHARIVRENSQLREEASDLQRKLSEMKMEDAEVAAAAAAAPRTLEVA

SEQ ID NO: 16519 - protein, 261 aa, Oryza sativa
  unsure (1)..(261): unsure at all Xaa locations
  Clone ID: TF_OSC400070j.C1.p5.np
EAAAAVRSLEWEVLLATNSLGSLVVDGADYDGGIDTFFLDDADDVLFGQLADEPPAAKGARAAAKAAVESLPTVVVDAARGDTQCAVCKDGMEAGERARRLPCAHLYHDGCILPWLAIRNTCPLCRHELPTDDPEYENWKARRAAPAAMAMATGTASLGNLAEERRRRRMISNRESARRSRMRKQKQLSELWAQVVHLRSTNRQLLDQLNHVIRDCDRVTHENCQLRDEQAKLQKQYFLGWHRHXGIGGNDECCDWXRRES

SEQ ID NO: 16520 - protein, 299 aa, Oryza sativa
  Clone ID: TF_OSC421842j.C1.p10.fg
MKKCPSELNFEAFFHGERGEDDADAAADQKPGGGPHPPPFAMFSAADLSSFGFADSVTQSTITGVIPNHIWPQSQSLNARHPAVYTIESQSSICAAASPTSATTLNMKESQTLGGTSGSDSDSESLLDIEGGPCEQSTNPLDVKRMRRMVSNRESARRSRKRKQAHLADLETQVDQLRGENASLFKQLTDANQQFTTAVTDNRILKSDVEALRVKVKMAEDMVARGALSCGLGHLGGLSPALNPRQGACRVPDVLTGLDYAGDDPFTGLSPPEQVQMPGGGEVGDAWGWDNHSNGAMSK

SEQ ID NO: 16521 - protein, 174 aa, Oryza sativa
  Clone ID: TF_OSC401561j.C1.p22.fg
MAYQSFGAVDLAASFFFSSSSSSPQPGLVGVHGDRFLGGGGGDGGDGGSSYDGGGDGGAASGKGTRRDERKERRLASNRESARRSRVRRRRQLDELSSHVAELRAANHRLAVELNRAAARHAQMARENARLAEEARALRERLPLRGGGGGGGDGEAEEEAGGGCGAEAILAPMD

SEQ ID NO: 16522 - protein, 272 aa, Oryza sativa
  Clone ID: TF_OSC3427j.C1.p1.fg
AAAPWNSYFDDILKDTEHHACTHTHTCNPPVHDLSHTHTCVHVHTKIVSAPSDTPSDAAETAESPTENNASKKRPSGNRAAVRKYREKKKAHTASLEEEVVHLRALNQQLMKKLQNHATLEAEVSRLRCLLVDIRGRIEGEIGAFPYQRPVKNIDLVSSVDQGSYLGGAQVMNSCDFRCADQMYCSPGMQVRTMGEDGAVSGQVLGQGACDIASIQCQGAKSGSAKLPVCGAMEHGYYGIPKAVRRCQGVRRPLRLTRKLEEKGQKQVINPS

SEQ ID NO: 16523 - protein, 187 aa, Oryza sativa
  unsure (1)..(187): unsure at all Xaa locations
  Clone ID: TF_OSC3427j.C1.p1.gp
AESPTENNASKKRPSGNRAAVRKYREKKKAHTASLEEEVVHLRALNQQLMKKLQNHATLEAEVSRLRCLLVDIRGRIEGEIGAFPYQRPVKNIDLVSSVDQGSYLGGAQVMNSCDFRCADQMYCSPGMQVRTMGEDGAVSGQVLGQGACDIASIQCQGAKSGSAKLPVCGAMGTMPVGCMPNSEKKX

SEQ ID NO: 16524 - protein, 1150 aa, Oryza sativa
  Clone ID: TF_OSC407343j.C1.p12.gm
MDDGDLDFSNPDTFLCPAVGGADPDGSCSMDSYFDDILKDTEHHACTHTHTCNPPVHDLSHTHTCVHVHTKIVSAPSDTPSDAAETAESPTENNASKKRPSGNRAAVRKYREKKKAHTASLEEEVVHLRALNQQLMKKLQNHATLEAEVSRLRCLLVDIRGRIEGEIGAFPYQRPVKNIDLVSSVDQGSYLGGAQVMNSCDFRCADQMYCSPGMQVRTMGEDGAVSGQVLGQGACDIASIQCQGAKSGSAKLPVCGAMEHGYYGIPKAVRRCQGARTGSQPSEPQVPRIGRQRPPPRSRSTSSSPRRPVKYCHVEDAPPEPSDLPRGAIAPAWTGRTGSPAKKLQVNADDSTDELVDPPKVEEKIGGVPHGLSTDSEVVQREAESISRKTLRSSAEKFEFQAEVSRLMDIIINSLYSNKDIFLRELISNASDALDKIRFLALTDKEVLGEGDTAKLEIQIKLDKEKKILSIRDRGIGMTKEDLIKNLGTIAKSGTSAFVEKMQTGGDLNLIGQFGVGFYSVYLVADYVEVISKHNDDKQHVWESKADGSFAISEDTWNEPLGRGTEIRLHLRDEAKEYVEEDKLKDLVKKYSEFINFPIYLWATKEVDVEVPADEDESSESSEEEESSPESTEEEETEESEEKKPKTKTVKETTTEWELLNDVKAIWLRSPKEVTEEEYTKFYHSLAKDFGDDKPLSWSHFTAEGDVEFKALLFVPPKAPHDLYESYYNSNKSNLKLYVRRVFISDEFDELLPKYLSFLKGLVDSDTLPLNVSREMLQQHSSLKTIKKKLIRKALDMIRKLAEEDPDEYSNKDKTDEEKSAMEEKKGQYAKFWNEFGKSVKLGIIEDATNRNRLAKLLRFESTKSEGKLASLDEYISRMKPGQKDIFYITGSSKEQLEKSPFLERLTKKNYEVIYFTDPVDEYLMQYLMDYEDKKFQNVSKEGLKLGKDSKLKDLKESFKELTDWWKKALDTESVDSVKISNRLSDTPCVVVTSKYGWSANMEKIMQSQTLSDASKQAYMRGKRVLEINPRHPIIKELRDKVAQDSESESLKQTAKLVYQTALMESGFNLPDPKDFASSIYRSVQKSLDLSPDAAVEEEEEVEEAEVEEKESSNIKEEAEPSSYDKDELAAMFISLTVVPCPCREYYLIS

SEQ ID NO: 16525 - protein, 357 aa, Oryza sativa
  Clone ID: TF_OSC400458j.C1.p48.fg
MGAYDRPPPVGMWSHEQFKVDNGQATSASTIMEAEMKFENRLEEIPQVVLEEGRNVDQEASKPPDKVLRRLAQNREAARKSRLRKKAYIQQLETSRLKLAQLEQELQRARQQAVYANGSLREPNLGFTGPIDPGALGFEIKYSHWVDEQNRNTGELRNALLQGQTTDQDLELKLLVEAGLDNYNRLFEMKEEAANSDVFYIMSGMWKTPTERFFLWIGGFRPSEVLKNLRPQLEPLTDKQVVEVGGLQQTSMQVEDALSQGMDKLKQTIADSLTAADPFDSPEAYMVHMANAVEQLRSLVQFVTQADHLRQQTLQEMHRILTTRQAARGLLALGDYFQRFRALSSLWAARPRDSGIS

SEQ ID NO: 16526 - protein, 416 aa, Oryza sativa
  Clone ID: TF_OSC411284j.C1.p12.fg
MAPSSLLIIFFLLPTSRSSALQQHGVAVVGMAAHQGMAAATAADRFCLPRMAAAAAAASQVENWGDSGVIVSSPFTDDTSTDLDDSADKHHLHALVGGGDGGDDAGEQRGADSSAVSKERRGDQKMQRRLAQNREAARKSRMRKKAYIQQLESSRSKLMHLEQELQRARQQGIFIATGGSGDHGHSIGGNGGTLAFDLEYARWLDEHQRHINDLRVALNAQMSDDELCELVDAVMMHYDQVFRLKSFATKSDVFHVLSGMWMSPAERFFMWLGGFRSSELLKVLASHLEPLTDQQLMGICNLQQSSQQAEDALSQGMEALQQTLGDTLVSAAATVVSGGGGADNVTNYMGQMAIAMAKLTTLENFLRQADLLRHQTLQQMHRILTTRQAARALLVISDYFSRLRALSSLWLARPRD

SEQ ID NO: 16527 - protein, 151 aa, Oryza sativa
  Clone ID: TF_OSC14114j.C1.p1.fg
MTSGFGFTPWAADTCPTLEQLMASSASPSPSSSLDDNAAAAEEENGEVEEEEERRRQRRKVSNRLSARRSRARKQQRLEELRGESARLRAENRELAARLHAVARHGLAARCQNARLRAEAAALARRLLALQRLARGRHMMITASPPQFSRR

SEQ ID NO: 16528 - protein, 151 aa, Oryza sativa
  Clone ID: TF_OSC900018j.C1.p1.fg
MTSGFGFTPWAADTCPTLEQLMASSASPSPSSSLDDNAAAAEEENGEVEEEEERRRQRRKVSNRLSARRSRARKQQRLEELRGESARLRAENRELAARLHAVARHGLAARCQNARLRAEGAALARRLLALQRLARGRHMMITASPPQFSRR

SEQ ID NO: 16529 - protein, 180 aa, Oryza sativa
  Clone ID: TF_OSC416709j.C1.p1.fg
MTLSGGTLSSGITSGSSHGTRSSGSEGDIQLQVQMDLKRKRRKESNRESAKRSRLRKQQHLDDLTSQVNQLKMENQQLTTTLNMVTQSCAFAESQNSVLRTQMMELDSRLSALREIIFYMNNGNQSPSNPTIAATTYPSTTTMTAATTGHYDYYDVFTANAWGSGMQMMQQPIDQFLYQC

SEQ ID NO: 16530 - protein, 203 aa, Oryza sativa
  Clone ID: TF_OSC400151j.C1.p14.fg
MAAQEQEQEKQQVKTSTTSSLPSSSERSSSSAPNNLKEGGGVESDEEIRRVPEMGGGGGSASSGAGADERQGKEDGKQQGGGGGGAAAAGGGQEQAPPARKRGRSAGDKEQNRLKRLLRNRVSAQQARERKKAYMTELEAKAKDLELRNAELEQRVSTLQNENNTLRQILKNTTAHAGKRGGGGGGKGGDGGGGGKKHHFTKS

SEQ ID NO: 16531 - protein, 360 aa, Oryza sativa
  Clone ID: TF_OSC401241j.C1.p11.fg
MATTRASLTDPLLPSPAARAPVKAKKLSWSMLHASSKDERRGQSGEAEAEASGGVHANPSSPARMQEQATSSRPSSSERSSSSGGHHMEIKEGKEAPLRSLLLPFLDFHFTVPLSGMESDEEIGRVPELGLEPGGASTSGRAAGGGGGGAERAQSSTAQASARRRGRSPADKEHKRLKRLLRNRVSAQQARERKKAYLNDLEVKVKDLEKKNSELEERFSTLQNENQMLRQILKNTTVSRRGPVLLKIPKSGLREAAPAGCGGLREAEGDEKFVLNGFTAANLSFDGMATVTPNGLLMLTNGTNQLKGHAFFPALLQFHRTPNSMAMQSFSTAFVIGIISAFEDQGSGSPAAAGGSGRAA

SEQ ID NO: 16532 - protein, 238 aa, Oryza sativa
  Clone ID: TF_OSC7652j.C1.p3.gm
MDLPQPMGMTQGAQAQWGVKGSPVGLIAASMSITEASLHFCYLHSLSVVFLYFFYFLFVLCDTFKMSVAPATEGSARRSAAAAAAEEEERQRNRKRSNRLSAQRSRIKKQQYVDGLAVEAEQLRRENDAMRAGAGAVLQRCRLVEQENRVLAAHARELCSALQLRASQLRLLGEVAGVPLDVPDVADHLVQLYGGDLGMTPLSPPPLLPPLPPQIEMLYFQPDSVMDPVSMLQGYENI

SEQ ID NO: 16533 - protein, 147 aa, Oryza sativa
  Clone ID: TF_OSC7652j.C1.p3.np
KMSVAPATEGSARRSAAAAAAEEEERQRNRKRSNRLSAQRSRIKKQQYVDGLAVEAEQLRRENDAMRAGAGAVLQRCRLVEQENRVLAAHARELCSALQLRASQLRLLGEVAGVPLDVPDVADHLVQLWRRPGDDAALATAAAAAAA

SEQ ID NO: 16534 - protein, 173 aa, Oryza sativa
  Clone ID: TF_OSC900423j.C1.p21.fg
MSVAPATEGSARRSAAAAAAEEEERQRNRKRSNRLSAQRSRIKKQQYVDGLAVEAEQLRRENDAMRAGAGAVLQRCRLVEQENRVLAAHARELCSALQLRASQLRLLGEVAGVPLDVPDVADHLVQLYGGDLGMTPLSPPPLLPPLPPQIEMLYFQPDSVMDPVSMLQGYENI

SEQ ID NO: 16535 - protein, 368 aa, Oryza sativa
  Clone ID: TF_OSC10722j.C1.p6.fg
MDPRFPPPAPSGGAPPRGHHRRAHSETFIRLPDADLLLDPDGEFGFSDLDFPSLSDDSPAASDPTPPPPPPALPQAAPRPPGGAHLRSLSLDAAFFDGLAFQGGGGGGGAGSGSSGGGAGHKRSGSMDGESSLFEGESAPPDYAKKAMPADRLAELALLDPKRAKRILANRQSAARSKERKIKYTGELERKVQTLQTEATTLSTQLTLLQAYWDAMIIKSVSLCLVVFILNCEYRYSSVLANCTFQDKQGHYKAIEIKESKYIYPDKQSNLLRKPSLFNAALNDALREEVQRLKIAAGQVPNMNGNSFNGGLQQQQQQQMPTYFSQQQQMHYLSGHQGRHHHPNNPHNSLNGGQSMSGQTLNDSMDFM

SEQ ID NO: 16536 - protein, 265 aa, Oryza sativa
  Clone ID: TF_OSC400259j.C1.p152.gm
MASRVMASSSPSHTASDLARFAAGRGGGGSAGLGSMNVEEILRGIYADMPTPALPLVGGDRPMSPLPAPDVAAAPRTAEEVWKEITGAGVAAAAGGVVPPAAAAAAAPAVVAGAGAGTGAEMTLEDFLAREGAVKEDEAVVTDPSAAKGQVVMGFLNGAEVTGGVTGGRSRKRHLMDPMDRAAMQRQKRMIKNRESAARSRERKQAYIAELESLVTQLEEENAKMFKEQEEQHQKRLKELKEMVVPVIIRKTSARDLRRTNSMEW

SEQ ID NO: 16537 - protein, 646 aa, Oryza sativa
  Clone ID: TF_OSC11046j.C1.p1.fg
MAEPALLDPTAAFDLRLYPAHLFDHELPLAGGGGGDDDDDLPLDGLEFDLPGDFSVEDFLLRSPERDDSGEGSAAGSGPTASPSSSPTTSASNSAVANGSGGEVKHEESDEGRSGGGDPKWSLKRKQASPGPSSDAAKCRRSGDGDVSPSASASRTAVDSDEGGTVCEEEEDERRAARLMRNRESAQLSRQRKKRYVEELEEKVKSMHSVINDLNSRISFVVAENATLRQQLSGGSVNCPPPGVYPPAPIPGMHFPWMPGYAMRPPGSHVPLVPIPRLKPQQPVPSSKVVKKPESKKTVENKSKSKTKTKKVASVSLLGLLLIMLVFGAFIPGFNHNFGMCGQSDNAMFRNFGQSHARVLSVSSQDKSSLNNSDMIGVDVGKMTGNTDGPGKKHQPAHNSSEILPALLYVPRNGKHVKINGNLIIHSVLASEKAVAHKASKDDSDQSARDHKETSVAIARYLSLPGKDVNRQETSSADGPLPQWFREGMEGPILNSGMCSEVFQFDISTASSNPGGIIPASPVVNSSSVNATEKIPAHSAAYHGKLKNRRVMYNEAIPLTGKTANNTEPFNRTSESSSKLPDSKPASSVVVSVLADPREAGNGDGDPRVSPKPLSKIFVVVLVDGVRYVTYSCTLPFKSSSPHLVN

SEQ ID NO: 16538 - protein, 168 aa, Oryza sativa
  Clone ID: TF_OSC400025j.C1.p12.fg
MAGLPFPSDSDTALEAFLADIGFGAPCPEAAPAPSPSHPDTTAAAATDEPVMAGDDQADEERRRRLRRRISNRESARRSRARKQRHLDELRAKASALRATSRDLVARLRGARARAALVALTNAQLRDEAGKLALRLAAARRVIALRQLYSAAAAGGGFEMQALASLIA

SEQ ID NO: 16539 - protein, 176 aa, Oryza sativa
  Clone ID: TF_OSC33872j.C1.p21.fg
MTIKRKDDGQVVKQSVKAVGGGLLERVDSDDEEIVGRVPEFGLALPGTSTSGRGSVRVAGDAAATAAGTSSSSPAAQAGVAGSSSSGRRRGRSPADKEHRRLKRLLRNRVSAQQARERKKAYMSELEARVKDLERSNSELEERLSTLQNENQMLRQVLKNTTANRRGPDSSAGGDS

SEQ ID NO: 16540 - protein, 442 aa, Oryza sativa
  Clone ID: TF_OSC400036j.C1.p47.fg
MEQTLDVPRSLRLLAPKAQQQMDEFWRDRQKEIETTKDFSEHAIPMARLKKIVSSQKGNMMMTFDMPAFLSKMCELFVQELAVRAWASAQSHNRCIILDTDIAKAIASTESYDFLVDILHNHRVKHKSTPCSTLTTKRCRLVDQPSTSHMPYQHQLPQFAPTYTPAIPITPSLMPPISHYIPFQYPSLSQEVSPMMASAPIVNRSMLLIHNIARGLGLQGNNISTFANNNIPDNIVGCSSPTVLASMMSPALLEVAGTSLNPPNSHSICTMNMINSSDPSGSSIGDINVANQASLAPSGRFNPAILRESSCPSFLHSNNDTIVAIPEGVDISGTMDVASDVAAIVINGQEEHERETNVEHHQQNEIYESIDIGIINASVADDNKYSISWDELGMADDSLLDKFLEEFQVRNDGVLRTGIELHEDPFLGDVMLANPSTSNANK

SEQ ID NO: 16541 - protein, 367 aa, Oryza sativa
  Clone ID: TF_OSC900254j.C1.p20.gm
MDPTKSSTPPPVMGAPVGFPPGAYPPPPPAGAAAAAYAQQLYAPPAAAAAQQAAAAQQQLQMFWAEQYREIEATTDFKNHNLPLARIKKIMKADEDVRMIAAEGPRRVRPRLRDVHPRAHPRGVGAHAEENKRRTLQKSDIAAAIARTEVFDFLVDIVPRDDAKDADAAAAAAAAGIPRPAAGVPATDPLAYYYVPQQPAGGAKGRRGEKGEEKARRLATGDEAAAATREQAGWGGGRRHRGHRPCGPPPGTSPRPPSSGRSRTSSSTATPSCSSPSCCCRTGHNSGKKSWEFPLFAGGCASGHRSVLIQNSDVAYLCNQMMLKLRDFYDPSKWWETAGRWPSSSGGAWACFGRGRAGAGNRSEGRT

SEQ ID NO: 16542 - protein, 335 aa, Oryza sativa
  Clone ID: TF_OSC401168j.C1.p5.fg
MPIPEKDGVEDNQEDDTFSRLQLLAQQRHAMEKFWRMSQEQIEESAGNEELILPISRVKNIIHAKEGGMMLSADTPAFVTKLCELFVQELILRAWVCANSHNREIILGTDIAEAITTTESYHFLANVVHGHQALGSNIPEIGVSAWKRHKLDEMTSLCHPPQAVQVTDLANHPPNIPVCPPIGQSGTQHTTSTHVLMMQGESIHKASKEKSPLKEVMVPTNKVGMTNSSYGVPNGGGATSSKVVIDSPKGETAQVFSSQHACPSLEDNYVIPIPAGHGDSFRTLDEANIPQLHQEQKNFISQDAIVGENIPLNESLEKSKHKDEDLLFPDKDLPE

SEQ ID NO: 16543 - protein, 258 aa, Oryza sativa
  Clone ID: TF_OSC401409j.C1.p13.fg
MRKKLGTRFPAARIKKIMQADEDVGKIALAVPVLVSRALELFLQDLIDRTYEITLQSGAKTLNSFHLKQCVRRYSSFDFLTEVVNKVPDLGGADSCGDDRALPRRRKALPNGSDPENEESRSSKMAVRSANISPRGRGRGRGRGRGRPPTKRKEVGYVQFEDESSMFADQGEALPGEETVPETIHGTESVPPSTHPPAEAPSAAEIPAPNPKVEEAKNDDHQPDWPMPDAIGNIGVGPSGFGHLTVQVDEDEDYDNED

SEQ ID NO: 16544 - protein, 289 aa, Oryza sativa
  Clone ID: TF_OSC418198j.C1.p28.fg
MAGKKKALTNPASPSASASASTPKKSTATSKDRSTPKPRKNPNPKEEAPPPPPANNKRLNPQGGSNRKKKADAGTPSKKPKRQPPEPKPRKHKGAKSEKPHRVSGEGEKPTPTKKKKKKESSKEPKREKQQASAPMSTPSKKNKEAKRDTGGAGKPTPTKRKLGDVDPPQERPSGEGQASSPTPAKKRKDKAAAAEAVADHGAGSFPMARVRQIMRAEDATIRPSNEAVFLINKATEIFLKRFADDAYRNALKDRKKSIVYDNLYFVPQKVTAEDALKAPVSSQVNQPQ

SEQ ID NO: 16545 - protein, 290 aa, Oryza sativa
  Clone ID: TF_OSC416336j.C1.p2.fg
MRKKLDTRFPAPRIKKIMQADEDVGKIALAVPVLVSKALELFLQDLCNRTYDITVQRGVKTLSSSHLKQCIHSYNVYDFLRDVVSKVPDMGTSDAGVDDKLGKRRKTAEDDSEEESKRTRNEAASQTSTGRGRGRGRGRGRRGGRVSEREIISAYEKFEENHEFPPGQFSKPSQLKVDVSVDGTDAIETKEATPLSNARASLRNIDLNIELTDYDDEGSAPLEVQPPAPAAGVVTTSSGPLVSEVNEEAKTKDFLGWQLPELTKMAMDPVQFALSSNHRLEEDEDYDNEE

SEQ ID NO: 16546 - protein, 138 aa, Oryza sativa
  Clone ID: TF_OSC420787j.C1.p13.fg
MSSAGGGGGRGKSKGSKSVSRSSKAGLQFPVGRIARYLKAGKYAERVGAGAPVYLSAVLEYLAAEVLELAGNAARDNKKNRIVPRHIQLAVRNDEELSRLLGAVTIAAGGVLPNIHQTLLPKKGGKDKADIGSASQEF

SEQ ID NO: 16547 - protein, 296 aa, Oryza sativa
  Clone ID: TF_OSC27280j.C1.p3.fg
MDPMDIVGKSKEDVSLPKSTMFKIIKEMLPPDVRVARDAQDLLVECCVEFINLLSSESNEVCSREDKKTIAPEHVLRALQDLGFREYIEEVQAAYEHHKHDTLDSPKASKFTGVEMTEEQAVAEQQRMFAEARARMNNGAAKPKEPEPEAQQQTQQPPQPQLHPQPQQPLQPQLQLHPQPQQQPSQLHPQQLLHPQSQQTPQPQPQVHPQPQQPPQLQPQPQLLQQPQLPQQLQPQSQLPPQPQQPPQLQLQSQLHPQPQQPPQLQPQPQLHQQPQPQAELQSQSQPQTEHGLDSS

SEQ ID NO: 16548 - protein, 229 aa, Oryza sativa
  Clone ID: TF_OSC401854j.C1.p11.fg
MPDSDNESGGPSNAGEYASAREQDRFLPIANVSRIMKRALPANAKISKDAKETVQECVSEFISFITGEASDKCQREKRKTINGDDLLWAMTTLGFEDYIDPLKLYLHKFRELEGEKAIGAAGSGGGGAASSGGSGSGSGSHHHQDASRNNGGYGMYGGGGGMIMMMGQPMYGSPPASSAGYAQPPPPHHHHHQMVMGGKGKVEEVQSKGKIRDFLQLQASMLELIQGEN

SEQ ID NO: 16549 - protein, 125 aa, Oryza sativa
  Clone ID: TF_OSC401203j.C1.p25.fg
MRQARPYSAMFAGGVSARTGPHALPLARIKKIMKRSAGDSSVVDGGGGGGGGARMISGEAPVVFSKACELFIAELTRRAWAATLEGKRRTVHKEDVAAAVQNTDLFDFLVDVVTADLGDDHTDYK

SEQ ID NO: 16550 - protein, 285 aa, Oryza sativa
  Clone ID: TF_OSC5489j.C1.p2.fg
MADAGHDESGSPPRSGGVREQDRFLPIANISRIMKKAVPANGKIAKDAKETLQECVSEFISFVTSEASDKCQKEKRKTINGEDLLFAMGTLGFEEYVDPLKIYLHKYREMEGDSKLSSKAGDGSVKKDTIGPHSGASSSSAQGMVGAYTQGMGYMQPQSNFHILVVLQSFAFPYMYQVAQIYCNKYEVSREQIWDTPQIMELSPWIPYTINRIWKETHGSQDIRIQGRPREAANSALDWQWPSKHSSLASNFYGTRVVGGHHEYQRSTKKDTTHVNFASGLGDLG

SEQ ID NO: 16551 - protein, 144 aa, Oryza sativa
  Clone ID: TF_OSC400992j.C1.p58.fg
MTNGQDNLLPIANVGRIMKDGLPPQAKISKRAKETIQECATEFISFVTGEASERCRRERRKTVNGDDVCHAMRSLGLDHYADAMHRYLQRYREGEELAASLNSSSSAAAAAAAAGSRGGGAIQIDVRAELSIFRSGNNQGRPNN

SEQ ID NO: 16552 - protein, 150 aa, Oryza sativa
  Clone ID: TF_OSC900366j.C1.p10.gm
MAGETGEGGGSHSQPEKQPGQAAAAASMAEAEVEELPKAIVRRLVKEKLAQVAAGGAEVIVNKDAMSAFAESARIFIHYLSATANDMCKESKRQTINADDVLKALDEMEFPEFVEPLNTSLQAKEVGDLNSDHPSDALLCSILSFSYRIW

SEQ ID NO: 16553 - protein, 199 aa, Oryza sativa
  Clone ID: TF_OSC402631j.C1.p11.gm
MKSRKSYGHLLSPGGSPPLDNESGEAAAAAAAGGGGCGSNAGYVVYGGGGGGDSPAKEQDRFLPIANVSRIMKRALPANAKISKESKETGQECVSEFISFVTGEGLRQGPPREAEDHQRGRPPLGHDHAWGARPTGGRVKSYLTGTGRPRAKRAHWLRGAGGGHQGAPRERAGPRRKTGGGNEGFDEVGGTGGGGIDGG

SEQ ID NO: 16554 - protein, 297 aa, Oryza sativa
  Clone ID: TF_OSC30077j.C1.p6.fg
MKSRKSYGHLLSPVGSPPLDNESGEAAAAAAAGGGGCGSSAGYVVYGGGGGGDSPAKEQDRFLPIANVSRIMKRSLPANAKISKESKETVQECVSEFISFVTGEASDKCQREKRKTINGDDLLWAMTTLGFEAYVGPLKSYLNRYREAEGEKADVLGGAGGAAAARHGEGGCCGGGGGGADGVVIDGHYPLAGGLSHSHHGHQQQDGGGDVGLMMGGGDAGVGYNAGAGSTTTAFYAPAATAASGNKAYCGGDGSRVMEFEGIGGEEESGGGGGGGERGFAGHLHGVQWFRLKRNTN

SEQ ID NO: 16555 - protein, 320 aa, Oryza sativa
  Clone ID: TF_OSC401807j.C1.p27.gm
MPSFTIAIVLSSVSDLQCELEFLACVTSKKHGGTHSHGMNCPAMTAATAAGAFGFGRTRADMEPSSQPQPVMGVATGGSQAYPPPAAAYPPQAMVPGAPAVVPPGSQPSAPFPTNPAQLSAQHQLVYQQAQQFHQQLQQQQQQQLREFWANQMEEIEQTTDFKNHSLPLARIKKIMKADEDVRMISAEAPVVFAKACEVFILELTLRSWMHTEENKRRTLQKNDIAAAITRTDIYDFLVDIVPRDEMKEEGLGLPRVGLPPNVGGAADTYPYYYVPAQQGPGSGMMYGGQQGHPVTYVWQQPQEQQEEAPEEQHSLPESS

SEQ ID NO: 16556 - protein, 250 aa, Oryza sativa
  Clone ID: TF_OSC414618j.C1.p4.fg
MEPAFPNGGAAAPPPPMAAEQLPPAAAVVREQDRLMPIANVIRIMRRVLPPHAKISDDAKEVIQECVSEFISFVTGEANDRCHREHRKTVTAEDLVWAMDRLGFDDYVPPLTAYLRRMREYEGGGSGGGGGGGRGAAAAPAVVPPPPPPPPEDAFRYVQVHHPVYAAPGEPVQGYGYPVAMSSALPAPHVHVGVRGGGQHEVFGGGPAPLAVYYGGAPYGEASSRGGCSAADEGSSSSSASPAPVGPNYE

SEQ ID NO: 16557 - protein, 530 aa, Oryza sativa
  Clone ID: TF_OSC419121j.C1.p2.fg
MLSSMFLFLLPLSLLSFSLLGNLWAGAATSAGEGWSSVGLRLMLLGGATPFFYINIETVIITNMNYYPEGSNPVYFAVLVKYEDLDGDVVQVDLMESKSAYGGAIGVWTPMRESWGSASAVTSARPFVTNNVIPAIWSRIAPSLPPSPLPRRPRSALAHCRASPASVSPSARASPTPPSPRSPPHRPSRSRHLLLSGIPAAALVVACPNLNDLDFSNDHYGSTSGMRRRRRWPSCVGFWGGFGDGDGDRYSITFSAYIVVLRTQEAYVQILQQLHRSTSLEMDPHSHKKAHEGLIGDNPDAYAVTTYQPVLMVEPSAAAAFPPAPQVAPAYPVNPMQLPEHQQHAIQQVQQLQQQQKEQLQAFWADQMAEVEQMTEFKLPNLPLARIKKIMKADEDVKMIAGEAPALFAKACEMFILDMTLRSWQHTEEGRRRTLQRSDVEAVIKKTDIFDFLVDIITDDKMKDDGMGSQAASMVSPYTSGGMGFSFDLYPNQHHLAYMWPPQEQQEQWPPQEQQEQKQKQDSDGGGQDE

SEQ ID NO: 16558 - protein, 177 aa, Oryza sativa
  Clone ID: TF_OSC400992j.C1.p59.fg
MADHHGGHHADGHRRQQQLQGEAADQAAAEIIKEQDRLLPIANVGRIMKQILPPNAKISKEAKETMQECVSEFISFVTGEASDKCHKEKRKTVNGDDVCWAFGALGFDDYVDPMRRYLNKYRELEGDRAAAAATSRSGAGAAAGPDHPSSSSSAAAATAGHFMFNAMDRSTDSSRQF

SEQ ID NO: 16559 - protein, 241 aa, Oryza sativa
  Clone ID: TF_OSC413083j.C1.p3.fg
MSEGFDGTENGGGGGGGGVGKEQDRFLPIANIGRIMRRAVPENGKIAKDSKESVQECVSEFISFITSEASDKCLKEKRKTINGDDLIWSMGTLGFEDYVEPLKLYLRLYREGDTKGSRASELPVKKDVVLNGDPGSSLVNYGAQRADANANHLDLFFLLRKNPESTTANCMREDEAKPVTVKIIETVYVEADTADDFKSVVQRLTGKDAVAGDAPELNSAQRFGSGREASRHGDHKVRIYE

SEQ ID NO: 16560 - protein, 205 aa, Oryza sativa
  Clone ID: TF_OSC400603j.C1.p33.fg
MEPKSTTPPPPPPPPVLGAPVPYPPAGAYPPPVGPYAHAPPLYAPPPPAAAAASAAATAASQQAAAAQLQNFWAEQYREIEHTTDFKNHNLPLARIKKIMKADEDVRMIAAEAPVVFARACEMFILELTHRGWAHAEENKRRTLQKSDIAAAIARTEVFDFLVDIVPRDEAKDAEAAAAVAAGIPHPAAGLPATDPMAYYYVQPQ

SEQ ID NO: 16561 - protein, 301 aa, Oryza sativa
  Clone ID: TF_OSC419400j.C1.p11.gm
MDPTKSSTPPPVMGAPVGFPPGAYPPPPPAGAAAAAYAQQLYAPPAAAAAQQAAAAQQQLQMFWAEQYREIEATTDFKNHNLPLARIKKIMKADEDVRMIAAEAPVVFARACEMFILELTHRGWAHAEENKRRTLQKSDIAAAIARTEVFDFLVDIVPRDDAKDADAAAAAAAAGIPRPAAGVPATDPLAYYYVPQQDISTAAVVWALTHVVQHGDTILLLAVMLLPHRAQLWQEVLGVSALCRGLCERPQERVDSEFGCRLFVTSTSTTKARWQWWETAGRWPSSSGGAWACFGRGRAGA

SEQ ID NO: 16562 - protein, 250 aa, Oryza sativa
  Clone ID: TF_OSC407812j.C1.p9.fg
MEPSSQPQPAIGVVAGGSQVYPAYRPAATVPTAPAVIPAGSQPAPSFPANPDQLSAQHQLVYQQAQQFHQQLQQQQQRQLQQFWAERLVDIEQTTDFKNHSLPLARIKKIMKADEDVRMISAEAPVIFAKACEIFILELTLRSWMHTEENKRRTLQKNDIAAAITRTDMYDFLVDIVPRDDLKEEGVGLPRAGLPPLGVPADSYPYGYYVPQQQVPGAGIAYGGQQGHPGYLWQDPQEQQEEPPAEQQSD

SEQ ID NO: 16563 - protein, 238 aa, Oryza sativa
  Clone ID: TF_OSC400426j.C1.p12.fg
MAAAAVADEVTEAMEQVEGEREEADAVADEAAEVMEQAEGEREEAIDAVAGEAGEVMKEVVEGEREEANAMADEADEAMEPEGEREEEADAVADEATEPMEQVEGEGEDGDAAAQRPALPLGRVKRIIRVDRDIKKVTNEAALLIAAATELFVGSLAAGAHRAASRRGRRAVRAVHVRAAAREHRPTADFLLDCLPAAEEAAPARAAAAGPSRGGGRGEAKPLPRGTRRIDAFFQKTT

SEQ ID NO: 16564 - protein, 186 aa, Oryza sativa
  Clone ID: TF_OSC400070j.C1.p19.fg
MAGNKKRGGRNMDQVKKAAVRSDGVGGSATNAELPMANLVRLIKKVLPGKAKIGGAAKGLTHDCAVEFVGFVGDEASEKAKAEHRRTVAPEDYLGSFGDLGFDRYVDPMDAYIHGYREFERAGGNRRVAPPPPAAATPLTPGGPTFTDAELQFLRSVIPSRSDDEYSGSSPAIGGYGYGYGYGKNM

SEQ ID NO: 16565 - protein, 181 aa, Oryza sativa
  Clone ID: TF_OSC6715j.C1.p2.fg
MAIPTKEEVEQNEEDNTFSRLQLLAQQRHAMEEFWRRSQEQIEASAGNHEHILPIDCVKNVIRPKNDAMMLSADTPTFVTKLCELFVQELTLRAWVCANSHNRDIILGTDIAEAITTTESYHFLGNVLRSHKALGSTAPDIDTSARKHIKLDQMTSLYHPTQEMQASRLAGYPPHVPIYPP

SEQ ID NO: 16566 - protein, 254 aa, Oryza sativa
  Clone ID: TF_OSC400069j.C1.p6.fg
MEAGYPGTAANGAAADGNGGAQQAAAAPAIREQDRLMPIANVIRIMRRVLPAHAKISDDAKETIQECVSEYISFITGEANERCQREQRKTITAEDVLWAMSRLGFDDYVEPLGVYLHRYREFEGESRGVGVGVGAARGDHHHGHVGGMLKSRVQGSMVTHHDMQMHAAMYGGGAVPPPPHPPPHHHAFHQLMPPHHGQYAPPYDMYGGEHGMAAYYGGMYAPGSGGDGSGSSGSGGAGTPQTVNFEHQHPFGYK

SEQ ID NO: 16567 - protein, 937 aa, Oryza sativa
  Clone ID: TF_OSC7036j.C1.p3.fg
MEGGPLQAKGLKGRDMQARPYRYSPLQKDEIEKQVKEMIDAGLITPSMSPYASPVLLVKKKDGSWRFCVDYRRLNALTIKSKFPMPVVDELLDELSGTKFFSKLDLKAGYHQIRMVETDEAKTAFKTHHGQFQFRVMPFGLTNAPSTFQCLMNSVLAPFIRKFVLVFMDDILVYSPDLDSHLHHLQQVFVILRQHQLFARRSKCSFACTQLEYLGHIISDKGVSTDPEKTAAMLAWPVPTSVTELRGFLGLTGYYRKFVQGYSIIARPLTLLLKKKAFLWTDAAQLAFDQLKTAMSNTPMLALPNFQLPFTLETDACAYGLGAVLSQQGHPIAYYSKTLGPVNQKLSIYEKEFLAIMMAVDKWRCYLQRGPFIIKTYHKILCHLDDQILGTELQQKAMTKLMGLQYSFQYKRGVNNIVADALSRMPSSSQFCAFSVVQPIWIQEMINSYTVDPQAQQLLAELAVHSPNSQGYSLTQGIIRFQNKIWIGSNAGLHTKLIQAFHASALGGHSGIAATYHRIKKLFAWPGLKLDVENFVKQCQVCQQAKHEHCRLPGLLAPLPIPKEAWQDISMDFIEGLPRSDGYNAILVVVDRFTKYANFIPLRHPFTASQVAHLVDKTVFKTHGIPRSIVSDRDRLFTSKFWTTLFATWDTQLQMSTAYHPQTDGQIERVNQCLEMYLRCMTQANPKKWSHWIHLAEFWYNTNYHTYLGCSPHKALFGVDPHYSQVPDLTLATLPDVVDVQTERQHLSEFLQQQLTRAQLRMKNKVDKGRSDRVFAVGDAVFLKLQPYAQSSVVNRPYPKLAYKFFGPFTVLERIGVAAYRLDLPASSTVHPVFHVSQLKAQVPDHTPVYTSLPSQVVLDAADVVPEAILERRLVKRSNAAHVQVLLKWSSLPADHATWEDYHVVKTRFPDAPAWGQAETPAGGTVMTGNGDTEKEV

SEQ ID NO: 16568 - protein, 1150 aa, Oryza sativa
  Clone ID: TF_OSC403247j.C1.p47.fg
MPPARGGRRGRGRGRRGGRGGAASRARGENVVDVEPIKLGDDDAKVDPQTKSPNEEITSAEVCEVETSEASPLGAPEEDEGKPGSTRNLKRLRKTITIDSAAAEEHGAESDDEEFDVLATASCQELAPCRRSKRLRCKPTRKRSKPTGKRDLGGKESEDDVFANSSSSSQDDAGKLASRRSKRLRERLTSDYFDGDMKIVRLPAEDQNAFGTDWAPEIFHMLMMIATPMIHVTLTTEITTDRKKIVPCRRTSKRLQEKRKAHDVSEESYTEASSCMLSTSSSSDDELLHNSIKPGRRNSGGPSCSICKIGIACSFLIKCKNSTCSRSFHTFCLDPPLQEIIGTWECSWCKSNAAPAVKVTEVLTSKKIQRLVGHRRILQEADFQYQFLVKWQSLSHHHDCWVPLEWLHVSDPLRVQSYLNKNCLPKEVYSEDQRKLEWFEVDHAIACRRKFHHEGLCDVLATFQDNQDFDGYEFLVKWKGLDYCEATWEPCCTDGVQQAVSMLVRRHKNASKRVNISQTCLDGSKIEEVHCGALYDYQLQGLQWLIDNFKTRRSVILADEMGLGKTVQVVCFLYHIIKESLTASPALILAPKSILLQWEKEFCQWASDLNVIVYQGDRDSRKCIQVHEMYSSDGKPLFDALVTSYEFVQIDKAVLQKFKWSTIVIDEAHRMKKLDCNLAACLKRYCSEFRLLLTGTPLQNNIMELFSLLHYIDPDEFSDPKADGLFSPIESGRDLTMDEKVARIHNILKPRMLRRMKSDVLTDSMPVKKWVEVPCALADSQRELYINILERNYSKLNSAIRNGRKLSLNNILMELRKCCNHPVGLEVGQQATEDVFLSLIASSGKLQLLHKLLPRLKERGNRVLIFSQMTRMLDILEDFLCSLGYKYARIDGQTSLSARQESIEEYKNIDSETFIFLMSTRAGGMGVDLPGADRVIIYDPDFNPFMDLQAQSRAHRIGQTRPVVVYQLITKCSVEEKILQKSKQKLAIENMLMNSSKKPSADELQSILLHGAKTIVDRKISATSIHYDNEAIENLLKLDPSTGEKCSSDDNGYLGSIVSFAHGVEDEAPSSPKVEDLKVLKPATPKVDLGRGKRQRKVVNYADEVENEDSDDMYAPEGSSTSEFSSSSSDDETDSALQLQIVTVPDIDAD

SEQ ID NO: 16569 - protein, 1133 aa, Oryza sativa
  Clone ID: TF_OSC401367j.C1.p45.fg
MESKLLEKLEGITKWMHEIDQRLDSQGGSLEKVTTKVDLAMDSVGKFRMAVETEFEGVVEREKMSALDTLTQTGTMTEYKQQFDSLVYQIRVFDPSVGEIRAAVVVQLPDTVQQASAIALMQESVLASRATKALKGKFVKLPQYKSDISSDTAPGRVDKEDLWKAKQLKDYRRAQGLCFKCGDKYTPEHRCAVGGQIKAMQLEEVLTDDILDVVIAAEQSDDEEDCHISLNALTGAHLPTAIHLRALVHSKVLLLLVDSGSSHSFIDYNFAQMLGLPLKPIPSTLVKVANGDCLPCQYVVPGFSWWIQGHTFTYDMRVVTLGGHDAILGRDWLEQWGEMSCHWANKTLKFQYQGSWISLQGVQDAAVPSEIAAVTLPQLLKWHKGCEIWTAALLEHSQDDVQHVIPSSVQQLLTDFDDVFHDPKCLPPHRVFDHAISLVPDAIPVNCRPYRYYPLQKDEIEKQVNEMIDAGLITPSMSPYASPVLLVKKKDGCWRFCVDYRRLNALTIKSKFPMLVVDELLDELSGTKFFSKLDLKAGYHQIRMVETDEAKTAFKTHHGQFQFRHQLFAKRSKCSFACTQLEYLGHIISDKGVSTDPEKTAAMLAWPVPTSVTELRGFLGLTGYYRKFVQGYSIITRPLTLLLKKNAFLWTDAAQLAFDQLKTTMSNTPVLALPNFQLPFTLETDACAYGLGVVLSQQGHPIAYYSKTLGPVNQKLSIYEKEFLAIMMAVDKWRCYLQRGPFIIKTDHKSLCHLDDQILGTELQQKAMTKLMGLQYSFQYKRGVDNIVADALSRMPSSSQFCALSVVQPIWIQEVINSYTVDPQAQQLLAELAVHSPNSQGYSLTQGIIRFQNKIWIGSNAGLHTKLIQAFHASALGGHSGIAATYHRIKKLFAWPGLKLDVENFVKQCQALFGVDPHYSQVPDLTLATLPDVVDVQTERQHLSEFLQQQLTRAQLRMKNKADKGRSDRVFAMGDAVFLKLQPYAQSSVVNRPYPKLAYKFFGPFTVLERIGVAAYRLDLPASSTVHPVFHVSQLKAQVPDHTPVYTSLPSPVVLNAADIVPEAILERRLVKRCNAAHVQVLLKWSSLPADHATWEDYHVVKTRFPDAPAWGQAETPAGGTVMTGNGDTEKEV

SEQ ID NO: 16570 - protein, 1391 aa, Oryza sativa
  Clone ID: TF_OSC401857j.C1.p18.fg
MEAKLLEKLDSLTLCMEALDDKLTKQSGRIDQVATKVDLAMDAVAALQKEQVQAAQLHKQAMASEPMYQIPPVFQVSAAVLHMSGNAAQWYQSFKLVEEVANWSQFRHAVVCEFESTSQREKIQALQTLRQAGSVAEYKHQFDSLVYQIRVFDPSVGAVMVQLPTTVQQAAAVALMQESVLLELSTKQSKRLMYKPLPTKGELPQGGTDTPAIKPERAELWKARQLRDYRRANGLCFKCGDKYSPEHQCALGGQIKAMQVTEVIPDDLLNAVTAEEDSDQDENCHISLNSLSGASHVNTIRLRALVQNKVLLLLVDSGSSHSFLDYNFAQLLGLQLQPIAPSLVKVANGDCIHCQFMVPQFTWWFQGRTFTYDMRVVPLGGHDAILGMDWLAQWGDMSCNWANKTLKFMYQGTWVELQGVPDSPPQTELSAMSLSQVLKCQKGCDIWAAALLETADFPSADSVPPAVSQLVHEFADVFQDPHSLPPHRVYDHAITLFPGSAPVNSKPYRYSPLQKDEIESQVKDMIDSGLITPSMSPFASPVLLVKKKDGTWRFCVDYRKLNSITVKSKFPMPIVDELLDELAGTRFFSKLDLKAGYHQIWMVEDDEYKTAFKTHHGQFQFHVMPFGLTNAPSTFQCVMNSVFAPLIRKYVLVFMDDILVYSPDLPSHLTHLKQVFELLRQHKLYAKRSKCSFACSQLEYLGHIISDQGVSTDPTKTAAMLAWPVPANVTELRGFLGLTGYYRKFVKNYSILAKPLTVLLQKKAFQWSDDAQQAFQKLKLAMSSTPVLALPDFSQPFILETDACAFGVGAVLSQHNHPIAYYSKTLGVANQKLSIYEKEFLVLGTDLQQKAMTKLMGLQYTFQYKKGVENVVADALSRVPPQSHLSALSVASPIWLQEVLNSYAVDTQAQKLLVELAVHSPNDQGYSLTDGLIRHHGRIWIGANLGLQTKLITAFHSSPIGGHSGTMATYHRLKKLFSWVGLKTAVFNFVKQCQICQQAKHEHCRLPGLLVPLPVPKEAWIDISMDFIEGLPKSDGYTVILVVVDRFTKFASFIPLRHPYTASQVAVTVDKFVFKTHGLPQSIVSDHDKVFTSRFWGDLFKVWNTQLNMSTAYHPQTDGQTERVNQCLEMYLRCMIQATPTKWNSWLHLAEYWYNTSFHTSLGCSPHKALFGVEPHISQVPVLLSSVHHSVVDLISERNQLSVFLQQQLQRAQLRMKHKADKGRSERSFSVGDHVFLRLQPYAQSSVVNRPYPKLAFKFFGPFQILEKVGSAAYRLALPEGSAVHPVFHVSQLKAHVPDHTPVFTSLPTPVVLDAADVWPELILDRRLVKKGNAAHVQVLIKWSSLSADDATWEDYDVLKTRFPSAPAWGQAASLAGGTVTADGIQCDAPQ

SEQ ID NO: 16571 - protein, 1058 aa, Oryza sativa
  Clone ID: TF_OSC400864j.C1.p5.fg
MEQQLAELVEVMSAIQKQNSAIQTSVGSLEEIKPLVVELASWKPAMDKAVTELHEEMGDLRQQVERIARNPVLSVKPSELPALLPTPTRPRDTAPKEEEVSPSVGGEGHGPLGHRVASIPRGKACGKESSPSSLPAKEGSNRGFTAGFHGGNARVDCPQFDGENPRAWKMKCETYFRVSGICSEVWEAMTSYRATARSATPSFASKTFGGGRADERTLPVEDKVAALRAYRKAKGLCHTCGERWSRDHKCGPTVQLHIVEELLELLADSAADGMPEIIEPTTDIGSESEPQGEVCQISRDAMIAQKDEIERQVKDMLQQGVIQPSSSPFSSPVLLVQKKDLTWQFCVDCRHLNAVTVKNRYPLPIIDELLDELSGASLFTSLDLRAGYHQIRMRAEDEYKTAFKTHNGHYEFRVMSYGLTGAPATFQGLMNMIFAPLLRKGVLVFIDDILVYSRNLQDHVMLLRQVVFVWTSEHQAAFEALKAALVSAPVLALPDFSGTFVIETEASDLGVGAVLMQDGHPLAFLSKSLGPRNRGLSTYEKECLAILLAVDHWRSYLQFGEFIIRTDQRSLIHLDDQRLVTSWQQRALTKLLGLSYRLVYKKGLENKAADVLSRCRSNEVYQLSTVSSCVPSWLEEVQKGYDSDICTSQLLAKVLLSPSQFPSYSLKNGILYYMRLIWLGANSELQLKILSAFHCSAVGGHSGIQVTYSRVRRLFAWPGLKQAVRQFVSNCSICKQAKAERVRYPGLLQPLPVPEHAWVTVSLDFIEGLPSSAGFDCILVVVDKFSKYAHFLALVHPFTAFDVALAYLNNVYKLYGLPHHIISDRVRIFTSALWTELFQLTDTRLKLSTAYHLQTDGQTERVNQCLETFLRCFVHACPKKWFRWWALAEFWYNTAYHSALERSPFEVLNKVGAVAYRLRLPDDCSIHPVVHVSQLRQAVAPTTATDVRALPTMAPEEVVPVQVLARRVSKKGAGAVEQVLVRWTGQSSSEATWEDAAALRLRFPDAPAWGQAAFEGGRNVTGAATVSEPVRENNPVKSGKRPQRERRPNVRVSGPEWS

SEQ ID NO: 16572 - protein, 760 aa, Oryza sativa
  Clone ID: TF_OSC400896j.C1.p18.fg
MGEVGEEREAGFENRIPAISGAGAGGRERGVGAGNAAHARRGRRGPEEAETWARRRLRARRGGGSGGRLGEDPTGFTLALHRYFLRASYKLNFRLGRRTSGCDTDATQLAFDQLKTAMSNTPVLALPYFQLPFTLETDACAYGLGAVLSQQGHPIAYYSKTLGPVNQKLSIYEKEFLAIMMVVDKWRCYLQRGPFIIKTDHKSLCHLDDEILGTELQQKAMTKLMGLQYSFQYKRGVDNIVADALSRMPSSSQFCALSVVQPIWIQEVINSYTVDPQAQQLLAELAVHSPNSQGYSLTQGIIRFQNKIWIGSNAGLHTKLIQAFHASALGGHSGIAATYHQIKKLFAWPGLKLDVENFVKQCQVCQQAKHEHCRLPGLLAPLPIPKEAWQDISMDFIEGLPRSDGYNAILVVVDRFTKYANFIPLCHPFTASQVAHLVDKTVFKTHGIPRSIVSDRDRLFTSKFWTTLFATWDTQLQMSTAYHPQIDGQTERVNQCLEMYLRCMTQANPKKWSHWIHLAEFWYNTNYHTSLGCSPHKALFGVDPHYSQVPDLTLATLPDVVDVQTERQHLSEFLQQQLTRAQLRMKNKADKGRSDRVFAVGDAVFLKLQPYAQSSVVNRPYPKLAYKFFGPFTVLERIGVAAYRLDLPASSTVHPVFHVSQLKAQVPDHTPVYTSLPSPVVLDAADVVPEAILERRLVKRGNAAHVQVLLKWSLLPADHATWEDYHVVKTRFPDAPAWGQAETPAGGTVMTDNGDTEKEV

SEQ ID NO: 16573 - protein, 1481 aa, Oryza sativa
  Clone ID: TF_OSC411208j.C1.p7.fg
MAYRAPTLRPQLAASPASRVPLSDSRRPPVYSGSNGFWSGRGRSGRASTSSSRVEDKVLRRRGLDGDQTSVRAFSSPREGANWMGSSPASSSSSSSSHASSSSESWIRDKLSGVRPSSLAGRAPTTGTKRQCSSPPPSADRSEKKAKEDLAMEEPPEALAMEEQQDALATKEQALAMEEEQGAPATKGEQEVLPEMEEEQLVMEEEQESLAMDKMESGMEEQPGIEEEVLPEMEEQLMIEEEQELSAMDKMESGMEEQPGIEEEVLPEMEEQLMIEEEQELSAMDKMESGMEEQPGIEEEVLPEMEEQLMIEEEQELSAMDKMESGMEEQPGIEEEQPATEELGADDALPSANTHLDLVSSHLRDDGNWLTVMSSLCHPSRGWCLWAIFGSHAFAIDTTADADILTLDLAGLKETTSCPRAKGNNVKHCGTESCASSWIKPGILQAPLKQAMDSMESKLLEKLEGITKWMHEIDQRLDSQSGSLEKVTTKVDLAMDSVGKVQQECAELARSMKRVASCSDQAGILGSPFGISQVSASGSATPPPLNPLVPPVLDGVDLGHGFGDGIYRRHQPLPKMDFPRFDGSDVRIWLDMCETYFDMYQITQNFKVSAAVLHMSGNAAQWYHSYKLVNEVNSWDQFRMAVATEFECVVEREKMSALDTLTQTGTMTEYKQQFDSLVYQIRVFDPSMGGKMLVTHFMNGLTEEIRAAVVIQLPDTVQQASAIALMQESVLASRATKALKGKFVKLPQYKSDVSSDTTLGRVDKGDLWKAKQLKDYRRAQGLCFKCGDKYTPEHRCAVGGQIKAMKLEEVLTDDILDAVIAAEQSDDEEDCHISLNAFTGAHLPTAIHLRALVHSKVLLLLVDSGSSHSFIDYNFAHMLGLPLKPIPSTLVKVANGDCLPCQPYRYSPLQKDEIEKQVKEMIDAGLITPSMSPYTSPVLLVKKKDGSWRFCVDYRRLNALTIKSTKFFSKLDLKAGYHQIRMVETDEAKTAFKTHHGQFQFREVINSYTVDPQAQQLLAELAVHSPNSQGYSLTQGIIRFQNKIWIGSNAGLHTKLIQAFHASALGGHSGIAATYHRIKKLFAWPGLKLDVENFVKQCQVCQQAKHEHCQLPGLLAPLPIPKEAWQDISMDFIEGLPRSDGYNAILVVVDRFTKYANFIPLRHPFTASQVAHLVDKTVFKTHGIPRSIVSDRDHLFTSKFWTTLFATWDTQLQMSTAYHPQTDSQTERVNQCLEMYLRCMTQANPKKWSHWIHLAEFWCNTNYHTSLGCSPHKALFGVDPHYSQVPDLTLATLPDVQQLTRAQLRMKNKADKGRSDRVFAVGDAVFLKLQPYAQSSVVNRPYPKLAYKFFGPFTVLERIGVAAYRLDLPASSTVHPVFHVSQLKAQVPDHTPVYTSLPSPVVLDAADVVPEAILERRLVKRGNAAHVQVLLKWSLLPADHATWEDYHVVKTRFPDAPAWGQAKTPAGGTVMTGNGDTEKEV

SEQ ID NO: 16574 - protein, 1332 aa, Oryza sativa
  Clone ID: TF_OSC13017j.C1.p6.fg
MPARTRSVNSLDSVDGFDARAEILQLRREMTDLSNLRGEMGEIKDLLKSICTALPGFHSAGASTSGTAGAGGSAGTQAMAGASVSAGAQAATGTGALIAPLVPPGFSSVAPILSTGGMQSGVALPQTADETQVNSTNAIPSSQIHAGMGSVFPSTSLPPIFPIHMSGAVPSVGHVNFSIEPNTVNPNFAPIFTSAPIFTSATRTQAGHLPGGLNIHGVESQEDVGMNHYGIETNQPWRYPQMQPTARPHLNATGIHMANGGGPVWPEGPRHLFGGMPNPYADMTLRSQRLELTIFNGEDAIGWLQQCEKFFEMTGTPVEQWVNLATGHLVGRAGKWFRNLGIPWHYINWPQFYLMISDRFTEANAHEAVEQLQNVRQTGSVMHYIDKFEDSVALVKRDHPYLIEYYILSCFIGGLRADIKHDHKCRTGKVIHMMEEVEDEEEESGSPEENQEGEYQTAPGSPAKKEDDNEEQLMQISTHAIQGTYGINTFSLITYVKGRKVVALVDSGSTNTFMNYEFALRSGCEIIEFDHNRVMVAGGGILNSTAKTEVIQYKVQGYLFVHTLKTLEMENVPVPDSVATILAGFAEVFAEPKGLPPRRECDHAIPLKMGAEPPNQRPYRVPHQQKNAMEEIIKELLESEEIRPNLSPYSSPAVMVRKRDGSWRMCVDYRQLNARTIKNKFPMPIVEDLLDELNGAKLVRKCVLVFFDDILIYSKNLEEHEKQLQCVLSILRSHKLYAKRSKCTFAAPSVEYLGHIVSGEGVATKPSKIKDVLEWAVPVNITKLRGFLRLTGYYRRFVQGYGAICRPLHDLLKKDNFHWGPEQQKAFDQLKKIMTTCPVLALPDFSKPFVLETDACGSSIGAVLIQEGRPIAYYSKALGQRAAGSSTYEKEAIAILEALKKWRHYLLGNQVIIRIDQQSLKYMATHKLSEGIQHKLLLKLLELDYNIEYKKGKENAAADALSRRDTKEVEEKEKCYAITLVYPEWIEDVKSSYLNDAQYMKLVDGEELNEESSNFSLGAGILRYKNRIYVGSTTNIRNKLIQAFHKSAFGGHSGVKVTYHRIKKIFYWPQLKKEVEKIVSECPTCQITKAEHVHSPGLLDPLQIPEMAWTHISMDFIEGLPKSQGKDVTPYEALYGVHPPQNGEQAIPGNVTEEIRITAQQREELMLRLKDNLLRAQNRIRKFADRLRSERSFQEGDMVYLKMQPYRQNAFGLRGSLKLRAKFYGPFRILKRIGKVAYHLQLPEEAGIHPVFHVSQLKKHVGNLVVPLPNLPLVDEDGNIKTEPVAVLARRVVPRRNEPVTQWLVHWENLSPEDATWEDSAFIQATFPHFRP

SEQ ID NO: 16575 - protein, 1377 aa, Oryza sativa
  Clone ID: TF_OSC400920j.C1.p23.fg
MPARTRSVNSLDSVDGFDARAEILQLRREMTDLSNLRGEMGEIKDLLKSICTALPGFHSAGASTSGTAGAGGSAGTQAMAGASVSAGAQAATGTGALIAPLVPPGFSSVAPILSTGGMQSGVALPQTADETQVNSTNAIPSSQIHAGMGSVFPSTSLPPIFPIHMSGAVPSVGHVNFSIEPNTVNPNFAPIFTSAPIFTSATRTQAGHLPGGLNIHGVESQEDVGMNHYGIETNQPWRYPQMQPTARPHLNATGIHMANGGGPVWPEGPRHLFGGMPNPYADMTLRSQRLELTIFNGEDAIGWLQQCEKFFEMTGTPVEQWVNLATGHLVGRAGKWFRNLGIPWHYINWPQFYLMISDRFTEANAHEAVEQLQNVRQTGSVMHYIDKFEDSVALVKRDHPYLIEYYILSCFIGGLRADIKHDHKCRTGKVIHMMEEVEDEEEESGSPEENQEGEYQTAPGSPAKKEDDNEEQLMQISTHAIQGTYGINTFSLITYVKGRKVVALVDSGSTNTFMNYEFALRSGCEIIEFDHNRVMVAGGGILNSTAKTEVIQYKVQGYLFGKAFQLIPLKGYDIVLGADWIYEHSPINLDLKQRTLTMNKMLDKNVMGFVIEVHTLKTLEMENVPVPDSVATILAGFAEVFAEPKGLPPRRECDHAIPLKMGAEPPNQRPYRVPHQQKNAMEEIIKELLESEEIRPNLSPYSSPAVMVRKRDGSWRMCVDYRQLNARTIKNKFPMPIVEDLLDELNGAKVFSKLDLRSGKNLEEHEKQLQCVLSILRSHKLYAKRSKCTFAAPSVEYLGHIVSGEGVATKPSKIKDVLEWAVPVNITKLRGFLRLTGYYRRFVQGYGAICRPLHDLLKKDNFHWGPEQQKAFDQLKKIMTTCPVLALPDFSKPFVLETDACGSSIGAVLIQEGRPIAYYSKALGQRAAGSSTYEKEAIAILEALKKWRHYLLGNQVIIRIDQQSLKYMATHKLSEGIQHKLLLKLLELDYNIEYKKGKENAAADALSRRDTKEVEEKEKCYAITLVYPEWIEDVKSSYLNDAQYMKLVDGEELNEESSNFSLGAGILRYKNRIYVGSTTNIRNKLIQAFHKSAFGGHSGVKVTYHRIKKIFYWPQLKKEVEKIVSECPTCQITKAEHVHSPGLLDPLQIPEMAWTHISMDFIEGLPKSQGKDVTPYEALYGVHPPQNGEQAIPGNVTEEIRITAQQREELMLRLKDNLLRAQNRIRKFADRLRSERSFQEGDMVYLKMQPYRQNAFGLRGSLKLRAKFYGPFRILKRIGKVAYHLQLPEEAGIHPVFHVSQLKKHVGNLVVPLPNLPLVDEDGNIKTEPVAVLARRVVPRRNEPVTQWLVHWENLSPEDATWEDSAFIQATFPHFRP

SEQ ID NO: 16576 - protein, 1817 aa, Oryza sativa
  Clone ID: TF_OSC416668j.C1.p17.fg
MEKSGRRPSRSCTRSPVRLGSSPSSFPPVVALVPDGCRVRDSPLSTVEGGAIGGKDLNAEEEEDVQTSQSDISTGNGHRPVRERRPNPRVLGPEWVARRRRRLDPVGSERKYHIVATISHISELFLRVPNNLVSEPFALQNPLGLAVKFPGERWDPATLVACDPQKLRLPQSENERKREEAEVRTRAEYLDLKKSVESRIPAVEKRVEDLGASLQSLSTKVEHLEGSLMRHTKLEPDASTAKTGGSGIIKEEQNQPNTDLTSPSFGMNENFSLSRAPFGFEPRTPSLDSGIASYNLSSTIPPMTCPQFCGDNPQMWKVNCEQYFDVFGIQQIHWVKIATLNFCGNAAFWLQSVRNQLGGITWVGLCDLVCSRFSKDRQQALIRQWFHIRQDGSVAEYVEKFDSLMHQLLAYDNSLLPVYFVTKFVEGLRSDIRVVVLVQRPQDMDSACAVALLQEEALEGVQSTQYKKPDTSIPIRNSHKGAGVLPSTLPPKQLLSPQSEDRRGTESARARDDKLSALKAYRRSKGLCFTCGERWSRDHKCSTAVQLHVVQELLDALQDVKTVEVSDGEQFLHCEDTSDLMAISQQAIWGTESPNSFRLRGWVQGTELLMLVDSGSTHSFMEESIGLKLAGVKPLRSKLSVKLADGETLSCSYEVTNCRWWMQGHNFINNFRLLNLGGYDIILGMDWLEQFSPMQVNWVDKWMDITISGQPVRLQGIVSQVSHCSPISTEQCLGMVRQGSLMYLVQLTSSDPVTKEPIPAAVQQLIDSFQAVFAEPNGLPPKRYCDHTIPLVPGAAPVNLRPYRFNPALKDEIEQQISDMLKSGVIQPSHSAFSSPALLVKKKDGTWRLVIDYRKLNAITVKGTYPMPVIDELLDELAHAKWFTKLDLRAGYHQIRMAPGEEYKTAFQTHTGHYEYTVMSFGLTGAPATFQGAMNETLSPVLRKFALVFFDDILIYSPDFSSHLDHIAQVLSLLSKHQWYVKLSKCSFAQKQLTYLGHTISAAGVHTDQGKIQEVVNWKVPTTVKKLRGFLGLAGYYRKFVKGFGVISKPLTNLLRKGVPFIWTPETDAAFHNLKQALVSAPVLALPDFQKVFTVETDASDSGIGAVLSQDGHPVAYISKALGPRTKGLSTYEKECMAVLLAVDQWRSYLQLGDFIILTDHHSLMHLSDQRLHTPWQHKAFTKLLGLSYKICYRRGSHNGAADALSRKFQHDEEELCHISACTPTWLQEVTTGYASDSYSSQLLTELTVQPNARKHFSLHAGLLKYKGRIWIGNNRQLQLKLLTEVHSNPIGGHSGFPVTYRKLKQLFAWPSMKKMTKLFVQQCQICLQAKPDRAKYPGLLQPLPVPEGAWQVVSLDFIEDGQTERVNQCLEIYLRCFVHSAPSKWAAWLHLAEYWYNTSYHSAVQSTPFEVLYGHSPCHFGISLQDCAIPDLHVWLKERQLMQKLVQQHLHRAQQQMKHFADKKRSFRTFAIGDWVYLKLQPYVQTSVAVRANHKLAFKYFGPFQITAQIGTVAYKLQLPPTSSIHPVFHVSQLKSATGFTGHVQSHLPSSISALQVPWRILDRRLAKKGNSTISQVLVQWSESPPEDATWEDYEELHARFPAALAWGQANSQGVGLVRDSPLSTVEGGAIGGKDLNAEEEEDVQTSQSDISTGNGHRPVRERRPNPRVLGPEWVAADNDKLLRPLAVHGARHGHADDERVGQRGQREAGDGPATAQPPLLMNRAQTPMTAMGSSGLDSDPLGSTKRGLSSAEAARGSGEARAARSRAARSGYEEAAARCSCRSWSSSRAARRRSERPGDEESGASAKAREERGER

SEQ ID NO: 16577 - protein, 1463 aa, Oryza sativa
  Clone ID: TF_OSC400800j.C1.p14.fg
MAEPTIADLLKEIKNMSAELTSLKADMATMKDKASTAASTETRHPDGLRDLDLPPRPKKWDFPRYDGTTDPLLFLNKFEAYFRHHRTMAEERVGMASYHLDDVTQTWYTQLLEDEGTPTWGRFKELVNLRFGPPLRSAPLFELSECRRTGTVEEYSNRFQALLPRAGRLDESQRVQLFTGGLLPPLSHAVRIHHPETLAAAMSLARQVELMERDRPAPPPLRAPPRGLLPAPAPRLALPAPAQQLALPAPPAAAPQGRDAANPRRLTPEEMAERCRQGLCFNCNEKFTRGHNRFCRRLFFVDGVEIDDVAIEGDAAAAAGDTEAPVFSLHAVAGVPIADTIQLQVTVGDASLLALLDGGSTHSFIGEEAARRAGLPIQSSPRMTAIVANGERVACPGVIRDAAFTINGSTFHTDLFVMPLAGFDVVLGTRWLGTLGPIVWDFTSRSMAFQRDGQRFAWKGVASTSTTHLRTLAAASGTLLDELLVAYEDVFGEPTGLPPPRGRDHAIVLKPSSAPVAVRPYRYPAAHKDELERQCAAMIEQGVVRRSDSPFSSPVLLVKKADGSWRFCVDYRALNALTVKDAFPIPVVDELHGARFFTKLDLRSGYHQVRMRPEDVHKTAFRTHDGLYEFLVMPFGLCNAPATFQALMNDVLRPFLRRFVLVFFDDILIYSETWTDHLRHLRTVLSVLRQHRLFVKRSKCTFGSPSVSYLGHVISEAGVAMDPAKVQAIHEWLVPRSARAVRSFLGLAGYYRKFVHNYGTIAAPLTALTKKDGFSWTEDTAAAFDALKAAVTSAPVLAMPDFAKPFTVEGDASTHGFGAVLVQDGHPVAFFSRPVVLRHRALAAYERELIGLVHAVRHWRPYLWGRRFVVKTDHYSLKYLLDQRLATIPQHHWVGKLLGFDFAVEYKPGAANTVADALSRRDTEEGAILALSAPRFDFISKLHDAQRQDPALTALRDEVSAGTRTGPWALVDDLLQYNSWLYIPPASPLAREIIEATHEDGHEGVKRTMHRLRREFHIPNMKQLVQDWVRSCAVCQRYKSEHLSPAGLLLPLPVPQGVWTDIALDFIEALPRVRGKSVILTVVDRFSKYCHFIPLAHPYSAESVAQAFFAEIVHLHGVPQSMVSDRDPIFTSTFWRELMRLMGTKLHMTTAFHPQSDGQSEAANRVIIMYLRCLTGDRPRQWLRWLPWAEFIFNTAYQSSLRDTPFRVVYGRDPPSIRSYEAGDTRVAAVAKSMEERAEFLFDIRYRLEQAQAVQKLHYDKHHRHVAYQVGDWALLRLRQRPTTSLPQSGTGKLKPRFYGPYRITELINDVAVRLELPAGARLHDVFHIGLLKKFHGPPPGAPPALPPLHHGAIAPEPERAVRFRLARGVRQALVQWKGESPASATWEDIEVLRAKYPALQLEDELSLEEGGDVMWGKTYTRRHRARDVRRAAERAGARMDAERAVIAGTAHATEDEAISASG

SEQ ID NO: 16578 - protein, 1424 aa, Oryza sativa
  Clone ID: TF_OSC900060j.C1.p13.fg
MAAAETELGDLSQKVVNLTSNLNNILGSLTKLETWIPAVDVGIQGLNNVVEEISARVTKLESMLATATFAAAQTPVGPDNVENHQGNASKALVAHERTLVKGKSRLPISPVNFDLGEASVQSQFSSRSSSPRLPKTNFPRFDGDNPKLWKKNSEKYFDMYQVPYDSWANFATLHFVGNAALWLQTYEALHSVETWPELCVVVHNKFGKDKYQEHLEELESLRQTSGVDAYYSKFEELMHRVLVYNQAFDETYFVTKFVGGLKTEIKAAIKLHKPRTVDAALSLAKTQEDLALEIKKGGQKSTYKEGFKSTAFRVNYQGKGILGQAPDDTTKTEEKPKWEDCFESLKAARKAKGECFKCGEKWGPGHKCPKYVQLHVLEELLEVFQLREDDEVCQNEEAESSEEELVVSECVVSGTMGKKTIRLQGLIQNHEVLILIDSGSSNSFISQQLVEKLGLAVTDIPLSQVIIADGGVMQCDKLAIGVEWWCQGHSFTNDLKVLKLGGYDIILGMDWLEHHSPMWIHWQRKKLRFTYQGKRINLVGVKENLSDCKSVTSKQLKGMLKTGAVSQVVQLCSIAEESLETELPPTISAVLKEFQEQFKAPSGLPPHRSFDHSIPLLSGSKPVNVKPYRYAPKQKDEIERQVKEMLLQGIIKPSSSPFASPVLLVKKKDGTWRFCVDYRGLNDITVKNKYPMLVVDELLDELSGAQWFTKLDLRSGYHQIRLVQQDEHKTTFKTHQELYEFRVMPFGLTNAPASFQGLMNTIFDKMIRRNVLVFVDDILVYSKTLEEHVQHLREVFAVLQQHKLFVKASKCSFAKQQLEYLGHIIGAQGVATDPSEVHAVQDWLVPRNLKQLRGFLGLTSYYRKFIKNYGIMTRPLTALLKKGVPFKWAELQQQAFSQVKWAMVQAPVLALPDFSQEFIVETDACDKGIGAVLLQNGHPIAYLSKALGVKAQALFTYEKECLAILMAVNKWRAYLQNNEFVIQTNHKSLTHLGEQKLTTSMQHKAFIKLMGLQYKIRYKQGAENRVADALSRRDADEELSAISVGRPKWLESVVDWYDQDEEAKQLLAQLIINLVGVEHFTLTNGVISGLGGHSRITATYNRIKNLFYWPGMKKDVYQYVSSCDICQQAKPEHCKSPGKLQPLPIPEQAWSTISMDFIEGLPKSEGFDTILVVVDKFSKFAKFIPLILSQHYKLPQLLSRMFMIHLGCHSALKKSPYEVLFARKPTPFGLIDVGKSTVPDVQIWLQNRAHMNEVLHQQLTRAQQRMKHQADKHRSERVFAVGDMVYLKLQPYVQMIVARRSCQKLCFMYFGPYKILERIGEVAYRLDLLQSSQIHPLVHVFLLKKVIHSGIQVQADLPENCVSEEAEVVPEEILSRQLIKRGNSAVPYGLIRWTGLPASLATWENLRQLQLRFPGAPAWGQAVS

SEQ ID NO: 16579 - protein, 504 aa, Oryza sativa
  Clone ID: TF_OSC401061j.C1.p30.fg
MARGKNHPDGEEEEAPAAAGEEEAPVEMDEEGEMEEEEEEEQGEGEGEERDEGEEEEEWEDAEEVEGGEESEQAAAEEEDSPLVVVEAEAAAPVVDGSPPKLAEGYYEIEDIRRRRLRKGKLQYLVKWGSQWEGGAWDLAAPELSGRIRTEDWKDQEEITYCLPKQVRVDVDHVVKVPRLRMAVDTHIAIFGTIHLYEFSYEDQEQDCVQKKQQYGRRGWPESANTWEPLENLSACSDIIDAFEMRLQSPRPGRKRKRKITTTPVAGSNPSHGKRGRPRLDAKSHTRAPAPEPKQLPCRTSCRRATNCSSKTVAGLDASGSVVRNQLAQNIVQEGSSSVISRTPCQELPLSIRLTDQQNEHHLVNGSSNSENLVKVPPSQGGQVTGAKKRKSGNVRRFEQNKPTQGQGECGALVVAEDVGSTEGETGDKKKTEGCPNRVHITKIIKPVRFAAAVNNDVQQVSITFKALRSDGQEVMVDDKELKANNPLLLISYYEQCLRYNPTS

SEQ ID NO: 16580 - protein, 2932 aa, Oryza sativa
  Clone ID: TF_OSC400390j.C1.p75.fg
MTKPSSKTEVEPSHVIPVTLDDFEGEDRKAMEEHINELTREALMRATTRTRQGVIIKPGPRPKLAPDMEKVDGFLRNRLGSLMDDYTLKDKAYTTVSQSPIDPIGSKTDGAAFTAGPTGPDGRGYPPDTRQGQYNHIASQTQPIRPPNPPPNPQGPNNMEDMISDIMRNRFGIETRNRARAYKKPYPDYYDNVSFPRNYRVPEFSKFSGEDVDYSDASDSEEEGDHDIYVAEWSWTNKNKPFVCSNLMPTLRKDRQSEVKYSFDVAKCDKILIIFCKRSKLDYLKAMSYLLKKRRAYCKWHNSHSHSTNDCNVFRRQVQSAIDEGRLKFTDGSKMKFDHDPFPVNTINFNNKKVLIRPEQAESTKGKKVVIGEPRPKMMVPKKQEIGVWKENKGEASTSKAPRKTKVTFDMLLEKYERQGGERDHNKGKRPRSPPRERFGHSPRRSCSPPYFHPQDMSWGPYPMPPPGYPYPYFMPGGATPPMYNHMPPMRFNQGWGGPRRPIHERLSSPNKSRFYGKNRVNEEKREGKRVKIEERTSEVITIKIGSHDVPIPSEDGVGKSPSKKSEAGSSSSQSAGLTRPSGRSDRGHVAGPTGPSGRSDRRSDDGLTDASGRSDRVSNVDLTGASGRSDRRSAAGLTGFQRRFDGRVAKGDVRASSSSNKVNKGHYLPPGTEPNPRWMPKDLTATQKRRLQRLRAQELREKKAEEKRDKRFNELRPPPFCAMDEAEVAQFLLGPKDAVFEKPDESNRHMKPLYLKGHVDGKPVSRMLVDGGAAVNLMPYSLFKKLGREGDELKKTNMILNGFNGEPTEARGIFSAELTVGNKTLPTAFFIVDVQEASLEWLQKRVQEYRSTKNDIGETVEDFDEVEKLGQGFTSADPLEEVDIGDGTKPRPTFVQKNMKADYKVKVIELLKEYVDCFAWEYHEMPGLSRELVEHRLPVKPGFRPYKQPLRRFNPLLYDRVKEEIDRLLKAGFIRPCRYAEWVSSIVPVEKKGSGKIRVCIDFRYLNKATPKDEYPMPIADLMINDALGHKVISFLDGNVGYNQIFMAEEDMYKTAFRCPGFVGLFEWVVMTFGLKNAGATYQRAMNLIFHDLLGIILEIYIDDIVVKSDGMEGHIADLRLAFERMRRYGLKMNPLKCAFGVSAGKFLGFMVHERGVEIDPKKIEKIHDFKAPTCKKEVQKLLGKVNYLRRFISNLAGKIDAFVPILRLKKEADFTWGAKQKETFEELKRYLSTPPVVRAPKAGKPFRLYVASEDKVIGAVLTQEEDGKEYIITYLSRRLLDAETRHIARCDNSRANDLAQQTSGYNVKRGLFLILEEPVLDFKFLRKIGKVGDQRRSDRRCTAGLTVTRGGLTGHMPPGHRFVLVATDYFTKWAEAVPLKNMTHTEANGQAESSNKTLLKLVKKKIEEHPKRWHEVLSEALWAHRIYKHGATKVTPFELVYGQEAVLPVEVNLGSLRYIKQDDLSSEDYETFMGDNLDEVTDKRLKALEEIEKEKKRVAKAYNKRVKAKLFQVGDLIEVVGDSRITAKLKVLRSCLSTCQKSCQQFQKMDFPRYDGTTDPLIFVNRCESYFHQQRIMEEEKVWMASYNLEDVAQLWYIQLQEDEGTPRWNRFKDLLHLRFGPPLRSAPLFELAECRRTGTVKEYQNSFQALLPRAGPLQEAQLVQLFTGGLLPPLSHAVRIHNPQSLAAAMSLARQVELMELDKPAPVPARPAPRGLLPALPQRLALPAPPASAPVAKMEAKPVKRLSQEEQAERRRLGLCYNCDEKYSRGHNRVCRRIFYIDGVTLTDAEDAALDADQDGEAPVFSLQAVAGVPICDTMQVRVMLGAVTLTALLDTSSTHNFIAEEAARRTNLAIQPKPRLTATVANGEKIQCPGVLRQAPITIDGEEFHVDLFVMPLAGYDLVLGTQWMVTLGPITWDFTARTMSFSRHGMEVRWSDVAARPEPTVAVIAASEVLLDGLLASFEGVFAEPSGLPPQRARDHSIVLKPGALPVAVRPYRYLAAHKDELELQCAAIIEQGIVRRSDSAFSSPVLLVKKPDGSWRFCVDYRALNALTVKDAFPIPVIDELLDELHGARFFTKLDLRSGYHQVRMRPADVHKTAFHTHDGLYEFLVMPFGLCNAPVTFQALMNDVLRPFLRRFVLVFFDDILIYSKTWADHLRHIRAVLSELQRHQLFLKRAKCAFASASVAYLGHVISEAGVAMDPAKVQAVRDWPAPRSARAVRSFLGLAGYYRKFVHNYGAIAAPLTALLKKDSFSWSGEAATAFDALKAAVTTAPVLAMPDFSKPFIVECDASSHGFGAVLVQDSHPVAFFSRPVAPRHRALAAYERELIGFVHAVRHWRPYLWGRRFVVKTDHYSLKYLLDQRLATIPQHHWVGKLLGFDFTVEYKPGHANAVADALSRRDTPEDGTILALSAPRFDFVDRLRHAQTTDPALVAMHEELTSGSQALPWAAVDGMIQYSGRLYIPPASPLLPELMAAVHEEGHEGVQRTLHRLRRDFHFPNMKQLVQDLVRACPTCQRYKSEHLHPAGLLLPLPVPQGVWTDIALDFVEALPRVRGKSVILTVVDRFSKYCHFIPLSHPYSAETVAQAFFADIVRLHGMPQSIVSDRDTVFTSHFWRELMWLVGTKLHMTTAFHPQSDGQSESANRVIVMYLRCLTGDRPRQWLQWLPWAEYVFNTAYQTSLRDTPFRVVYGRDPPSIRSYEPGDTRVAAVAKTMEERDKFLADIRSRLEQAQATQKRHYDKAHRHVTYQVGDWALLRLRQRAASSLPQTVAGKLRPRFYGPYRITELINDVAVRLALPPRARLHDVFHIGLLKKFHGSPPDAPPPLPAVHHGAVVPEPERAVKTRLARGVRQLLIQWKGESPASATWEDADAFIAKYPDFQLGDELALDEGGDVMWGRTYARRRRARDVRRATERAQRTAEEATGSG

SEQ ID NO: 16581 - protein, 722 aa, Oryza sativa
  unsure (1)..(722): unsure at all Xaa locations
  Clone ID: TF_OSC401613j.C1.p1.np
SVTKWTPPKTVSQIRSFLGLAGCYRRFIENFSRIARPMTXLLKKDEKFKXTAECDKSFEELKKRLVSAPVLILPDQTKDFQVYCDASRHELGCVLMQEGRVVAYASWQLRPHEGNYPTHDLELVAVVHALKIWRHYLIGNRCEVYTDHKSLKYIFTQPDLNLRQRRWLELIKDYDMSIHYHPGKANVVAYALSRKSYCNALCTEDVCKELQQELERLNVGIVEHGFVAALEARPTLVDQVRAAQVNDPEIAELKKNMRVGKARDFLEDEHGTIWMGERLCVPDDKELKDLILTEAHQAQYSIHLGSTKMYQDLKEKFWWANMRREIAKFVTLCDVCQRVXAEHQRPAGLLQPLQIPEWKWEEIKMDFITGLPRTSSGHDSIWVVVDXLTKVAYFIPVHTSYTGKRLAELYLSRIMCLHGVAKKIVSDXGSQFTSKFWQKLQEELGTRLNFNTAYHPQTIDGQTERVNQILEDMLRACVLDFGGTWYKSLPYAEFSYNNSYQASLQMAPFEALYGRKCRTPLFWDQTGERQLFGTEVLTEAEEKVRTVRERLRIAQFRHKSYADNRRRELTFEAGDYVYLRVTPLRGVHRFQTKGKLAPRFVGPYKILERRGEVAYQLELPSNMIGIHDVFHVSQLKKCLRVPEEQADSEHIDIQEDLTYVEKPVCILETRERRTRNKVTRLYRVQWSHHSEEEATWEREDELKAAHPHLFASSSESRGRDSV

SEQ ID NO: 16582 - protein, 1261 aa, Oryza sativa
  Clone ID: TF_OSC17178j.C1.p4.fg
MVNTRNGSRAVGEGSNGEERTDGGHPNSASGHGPPPLPENPTLAQVMAHQTQMMAAMMQQMQQQHQQMHQRMQQQAEQQQFGPPPPQSKLPEFLCVRLPTFSSTTNPMEVNDWLHAIKKKLNLLQCNDQEKVAFATHQLQGPASAWWDNHMATRPPGTEVTWAEFCRSFRKVQVPDGVVAQEKREFRILHQGNRTVTEYLHEFNRLARYSPEDVRTDAEKQEKFLAGLDDELTNQLISRDYADFEKLVDKAICQEDQRNKMDRKRKAAQFRSNQGSHQRPRFTPGQQGGPTTMIVRQHRPFNSSSFHQGASGSQNHQGTPSAQAKKETGAKPRSCFNCGEHGHFADKCPKLRRAGPRFAQARANHASAEEAQAAPEVVLGTFPINSIPTTVLFDSGATHSFISKKFVGMHGLRKEEISTLMRVHTPGNSSTSISYSPSVLIEIHRSRFLANLILLESKDLDVILGMDWLTKFKGVIDCANRTVTLTNEKGETVVYKSLVSPKQGISLNQIEVENLVATEEKSSRKLEDIPIVCEYPEVFPEDLTTMPPKREIEFRVDLAPGTTPIYKRSYRMAANELAEVKKQKKDRTKRMCVDYRALNEVTIKNKYPLPRLDDLFDQLKGAKVFSKIDLRSGYHQLRIREEDIPKTAFTTRYGLYECMVMSFGLTNAPAFFMNPMNKVFMEFLDKFVVVFIDDILIYSKSEEEYEQHLRLVLEKLKEHQLYAKFSKCDFWLSEVKFLGHVITAQGVTAECDKSFEELKKRLVSAPVLILPDQTKDFQVYCDASRHELGCVLMQEGRVVAYASWQLRPHEGNYPTHDLELVAVVHALKIWRHYLIGNRCEVYTDHKSLKYIFTQPDLNLRQRRWLELIKDYDMSIHYHPGKANVVAYALSRKSYCNALCTEDVCKELQQELERLNVGIVEHGFVAALEARPTLVDQVRAAQRVKAEHQRPAGLLQPLQIPEWKWEEIKMDFITVLAEIARGIGNPAELQHSLPPADHPDGQTERVNQILEDMLRACVLDFGGTWYKSLPYAEFSYNNSYQASLQMAPFEALYGRKCRTPLFWDQTGERQLFGTEVLTEAEEKVRTVRERLRIAQFRHKSYADNRRRELTFEAGDYVYLRVTPLRGVHRFQTKGKLAPRFVGPYKILERRGEVAYQLELPSNMIGIHDVFHVSQLKKCLRVPEEQADSEHIDIQEDLTYVEKPVCILETRERRTRNKVTRLYRVQWSHHSEEEATWEREDELKAAHPHLFASSSESRGRDSV

SEQ ID NO: 16583 - protein, 1255 aa, Oryza sativa
  Clone ID: TF_OSC23279j.C1.p1.fg
VRMLDQQRNIYLGQAGEGNQYAEAVLKGPRLEIPLFSGEDPIDWLKQCEKFFEITGTPLDQWVNLAVAHLNGRALKWFGGIGLPWQVIAWPQWCSMVCTRFSAASEHEAIELFQNVKQFGTTVEQYIDKFEDYVDLVKRDHPYLQEQYLTSCFIGGLRADIKYDVCGLLMPEKWWEISTETGIRIHLEVIRGGMLTIGDKTEVREIGERKRSAGSVKNLGFQGTSDYALRNSYPLKNTDTKKVVVAGGGELKTDVMVPDISYEIQGECFTNQFKLLPLKGYDIIWGADWIYNYSPISLDLKQRILGITKGNKVILLQDFTKPNKHFQISGKRLEKMLKKGALGMVIQVNVMSETVEEEGHVIPEDISDIIQQFPAVLKEPKGLPPKRECDHVINLQSGAVPPNIRPYRVPHYQKEAMENIINELIESKEIQTSDSPYSSPAVMVRKKDGSWRMCVDYRQLNAQTVKNKFPMPIIEDLLDELNGARIFSKLDLRSGYHQIRMAEKDVHKTAFRTHLGHYEYQVMPFGLTNDPATFQSLMNHVLAPFLRRFVLVFFDDILIYSKTRAEHLEHVKLVMQALQDNHLVIKLKKCAFGLASVSYLGHVISQDGVATDPKKVGKIKNWPTPKDVTDVRKFLGMTGYYRRFIQGYGTICRPIHDMLKKNGFQWGADQTTAFETLKHKLRTSPVLALPDFDQAFTIEADACGVGIGAVLMQGGRPIAFFSKALGPKAAGQSIYEKEAMAILEALKKWRHYVLGSKLIIKTDQQSLKFMMGQRLVEGIQHKLLLKLMEYDYTIEYKSGKENLVADALSRLPQKEAVADRCHPMTVVIPEWIVDIQRSYENDVQAHKILSLIGTAADPDREYKLEAGLLKYKGRIYVGEATDIRRQLITTYHSSSFGGHSEIPDMAWTHITMDFIEGLPKSQGKDVILVVVDRLTKYAHFIALAHPYDVEQVVEAFMNNIHKLHGMPMVIITDRDRIFTSSLFQEIFKAMKVKLRFSTAYHPQMDGQTERVNQCLESYLRNMTFQEPHKWYSWLALAEWWYNTTFHTAIQMTPFKAMYGYSPPQINEFSVPCNISEEARVTIEEKEAILNKLKNSLADAQHRMKYFADKNRTERNLEVGDMVYLKLKPYRQSAFGIRGSLKLRSKFYGPFKVLQKIGQLAYKLQLPDDAQIHPVFHVSQLKKHLGKHAIPMSNLPSVGPDGQIKTEPLAVLQRRMVPRKGVAVTQWLILWQNLSPAEATWEDASVIQAMFPSFNP

SEQ ID NO: 16584 - protein, 1617 aa, Oryza sativa
  Clone ID: TF_OSC10179j.C1.p2.np
TKQTAKIMENEAKLDLLLKKMEETERKREEGEKKQSLEMRVFKEAVESWIPAVEKKVDVLQSTVDMLQTQVAKLSAPPPTNSATPSSSSPSGAAGVRAIDSTGLNGQGPPPGNGTLASQNFSPFHCRVDQGPPPGNGTLASQNFSPFHCRVDASAMNSFQSGTSVGLTGGVAPMTCPKFDGDNPIMWKVNCESYFDLYGIHPINWVKVATLNFTGNAAFWLQAVRSQLEGVTWEELCDRVCTRFNKDRQQALIRQWFKICQTGTVADYVEKFDSIMHQLMAYDPTFKPVYFVTKFVEGLKHEIRSAILLQRPGDLDAACTLAFLQEEALEGDKGIDIKKGEGSGSAKHSVRVALPLPTPPTVKGGSPSFAEERRISDNGRSQNREMDRLATLKAYRRSKGLCFTCGEKWGREHKCASSIQLHVVQELLAVLQPDISSEEFIVQSDDSLMAISIQAINGTESNHSIRLRGWLQGIEVLMLVDSDSTHSFVDHQLGLKLTGVKSMASPARVKVADGGHLNCSLYVNNCDWLTQGIHFKSNFRLLSLGTYDVILGMDWLEQFSPMKVDWVQKWLEFQFQGSTVRLQGIQSHISSCLPITPDQLTGLLKSGSALFLIHLDSNHTSHITTIPAHVQPLLDEFQSVFQEPTELPPKRLCDHKILLPGSKAVFIRPYRHTPAQKDEIERQVKEMLQNGIIQHSSSPFSSPALLVKKKDGSWRVCIDYRQLNAITKKGTYPMPIIDELLDELAGAKIFSKLDLRAGYHQIRMAEGEEFKTAFQTHSGHYEYKVMSFGLTGAPATFQGAMNDTLRPLLRKCALVFFDDILIYSPDMNSHLDHLKQVLQLLDTHQWKVKLSKCDFAQTQISYLGHIISGQGVSTDPSKIQSIVDWAVPTTLKKLRGFLGLAGYYRKFVKDFGTLSKPLTQLLKKDAPFVWSAEVNQAFQALKHALTSTPVLALPNFQQGFTIETDASDIGIGAVLSQNQHPVAFVSKALGPRTQGLSTYEKECLAIMMAVDHWRPYLQFQEFLIITDHHSLMHLTEQRLHTPWQQKAFTKLSGLQFQIVYRKGKHNAAADALSRHVPEETSEFLGISTCSPVWLQDILHGYDQDPLALSLLTGLAVNPSSYPHYSLSKGLIKHKGKVWVGNNSNIQQQIISALHDSPLGGHSGFPVTYKRIKSLFSWPHMKLTVQKQLASCAVCLQAKPDRSKYPGLLQPLPVPDGAWQIISMDFIEGLPKSYHQDCILVVVDKFSKYAHFMPLSHPFSALDVAKVFMLNVYKLHGLPQIIISDRDKIFTSALWEQLFLRSGTKLHLSSAYHPQSDGQTERVNQCLEIFLRCFVHATPAKWSLWLHLAEFWYNSSYHSALNKTPFEVLYGYPPSHFGIRADACVISDLDSWLSERHLMTQLLRQHLNRAQQVMKTQADKKRSFRSFQVGDWVFLKLQPYVQSSVAKRANHKLSFRYFGPYQILSKVGSVAYKLQLPADSMVHPVFHVSQLKGTQNFKHSIQSQLPNITDHIQYPVQILDTRIQKKGNKVVRQILVCWSNLPAVEATWEDEEELKQRFPSALPWGQVSLQGVGFVSSNTASGVAVSDEAQENTITRPLKRATRIKKSNVRLSGPEWAC

SEQ ID NO: 16585 - protein, 112 aa, Oryza sativa
  unsure (1)..(112): unsure at all Xaa locations
  Clone ID: TF_OSC10179j.C1.p6.gp
DHIQYPVQILDTRIQKKGNKVVRQILVCWSNLPAVEATWEDEEELKQRFPSALPWGQVSLQGVGFVSSNTASRELPLSDEAQENTITRPLKRATRIKKSNVRLSGPEWACKX

SEQ ID NO: 16586 - protein, 1370 aa, Oryza sativa
  Clone ID: TF_OSC900333j.C1.p7.fg
MEAMEGRLVDMIQSLVKKVEEVNVMGSKLEIIDKKLEQYGEQLGKVQAKVDLSMDSLGQVQMEQAFVTKALKEGNPHAAPTSTRPGKAPILQTPSTASTSSTPPTPPPLPNLNGYASVQPIHSAARDHAEVEHKRNWTPKMDFPKFDGLKDELHYSVAAQLPENVHQAFQVALIFESAHRMKKGVHKKEGYLTKGIDTPAKVPGDIWKAQQLKEYHKTHGLCFKCGDKYAPRHVCAKQEGPQLKAMEVEQNSEMLTDEMLDVVACLETQPENMLLSIQAISGSVAPKTIQLRALVKDQVVLILVDSGSSHSFINEALCQKLQLSTVPHPSYDVKVANGALLTCASHVPHFRWLLQGQTFQFPVKVLALGGYDMVLGMDWLEQHSPIQCDWNLKTISFNHQGSWVTLQGIQASAMHSLTAATPDQIMNWFQGNDIWAMAVVQQITPPLNSVIPSTVQALLDKYQFVFSAPDSLPPHRAVDHALPLLPGAVPVNCRPYRYSPAQKDEIEKQVCEMLEAGLITHSCSPFASPVLLVKKKDNTWRFCVDYRRLNTLTVKNKFPLPIVDELLDELTGAQYFSKLDLRSGYHQIRMLPEDEYKTAFKTHHGHFQSRVMPFGLTNAPATFQYLMNSIFAPFMRKFVLVFMDDILVYSHSWAEHLSHLELVFQTLQNHQLFAKLSKCSFATPTLEYLGHTISKDGVATDPAKTACMQQWPVPANITELRGFLGLTGYYRKFVHHYGIIAKPLTKLLQKNVKFVWTPEADSAFHALKQAMCSTLVLALPDFSKPFALETDACDIGIGAVLLQDGHPIAFYSKAIGTQNTIGGHSGGQATYQRLKKLFMWAGLKQQVEEFVQQCAVCQQAKHEHCKYPGLLQPLPIPEGAWQEVCMDFIKGLPLSRGFDVILVVVDRFTKYAHFIPLKHPFTALQVAEVFLNNVTKLYGLPKIIVSDRDKVFTSAFWQALFKRFEVHLHLSSAYHPQSDGQTERVNQCLEMYLRCAVSNTPSKWCYWLPLAQYWYNTTFHTAIQCSPHKALYGVDPHHGILPSFALEDVDTSTSSSEADNLLKDRTFYASLLRHHLTRAQHRMKQAANANRTLRSFQVGDMVYLKLQPYAQHSVVSRPCPKLAMKYFGPFSIVSKIGSVAYKLQLPEASRIHPVFHVSQLKQVIPNNAPVFSTLPMSLELDVQSLSPSAILDRRMVKRGNAAVVQVKVRWGSLPEDFSTWEDYDVLCVRFPEVKSWGQDSSHGGGTVIAAAMTESKSKAEEKKKGKAERLVWFDDSRPYVVLMCTISQGIGGFVFGNERSESKEDSYVERFLDCISNGTIPDDSRPVLLNVLKEDHEDAELVRGALETFVSAVTPIETSKNRGSACISEL

SEQ ID NO: 16587 - protein, 1629 aa, Oryza sativa
  Clone ID: TF_OSC401333j.C1.p5.fg
MFKALFLMVDEEEPLQLETEINQETRTKNQTLGRIGRREEKEERLKSEKVASGGDGRRRGERRVVGAPSNPSHVRVKEQPLSEGAKSVAEDAGDDADSGRREDELEAAEGEVVRRATRPVKINLKYYGPDWAVMSQESKLDVLLRTIEENEKKRMEAEARTRDDLADLKKMVEICLPKMEEKVEKLSESVQTLSHKHHTDLSTSLPPMTCPKFDGENPQMWKSNCEQYFDIYGINPMHWVKVATLNFSGNAAFWLQSIRSQIMGITWQTLCDLICARFTRDIQEALIRKWFHAQQNSTVTEYVEQFDSIMHQLMAYDSALTPVYFVTKFIEGLRDDVRGAVMLQRPQDLDSACSIALLQEEILESNKSTTHRRSDNHIAFRPVPKLNNYVPVPPGQRSVAVSAHDDKKGVESAKSREDKFASLKSYRRAKGLCFVCGERWGRDHKCATSVQLHVVQELLEAMRSECNSDDILTAKDPIESVEAIDGGLMAISQQALLRGWVQGTEILMLIDSGSTHSFIDESIGSKLVGLIPLSRSVTVKIADGGTMKCTQQILGCRWWTQGHYFKSDFKLLNLGSYDAILGMDWLEQFSPMQVDWVNKWLEVVIDGQPVRLYVNPRPKGLPPKRICDHHIPLLPGSKPVNLRPYRFNPALKDEIEAQISEMLQSGVIQPSQSAFASPALLVRKKDGTWRLVIDYRQLNAITVKCSYPMPVIDELLDELPGAKWFSKLDLRAGAPATFQGAMNETFKSVLRRFALVFFDDILIYSPDLPSHLDHLKQVLTLLQQHHWQVKLSKCSFAQQQLTYLGHVISAEGVSTDPSKIQEIVNWETPTTKKKLRGFLGLAGYYRKFVKGFGLISKPITQLLRKGVPYKWTLETETAFQQLKQALVSAPVLALPDFSLPFTVEIDASDSGIGAVLSQNKHPIAYISKALGPRNRGLCHARNFYPKFQTLTYGRDRSVHDRLTGEGDDDVGDDVTTGGGGSAARTAHARRRTAALRHERRTPTGSGRHGELTGDQSDGGRGTDGDGDEEEAAANFGLTAATVLRRSSAAAKEWTRTAATWRPRRRSSRATATAGTAAAHGWSDGGDGGARAHGARAFPTTRGEGKGCDRLSTYEKECMAILLAVDHWRSYLQLGEFIILTDHHSLMHLSDQRLHTPWQHKAFTKLLGLNYKICYRKGTSNAAADALSRKFQSDSELSIISSCVPSWLQEVAKGYEHDPYSSDLLSALSVQLDCKPGFQLQSGIIKYKGRIWIVTYSKIKKLFAWQGMKSQVKDFVQQCQTCLQAKPDRSKYPGLLQPLPVPDGSWEVIIMDFIEDRDKIFTSQLWTYLFSASGTKLNLSTSYHPQSDRQTERVNQCLEIYLRCFAHANPSKWVTWLHLAEYWYNTSYHSSLKTSPFEVLYGHSPRHFGINVDTCEIPDLQEWLKERKLMQALVQQHLHRANQQMKHMADKKRSFRSFAVGDWVLRKIGTVAYKLQLPATASVHPVFHVSQLRAAKGYKELSSLQLPKANSALQVPSQILDSRVVKRATDAVLQVLIRWSDSAAEDATWENMEDLRTRFPTALAWGQAKFQGEGIVKEQPLSEGAKSVAKDAGDDADSGRREDELEAAEGEVVRRATRPVKINQKYYGPN

SEQ ID NO: 16588 - protein, 963 aa, Oryza sativa
  unsure (1)..(963): unsure at all Xaa locations
  Clone ID: TF_OSC900010j.C1.p13.np
PPNLRPYRVPHYQKAAMENIITDLVESKEIQESESPYASLAVMVRKKDGSWRLCVDYRELNSQTVKNKFPMPIIEDLLDELHGARIFSKLDLRLGYHXIRMAEQDVHKTAFRTHMGHYEYQVMPFGLTNAPATFQSLMNQVLKPFSRKFELVFFDDILIYSRSKEEHLDHLKLVLQVLKENDLVIRLKKCAFGLSEVSYLGHVILQNWVATDPKKVDKISRWPIPTDVTELRKFLGMIGYCRRFIKGYGVICRPMHDMLQKQGFQWGPEQTAAFNELKSKMCTSLVLAMPDFSKEFVEADACGSGIGVVLMQSGRPIAFLSKSLGPKADGQSVYEKEAIAILEAIKKWRHYILGGKLVIRTDQQSLKFMMNQRLVEGIQHKLMLKLMEYDYSVEYKQGKQNYVADALSRMPIIQEKEEESCQAITIVVPDWIEDIKRSYDDDVQAHKLLSLVGTEADPNGEYRQESGLLKYKGRIYVGQGTNIRTELLRACHASSFGGHSSMRATYHRIKLLFYWPRLKKEVENFVRECPTCQVTKGENVHIPGLLEPLEIPDMAWSHITMDFIEGLPMSRGKDVIFVVVDRLTKYAHFLALSHPYAVEQVVEDFMDNIHKLHGMPNAIITDRDRIFTSGLFHKIFKAKKVQLRFSTAYHSQTDGQTERVNQCLESYLRNMTFQETKNCSPWLALAEWWYNTTYHTAIQMTPFKAXYGYSPTQINEFSIPCNVSAEGRMTLEEKEAILQKLKGSMELAQKRMKYFAGKNRTERVFETGDMVYLKLQPYRQTALRIRGSLKLRSKYYGPFKIIQKVGKVAYKLQLPAEAQIHPIFHVSQLKRHLGTHAIPMANLPAAGPDGQIKTEPVAILQRRMVPRMVAVTQWLVLWQNLSPADATWEDATVIQGMYLDFHPXGQECCHGGGLTKLFDEGSCRRREAYAQAAVCYQHXPYAVPGRWSPQLSRGPQPRWXVLL

SEQ ID NO: 16589 - protein, 1476 aa, Oryza sativa
  Clone ID: TF_OSC401054j.C1.p44.fg
MGDDLKSTLETLAKTLASLQSSSEATTKAIEDNTQAIAALSVARTTEKASTESSGTPAPDRPPKHWRPEFPKYDGKTDPLAFINRCESFFIQQHVIPAERTWMASYNLQDGAQLWYMHVQDNEGTPTWERFKELLNLRYGPPLRSVPLFELSACRRTSTVEDYQDRFQALLPRAGRLEEAQQVQLFTGGLLPPLSLQVQQQKPASLEEAMSLARQFELMEPYLFPATTSARGVLPTPAPRPSTGPVVKPAPATVTVEGRPVKRLSQAQQEERRRLGLCYNCDEKYSRSHNKVCKRLFFVEGGAIEEGDDTVEDDTEEATVEAPVFSLHAVAGIPLGKPILLQVTLGAASLVALVDTGSTHNFIGEDAALRTGLPVQPRPRLTATVANGEKVSCPGVLRRAPITIQGMAFDVDLYVMPLAGYDMVLGTQWMAHLGTTIAWDVTTGTVSFQHQGRTVSWQSLPPHQRADVHAVSTGTSLVAATGSSSSTPAPTTEPALLDGLLGSFDDVFAEPRGLPPPRGRDHAIHLLPGAPPVAVRPYRYPVAHKDELERQCAVMMEQGLIRRSTSAFSSPVLLVKKADGSWRFCVDYRALNAITIKDAYPIPVVDELLDELHGAKFFTKLDLRSGYHQVRMRAEDVAKTAFRTHDGLYEFLVMPFGLCNAPATFQALMNDILRIYLRRFVLVFFDDILIYSNTWADHLRHIRAVLLLLRQHRLFVKRSKCAFGVSSISYLGHIIGATGVSMDPAKVQAVVDWPQPRSARTVRGFLGLAGYYRKFVHDYGTIAAPLTALTKKEGFRWSDEVATAFHALKHAVTTAPVLALPDFVKPFVVECDASTHGFGAVLLQDKHPLAFFSRPVAPRHRALAAYERELIGLVLAIRHWRPYLWGRAFVVRTDHYSLKYLLDQRLATIPQHHWVGKLLGFDFTVEYKSGASNVVADALSRRDTDEGAVLALSAPRFDYIERLRAAQTTEPALVAIRDAIQAGTRSAPWALRDGMVMFDSRLYIPPSSPLLHEILAAIHTDGHEGVQRTLHRLRRDFHSPAMRRVVQEFVRACDTCQRNKSEHLHPGGLLLPLPVPTTVWADIGLDFVEALPRVGGKTVILTVVDRFSKYCHFIPLAHPYTAESVAQAFYADIVRLHGIPQSMVSDRDPVFTSSFWRELMRLTGTKMHMTTAIHPQSDGQTEAANKVIVMYLRCFTGDRPRQWVRWLPWAEYIYNTAYQTSLRDTPFRVVYGRDPPIIRSYEPGETRVAAVARSMADRDEFLADVRYRLEQAQATHKKYYDKGHRAVSYEVGDLVLLRLRHRAPASLPQVSKGKLKPRYFGPYRVVEVINPVAVRLELPPRAKLHDVFHVGLLKKFVGAAPPSPPALPAVHHGAIDPEPERVTRSRLARGVRQVLVHWKGESAASATWEDLDTFKERYPAFQLEDELALEEGRDVMWGRTYARRHRARDVRRAGERAAARAQSTSREPQGQVNNSG

SEQ ID NO: 16590 - protein, 212 aa, Oryza sativa
  Clone ID: TF_OSC20914j.C1.p1.fg
MEYYVSKGVFGWVIRLPFSLRFWLLCIVLLLVGIPEFRSLIVIYAVCLPGQVFLKAQPYVQSSLAVRSNHKLTFSLDFPVRLPLVVNPDTIEPVQVLARRVLKKGAGTSEQVLVRWTGQMSEDATWEDAGMLRQQFPTAPAWGQADFDGGRNVADSTVSGTVPDLAIYANPVKKIPVRARRANVGMGLSCVVKMRLYKHLWCGEGVSNMKWM

SEQ ID NO: 16591 - protein, 1670 aa, Oryza sativa
  Clone ID: TF_OSC400555j.C1.p16.gm
MWDYLQAPRYLLVVFNDVPVEQADAGFFNVELKIFDSPPADRGDNPSLNEYTPPSAKAFQNSFEYTDYPNPPIIVVLRGVNVSQPLIHRALAGQLQGILLRRKRRLGLFPHSLHPMVAWREEIINGRVYIIRKDLDNPLPLKSGLPPSQCHWKTLLKIFPILPGGILCNRIRPIYKNLRNKRETFAELRNARRAQRQNARLRQIRPRQGPATLGINALDNLVSRSRRSSSSVADSTSAPATTDPIYDSTTTPAAAPAVAPPNFPPAAAASPASSPSVASCSAHHMGDDLKASIEALSKDMALMHESIKANAASIAANAKAIAALATTTSSSTSGARPGFGDQPPDRPPKHWRPDFPHYDGKSDPLIFINRCESFFLQQRIMQEEKVWMASHNLLEGAQLWYMQVQEDERGTPTWTRFKELLNLRYGPPLRSAPLFELSSCRRTGTVEDYQDRFQALLPRAGRLDEEQRVQLFTGGLLPPLSLQVQMQNPQSLAAAMSLARQFELIEQYTAVPAKAPGRGVLPAPAPRPQLALPAPAGAAKPAPPAATAADNRPVRRLNQAEQEERRRLGLCFNCDEKYSRGHNKVCKRLFFVDSVEDEDEEAPEDEVDAEAPLGATTLVALVDTGSTHNFIGESAAARTGLSVQPRPRMTATVANGEKVACPGVLRHAPITIEGMPFHVDLYVMPLAGYDIVLGTQWMAKLGRMSWDVTTRALTFDLEGRTICWQGAPNQDGPAVRAASADDSLLGGLLDSFADVFTEPTGLPPQRGRDHAIVLKQGTSPVAVRPYRYPAAHKDELERQCAAMISQGIVRRSDSAFSSPVLLVKKADSSWRFCVDYRALNALTVKDAFPIPVVDELLDELHGARFFSKLDLRSGYHQVRMRPEDIHKTAFRTHDGLYEFLVMPFGLCNAPATFQALMNDVLRSFLRRFVLVFFDDILIYSDTWADHLRHLRAVLTVLREHKLFIKRSKCAFGVDSVAYLGHVISAAGVAMDPAKVQAIREWPQPRSARAVRGFLGLAGYYRKFVHNYGTIAAPLTALLKKEGFAWTEAATAAFDALKAAVSSAPILAMPDFTKAFTVECDASSHGFGAVLIQDGHPLAFFSRPVAPRHRALAAYERELIGLVLAVRHWRPYLWGRHFTVKTDHYSLKYLLDQRLSTIPQHHWVGKLLGFDFTVEYKPGAANTVADALSRRDTTEDASVLVLSAPRFDFIERLRQAQDVDPALVALQAEIRSGTRAGPWSMADGMVLFAGRLYLPPASPLLQEDFVRTCEVCQRYKAEHLQPAGLLLPLPVPQGVWTDVALDFVEALPRVRGKSVILTVVDRFSKYCHFIPLAHPYSAESVAQVFFAEIVRLHGVPQSMVSDRDPVFTSAFWSELMRLVGTKLHMTTAFHPQSDGQSEAANRVIIMYLRCLTGDRPRQWLRWLPWAEFVFNTAYQTSLRDTPFRVVYGRDPPSIRSYEPGDTRVAAVAKSMEERSEFLEDIRYRLEQAQAIQKKYYDKSHRAVSFQVGDWVLLRLRQRAPASLSLAVSGKLKPRYFGPYRIAEMINEVAARLALPAGARLHDVFHIGLLKKWHGAPPDAPPPLPNVHHGAVACEPERVIKARLARGVRQVLVQWKGTSAASATWEDREPFFARYPALQLEDELPLDGGGDVIGRTRGCGRSGHGQWLGWKG

SEQ ID NO: 16592 - protein, 1461 aa, Oryza sativa
  Clone ID: TF_OSC420199j.C1.p34.fg
MGDDLKASIEALSKDMALMHESIKANAASIAANAKAIAALATTTSSSTSGARPGFGDQPPDRPPKHWRPDFPHYDGKSDPLIFINRCESFFLQQRIMQEEKVWMASHNLLEGAQLWYMQVQEDERGTPTWTRFKELLNLRYGPPLRSAPLFELSSCRRTGTVEDYQDRFQALLPRAGRLDEEQRVQLFTGGLLPPLSLQVQMQNPQSLAAAMSLARQFELIEQYTAVPAKAPGRGVLPAPAPRPQLALPAPAGAAKPAPPAATAADNRPVRRLNQAEQEERRRLGLCFNCDEKYSRGHNKVCKRLFFVDSVEDEDEEAPEDEVDAEAPVFSLHAVAGVAVGHPILLRVQLGATTLVALVDTGSTHNFIGESAAARTGLSVQPRPRMTATVANGEKVACPGVLRHAPITIEGMPFHVDLYVMPLAGYDIVLGTQWMAKLGRMSWDVTTRALTFDLEGRTICWQGAPNQDGPAVRAASADDSLLGGLLDSFADVFTEPTGLPPQRGRDHAIVLKQGTSPVAVRPYRYPAAHKDELERQCAAMISQGIVRRSDSAFSSPVLLVKKADGSWRFCVDYRALNALTVKDAFPIPVVDELLDELHGARFFSKLDLRSGYHQVRMRPEDIHKTAFRTHDGLYEFLVMPFGLCNAPATFQALMNDVLRSFLRRFVLVFFDDILIYSDTWADHLRHLRAVLTVLREHKLFIKRSKCAFGVDSVAYLGHVISAAGVAMDPAKVQAIREWPQPRSARAVRGFLGLAGYYRKFVHNYGTIAAPLTALLKKEGFAWTEAATAAFDALKAAVSSAPILAMPDFTKAFTVECDASSHGFGAVLIQDGHPLAFFSRPVAPRHRALAAYERELIGLVLAVRHWRPYLWGRHFTVKTDHYSLKYLLDQRLSTIPQHHWVGKLLGFDFTVEYKPGAANTVADALSRRDTTEDASVLVLSAPRFDFIERLRQAQDVDPALVALQAEIRSGTRAGPWSMADGMVLFAGRLYLPPASPLLQEVLRAVHEEGHEGVQRTLHRLRRDFHFPNMKSVVQDFVRTCEVCQRYKAEHLQPAGLLLPLPVPQGVWTDVALDFVEALPRVRGKSVILTVVDRFSKYCHFIPLAHPYSAESVAQVFFAEIVRLHGVPQSMVSDRDPVFTSAFWSELMRLVGTKLHMTTAFHPQSDGQSEASNRVIIMYLRCLTGDRPRQWLRWLPWAEFVFNTAYQTSLRHTPFRVVYGRDPPSIRSYEPGDTRVAAVAKSMEERSEFLEDIRYRLEQAQAIQKKYYDKSHRAVSFQVGDWVLLRLRQRAPASLSLAVSGKLKLRYFGPYRIAEMINEVAARLALPAGARLHDVFHIGLLKKWHGAPPDAPPPLPNVHHGAVACEPERVIKARLARGVRQVLVQWKGTSAASATWEDREPFFARYPALQLEDELPLDGGGDVMWGRTYVRRRRARDVRRAAERAARAEAERAAAADQATVSG

SEQ ID NO: 16593 - protein, 1172 aa, Oryza sativa
  Clone ID: TF_OSC404812j.C1.p11.fg
MESMEERLMDTLKALALKVDGVEDIAKRLTQIDLKLAQQGEWLDRVQTKVDLSMTSLGQVQQEQSQVWKLEVGWHDWTMLKMAIAGEFEGAQLGNVGKRHFQKRDPVVWKQPEKPKLATGELWKAQQLKEYRRAHDLCFKCGDKYVPGHVCVKPDNAQLKAMEVQEDQVILSDDNLDAVVASDMVEDDCNLSLHAMAGTCSASTLQLRAMVGNQVILILVDSGMDWLTKHSPMQCDWVARSIQFPYQGDLITLQGIQSTPFSAVTEASVHQVVKWTQGNYIWAMAVLEPDFSKGSPPVELAVQSVLDKFSSVFTATNSLPPHRVLDHSIALIPNSVPVNSRPYRYSPTQKDEIEKQVLEMLNAGLITPSCSPFASPVLLVKKQDNSWRFCVDYRRLNSLTIKNKFPLPIVDELLNELAGTKFFSKLDLRSGYHQIRMLETDEFKTAFKTHHAHFQFRVMPFGLTNAPATFQCLMNSIFAPFLRKFVLVFMDDILIYSRSLEDNIHHIELVLQLLQQHQLCAKLSKCSFPQNKLEYLGHIISAEGVATDPEKTRVMQDWPLPSNVTELRGFLGLTGYYRKFVKHYGILAKPLTMLLQKNAKFVWTPQAQSAFVALKEAMCSTPVLALPDFAKPFVIETDACATGIGVVLSQEGHPVAFYSKALGIVNQRLSIYEKEFLAIMMAVDRWRSYLLRGPFVIKTDHKALCHLDDQTLDTELQKKAMTKLIGLQYKFQYKKGVENKSADALSKEILNSYAVDSSAQQLLCELAVSSPNAKGFSLSNGLIRKAAWQDVSMDFIEGLPLSKGANVIFVVVDRYTKFAHFLPLRHPFSALQVAKVYLNNVASLYGLPKSIVSDRDKVFTSNFWQTLFKRFEIPLHLSTTYHPQSDGQTERVNQCLEMYLSPSNSPNADQLFQERAMFSSLLKHHLSRAQNRMKQTADAKRTLRSFQPGDLVLLKLQPYAQKSVVARPFPKLAFKYFGPFPVVAKVGSVAYKLQLPDHSEIHPVFHVSQLKQYIPDASPVFSTLPSTLQLDATELIPSEILDRRMVKKDNAAVVQVLVRWGTLSPELATWEDYDVLRARFPLALVWGQAGARGGGGKCHVCHYRTSQWRQRKENRGKRKVRRRVFAKKAYCVKRVNHTQKSNGISSCANYCGFYLEVYRLPIPPNLALLIDA

SEQ ID NO: 16594 - protein, 1347 aa, Oryza sativa
  Clone ID: TF_OSC401158j.C1.p5.fg
MSIAEGEVVNLNQKVVDLSTNLDRILGSLKGVEAWIPSVDAGMQGLRRSVEGIKARVIKLEAQSSTATPPPNGHRVDNKYQGEATAAESAQERTLVKSKIQIPQSAVNFEVGESSEWGIGNSQFGTQGPRLPKTEFPKFDGDNPKLWKKKSEKYFDMYQVPYATWASFATLHFVGNAALWLQTYEELHAVESWSELCVAVNGKFGRDRYQQFLEKLDNLKQEGTIEEYYSRFEELMHKVLVYNRGYDETFFVTKFLGGLKTEIKAAIKLHRPGTVDAALSLAKTQEELLMEVNLKAYHKTTIKESFKNNFKVPSLAKGILGPPPDEIKKTEERPKWEEQYDSLNAARRARGECFKCGEKFGPGHKCPKAVQLHVLDELLEVFQFSDEPGQVEESSSDEELLLSENALFGTEGKRTIWLQGLIQQVLILIDSGSSSSFMASHLVDRLHLVPNSIPSALVMIIDGGKLFCDEMAEQVEWWCQGNTFSSNFKILGLGGYDLILGMDWLEAHSPMWIHWGRKTGMHKKGVISQLIQLCSIQEIAANQEAIPREIEAVLQHYQGLFQEPTELPPHRTFDHEIPLLDGAKPVNIKPYRYAPKQKDEIEKQVTQMLQHGVIQPSHSPFASPVLLVKKKDGTWRFCVDYRGLNDITVKNKYPMPVVDELLDELSGLKWFTKLDLRSGYHQIRLVEKDEFKTAFKTHQGHYKFRVMPFGLTNAPATFQGLMNTIFAHAIRKFVLVFVDDILIYSKTLAEHVCHLKSVLTVLQQHQLYIKRSKCSFSQPSLEYLGHIIGAIGVATDPQKVQAIRDWPVPKNLKQLRGFLGLAGYYRKFIRNYGVITKPLIELLKKGTFFFWSTLEHTAFQEVKQCLQQAPVLAMPDFNQQFVIETDASDKGIGAVLMQAGHPIAFLSKALGPKAQGFSTYEKECLAILMAVDKWHQYLQYAEFAILTDHRSLTHLCDQKLSTPMQQKAFLKLLGLQWMEVVVDGYHHDPATKQLLVELSLHPDGVNNFTLVNGIIKFKGRIWLGKHVEAQQAVLLSLHNSGVGGHFGIAATYQRIKSMFAWPGLKRDVKAYVQSCAICQQAKAIISDRDRIFTSALWQELFRLSDVKLNMSSSYHPQTDGQTERLNQCLEAYLHCAVYSSPALFARKPTSFGVIDMGQSTIPDVQQLLVNRAKLNELLHHHLVRAQQRMKAQADKHRSKRQFAPGDMVYLRLQPYVQLTMAKRSCHKLSFRYFGPYKVLERIGAVAYRLALPAGSLIHLVVHISLLKKAVQPDTPVSSDLPLTCSTDEVEVYPKAILRRQLIKRGGSSIPSVLVRWSGLPDTLATWENLADLWRRFPSALAWGQASP

SEQ ID NO: 16595 - protein, 371 aa, Oryza sativa
  unsure (1)..(371): unsure at all Xaa locations
  Clone ID: TF_OSC414007j.C1.p20.np
SKFTWPGFKKDVEQCEVFQQAKAEHGMAPDLLRPLHVPLQVWEIPKSGRFYIILVVIDKFTKFAXLIPLSHPFTTLTVAQAFMSNIYETLTCQLFKLAYVKLNMSLFKLAYVKLNMSSSYHPXTDGQSEMLNQCVEAFLWCDVHACLTKXSQXLSQAQHXYNTDFHRALGKXPYEILFARKHTYFGEVNLGQSIMPDVQVWLQEYSQLNVVLRHQLIKAQMVVHQANKHRTERWLELGDLVYLKHQLLIHQPYMQITVAXRSYHKLSFKYYGPYRVLDWVRAVAYKLELLVCSQIHLVVHLWLLKKALKVGTQVITDLPKLCDTTAEVVPEEVLQHQLIKSGRAMIPHVLIQWTRLPMELATWENLCQLXQ

SEQ ID NO: 16596 - protein, 149 aa, Oryza sativa
  Clone ID: TF_OSC16508j.C1.p1.np
VPVSMNNPCFWSKLQPYRQTAFGIRGALKLRSKFYGPFKIMEKVGRVAYKLQLPEGSNIHPVFHVSQLKKHIGSRAVPMANLPSVGPDGQIKTEPVAVLKRRMIPRGGVAVTQWLVLWHNLSPSEATWEDASMIQSMFPSFILEDKDQL

SEQ ID NO: 16597 - protein, 1414 aa, Oryza sativa
  Clone ID: TF_OSC30417j.C1.p2.fg
MAQDGKLDLLLKMMEEAEKEREEMDRKREESEALNLVELQLLKLAMESRIPLVEKQVSELGGSANDLAKRVNSLQASVEKCQREVQQNALYKGESSQGPTQFPNDDDLNGNSPNPFLFTPQQGWRNPPQFNSVSPFTPENSGCPIFDSGMASIGGNVPSMSCPQFDGENPQMWRDNCEIYFEVYGVHPANWVKVALLNFTGSASFWLQSVRNELVGISWLELCDRVCPQTGSVTEYVERFDSLMHQLLAYDNALTPRYFLTKFVDGLKDDIRGAVMLQRPEEILEGSRKPSYRKSDGTNFNKVFSRPTQPTVWPKSPAQTTGDDRKLIESGKIRVKGLIQGTKLLMLIDSGSSHSFLDENIVQTMQGVTSLPQPVKVKVASGEVLICDKQLPDYAWWLQGRCYRTNFKLLSLPGYDAILGIDWLQGLGVMRIIWVQKWLEYEINGSPVRIQGVMPKVDACPLISGDKLMGLCKMGALMHLFQITSETDIHKPEIPIMIQEVMNEFNSVFEEPQGLPPRRRCDHSIPLIPGSKPVNLRPYGYNPAQKDEIEQQVRDMLKSGVIHPSVSPYSSLALLVNKKDGTWRLCVDHRLLNAITIKSKYPLPVIDELLDELAGTGWFSKLDLRAGYHQIRLVAGEEPKTAFQTHFGHFEYRVMSFGLTGALATFQGAMNETLASVLRKCALVFFDDILIYSPTLEAHAQDLRTVLQLLQDHQWKVKLSKCSFALKELNYLGHTIGVAGVSTDPSKVQDIVNWAIPTTLKKLRGFLGIAGYYHKFVKNFGVISKPLTNLLRKGVEFVWTPEVHESFEQFKKALASAPVLALPDFTKPSVIETDASEIGIGAVLSQDKHPIAYMSKALGPRTRGLSTYEKECLAILLAIEHWRSYLQYAEFTILTDHKSLMNLTDQRLHTPWQQKAYTKLLGLQFKICYKKGIHNEAADARSRCDHNSSLEVVAISQHLNRAQQFMKSQADKKRSFRAFAVGDWVYLKLQPYVQTSVAARANHKLSFKFFGPYEIQEKIGVVAYRLVLPASSSIHPVFHVSQLKAAQGFKGDASVHLPVQSSTKQVPVAILDTRVRKSGMSVIPQVLIHWSDDVIANATWEDLEDLRTRFPRALAWGQSSFQGGNIVKAALGADADIAKEEKIEGRGRKNVKAAQVLTTIERWQQCRVVDNKLMAMVDGLMEDGAGSGEDDRGGWHNSAAPFAENSRERESEDSQSWALLSFGIRAMSAPASGSSRTHRRTGRRLSPSPPRVSGRQLVVQRIVKEDGSVYYPILRRSNYSDWAVLMRVNLQAQGLWDAVDTGDVPYQEDCQALSAILRAVPAEMVRPLAEKDSAKDAWDALKSMRVGADRVKESRAQKLRQTFESMRFKNGEHLEDFSLRLQSLEMICLKRRLFENCFASFPGGIAKWLYRLKP

SEQ ID NO: 16598 - protein, 1353 aa, Oryza sativa
  Clone ID: TF_OSC412872j.C1.p11.fg
MSSTVTNVADDWKKGLAEVLDRLDSIRGKLSDLDNEQQAHHIAIQRLERAGRDRSPRRNNRDRDDDHDNDGRRGDRPPRYHKIDFPKFNGQGDPLHFLNRCEQFFQGQRTPEEEKVWLASYHLLDGARQWYMRIERDLGTPTWRRFSDLLNLHFGPPLRQAPLGKLAACRRKTKVAAYIDRFLDLLARAGPLTEEQQVDLFTTGLQEPLSIDASSSAAPTPSQPDAASSVGQASTQVAGRTVRRLSQSEMDERRRKGLCFNCDELYARGHKKVCKRLFLLDLAYDDDDDEVEGAAPAVEPETLRISLHAVTGVRPSNAMHLHVRLGDATLHALVDTGSTHNFLSQEAAARVHLPLVQRAGLRVTVANGDKVPSPGMFQDARISIDTEVFITDLYVLPLGGYDLVLGMQWLSTLGQILWDFGQLTMSFWHKDHMVLWRGLPTGASPAAHVATTRDLLDDLLTEFADVFATPSGLPPPRHQDHRITLLPDTAPVAVRPYRYSARHKDELERQCRDMEAQGIIRRSSSAFSSPVLLVKKADGSWRFCVDYRALNSRTVKDKFPIPVVDELLDELHGARFFSKLDLRSGYHQVRMRDADVEKTAFRTHDGLYEFLVMPFGLTNAPATFQSLMNEVLEPFLRRFVLVFFDDILIYSPSWSSHLQHLRAVFNTLRAHKLFVKRSKCSFGDTSVAYLGHVVSGQGVAMDASKVQAVVDWPRPCSARALRGFLGLAGYYRKFINDFGAVAAPLTRLLKKDGFLWSPEAEVAFGRLKKALTTAPVLALPDFDQPFIVECDASGTGFGAVLHQDGGPIAYFSRAFAPRHHALAAYERELIGLVQAVRHWRPYLWGRRFVVKTDHFSLKYLLDQRLATLPQHHWVGKLLGFDFEVAYKPGRQNTVADALSRRDEPAASLCAITTPVFDWLQDLHTANDTDPALVALRDQILAGNRTAPWALTDGIVTFKQRMYIPPASALLQTALAMVHDDKHEGIQKTLHRLRREFHTPGDRRVVQEFVKACAVCQRNKTEHLHPAGLLLPLPVPSAVWSDVSMDFVEGFPRVAGKSVILTVVDRFSKYAHFITLSHPYSAESVARAFYTDIVRLHGIPTSIVSDRDPVFTSTFWNALFAATGTKLHMSSAFLDDIRYRLEQAQQHAKKFYDRHHRELQFVVGDWVWLRLRHRVPASLATPVKGKLGPRYYGPYKVLEIINKVAYRLALPAGARLHDVFHVGLLKPFVGTPPTSPPALPSTLHGAALPQPAQVLKSRMARGVHQLLVRWDGLPASATSWEDLDDFRTRYPAFQLADELFVEEGRDVMWGIQYQRRNRRQQPEQAPLDTKEELGVNGFKKGEVNPVCSFLIYGN

SEQ ID NO: 16599 - protein, 1118 aa, Oryza sativa
  Clone ID: TF_OSC414256j.C1.p13.fg
MEKATATTKVAGRRQRGMDSSPAHEGDGVPVGFRRREAVAEMAHTAAELAAAAAWRGGGPSGNGTRPEMGGGDGARRAWRDGGRGRGRGRPLELMKRVEIGRSLLGQCVQNLEEVLESVRRENRRAEVVGGARGSFKSGGFSSVSARAIPGVGGRADDRRSQDDHRTPEDKIAALQAYRRAKGLCHTCGEKWSKEYKCGPTVQLHIVEELLGMFPSEAADGCDSDCREDEVTESEGVLCQISKEAILEFADKLSTQQYFCPAIKVKVADGGSIFDEPQGLPPSRVFDHSIPLLPGAKPVNLHPYRYNPAQKDEIEKQVREMLQQGVIQPSANPFSSLVLLVLKKDGTWRFCIDYHHLNAIIVKNRYPLPIIDELLDELLGACVFTSLDLRAGFHKIHMKLEDEHKTAFKTHNGYYEFRVKRSKCTFASSQLTYLGHVISDAGVSTDPKNIAAVVRWAVPQNVKEVRGFLGLAGYYRKFVRHFGVISRPLTDLLKKHVVFVWTSEHQAAFDALKAALTSAPVLALPDFTQTFEIETDASDRGVGAVLMQVDHWRSYLQFGEFIIRTDQRSLIHLGDQRLATLWQQKALTKLLGLQYKLVYRKGVENRAADALSRCDSPEILQLSALSVCVPSWLDEVRDSYASHPHTSSLLSQVLLQPESAPHFSVTDGVLRYKGRIWLGHNVGLQQKVLGALHNAAVGDHSGVQVTYTRLRRLFAWPGLKKSVQLFVDSCSMCKQAKAERVRYPGLLQPLPVPEHAWQVVSLDFIEGLPLSLGFNCILVVVDKFSRYAHFIALAHPFTAFDVALAYMQNVYKLHGLPQSMISDRDCIFTSNLWSELFKLTDTQLRMSSAYHPQTDGQTERVNQCLETFLRCFVHACPRKWFRWLALAEFWYNTTPHSALGTTPFEALYGHPPRHFGVRYIAECAVPDLTEWLQERQIITNLLRQHHLRAQQRTKSQADKHRSDRVFAVGDWVFLKVTARVGPVAYRLQPPYDCAIHPVVHVSQLRKASPPQSAVAVRPLPLVESEELIPVQIIARRLYKRGAAAVEQVKVRWMGQSSSDATWEDLAVLKQKFPTVPAWGQAGCPEGGHVTADDNPIKTIRRSARERRPNTRVTGPEWV

SEQ ID NO: 16600 - protein, 2192 aa, Oryza sativa
  Clone ID: TF_OSC401612j.C1.p11.fg
MKHLNDVRVGSKVARMYLVQANCVGGYKGRYFYECVECDLGGNLLCCDSCPRTYHLECLNPPLKRAPPGNWQCPRCRTKKVSLKLLDNADADTSKRERTRRMRTSTTSDSPSPSPQNKASFNTSRGAAFRDDEPGAKDNEVEKRKPLILHLKKRSTKELSTDTTSSKSGLLGKSSEEKQEKHGSALKVKKHLHPMELSPKKYKNKKQHNHRDSKRSEAKKVQYLASDVDSDSSMEPSTSLEHSESPPPKRKSLDGRTPASSTKKGKKKVKFVDKKHPENAVHITEKEHGGAGDKITTQGDLQVDRILGCRLQTSQIISPAHASSEQIDMAPPSASGAPEPSQALLKGLHEEIQSSNSDTNVTEDACADELANDGGENNLDCSDAQKESNVRSHGHKESLNAKEIMNTASACSADQIVTVKDAGAVQTYVTASVNGEYETVTDIPEEKNDTKHPVSKADTEVHTKQEHTPDSKLHGKIQETELKEHDGTTYEFLVKWVGKSNIHNSWISESELKALAKRKLENYKAKYGTDEIEEALIKWCALPYDECTWERLDEPTMVKYAHLVTQFKKFESQALDKDKGGSHAKPREHQEFNMLVEQPKELQGGMLFPHQLEALNWLRKCWYKSKNVILADEMGLGKTVSACAFLSSLCCEYKINLPCLVLVPLSTMPNWMAEFASWAPHLNVVEYHGSARARSIIRQYEWHEGDASQMGKIKKSHKFNVLLTTYEMVLVDAAYLRSVSWEVLIVDEGHRLKNSSSKLFSLLNTLSFQHRVLLTGTPLQNNIGEMYNLLNFLQPASFPSLASFEEKFNDLTTTEKVEELKNLVAPHMLRRLKKDAMQNIPPKTERMVPVELTSIQAEYYRAMLTKNYQVLRNIGKGGAHQSLLNIVMQLRKVCNHPYLIPGTEPESGSPEFLHEMRIKASAKLTLLHSMLKILHKDGHRVLIFSQMTKLLDILEDYLTWEFGPKTFERVDGSVSVAERQAAIARFNQDKSRFVFLLSTRSCGLGINLATADTVIIYDSDFNPHADIQAMNRAHRIGQSNRLLVYRLVVRASVEERILHLAKKKLMLDQLFVNKSESQKEVEDIIRWGTEELFRNSDVAVKDNNEASGAKNDVAEVEFKHKRKTGGLGDVYEDRCADGSAKFIWDENAITKLLDRSNVPSTVAESTDGDLDNDMLGTVKSIDWNDELNDDPGATEDIPNIDNDGCEQASEAKQDAANRVEENEWDKLLRVRWEQYQTEEEASLGRGKRLRKAVSYRETFATIPNEALSEDSDEEDEPKREYTAAGLALKEKYEKLRARQKERIAQRHVIKNYADDRLEEFMKLYDSSANPLRIVEDPNPVQPSGAKRLGESTAEMKQSSKKTKRYPEIPQELYAKLTGNAASSKHHPKAADISNSGTPHHLLPVLGLCAPNADQMNSYKGSVCGPSTKEQKRASGELANKPLLTPAVDHSSEQKHDGQPTPCKPMFPGSSEETLRRLNNIIPDSYFPFQPIPPISGKGIGDHVENPVSSIPSFQGKLGLPNFSLEDSIPLKHLKSVPDLFPNLSLGTSNEYLRNCVPELPNSSFLPSFMADIAGTSKQKNKFMADMSGLLPGLAINPVQQIHSSMPENHKKVLDKLMMRAQYSSSKFLKNASNKFLKKSLKPDYWSEDELDALWIGVRRHGRGNWEAMLRDPKLKFLSHRSHEELASRWILEEQKIIEEPMPTATRSSNSTSFPGISDAMMSRALNGSSFSKLRMEPPKLQSHLTDIQLGCNDIPTRFSHVEPTNYMNLSEGGPSLTPWQDFKNRSGHSGDFPGPLDKWEKPDMGLIPPFMPNPFMKESIGSLPINRHSSNSIQQNEVGSSSHESILHGFSDGQAKLFHEMQRRVKLGKLPIEMNLNHTKLSDPLAENSGDFESSKPNKLPHWLQEAVRAPPSKPPECELPATVSAIAQSVCLLLGEQKPAIPPFPIPGPRLSLPKDPRSAPKKRRVHKVQQASSLVDHSKTTVGQGDHNSTPSAPLSMEAAPASPAVIKSSDTPSLNLNSPSSSSAGSRGQDASTPSTFEEPERTMEVSEPASVAAATCPSRPEPPETGTHRIEFSAVDDMDTGSCRSPVRDTPDPDNQKSELSGSGNTPTELSVLPLVDAPGTSSEPAVVPVSSDEESTQEGVPGKAVSTGDQEKRTPPDESENSGAANPVSAAQTADEDKVDEMITDEH

SEQ ID NO: 16601 - protein, 1532 aa, Oryza sativa
  unsure (1)..(1532): unsure at all Xaa locations
  Clone ID: TF_OSC400800j.C1.p28.np
MKSMEERLLDAMNAMAAKDDIATHLMXIDLKLEQQGERLGRVKTKVDLSLTSLDQVQQEQTWVXRALKAVIVAPSPPPPLPPETPHQAPTSSEPQPPPPPPLGTFTSLTSSEPQPPPPPPLGTFTSLPPGDCEHCDMGHRQWTPKMDFPKFDGNGVKVWIDNCETYFAFYQITEAFLVSATSMNLMGDAANWYQTWKLEVGWHDWEMLKTAISREFDVHLWSVKMDELLLLKQTSTVIEYCSKFSELVYQIRLYDPLLCGSVLVSHFMLGLKDDLRSFVQAAQPTTVTQDCLVALAQEGAHIGQPINQCRDNAVGRGNEKPKLARGELWKAQQLKEYRRAQGLCFKCGDKYVSGQVCVKQEAELKLVQEEPVILFDDILDAVTAPELVEEDFNLSLHALAGTCSSATVQLRALVGNQVILIFVDSGSSHSFVNSDLCAKLQLPTTATLPISVKVANGEVLSCDAKIPQFTWWVQGYHFSFTMRLLPMGXYDVVLGMDWLTQYSPMTCDXAAKTIQFSYQGAEIILQGVASPIVIEVTEVSATQVVKWDQGNDIWAMAMLEPVAALSSSSSEYPAIQQLLQQYSTLPPDRVLNHSITLLPNSVPVNSXPYRYSPAQKGEIEKQVFEMLTAGLITPSCSPFASPVSLVKKKDNSWRFCVEYRRLSSLTIKNKPLPIAEELLDELASTKFFSKLDLKSGYHQIRKLEADEYKTAFKTHHGHVQFRVMPFGLTNAPATFQCLMNSIFAPFLRKFVLVFMDDILICNKSLEEHGHHLELVLXLLQQHQLCAKLSTCSFATSQLEYMGHIIFAEGVATDPEKTQAMASWPIPTNVTQLRWFFLTGYYRKFVQHYGILAKPLTMLLQKNTKFVWTPQAQEAFAALKTAMCTTPVLTLPDFSKPFVLEIDACATGIGAVLSQEGHPVFYRKALGIANQKLSIYEKEFLAIIMVVDKXRSYLLTSPFVIKTDHKALYHLDDQSLGTDLQKKAMTDLQKKAMTKLIGLQYKFQYKKGVDNKSADAFSRVGHLFISVVQPAWVQEVPNSYVVDLFAKXLLQXLAITSPNSQGFTLSHGLIRKADKIWIGVNSALQTKLIAAFHSFAIGRHCGIQATYQRVKKLFVWKGLKKSMEEFVXQCAVCQQAKHEHCSYPGLLQPLTIPYGAWLDISMDFVEGLPTSKGSSVILVVVDRYTKFAHFLPLKHPFSALXVAELFLNNMASLYGMPKSIVSDRDKVFTSNFWQTLFKRFEVPLHLSTAYHPXSDGHTERVKQCLXMSLRCAVSSSPHXWCAWLPLAQFWYNTNYHFALQCSPXKSLGTDPSYGLLPAMSVNASSTDSDSPVADALLRERAMFSSLLKHHLTCAQNRMKKTADLKRTRRSFQIGDLVLLKLQPYAQKSVVSQPFPKLVFKYFGPFPIVDKIGSVAYRLQLPDHSGFHPVFHEXQLKQFVPDAKPVFSSLPSPLQLDITELVPSAILDHRMLKKGNALVVQELVRWGSLAPEWATWEDYEVVRARFPEPIAWGQAPARRGRGGGGANVTPDTLM

SEQ ID NO: 16602 - protein, 1644 aa, Oryza sativa
  unsure (1)..(1644): unsure at all Xaa locations
  Clone ID: TF_OSC411504j.C1.p5.np
KLIFRSKSTTWRSKTRDSRRLCWRFKRRSDMVVKQGETQEMLLKLKSVAGWRPQVDAAIQGLHEEGGNSSNTSQASRMAEEEGGNSSNTSQASRMAEEGSHQTPLLPTPSTPPLFSGTAASELGPDGHRVANFHRGKASGVVHTLGPPPVKGTYHEFSVPHGIEFGANSSRGNRDLHGEQGFNHRLPKLDFPQFDGSDPQGWRLRCEHYFGVYGTHPNLWVWVATIYFMGRAASWLRSSRAHEVFVDWGRFCEAVNRKFDRNQHRQLIRQLDQIKQTGSVSEFYEWFDDLMNQLLTYDPMYNTLNLVHQFIEGLRFDIRKAVLLHCPKDLESALVLALLQEELSERNQEQRKFGDGSQKFKNAYPLPLPPTKALKSEEKTQSANLSDKVSALRSFRRAQGLCYLCAEKWSPTHKCSGTVQLHAVQELFALFPDNVNEDQAGISSEDSDSSLLAMSVHAVQGTDSQSTIRLQGKIQGLNILMLVDSGSSASFVSDQLADRLTGVQFLAHPLSVKVANGQVLHCQKEMPSAEWFVSGQKFLTTFKVVALGGYDAILGMDWLTKYSPMHIDWQLKSIHLIVMGHEVLLRGVQSNTSDCALISSQHLQHLHSIDSLSSIPDAVQSLVQEFSHLFELSSIPDAVQSLVQEFSHLFEEPSGLPPARDYDHTIPLIPGAVPVNVRPYRYTPAQKDEIEKQVKDMLQKGIIQPSASPFSSPVLLVKKKDGTWRFCVDYRHLNAITVKNKYPLPIIDELMDELAGACWFSKLDLRLGYHQIRMAVGEEAKTAFKTHNGHFEFKVLPFGLTSAPATFQGVMNTVLADQLRQNVLVFVDDILVYSRTLEEHKNHLRQVFETLSKHQLRVKLSKCSFAQTQLSYLGHIISADGVSTDPEKIQVVRQWPVPVSVKDVCSFLGXAGYYRKFVRHFGIISKPFTELLRKGQPFIWTQHHQKAFDTLKQSLISAPVLVMPDFQKMFVVETDASDRGIGAVLMQDQHPVAFLSKALGPRTQVLSTYEKESLAIILAVDHWRSYLQHEEFLIRTDHRSLAFLDNQRLTTSWQHKAMTKLLGLRYRIVYKKGLENGAADALSRRSSDGLPICALSVGLPDWLQDVVSGYKSDPEALQLLHSFKEGTPHSAHFELQNGILYFKKRVWVGNNRQFQQQVLANLHTAALGGHSGIQVTYQRVKQLFAWPGLRQTVQDFVHSCVVCQQAKPEHVPYPGLLQPVQIPEHAWQVISMDFIEGLPRSASYNSILVIVDKFTKFAHFLPLSHPFTAVSVAQLFMDRIHSIHGLPLAIISDRDRVFTSIFWKELFRRSGTQLRMSSSYHPQTDGQTERVNQCLEMFLRCFVHACPSRWSQWLSLAQFWYNTSFHSALMLTPFEAMFGHKPRHFGLSVDSVGVPSALDSWMQDRHNMQSLIHHHLVRAQQRMKSQADSKRTDRVFAVADWVFMKLQPYVQQFVMTRANQKLAFKFYGPFQILQRVGSVAYKLQLPATSLIHPVVHVSQLKKAVAASEVVQSTLPRLDPDSGHLATPVEVLQQRLRRRGDKMIVQALVRWSGTSSSTTSWEDLEELRHRFPSATAWSQAVFQGRGNVTSGTGTPDDEEQVSKIAGSVQSTAQQRHVRVTRPNPNSRVALPFRRPCWARRSRTAA

SEQ ID NO: 16603 - protein, 542 aa, Oryza sativa
  Clone ID: TF_OSC411151j.C1.p1.fg
KNQSEHLEHIKLVMQALAANQLVVRLKKCDFGLDRVNYLGHIISEDGVSTDPKKICAIKNRKAPRNVTEVQDIKRSYEEDVLAHKILSLIDTDGDPERNYKCESGLLKFKGRIYVGETTEIRQLLLEVYHTSCFGGHSRIRATYHRIKQLFYWPSLKRQVEHYIRECPTCQVTKAEHVHIPGLLNPLEIPDMAWAHISMDFIEGLPKSQGKDVILVVVDRLTKYTHFLALSHPYTVEQVVQIFMDNIHKLHGMPIAIVTDRDRVFTSTFFQEIFKIHKVKLRFSTAHHPQTDGQTERVNQCLESYLRSMTFQEPQKWFSWLALAEWWYNTTYHTSIQMTPFQALYGYPPPQISEFSIPCNISEEARVTLEDKAMILQKLKGSMGEAQRRMKFYADKGRTERTLEVGDMVYLKLQPYRQVAMGIRGSLKLRSKFYGPFKVIEKMGSVAYKLQLPEGAGIHPVFHVSQLKKHLGPRAIPMPNLPAVGPDGQIKTEPAAILQRRMVPRHNEPVIQWLILWENLTPADATWEDASYIQAVFPNFQP

SEQ ID NO: 16604 - protein, 1160 aa, Oryza sativa
  Clone ID: TF_OSC414256j.C1.p10.fg
MADPRVKRLEMGEIKGLLSSICASMSSQGPGFGGTAGASTSGIARGAAGLAASAAATVSNTATVAGSSSVPPGFSPRPNTTGLQTGAGATPLTSGAQGAMTSVGNVNFQIEPNTVNPSFGPVFTTATRTHVLPERRNFNFPERESQEDVGMNHYGIDTNQPWRYPTRQPGGTAVGTRAGMPNPGGGMYWQEPPRYLHGVIPNPYTEMSLRSQRLELTLFNGEDAVGWLQQCEKFFEMTGTPVDQWVNLASGHLVGRAGKWFRNLAIPWYCLNWQQFYLMVLDRFTEANAHEAVELLQNAKQTGSVMQYIDKFEDCVSLVKRDHPYLTESYILSCFIGGLRADIKHDVCGQKPQNLLAGYWYAKVYEKASIAKRLSYQSEFNRNKPQFQPAQSSGTRFVNQKNTTQGVEKEKKTCCYHGEEEGWELEDVCGLSAIECQNRQEQVPYAYHRRLLDELNGAKVFTKLDLRSGYHQIRMVEGDIPKTAFKTHMGHFEYLVMPFRLTNAPATFQALMNQIFGKLLRKCVLVFFDDILIYSRDLREHEQHLRIVLNILRSHKLFAKRSKCTFAVGSIEYLGHIVSGEGVATKPSKIQDVVDWPVPKNVSKLRGFLGLTGYYRRFVKGYGTICRPLHDLLKKNSYQWGVEQQKAFDNLKEVMTSCPVLALPNFNQPFVLETDACGIGIGAVVIRTDQQSLKFMATQRLTEGIQHKLLLKLMEFDYSIEYKKGKENKAADALSRRDTDGDKCLAITLVYPAWVEDVKNNYMGDEKYAKLVTGEELNEGAEGFTLQSGLLRYKNRIYVGQSTDIRQRLLQSFHNSTFGGHSGMKVTYHKLKKIFYWPKMKKDVDRQVTECPTCQIAKPEHIHVPGLLDPLQIPEMAWTHISMDFIEGLPKSHGKDVILVVVDRLTKYAHFVAMSHPFDTQDVIQVFMENEPKEWYKWLPTAEWWYNTSYHTSLQVTSYEAMYGVTPPHIGERAIPGNVSEEARATVQQREDMLARLKENLAKAQTRIKKLVDRLRSERQFELGDMVYLKMQPYRQNAFGLRGSLKLRAKFYGPFRVLEKIGKVAYKLQLPEEANIHPVFHVSQLKKHVGRQAIPLPNLPLVGADGTVKTEPLAVLARRVIPRQNEPVVQWLIHWENLTPEDATWENATFIQATFPHFRP

SEQ ID NO: 16605 - protein, 1479 aa, Oryza sativa
  Clone ID: TF_OSC900307j.C1.p21.fg
MVTKTRSQESMDGVEELTEMRVEIATIKKDLGALKGLKNEMAEVKKLLKVMCASLGEGDPEKRPETGEASERVSGAPHDVNATTALADIIDGSGPMLTGTAPIMSQGGGFFIEPNVTQPRMSNCMASMPFVAGSNAVYAEAIIKGPRLEISLFEGDDVIGWLKQCEKFYELTGTPHEQWVNLALAHLSGRAAWWFRGVGIPWQLISWPQLAAMMCDRFCEASDHEAVEQLQNVKQANLSVTQYIDKFEECVDLVRREHPYLQEQYLNSCFIGGLRGDIKHDVSGQKPQGLLQSYWYAKNYERAANAKRAIYNFNRNRNQQQFAGNQGRPMGPRNQLRGEVDKKEEKKCWFCKEPWFPRHQCKVKQALHALLVEDEEQGEDSEGNAEEVIQEEEPPVEQEKPVQEGAKVELMCISQNALQGTTRPDTFLVMILINGRRAVGLVDSGSTGTFMDQEFALKSKCPIHQTLAKKIVVAGRGELLSEDQVPEIKYQIQGEDFSNGFNLIPLKGYEIILGADWIFTHSPITLDLKQRELVITKEKQKIILQDFTKPGKRARVGEKKMGKLIRKGAVGCVIQIHTISVEKENEKHVIPPEIQEILLKFPQVLKEPQGLPPRRKCDHTINLKTGSDPPNLRPYRVPHYQKESMENIIAELIQSQEIQISDSPYSSPAVMVRKKDGSWRLCVDYRQLNGQTIKNKFPMPIIEDLLDELHGSRVFSKLDLRSGYHQIRMHPDDVHKTAFRTHLGHYEYNVMPFGLTNAPATFQALMNQVLAPYLRKFVLVFFDDILIYSKNKEEHLEHIKLVMQALLDNHLVIKLKKCEFGLDRIAYLGHIISSEGVATDPEKVEGIRRRKIPNNITELREFLGMAGYYRRFIKGYGVICRPLHDMLRKDAFQWGPEQTTAFEELKLRLSTSPVLTMPDFSQPFVIEADACNTGIGAVLMQTGKPIAYLSKALGPKAAAQSIYEKEAMAILEALKKWRHYILGNKLVIKTDQQSLKYMMNQRLVEGIQHKLLLKMMEYDYSIEYKAGKENLVADALSRGKISEAVPAESCQAITVVIPEWVTDIKRSYEGDVLAHKIISLIGTDMDPEQLYKEESGLLKYKGRIYVGSVTKIEHVHIPGLLSPLEVPDMAWSHITMDFIEGLPKSKGKDVILVVVDRLTKYAHFIALSHPYTVEQVVEAFMDNIHKLHGMPLVIVTDRDRIFTSNLFQELFKARRVNLRFSTAYHPQTDGQSERVNQCLESYLRNMTFKEPQNWYSWLALAEWWYNTTYHTAIQMTPFKALYGYTPPQINEFSVPCNVSAEARVSLEEKEAIIQNLKSSMDAAQKRMKHYADRNRTERELQVGDMVYLKLQPYRQNALGVRGSLKLRSKFYGPFRVEQKIGQVAYKLQLPEGANIHPVFHVSQLKKHLGRHAVPMPNLPLVGPDGQIKAEPVAILQRRMIPRRGEPVVQWLVLWRNLSPADATWEDATFIRATFPNFEP

SEQ ID NO: 16606 - protein, 1347 aa, Oryza sativa
  Clone ID: TF_OSC401048j.C1.p10.fg
MAGANDDVWRQRFDDMMRRLEELSGLITDIDQQQRTQTLAINRLENGARAPSSRFDDLSDVGDRNGGRFAHHNVGRGDRYGRGGDGFHGHGRPGGHRFDGDGDRPPRYHKLDFPKFDGRGDPLPFLNRCEQFFRGQRTPEDNKVWLASYHLLDGAQQWYTRLERDHEPPSWHRFSELLNMRYGPPLHSTPLGELAACRRTTTVDDYAERFLDLLTRTGYLSEDQQLGEDDTDNDSATDQADAAATLRISLHAATGVRASDAMHITAHLGDTDLYTLIDSGLMHTFLSQDTAARVGRAPQPRMGLNVTVANGDKVACPGVFPDMPLQIAGEEFATDVYVLTLGGYDLDFTVLTMSFWHRVTLHGLPGHQRPRALACAPAALLDSLLEEFADVFTEPTGLPPARDRSHRIQLLPGTAPVAVRPYRYPVRHKDELERQCRVMEENGLIHRSTSAFSSPVLLVKKADGSWRFCVNYRALNERTVKDKYPIPVVDELLDELHGAAIFSKLDLRSGYHQVRMHPDDIDKTAFRTHDGLYEFLVIPFGLTNALATFQSLMNDVLRPFLRRFVLVFFDDILVYSPTWTSHLQHLRTVFTALWAAQLFVKHTKCSFGDPSVAYLGHIISQHGFAMDAAKIQAVAEWPRPRSPKELRGFLGLASYYRKFIQDFGSVAAPLTQLLRKDSFAWAPATDDAFQRLKLALTTTPVLSLPDFNRPFVVECDASGTGFGAVLHQGEDPIAYFSRPIATRHHALAAYERELISLVQAVRHWRPYLWGRQFIVKTDHYSLKFLLDQRLSTIPQHHWVSKLLGFDFVVEYKPGKQNAAADALSCRAAPDSQAFVLSTPTFDLLKDIRTAGDTDPALQALRDEINSGTRTTPWAVIDGLVTYKRRIYIPPGSPWVSVVVAAAHDDGHEGIQKTLHRLRRDFHTPDDRRVVHDHIQGCLTCQRNKTDHLHPAGLLLPLPVPSAIWSDVAMDFVEGLPRVGGKSVILTVVDRFSKYAHLIALAHSYTAETVARAFFVDIVRLHGVPESIVSDRDPVFTSAFWTALFTATCTKLHRSTAFHPQSDGQSKAVNKAIAMCLRCMTGDRSRQWLRWLPWAEYIYNTSFHAALRDTPFKLVYGRDPPSIRAYDASELRVAAVAQSIEERDAFLADVRLRLEQAQQYAKRYYDQKHREVSFEVGAWVWLRVRHRVPASLPEAVKGKLRPRFYGPYRVVAVINEVAYRLALPPGTRLHDVFHVGLLKPFVGVSPSAPLALPPIQHGAAQPVPRQVLRARLARGVRQLLVQWEGLPASATSWEDLDDFRNRYPSFQLADELLIEGGRDVMWGIPFRRRKQQAGLGAGRAIGPGGTAV

SEQ ID NO: 16607 - protein, 1319 aa, Oryza sativa
  Clone ID: TF_OSC401057j.C1.p37.fg
MAGANDDVWRQRFDDMMRRLEELSGLITDIDQQQRTQTLAINRLENGARAPSSRFDDLSDVGDRNGGRFAHHNVGRGDRYGTDEFRCADAASDDARRGHESCSFVRTPRTRSPATPPATTRRPRHTTTSSGGQPPGAGSRAGHRRLTGRHATAINRTVRRLSPEEMDERRRQGLCFNCDEPYSRGHNRLCRRLFFLELGEDDTDNDSATDQADAAATLRISLHAATGVRASDAMHITAHLGDTDLYTLIDSGLMHTFLSQDTAARVGRAPQPRMGLNVTVANGDKVACPGVFPDMPLQIAGEEFATDVYVLTLGGYDLDFTVLTMSFWHRVTLHGLPGHQRPRALACAPAALLDSLLEEFADVFTEPTGLPPARDRSHRIQLLPGTAPVAVRPYRYPVRHKDELERQCRVMEENGLIHRSTSAFSSPVLLVKKADGSWRFCVNYRALNERTVKDKYPIPVVDELLDELHGAAIFSKLDLRSGYHQVRMHPDDIDKTAFRTHDGLYEFLVIPFGLTNALATFQSLMNDVLRPFLRRFVLVFFDDILVYSPTWTSHLQHLRTVFTALWAAQLFVKHTKCSFGDPSVAYLGHIISQHGFAMDAAKIQAVAEWPRPRSPKELRGFLGLASYYRKFIQDFGSVAAPLTQLLRKDSFAWAPATDDAFQRLKLALTTTPVLSLPDFNRPFVVECDASGTGFGAVLHQGEDPIAYFSRPIATRHHALAAYERELISLVQAVRHWRPYLWGRQFIVKTDHYSLKFLLDQRLSTIPQHHWVSKLLGFDFVVEYKPGKQNAAADALSCRAAPDSQAFVLSTPTFDLLKDIRTAGDTDPALQALRDEINSGTRTTPWAVIDGLVTYKRRIYIPPGSPWVSVVVAAAHDDGHEGIQKTLHRLRRDFHTPDDRRVVHDHIQGCLTCQRNKTDHLHPAGLLLPLPVPSAIWSDVAMDFVEGLPRVGGKSVILTVVDRFSKYAHLIALAHSYTAETVARAFFVDIVRLHGVPESIVSDRDPVFTSAFWTALFTATCTKLHRSTAFHPQSDGQSKAVNKAIAMCLRCMTGDRSRQWLRWLPWAEYIYNTSFHAALRDTPFKLVYGRDPPSIRAYDASELRVAAVAQSIEERDAFLADVRLRLEQAQQYAKRYYDQKHREVSFEVGAWVWLRVRHRVPASLPEAVKGKLRPRFYGPYRVVAVINEVAYRLALPPGTRLHDVFHVGLLKPFVGVSPSAPLALPPIQHGAAQPVPRQVLRARLARGVRQLLVQWEGLPASATSWEDLDDFRNRYPSFQLADELLIEGGRDVMWGIPFRRRKQQAGLGAGRAIGPGGTAV

SEQ ID NO: 16608 - protein, 2630 aa, Oryza sativa
  Clone ID: TF_OSC400891j.C1.p34.fg
MWKTQPGGTSRDGRGGGSTARANAGTGYPTRSRTSGNPQFSAPTNGANQRAMASLRSPLRGGPDMPTSRRCSPRLSGTQQDEVAEVARVGMLKRASNNASNSSTSRAPTRSSSTTTASSKDVAEEHSSGVGSTSSLSKKRKRMTAKSYRSLFKRSKKASSTERARKILPMGMWQRATLVHQHISIETCPQNKVAESRLEVEGRDRPTGHSRQNSISSLQSAPIPPIHYEEPESGHGDGEPLSIQKEVASSQFKVTASDEMEGNSNICVACGTPGDLNRVCDSGPVMEKAAKEATMFLVWIIGWNICLLRLLFGIHSVADGIESLWNVKEGMQNGKQYLVKYKNLAHVHNRWVPEGVINDTPGGCDLLSLFNKRDHKEKTNWKKEWTEPHHLLRKRPLMPPKEADDFFCSSRANIEHCNVEWLVKWRDLGYEHATWELETACFLRTPQADELKRKYENRRKAAKQSSIPVETKVKHKTFQKLQRLPDEWPPGFDNDHLFSINQLLEFWCKSHGAVLVDDKEYVTKTILFTLTVLPDVCQPLLIVTTPASLSAWEIQFNHLAPFINVVVYDGQKDTLKLIQDLEFYDNRRCMMLQVLLSHPDAILEDIETIERIRWEAVIVDYYENSAFKYFEQLKKISTDFRMVLLGSPIKDNVPEYMNLLAFLNSEDKGYSDYVNADDALVMSKARFTHHIAYERKTDSSKFLEYWVPSCISQPQLEMYCSILLSKSSVLRSEMETDSVGALHDIYLSLKKCCDHPYIVNEFLRSSLSNNSNVTENIDTVVHASGKLLVLDKMLNEIKKKSLRVILLFQSDRAGGNKMGNILEDLMHHRFGPESYERVEYRAVLSRKQAAIDKFNNKTNGRFVFLIENRACLPSIKLSSIDAIIIYGSDNNPLNDLKALQKIKIESQFERVSIFRLYTPFTVEEKSLVLARQGIVIDNNIQDLRTSLKHSLLRWGAAFLFSRLDEVQQDDHASKSSEMERHFIDEVIVEFLTKLSTTVEDSTEVHRKSISKANMSGELYSRNITLMGEKEGISVLEDNPAEFWLNLLDGRSPHVSCISEPLQSRVTKSQTMDEVNAPAEEINEARKKHRKVGEIMGSSSKVVSDKSNDDALPDICTTSGPALQPVDVTQQKSVQSEGSESLMSTPKNLHAQMKQELSKLIKVLQLPNTIQFNGAKIAGQVLIEVDNVTLLVEQFFEYLLNNHVVVQEPKYIFHALNIALCWRVASIHNFKVDHKESLALAEKRLKYECNEELARLVYDSLKRKFPKKAGATGSNCQSTSVEKTKPSQQETSNILRNDHIFPKQRMDLHDNFMNGALQEGSFVAAQMVSEEQELIAVPGTHMECHFSTDELPDIVEKRINLIDNVFSVREYRIFDKQQSQISELEKYTQNKTARLKTVCNLVLEHICRSHADVETRNDTIKQTVQWFTMLMYAFLEHMRLQHSKLESLQSNTWAEERQLKEKLCLEAKSGQLDHTFDQQIALPDSNFVMQEFIHLKEQSSNSHVSGSAVSDCQQLCHDRLKMVNTLVRNVVPSEPISAQTVRNGSVEVVMVAGQPAPEVVDFPENNTCYSPDGIGLQKAKSPSIRPSNDDSINQESSASEYTSTENVERDNANPSTLPGVATSPAIGIYANLESTMVASTQNLTIFPASKEVATQSNLSTLPGSQTVETSQQPPAEAKLTENLGVTAWDVQPEMQTTTSTLDSPSARMCPDNNNQTVHQPDTSTSPLQEGSTSCHLTSVDATAGVTAKVDDTAAADPLDSETQSYTAAHKPAALLVSTEVETQTDQSSMLERQSISVPLVQSSLSSQNPPAEAEPASTLSRETARDVQPERQQSASVLETSLQRMHPDDDSQTKHQLETVLSQRGETCGHLGDAREIVDANDSNTVCDVRAHLESPIFATPQSLVICQGLSEVGSQGNISNMSSQQSTDLSAQQNLAPSPLPPAEAERTGLLTTQPAQNFQPELQPSTSLFDASLESNNISQTDCQSDRAVVFLQEGATTQQHLLDTGVVVDDIVAEEPSHSESPTYIIHETAALVVSTEVETQTCQSNIPIQQNTSHPAQQSPETSRHSIASPVGLEATQEFQPEMQPSTSGQDQSEELEQEGMSSSAIQDLQPEMQPPNSVQGQYPGAVLCIAAAEDLQPLMQSSTPVPNQLAEANQEGMLSAAAAQNLQCETQRLTSTQDAPFERTDLSGIPVPRSITTAHQSVVPSWDLQTGVEPTGALCMETTHERQSELPSGSMQERSAETRANLVQRSCTTETCDLQPQLDLSSTIQTVQLEGIRSEDMNQIGVQSNSALSSEQPTQPLPVAPLVFNYQRFSDEPLKNELERLKHTSNVLSKVHEQKRKQLLVEYNQEMEKLKQKYDSLLQKEDSFYAQKEAELDTIYRKVFINQSLAENFRRKFLPLSAAQGGSTRPTIGQLVQSSQEPSARIVAEQVTASPVTLSSAVRPQVLHSSGPYVQPSLVVQPSSQATQPQSILPGNMYRAMSSSPFSSTPMPMPHGTYRAAGAQPHAPSPHLQQLRMPSPYATSHGNQHQRPSILASLLPFVLPSSSNPSLTAPLSLNTVVHRTSGPLNAGAGSQHAGSQISGVNPSGSSASASLNTWLTARLALTSEARGTVSSTEVVCLSDDES

SEQ ID NO: 16609 - protein, 2071 aa, Oryza sativa
  Clone ID: TF_OSC900030j.C1.p7.fg
MSDARSRRSVASSTRRQQDAELATTEERRRATAQTTAAAARAARLAAAELAATRVEAETEAAEDVARAAKVEVETLRSSINGSIAGDITADRELEELARGRARERAERWAAAHLHGGGPRDRAPADGNPDGRGRAGGSAALSPLTGAMVTTASRRWSGTLVPAKRTAKEAWDAIAAARIGSDRARKSTLQALRKEWENLAFKPGEDVDDFALRLNTLLQKMVQYGDDTYDEERAVEKLFRCVPEKYRQIARSIESLLDLSTMSIEEALGRLKVVDGDEPQPLSGPITIGGKLHLTREQWEASQGDGRKGESSSPTGGCKPRKAWGGVQLRLLTGVYYIPALRNSIISVGQLDENGSRVLVEDGLMRIWDRRRRLLAKITRGTNRLYILSAQVAQPVCLAARRDDEAWQWHERFGHLHFEALKRLSAKEMVRGMPCLDHVEQLCDVCVVTKQRQLPFPQQTSFRAKEQLELVHGDLCGPVTPATPGGRRYFLLLVDDLSRYMWVMVLGSKGEAADAIRRTQAAAEAECGPKLRVLRTDNGGEFTAAEFASHCADEGIQRHYTAPYSPQQNGVVERCNQTVVGMARALLKQRGMPAIFWGEAVVTAVYILNRSPIKALDGRTPYEAWHGRKPAVSHLRVFGCLAFAKELGHIGKLDDRSTPGVFIGYAEGSKAYRILDPETQRVRTARDVVFDEGRGWVWDKAVDDGSTPTYDDFTIEYVHFERAGGVGSSSSPSVSTPVPEPPPTPTPTHPRATTSTTTSSSSTPPQPVSPRAPAPTATPPGTSTPTPARVERSPVEFATPFSHDEERIDAYHDGEQLRYRTMQDLLGDQPVPGLVPRDLEAQLHLACDDGEPRSFAEAEKHAAWRAAMRSEMDAVQENRTWELADLPRGHRAITLKWVFKLKRDEAGAIVKHKARLVARGFVQQEGIDYDDAFAPVARMESVRLLLALAAQEGWGVHHMDVKSAFLNGDLKEEVYVHQPPGFVLPGKEGKVLRLHKALYGLRQAPRAWNAKLDSTLKGMGFEQSPHEAAIYRRGNGGNALLVGVYVNDLVITSTKDAEVAAFKEEMKATLQMSDLGPLSYLGIEVHQDDSGITLRQTAYAKRVVELAGLTDCNPALTPMEERLKLSRDSTAEEVDATQYRRLVGSLRYLTHTRPDLAFSVGYVSRFMQRPTTEHQQAVKRIIRYVAGTLDHGLYYPRCPGKAHFVGYSDSDHAGDIDTSKSTSGILFFLDECLVSWQSVKQQVVALSSCEAEFMAASAASTQALWLARLLGDLLSRDTGAVELRVDSKSALALAKNPVFHERSKHIRVRLSNMQRGSTTTTIGSCNLRWATGFGSVSLATPVKGKLGPRYYGLEIINKVAYHLALPAGARLHDVFHVGLLKPFVGSPPTTPPALPSTQHGAVLPALAQVLKSRVSHGVRQLLVRWDGLSASATSWEDLDDFRTQYTVFQLEDELFVEEGRDVMWGIPYRRRNRQGTLLSNSFSVPDVSCVPDLTMQHMSAGQLADRNYRVILDPNFCYIQDRCTGQLVGTGPRRRDSQRLWELDWIHLPSTASASLVGSVFAASSTSSFAQWHHRLGHICGSRLPTMIRRGLSGHVSGHESLHQCQGCRLGKQIQLPYHSREYLSGALRHVLYEYGTLAQFSCPGAHAQNGVVERKHRHLLETARALLLGSCVPPHFWAEAVFTANYLVNIQPSSALHGGIPYEHLCSKLPDYFGLRLFGYVCYVLLAPHTTSASLVDPLSFLFLPDASIASTRPESQLAMAEEIAALERTGMWDLVPLPAHVCPITCKWVYKQEHGRDYDETFAHVAHMTTVRTLFAVASIREWSISHLDVKNAFLNGELHEEVYMRPPPGYSIPEVETPMELNVHLCATYGEPLSDPTHYHHILHYTRVLRVLRYLRGTIVHRLFFPRSSSLQLQAYCDATWASDSSDRRSLSAFCVFLGGSLISWKTKKQTAVSHSSAEAELHAMALVIAEVTWLRWLLEDFGVSVSMPTPLLSDSTDAISMARDPVKHELSKHVGVDAFYTRAQVQDGVVAPRYVPSEIQLADLFTKAQTGAQHRFYLSKLSVLDPP

SEQ ID NO: 16610 - protein, 1573 aa, Oryza sativa
  Clone ID: TF_OSC401439j.C1.p13.fg
MPRGPRVEDPVLEEVQPWETAVDELRLSMMDLQRKVEEDHKLVQEQLQNQAVQAQVYKDEVMQNLLSIQQMLGGTTSCMGQEIKGTPKTPGFAQSVVGGGKAVDTNAASTSRHPLFDYRNLSCPMTTQAIETTDLPPTVFTPKPVSTPPSEWNTSVYFTTPTVPPPIPPVPPPPPNQNNLPQNQNYNPYNMNYQYTPFYYPPYPPYNTPWNLPQYNYPPPSHTPPNQPFLPQNWDRRFGPYHDPNGRERTQYAENAHRRSKHVDFPIFDGECPESWIRKAEKYFALNQTPEEEKVLVAEIYITGRADQWISSSDVLTEQLTWPEFKSMICQRFAAKSNIEVIDTFRNLKQYGSVDVYIDKFEEVMALVKRNRPNLTEQYFLDYFISGLKDHIKRPLKSLHIQSLVDAYEHARNYDVPPRSSPTVAVSQSKEMPKLPVKPALKDDKPSPFTAPKSFGRCFKCQEPWVPGHGRVCKATKQIYLVTLDDDGEEMPDNAAAQFTTPPGSPAHEATTHTDLSLHALEGTNSVATTFTIHVCIGKMSATALIDSGSTSTFISPKFVSKAGLEIVNNDPIPVKVANGGTLYTGARCVDVPYMIQQHQFISTFRLLNLKGYDIVLGCDWIYHHSPLTLNLKTRELTIHKDGLLELTLPDIKPVALPPQRDCDHTIPLIPGAKPVNVRPYRLPYQKKNALEELVQQLLTSQTIQPSMSPYSSPAILVKKKDGTWRLCVDYRQLNASTIKNKYPIPVIEDLLDELQGAQIFSKIDLRSGYHQIRMHAADVHKTAFSTHLGHFEYLVMPFGLTNAPATFQALMNKILAPYLRKFVLVFFDDILIYSKSATEHAQHLSLVLQLLRHHQLFAKPSKCVFGQDQVEYLGYIISSSGVATDPVKVQAVQNWPTPTSITELRGFLGLAGYYRRFIKNFGIICRPMFDALKKNNFHWQEVQQQAFDAIKLQLAQAPVLAMPDFSLPFILEADASGHGIGAVLMQNGRPLAYLSKAIGPKAAALSTYDKEALAILEALKKWKHYFLGTSLIIRTDQASLKYINEQRITEGVQHKLLIKLLSYDYKIEYKKGQENKAADALSRMQQLNALTTTVIVPQWITEVAASYSTDPKCHELESHLHIAPQSHPPYTLKGGILRYKDHIVVGAGNTLREQLLVSFHDSALGGHSGERATYQRMKQLFYWPGMKLAVTQFVKACPVCQKNKTEHNMPAGLLQPLPLPEMAWSHITMDFVEGLPKSEGKDVIWVIVDRFTKYAHFIPLSHPFTADQILTQFLEHFYKLHGLPTVIVSDRDRIFTSSTWKEVFEKAGVKLHFSSAYHPQTDGQSERVNQCLENYLRCMTSSKPRKWKALLPHAEWWYNTTFHTSLGMSPYQALHGIKPPLLAELLLPGSLLEGERNKQEAKAALLETIKSHLVKAQARMKYFADQHRQERTLEVGDMVYLKMQPYRHNSLGLHSSLKLHSRYYGPFRVLERIGSVAYKLLLPVTSQIHHVFHVSQLKKHLGSRAVPEQGLPLIDAEGRILSTPLAVLDRRLIPRNNEPVVQWKIHWANLPESAATWEDAAFITKVFPSFTP

SEQ ID NO: 16611 - protein, 1509 aa, Oryza sativa
  Clone ID: TF_OSC900392j.C1.p8.fg
MALLPPLAPPTETAQFPEGAGMAAWFSEAAGTVWSCGLEMAPFPAAARAVALSRSLPSREMDEKVEIFVVDLTEVSEQYEFLALDFIRSEPGGGRHFCKRKQGRELVPELFLQKNWMVTKTRSNETILDMEELNEFRVDMANLKKEGLLLELCKQKNVEEVDGDTDAAVAAVAAEKANKTVSSDTGGAGPSNPTAGNPPEVRFAIEHNTISVEGVGSSRGPQDAAAVMNGWVFDTSMGTHRPNVFGNGSQQGFDRVGGIPRRFQGNSGGRALKWYRGIGLPWQVITWPQWCAMVCTSFSAADVHEAMELFQNVKQHGQIVEHYIDKFEEYMDLVRRDHPYLQEQYLNSCFIGGLRSDIKHDEAWFPGHQCKVKKALNALLLEEEEYEGTEEVGREKKAQEKVLEETEHAPEEIDQEELMYVSQNAMQGATRPDTFSVIIQINGRRAVGLVDSGSPSTFMDQEYAIRNDCPLVSTDSKKVVVAGGGELKSEVQVPDILYQIQGETFSNKFNLIPLKGYDIILGADWIYKYSPITLDLKKRELGITKGEKVITLQDFTNTGKHLLVDSSKVDKIIRKGGLGYLFQITQVAEESDVEESISIPDDIQDILQRFPTVLEKPKGLPPQRGCDHVITLKDGAIPPNLRPYRVPHHQKEAMEKIIAELIESKEIQVSNSPYSSPAVMVRKKDGSWRLCVDYRQLNAQTVKNKFPMPIIEDLLDELNGAKIFTKLDLMSGYHQIRMSRPDIPKTAFRTHLGHYEYQVMPFGLTNAPATFQSLMNQVLAPFFRKFVLVFFDDILIYSKDREEHKEHIRLVLQVLKANNLVIKPKKCAFGLSSVSYLGHIISQNGVATDPGKVEKIVSWPIPKNVTDLRKFLGMTGYYRRFIQGYVLICRPLHDMLKKEGFQWGEKQTEAFKFLKQKMCSSPVLTLPDFSKEFTIEADACGTGIGAVLMQGDRPIAFYSKSLGPKAAAQSIYEKEAMAILEALKKWRHYFLGSKLVIKTDQQSLKHMMNQRLVEGIQHKLLLKLMEYDYIIEYKAGKDNVVADALSRLPQDQLQTEICNAITVVIPKWIIDVQNSYEGDVQAHKILSMIGTNSDPDQHYSFENGILRFKGRIYVGEETSIRTNLIRDYHCSAFGGHSGMRATHHRIKALFYWPGLKKTVEMFIRECPVCQITKVEHIHIPGLLNPLEVLDMAWTHITMDFIEGLPKSKWKDAILVVVDRLTKYAHFLALSHPYSVEQVVEIFMNNIHRLHGMPMAIIIDRDRIFTSQLFQEIFKSMKVQLRFSTSYHPQTDGQTERVNQCLESYLRNMTFQEPHQWYSWLSLAGWWYNTTYHTSLQMTPFQALYGYPPPQINEFSISCNVSAEARTERSLNVGDMVYIKLQPYRQTAFGIRGSLKLRSKFYGPFKVLEKIGQVAYKLQLPEDASIHPVFHVSQLKKHLGQRAVPMSNLPSMGPDGQIKTQPVAVLQRRMIPRNGVAVTQWLILWENLGPADATWEDAAVIQSMYPTFHP

SEQ ID NO: 16612 - protein, 420 aa, Oryza sativa
  Clone ID: TF_OSC405185j.C1.p13.gm
MEEDEEEDDELLMEMTSDDELLFLNGIHVRLDLERTLTTAPIKLSAPLCQSLESMEGKLLEKLELLTQKMEAMDDKMTKHGGRLDQAVVKVDLALEAVGKLQQDQLQAARLQKSLASSDQGVQESDSQTELCAISYPQILKWQKGCDIWAAVLLEPTDNADSQSISEVVAPLLSEFADVFQEPKCLPPHRTFDHAIFLYPDDAPVNSKPYRYSPLQKDEIECQVKDMIDSGLKSDVANFVKQCQICQQAKSEHCKLPGLLTPLPIPKEAWVDISMDFIEGLPKSDGFTVILVVLIKWSSLPAHQATWEDYEVLKTRFPSAPAWGQAVSPAGGRLETISCQPRLVDVPLPNNALSAVQATTSEVSKLIIPTNQSLQLHDPPSPNERTKKTLLDSQKSCRMRHIPCVMRMAKLAHQDFRGST

SEQ ID NO: 16613 - protein, 1700 aa, Oryza sativa
  Clone ID: TF_OSC401078j.C1.p4.fg
MAFFSNSGSRADSGGYNLNEKAEDEAAYESVGDRDVDLNSRQWNLNEKAEDAYHSDEEQYDGGRSGPNSSENKSVQNARKINGPSGPWGTNFLKDCGPTQTAKEEQLTSNRGMEYGSAASSHDDMDASGEDDELNRGHGEVPAEEMLSDDYYEQDGEEQSDSLLRGGMRRPSCSTSGAAAESVSSRQKKKPTKYNAYEDEDDDEYNDENDDEDDDDADEDDPDDVDFEPESDTEKAADKDKFVDSENSDEEEDDELELSDDDEDDFVENKRQCKRLKVGGTKTSKGRKLPVQVQRKRGVSFTDEDSSGKDSDAPSDTDISHRAKKPDKLHQKTVGRKDVFSNVDSHEVRTSGRRRTARNISYAESEESDDSEEKLAKQQKVLKEDPEEEEGETIERILWHQPKGVAEEALRNGQSTQPTVISFTSDVDQSWDDVEFYIKWKGQSFLHCQWKTLSELQNVSGFKKVLNYMKRVTDELRYKRSLSREEVEVHDVGKEMELDLIKQYSQVERIFADRVSKVDGDDLVPEYLVKWQGLPYAESTWEKDTDIEFAQDAIDEYKAREAATSILGKTVDFQRKKSKASLRRLDDQPEWLKGGKLRDYQLEGLNFLVNGWRNDTNVILADEMGLGKTIQSVSMLGFLHNAQEINGPFLVVVPLSTLSNWAKEFRKWLPDMNVVVYVGNRASREICQQHEFFTNKKGGRHVKFHTLITTYEVILKDKAALSKIKWNYLMVDEAHRLKNCEASLYTTLLEFSTKNKLLITGTPLQNSVEELWALLHFLDPSKFNSKDIFVERYKNLSSFNETELANLHKELRPHILRRVIKDVEKSLPPKIERILRVDMSPLQKQYYKWILERNFQNLNKGVRGNQVSLLNIVVELKKCCNHPFLFESADHGYGGDSIGDRNKVERIVMSSGKLVLLDKLLMVRMLDILAEYLSLRGFQFQRLDGSTRADLRHQAMEHFNAPGSDDFCFLLSTRAGGLGINLATADTVIIFDSDWNPQNDLQVLDHLVIQKLNAEGRLEKKESKKGGSMFDKNELSAILRFGAEELFKEDKTDEETKKKLESMDIDEILERAEKVETKGGEGEEGNELLSAFKACSVHYHMTCDSDIMLKFYTSVANFSSGEDDATFWSRLIQPDASDMVEETLAPRAARNKKSYVEDHQLDKNSNRKRRGIDAQEKPRRRSSRTMDTAVSLPLIDGSAHQVREWSFGNLSKKDATRFVRAVKKFGNPSQIGLIVDDVGGAIAKSSVDQQLELFTLLIEGCQDAVKNNMDAKGTVLDFFGVAVKAHELIARVEELQFLARRIARYKDPVRQYRIQAPYKKPQWSASCGWTETDDARLMVGIHWYGYGNWEKIRLDPKLSLTAKIAPATLGERETFLPRAPNLDNRASALLQKEFANLRGKSSKAKGGPRQAIDNESNGGARSLRGRQKDTKIKEDNNSIKDDFKKRKVVEPEAREEGEISESEAETKYRQDKEEKWLEWCSEVLDDEQEILKRLDRLQNTSVNLPKEKVLSRIRKYLQIIGNKIGEIVDQHSESYKQSRMAMRLWNYVANFSSMSGEQLHDLYLKLSQDQMEAGVGPSHGGNFASVPPNRGPKSNQLHPSRNQRSTRSVQYVSESFNNGENTGNSEAWKRRRRSEPDNQFDNQPLYQAPPIMTNGNRLQESSSSAGILGWAPVEMRRYGNERPKRGVHPSRFPPGHGPLL

SEQ ID NO: 16614 - protein, 1100 aa, Oryza sativa
  Clone ID: TF_OSC400825j.C1.p42.fg
MSSLVERLRVRSEKRPLYTLDESDDDLPPRGGGGKGRDRHSDGPTERIEREDAVSPLTEMEKILDCEETKPDASEETSSSESGSKKKPVKRYLIKWKGISHLHCTWVSESEYLETAKIYPRLKTRLNNFHKQMDSTDKSDDDYSAIRPEWTTVDRILATRKSSTGEREYYVKWKELTYDECTWENDSDIAVFQPQIERFNEIQSRRKKSTDKCKSVTREIRQYKESPKFLSGGTLHPYQLEGLNFLRYSWYHNKRVILGDEMGLGKTIQSIAFLGSLFVDKLGPHLVVAPLSTLRNWEREFATWAPQMNVVMYFGSAASREIIRKYEFYYPKEKPKKLKKKKSSPSNEDKKQSRIKFDVLLTSYEMINMDSTVLKTIEWECMIVDEGHRLKNKDSKLFGQLKEYHTKHRVLLTGTPVQNNLDELFMLMHFLEGDSFGSIADLQEEFKDINQDKQVEKLHGMLKPHLLRRFKKDVMKELPPKKELILRVELTSKQKEYYKAILTKNYEVLTRRSGGHVSLINVVMELRKLCCHAFMTDEPEEPANSEEALRFSDVINILIPLPAFYYFQTHIDAEVLEFSDISCCYLFISRLNKHNAIFEVVDIWRLLESSGKMELLDKMMVKLKEQGHRVLIYSQFQHMLDLLEDYLSYRKWSYERIDGKIGGAERQIRIDRFNAKNSTRFCFLLSTRAGGLGINLATADTVIIYDSDWNPHADLQAMARAHRLGQTSKVMIYRLVSRGTIEERMMQLTKKKMVLEHLVVGRLTKGTNIVQEELDDIIRHGSKELFDDENDEAGKSCQIHYDDAAIDRLLDRDQADGEEPVEDEEEDEFLKGFKVANFEYIDEAKALAAKEEEARKKAEAEAANSDRANFWDKLLKDRYDVQKVEEHTTMGKGKRSRKQMAAADEDDITGLHDMSSEDDDYSYDDDVSDNDTSLQSGLAGRRGPYSKKKQRSNVDSLPFMEGEGRALRVYGFNQIQRTQFLQTLMRYGFQNYDWKEFTPRLKGKSVEEIQRYAELVMIHLLEDINDSGYYADGVPKEMRTDETLVRLANISLVEEKVAAMEQGKITKLFPSYLLYEFPSLVGGRVWKAEQDLLLLKALIN

SEQ ID NO: 16615 - protein, 1364 aa, Oryza sativa
  Clone ID: TF_OSC412868j.C1.p3.fg
MSSLVERLRVRSEKRPLYTLDESDDDLPPRGGGGKGRDRHSDGPTERIEREDAVSPLTEMEKILDCEETKPDASEETSSSESGSKKKPVKRYLIKWKGISHLHCTWVSESEYLETAKIYPRLKTRLNNFHKQMDSTDKSDDDYSAIRPEWTTVDRILATRKSSTGEREYYVKWKELTYDECTWENDSDIAVFQPQIERFNEIQSRRKKSTDKCKSVTREIRQYKESPKFLSGGTLHPYQLEGLNFLRYSWYHNKRVILGDEMGLGKTIQSIAFLGSLFVDKLGPHLVVAPLSTLRNWEREFATWAPQMNVVMYFGSAASREIIRKYEFYYPKEKPKKLKKKKSSPSNEDKKQSRIKFDVLLTSYEMINMDSTVLKTIEWECMIVDEGHRLKNKDSKLFGQLKEYHTKHRVLLTGTPVQNNLDELFMLMHFLEGDSFGSIADLQEEFKDINQDKQVEKLHGMLKPHLLRRFKKDVMKELPPKKELILRVELTSKQKEYYKAILTKNYEVLTRRSGGHVSLINVVMELRKLCCHAFMTDEPEEPANSEEALRFSDVINILIPLPAFYYFQTHIDAEVLEFSDISCCYLFISRLNKHNAIFEVVDIWRLLESSGKMELLDKMMVKLKEQGHRVLIYSQFQHMLDLLEDYLSYRKWSYERIDGKIGGAERQIRIDRFNAKNSTRFCFLLSTRAGGLGINLATADTVIIYDSDWNPHADLQAMARAHRLGQTSKVMIYRLVSRGTIEERMMQLTKKKMVLEHLVVGRLTKGTNIVQEELDDIIRHGSKELFDDENDEAGKSCQIHYDDAAIDRLLDRDQADGEEPVEDEEEDEFLKGFKVANFEYIDEAKALAAKEEEARKKAEAEAANSDRANFWDKLLKDRYDVQKVEEHTTMGKGKRSRKQMAAADEDDITGLHDMSSEDDDYSYDDDVSDNDTSLQSGLAGRRGPYSKKKQRSNVDSLPFMEGEGRALRVYGFNQIQRTQFLQTLMRYGFQNYDWKEFTPRLKGKSVEEIQRYAELVMIHLLEDINDSGYYADGVPKEMRTDETLVRLANISLVEEKVAAMEQGKITKLFPSYLLYEFPSLVGGRVWKAEQDLLLLKALIKHGYARWQYISDDRDNGIFEAARQELRLPTANELISSHSNNETNGNLESTQEGQSNPTSMIHYRDTQRKIVEFIRKRYHLLERCLNLEYAVIKTKTPVPDDLAEQDFPGGHRPAVPDYSEMLRELPVLEPISKEVAPEGTTDQSQVSHLYNKMCFVLEDSAVPALNSHFGDKAASSGLANSLHKFEAVCEDVSRILRSHENGTTPKEEVMLDASSKETTSPKDPATEVPSSASKEATPPVQDPVIEAVKEEPPTVKAEDKMEIDS

SEQ ID NO: 16616 - protein, 159 aa, Oryza sativa
  Clone ID: TF_OSC423269j.C1.p6.gm
MPRGISRLNDGDVVEFSVGSGNDGRTKAVDVTAPGGGALTGGSRPSGGGDRGYGGGGGGGRYGGDRGYGGGGGGYGGGDRGYGGGGGYGGGGGGGSRACYKCGEEGHMARDCSQGGGGGGGYGGGGGGYRGGGGGGGGGGCYNCGETGHIARECPSKTY

SEQ ID NO: 16617 - protein, 241 aa, Oryza sativa
  Clone ID: TF_OSC102138j.C1.p12.fg
MAAAARHRGTVKWFNDTKGFGFISPDDGSEDLFVHQSSIKADGFRSLAEGEQVEFAISESEDGRTKAVDVTGPDGSFVKGGAGGGGGGGGGFGSRGGGGSGGGGRSYGGSWGGGRRSGGGGPGGGCFKCGESGHMARDCFNGGGVGVGGGGGGGGGAGGGCFKCGEMGHMARDCFNSGGGGGGGGGGGGGGACYNCGETGHLARDCYNGGGGGGGGRFGGGGDRSCYNCGEAGHIARDCHK

SEQ ID NO: 16618 - protein, 210 aa, Oryza sativa
  Clone ID: TF_OSC401232j.C1.p22.gm
MRGAALNAGCTACLLPSVDGAGRSSLLLLQGGGSGWPAKRGGERLLGLGGEGKMVSERVKGTVKGFDATNGFGFITPDDDGEDLFIHQSSLKFDDYRSLNDSDVIELSVGSGNDGRNKAVDVTALGGDTHTGGFRPSCAVGARRPLPSTAAPLSSALNSVRCAVIRSPPPSLYTIGRAVVVVHHQPLVVVLTTSAERRFGEEVLDRMRGG

SEQ ID NO: 16619 - protein, 119 aa, Oryza sativa
  Clone ID: TF_OSC411506j.C1.p5.hg
MKGFDATNGFGFITPDNGGEDLFVHRSSLKFDSYRSLNDGDVIELSIGSGDDGRTKAVDITALGGGAHTGGSRPSCGQIPTAASRRLSTSPRCLLALDVLLLPAPRRSPPLVIPSSSPG

SEQ ID NO: 16620 - protein, 197 aa, Oryza sativa
  Clone ID: TF_OSC401879j.C1.p14.fg
MASERVKGTVKWFDATKGFGFITPDDGGEDLFVHQSSLKSDGYRSLNDGDVVEFSVGSGNDGRTKAVDVTAPGGGALTGGSRPSGGGDRGYGGGGGGGRYGGDRGYGGGGGGYGGGDRGYGGGGGYGGGGGGGSRACYKCGEEGHMARDCSQGGGGGGGYGGGGGGYRGGGGGGGGGGCYNCGETGHIARECPSKTY

SEQ ID NO: 16621 - protein, 273 aa, Oryza sativa
  Clone ID: TF_OSC401093j.C1.p13.fg
MSSPFLGSSSSSASSPLSYLTPPRPPPPPPPLLMVRHGLARWLTDLDDELMVFDDDLGVQGQGYAAAANGGIGGGGVEAVNAAAAPRQGGRHAGHPPLPRPPPRQCPRCGSANTKFCYYNNYSRTQPRYLCKACRRHWTEGGTLRDVPVGGGRKNSKRAAGGGKAGATASTAASAHVVAPAAAPPTSSSFPDLLRQMLMAPATAGGGGGYSIDLTAWQQMAAFAAPPQAATGDVGGAVGAASTAAPDANCGGGGVQYWNGWLQDDMPGLDGSC

SEQ ID NO: 16622 - protein, 513 aa, Oryza sativa
  Clone ID: TF_OSC400138j.C1.p15.fg
MTTRRTRKERKQMGGGGKCKRGKRGKIAAKRRRGQVRCCSSSSSSGGARRRARERESEESLGEMGECRGGGGGGDGLIKLFGKTIPVQPDAKFLILGSASLGEFSDVQQHSGSSSSSTESDVQETAAVAVADPSPRSEVVDGESPPQPGGEAASHQQQQKEMKLKKPDKILPCPRCSSMDTKFCYFNNYNVNQPRHFCKHCQRYWTAGGAMRNVPVGAGRRKNKNATAAAHFLHRVRACAAAAAMPAAPHDATNATVLSFGGGGGGHDAPPVTLDLADKMTRLGKEGLVAHARNADAAAACSEVSSNRDDEQIGNTVAKPANGLQQHPPPPHHHHHSAMNGGGIWPYYTSGIAIPIYPAAPAYWGCMIPPPGAWSLPWPATVQSQAISSSSPPTSATPSVSSFTLGKHPREGGDHEARDHHGNGKVWVPKTIRIDNADEVARSSIRSLFAFRGGDKADDNNDDDGTGVHKLATTVFEPKRDSKTAKHPAITSLPLLHTNPVALTRSATFQEGS

SEQ ID NO: 16623 - protein, 318 aa, Oryza sativa
  Clone ID: TF_OSC401827j.C1.p1.fg
MAAAGILPVSGGGGASSARPVSMAERARMAKIPQPEPGLKCPRCDSTNTKFCYFNNYSLTQPRHFCKACRRYWTRGGALRNVPVGGGFRRNKRGTKPSNSKKPAAAVAGGVMAPPHAQLQLPFGFDGGGGGGHGSIIGGGGGGGASRLGFPELSSLHAAAAVDYQLGGGGGGDGLGLERQRLPHFPFLARSNAAVHPPPLMSTAAGVSYPFGDVAAGGLGGDMPANAASVAGSAGLITQMASVKMDDIDNHPPPSAATTTASSPIEFLGLRGSLQFWGGGGGHRGGGDGAGGSAAPGGGGGGWSDLPAFDLSTSGNIL

SEQ ID NO: 16624 - protein, 438 aa, Oryza sativa
  Clone ID: TF_OSC401231j.C1.p3.fg
MRISEEKPCTDQELDADQMNSSSFNSSSECENQTPSNDEMTGSESKSEAAQTEGGGSSEEKVLKKPDKILPCPRCNSMDTKFCYYNNYNINQPRHFCKSCQRYWTAGGSMRNLPVGAGRRKSKSSTANYRSILITGSNLAAPAGDAPLYQLSIKGDQTATAVKFAPDSPLCNSMASVLKIGEQSKNAKPTSTAQPRNGETQTCPASGTTSDSPRNEPVNGAVSGHQNGIVGHSGVPPMHPIPCFPGPPFVYPWSPAWNGIPAMAPPVCTAPAEPANSSDNGSTASVQWSMPPVMPVPGYFPVIPSSVWPFISPWPNGAWSSPWIQPNCSVSASSPTSTSTCSDNGSPVLGKHSRDSKPQGDDKAEKNLWIPKTLRIDDPDEAAKSSIWTTLGIEPGDRSMFRSFQSKPESREQISGAARVLQANPAALSRSQSFQETT

SEQ ID NO: 16625 - protein, 389 aa, Oryza sativa
  Clone ID: TF_OSC401894j.C1.p43.fg
MEEMLMAANAAAGANPNPAATAPSSVTGGALRGGGGGGAPPVAGGAGAGSTERRARPQKEKALNCPRCNSTNTKFCYYNNYSLQQPRYFCKTCRRYWTEGGSLRNVPVGGGSRKNKRSSSSAASASPASASTANSVVTSASMSMSMASTGGGASKNPKLVHEGAQDLNLAFPHHGGLQAPGEFPAFPSLESSSVCNPGGPMGTNGRGGGALSAMELLRSTGCYMPLQVPMQMPAEYATPGFALGEFRAPPPPPQSSQSLLGFSLDAHGSVGGPSAAGFGSSAGLQGVPESTGRLLFPFEDLKPTVSSGTGGGGASGGGAGVDGGHQFDHGKEQQAGGGGGGPGGHDTPGFWNGMIGGGSGTSWGIVKRRMKGRTRLGRKKEKWTPITMH

SEQ ID NO: 16626 - protein, 129 aa, Oryza sativa
  Clone ID: TF_OSC414619j.C1.p1.fg
MQEFHPVPGLAGRLFGGAAAAAAVAAVEEVRCPRCDSSNTKFCYYNNYNLSQPRHFCKACRRYWTKGGLLRNVPVGGGCLKPKRPAPPEFFFLHRGGGISLLLATQTDCVLSACLTVSGDSSRFAFVML

SEQ ID NO: 16627 - protein, 215 aa, Oryza sativa
  Clone ID: TF_OSC400431j.C1.p37.fg
MEVAEGRTVAAAAAGGGGLGGGARTEAEGLACPRCESTNTKFCYYNNYNLAQPRHFCKACRRYWTRGGALRNVPVGGGTRNKVAPAPCTGRRKRAAHAAHAAAPPPTTTASSAPLPLMPPAVAYELPFLPPPPPLPLAAVDPDRRLLDLGGSFTSLLAPAQLHNGHFTTGFLLGTMSSAPPPPPPPATSTPSPAPAAHPPVSDSIWAMGWPHLSI

SEQ ID NO: 16628 - protein, 276 aa, Oryza sativa
  Clone ID: TF_OSC413680j.C1.p1.fg
MQEQQPETGRRPAQQFATVDLRRPKGYAAAPATPQPGSAATAAAAAGPAATAAAAAAGEGDPCPRCESRDTKFCYYNNYNTSQPRHFCKCCRRYWTKGGTLRNVPVGGGTRKKSSSSSSSSSSSSAAAAAPAAKRQKTSKKRRVTTPEPLAATTPVLTEAAADSAAKTTTEATSEKKTTTSTTTTTPPAPDTTSEITTELVVPAVEEDSFTDLLQPDSAAVTLGLDFSDYPSITKSLADPDLHFEWPPPAFDMASYWPAGAGFADPDPTAVFLNLP

SEQ ID NO: 16629 - protein, 431 aa, Oryza sativa
  Clone ID: TF_OSC415629j.C1.p30.gm
MIFPPAFLDSSSWNDNNNNNHNQQQQQQHAHGHHQHHQVAAGCGGGGGGGDGNSHELLQQQSMIPGTLADGGGGGGAVGPAKPMSMSERARLARIPLPEPGLKCPRCDSTNTKFCYFNNYSLSQPRHFCRACRRYWTRGGALRNVPVGGGYRRHAKRAKPKPASAAGSASAATTTAGSTPAGSTTTTTTSSTCATPNAPALPAMLGGNLSILPPLLRLADFDAMSLGSTFSGMAAAAGKPPPVDAAGCYSVGAATGLEQWRLQQMQSFPFFHAMDHQAAMAAPPPAMAMPGMFQLGLDGDGHGSGGGEDGGELHHAMPSSKREGYPRGMYGDHHLAGGYTSYSSATTVFVVVLVMVCAWKFEKCTEKEEEDELKKEVHALVQWWNRLGQKEEESQTGRSVASTEVLGVGDPPPQVGSGAAADLRGSASARE

SEQ ID NO: 16630 - protein, 175 aa, Oryza sativa
  Clone ID: TF_OSC401137j.C1.p11.fg
MANLPSTAAAAAADASGFKLFGKVIQPDGQRGVEESAAAQAPPHPHPPAPPVMEAAAAAAGTSQTLQAAGGGGGGGGGGGGEPLPCPRCGSRETKFCYFNNYNVRQPRHLCRSCRRYWTAGGALRRVASASPGRRRPRPSAARSAAAAAASASAASPPAAVPAASEGAESVDSRS

SEQ ID NO: 16631 - protein, 347 aa, Oryza sativa
  Clone ID: TF_OSC17105j.C1.p4.fg
MAPAAGDDAVVPRKGAGGGGTTTPPPPPPAQQQQQQPLPPPPPQEQGLRCPRCDSPNTKFCYYNNYSLSQPRHFCKTCRRYWTKGGALRNVPVGGGCRKNKRSRSAAAASRLSLNLPTVEGIGGAAADPAAAAAARLGFLGGGTTMMMSSSTSPLGGAAAAVADFQQGGAVGMLPLPRLQSPAGGGVGHHQYVPFGEWPSGDIAGGNAVNGAAGHGAQQRLATMFLGPPGSASAAAAAAQANDGGGNGAQATASGHAAGGGGGAFMHMAGSVPSMEAAMPSATSWFMDSCSYGLPSPPPPATAAVAATTSSNLNSGGRSSGGDDNATSNCGSAIPAWGDISTFAMLP

SEQ ID NO: 16632 - protein, 371 aa, Oryza sativa
  Clone ID: TF_OSC900120j.C1.p17.fg
MAPAAGDDAVVPRKGAGGGGTTTPPPPPPAQQQQQQPLPPPPPQEQGLRCPRCDSPNTKFCYYNNYSLSQPRHFCKTCRRYWTKGGALRNVPVGGGCRKNKRSRSAAAASRLSLNLPTVEGIGGAAADPAAAAAARLGFLGGGTTMMMSSSTSPLGGAAAAVADFQQGGAVGMLPLPRLQSPAGGGVGHHQYVPFGEWPSGDIAGGNAVNGGGGHGAVSSTIASSIESLSFINQDLHWKLQQQRLATMFLGPPGSASAAAAAAQANDGGGNGAQATASGHAAGGGGGAFMHMAGSVPSMEAAMPSATSWFMDSCSYGLPSPPPPATAAVAATTSSNLNSGGRSSGGDDNATSNCGSAIPAWGDISTFAMLP

SEQ ID NO: 16633 - protein, 206 aa, Oryza sativa
  Clone ID: TF_OSC900263j.C1.p6.fg
MAPAVASSPSLVLSAAAATASNKRPADSDASPPHQGDRTGQQEKKQQQLECPRCRSTNTKFCYYNNYSTSQPRHFCRACRRYWTHGGTLRDVPVGGASRRGGGGKRRRVSADADPSSASPPPPTTSTTDAYADLPAGFPFLSDGAFLPQFGLAGVAPAAFSWASAVPDLYNCGIAPWDDGTAVTGAAWDNFADIAGLDLSWPPPGN

SEQ ID NO: 16634 - protein, 359 aa, Oryza sativa
  Clone ID: TF_OSC400755j.C1.p13.fg
MAGAGGAATAAAGGGGGGGVAAGRSGGGGGGGAAAAAGAGAPDPRAEALRCPRCDSANTKFCYYNNYSLSQPRHFCKACKRYWTRGGTLRNVPVGGGCRKNKRSRSGGAAPGGGVGRGGPGGGAAAAVSSAGGGAAGTSPASSLALPQPGSLPSLSSALGLTGGTSLASLLLGSGGSGGDHLGLFQAMQSVVSDAAAFEMHQQHQSQVDHLLGLGYGAAGAQIQAAKPWLHDGGATGGLLDGFYAPLLSGSIVPGLEELQVKAEATTGDHQQKSSAAAAGEQSWDLPTPSSSNVEASIIASDALMAAAAASMNPAVSAAAASTAPSAQSLLYWGNGGIGAAAAAWPDLANCGSSIATLF

SEQ ID NO: 16635 - protein, 355 aa, Oryza sativa
  Clone ID: TF_OSC408710j.C1.p17.fg
MPPHHGGLMAPRPDMVAAAVAASGGGGGGGGPTGGTAVRPGSMTERARLAKIPQPEPGLKCPRCESTNTKFCYFNNYSLSQPRHFCKTCRRYWTRGGALRNVPVGGGCRRNKRTKSSKSSSSTSAAGSASATGGTSSSTSSTATGGSSSAAAAAAMMPPQAQLPFLASLHHPLGGGDHYSSGASRLGFPGLSSLDPVDYQLGGGAAAAAAIGLEQWRLPQIQQFPFLSRNDAMPPPMSGIYPFDAEAAADAAGFAGQLLAGTKVPGSSGLITQLASVKMEDSNAQSAAMNSSPREFLGLPGNLQFWGGGNGAGPGGNGDGATGGSGAGVAPGGGGSGGGWADLSGFNSSSSGNIL

SEQ ID NO: 16636 - protein, 403 aa, Oryza sativa
  Clone ID: TF_OSC401232j.C1.p3.fg
MVFPSVPAYLDPPNWNNQQGQPPRPANVGGGDAQHLPVGPTAAAAAPGEIGGLPTSSSSASAAAAAAQQARPNSMAERARLARAPQPEPALKCPRCDSTNTKFCYYNNYSLSQPRHFCKTCRRYWTRGGSLRNVPVGGGCRRNKRSGKSSSAAAAGASSSSSKPSSSAARQLPGGGASPMPSAAASTQPGGAAAGAIIPPSGLSSMSHHLPFLGAMHPPGPNLGLTFSAGFQPLGGMHHHVDTADQFPVASGGGATIGASLEQWRVQQQQQQQPQQHQFPFLGGALELPPPPPMYQLGLEATRAAGTGATAAAAFTLGQTSATATTSRQEGSMKLEDSKGLEMSLQRQYMAALRQGDGVWGNNNGGNGGSDGGGNGGGGSWTMNFPGFHSSSGGGGDDGGGVL

SEQ ID NO: 16637 - protein, 493 aa, Oryza sativa
  Clone ID: TF_OSC400397j.C1.p44.fg
MAALRQGDDPAIKLFGRTIPLLLDPPAAAAAAADEENSVLENSVLSFLDFLATFGVMPNLGNGVKTNNDLPLVSDKLLIVKGIPFCPNNSKKNDLQGISRPDGRIEIDSMTEDVKTEPDGSVPEKILKKPDKILPCPRCNSMETKFCYFNNYNVHQPRHFCRNCQRYWTAGGAMRNVPVGAGRRRNKHVSKYCQAMMTCNNTVAPGDVSDVVHHQVITHGSSLLPATLKENETPTEFISEVPPCKSSASILDIGEPNDTDLVPLASGDNKEEKSCASSVVVSSCSENLMPDNAIMKEPNNRSGCCNGVALPFPTGPALVLPWSLGWNSVALMPATQCSMQPVLGLKDGIPCPPSWPPQLMVPAPGICTPVVPIPLVPPLWSCFPGWPNGMWNAQCPGGSSSLVLGKHSREESLQEEEKTRNYLWVPKTLRIDDPAEAAKSSIWATLGIKPDDKGIFKSFQPNVAKNGTAPESPQALQANPAAFSRSQSFQETT

SEQ ID NO: 16638 - protein, 440 aa, Oryza sativa
  Clone ID: TF_OSC401896j.C1.p16.fg
MGECKVGGGGGGGDCLIKLFGKTIPVPEPGACAAGDVDKDLQHSGSSTTEPKTQENTVQDSTSPPPQPEVVDTEDSSADKNSSENQQQQGDTANQKEKLKKPDKILPCPRCSSMDTKFCYYNNYNINQPRHFCKNCQRYWTAGGAMRNVPVGAGRRKSKSVSAASHFLQRVRAALPGDPPLYAPVKTNGTVLSFGSDLSTLDLTEQMKHLKDKFIPTTGIKNTDEMPVGLCAEGLSKTEESNQTNLKEKVSADRSPNVAQHPCMNGGAMWPFGVAPPPAYYTSSIAIPFYPAAAAAVAAYWGCMVPGAWNAPWPPQSQSQSVSSSSAASPVSTMTNCFRLGKHPRDGDEELDSKGNGKVWVPKTVRIDDVDEVARSSIWSLIGIKGDKVGADHGRGCKLAKVFESKDEAKASTHTAISSLPFMQGNPAALTRSVTFQEGS

SEQ ID NO: 16639 - protein, 205 aa, Oryza sativa
  Clone ID: TF_OSC401539j.C1.p71.fg
MAPAAGGFKLFGKVIMQCGVSEGTQDKAQGFVVAREKVEPEEEEEEEQRVPAAATSGQRASIKREAADRDEEQRQGGGDAAGQPTQRRLQDSAEARAAAAAPLPCPRCRSRDTKFCYFNNYNVNQPRHFCKACHRYWTAGGALRNVPVGAGRRKNRPLGPLAVAHHNHHHRAAAGFVLGFPNPSSPTSPSPVYTDRWPVTPDRPF

SEQ ID NO: 16640 - protein, 320 aa, Oryza sativa
  Clone ID: TF_OSC409189j.C1.p1.fg
MAKLASCMTASIYSTAINPRNKLNRNNKGIVPEEHGMGSSSPSAELIACPRAPMQAAAAAADRRLRPQHDQPLKCPRCESTHTKFCYYNNYSLSQPRYFCKTCRRYWTKGGSLRNVPVGGGCRKNKRAPPKKAAAHAQPAVAVAAALQGRHMETGLHLSFSGMQHHLAPPPPAAATAADPLCSLGLFDWKQYDPVFAGSGGGGSPVAALESAGGSEAQFMGAGMMGIGGGGVAEYHALSALRFAAGLGDHLALPFGAVRAEHDAVEVKPVAAERLLSLEWCGEASRTAAPESSISSLGGLGLWSGMIGGGHHHHGSSAAI

SEQ ID NO: 16641 - protein, 365 aa, Oryza sativa
  Clone ID: TF_OSC400070j.C1.p16.fg
MANKQWAAGSVVARARPCVRVRTLRGRRAGDGRAPDACRSDTLVKNVCHDSVTGSEHSKMENQSGWFYVTISKESQKRRRKREAQEFQSIPGLAGRLFGGAAAADIRRAQAQQGPASRCGGIPSPEAVKCPRCESTNTKFCYYNNYNLSQPRHFCKSCRRYWTKGGVLRNVPVGGGCRKTKRSGSSSAASSAPSTPTAATDNAKNQRRASASSPRSSSGGSGNTSPTAAAATTPTTPATPSSNTIAVINHATTTTTTTNPFPTDVPPPAPIFADQAAALASLFAPPPPPPLPVFSFAAQAKTEDGIASVLLAGQTTAPTAATVADMTPFTSLDAGIFELGDVPPAAYWNAGSCWTDVPDPNVYLP

SEQ ID NO: 16642 - protein, 439 aa, Oryza sativa
  Clone ID: TF_OSC423196j.C1.p8.fg
MASGSLLLPPACLQHPLPAAAAASGGVGGSSREQCPRCASHDTKFCYYNNYNTSQPRHFCRACRRYWTLGGSLRNVPIGGSTRKRPRPPVRRPPVHFTAAAAAAAAAAPPHHHHHHHGGPLTPPPATSSSSQQAGLLGSLFALGAAPLLEGRVGVGFDLGLGLPGPGHHHAVAGGGGPAAAVATSSSSSAAAPLLWPTGLLDSSSNNAETWRMAAGGMWPEFTAAAAQNIRLVIDIGDTTIQVPLNGPTVVQNIGRQAAAAVAGDSSAGGVSEKTGGAGGGGGEEWMQEQDGLLCMRGRRCGRRGGCLPRPRDWFAALLAADPAAAAVTRDQAGKAMLYLIVNTCTFATSLAVLPDAVRRRRRLRVEEGHRVADHQHDDGRRAVRRGDVRALRRRRLPAHGPFVGTVVAAVTVVVVRCNLALPFRGGDAGHGCSWVSRL

SEQ ID NO: 16643 - protein, 134 aa, Oryza sativa
  Clone ID: TF_OSC400755j.C1.p28.gp
FCYYNNYSLSQPRHFCKACKRYWTRGGTLRNVPVGGGCRKNKRSRSGGAAPGGGVGRGGPGGGAAAAVSSAGGGAAGTSPASSLALPQPGSLPSLSSALGLTGGTSLASLLLGSGGSGGDHLGLFQAMQSVVSD

SEQ ID NO: 16644 - protein, 320 aa, Oryza sativa
  Clone ID: TF_OSC400259j.C1.p105.fg
MLPYAPRPPSLLVDRRYKQGAEAAPNCPRCDSPNTKFCYYNNYSLSQPRYFCKGCRRYWTKGGSLRNVPVGGGCRKNRRGKSSSSARSAADAVSSGRDAAFGHRFPGPVRPDMVLEGMVGNPANPGQAMPDVAAAADGSTIDLAMLYAKFLNHPPTDAGLGAVTPESGGHVDEAFDTFSASSDLSPGILAAASAQFDPNQDGFGEWSSPASGNDPTSTATTATTSMLCTDASVQAALGELNFAMDQSCFDSLGLPTDVAGAGSLSSWCSIVPSLSTWEEPKYDSLDSFPDDAMSLHECMIGAPDHDWSVDCQGLEALYMP

SEQ ID NO: 16645 - protein, 349 aa, Oryza sativa
  Clone ID: TF_OSC405553j.C1.p2.fg
MDQLKGASALNHASLPVVLQPIVSNPSPTSSSSTSSRSSAQATQQRSSSATSSPHGQGQGGGAAEQAPLRCPRCNSSNTKFCYYNNYNLTQPRHFCKTCRRYWTKGGALRNVPIGGGCRKPRPMPAPVAKPPMSCKAAPPLGLGGGPVSWASGQQAATAHLMALLNSARGVQGHGGSNVHRLLGLDTMGHLQILPGAPNGAGAGTAASLWPQSAPRPVTPPPPHMDSQLGMGTLGHHDVLSSLGLKLPSSASSSPAASYYSDQLHAVVSNAGRPQAPYDVATASLPCTTAVTSLPSALSSVSAAAPTSNTVGMDLPPVSLAAPEMQYWNGPAAMSVPWPDLPTPNGAFP

SEQ ID NO: 16646 - protein, 167 aa, Oryza sativa
  Clone ID: TF_OSC900050j.C1.p4.fg
MPRHFCKSCRRYWTKGGSLRNVPVGGGSRKSSTSSSSAAAAAASSSSSPSSPAKSPKRSKNSKRRRVSPPPPQPVPAPPPPTTADAADVAAPTAPEATTKKAPEDLTAAAATQPAVALGLGVADGGGGGKEHLDTSPFEWPSGCDLGPYWPTGVFADTDPSLFLNLP

SEQ ID NO: 16647 - protein, 471 aa, Oryza sativa
  Clone ID: TF_OSC401036j.C1.p10.fg
MASGGALSPVEEKPTVVKTTKAEQHEEEAAVAVKSAAEMMKKSSPCCPRCNSIKTKFCYYNNYSMAQPRYFCRECRRYWTQGGSLRNVPVGGGCRKSKRSSASSASASAASPPAPAVGAAPPVVPALSSAISKLLQSEPMAAPCADFPNVLPTFVSTGFELPAAAGDRLSLGSFGAFGNLSAAVAAPGGGGGSSTTTSFMDMLRGVGGLFDGVGNSHQMGGNGGGGGSYYAPLITGAGNGMLMPPPPLPPFSGSLMQHGMQGLFANHAMGGGGGGVMNAGEDGSVMAGLGGGQWPPALGGADEQQGGGDGGEAVMTKDTGGGASSSASRPDYFYGWNSAAGGVVAGGGIGGNAAAATGATPWQGLIDSSSAMMPTTTQTTLFVGSYDKGVNHALQDNQEVHMLKILGVITAPKSPPKEALNIDVLPDLLKLDNGFSTHRVLTSPYLACKLWEKEMKQQNIGVGQQISSKAW

SEQ ID NO: 16648 - protein, 262 aa, Oryza sativa
  Clone ID: TF_OSC400765j.C1.p2.fg
MLGSDQLEHRPAPSAPRAEPDDVADDVEVEAFRDIHPEPSPPHLPPPPLRQPSWDAASHRSLSSSGAGGGGDVELFATMSREFTAMVAAGSSSAPSPDVPGDAPAAADLNLLQLARIGENEPAAEANALAIVPAAAGSGPPAPVEQVKKEEVEAKVAAWQAEEVAKINNKFKREEVVINGWESQQVDKATAWLAKIERKLEEERAKATEKARNEAAAARRKAEERRASAEARRGRKTAEVLDRANFCKAAGRVPSKRSFFSF

SEQ ID NO: 16649 - protein, 294 aa, Oryza sativa
  Clone ID: TF_OSC407314j.C1.p3.fg
MLHEQHAPPPQPEPEVSLQLSAPATAADDVAAGDDEEVTVVTTYRDIHPLTPPSPTTTTTPPTRLGSAAYSWDTASSHRSVSSEEQFMTMSREFTAMVAAGTTMQTGPNDGNNGGDQLTSIGEDELEETNPLAIVPDSHPIATPARSRASQLEVVPAAGPSPAPPVEARQVKKEEVETKVSAWQTAEVAKINNRFKREEVVINGWETEQVEKASAWLKKIEVFLMTEQLTQRKLDEQRAKALERTQNDIAKARRKAEEKRASAEAKRGLKLAKVLELANFMKAVGRVPTKRSFF

SEQ ID NO: 16650 - protein, 294 aa, Oryza sativa
  Clone ID: TF_OSC407323j.C1.p1.fg
MLHEQHAPPPQPEPEVSLQLSAPATAADDVAAGDDEEVTVVTTYRDIHPLTPPSPTTTTTPPTRLGSAAYSWDTASSHRSVSSEEQFMTMSREFTAMVAAGTTMQTGPNDGNNDGDQLTSIGEDELEETNPLAIVPDSHPIATPARSRASQLKVVPAAGPSPAPPVEARQVKKEEVETKVSAWQTAEVAKINNRFKREEVVINGWETEQVEKASAWLKKIEVFLMTEQLTQRKLDEQRAKALERTQNDIAKARRKAEEKRASAEAKRGLKLAKVLELANFMKAVGRVPTKRSFF

SEQ ID NO: 16651 - protein, 543 aa, Oryza sativa
  Clone ID: TF_OSC401520j.C1.p20.fg
MALPAVGPRGATDPDPAPSPLRVHGIGIGSHASRGTAPRGEEEEEEEEWRGDGDAGSEEEEGEAVSDSFSHSLRECQKQRKLRAEGAALLLSPAKHELTGGGGGSIELLVLSPRCLVGGNVGGMSKSSTASSRSRSGTFPSPGTPNYHRHCASTMQYPKGWSSERVPLGGGTNRRYGGSGVVLPFNNGRKLPSKWEDAEKWILSPVSCDGIGRMSAPAPHHRRPKSKSGPLGHPGGIPGAYAAASPFVPCFDGVLAAANFAAHSPFSAGVLMPEHVRNGDFSSGRGRSGDDGSSRSYSAEKDPYILRSASIHAWTETLMEASAFANISEETAQDDKLQGLRGETPAISSPIIKKDVATQMSPDDSISSSPKARHSCSSLPSGHPIKEPNSNALKPEVRDVQVDDQVTVTRWSKRHVTRGSDRRSTNIVEWRKKTIETRAPSFDEKERESCVSKCKREEAKITAWENLQKAKAEAAIRKLEMKLEKKRSSSMDRILGKLRTAQKKAQDMRSAVSDVAAHVSQQIRINQEVRFFLAVAAGGDGVI

SEQ ID NO: 16652 - protein, 316 aa, Oryza sativa
  Clone ID: TF_OSC12505j.C1.p18.fg
MLSEQTAASGSSSSSRGADDREIVISTGREIVVRSSGGEEREEEVVVEEELEEPEFRDIHALSPPPTPTPSQPSSSYHRRRRESWESAAGSRHTSIRSVGSDTAPSELFPTMSREFSAMVAAAANANAAAAAAANGGDSSRAGVDDALGRIGEDELEETNPLAIVPDSNPIPSPRRAHLALPAPGDVSSAGGGHGDEVSVGQVKKEEVESKIAAWQIAEVAKVNNRFKREEVVINGWEGDQVEKANAWLKKYERKLEEKRAKAMEKAQNEVAKARRKAEEKRASAEAKRGTKVARVLELANFMRAVGRAPSKRSFF

SEQ ID NO: 16653 - protein, 531 aa, Oryza sativa
  Clone ID: TF_OSC401648j.C1.p50.fg
MEYERIHKVQAGALSPTKLRMKLLGTHNRVRVISNSSSRTSPSKNTEPSQAQNRLLVCDVLEEVSGSSDGSKCSSAINKTEALEKDPPLDINKVEDMTKSSVQQPASSNSSMIHPVRTIEEESNDCDSGIDNASTSSFEFHGGEKTAAQNPTSGYFSRQTSSKWNDAEKWIVNKQNVQQNISKGAPQNQSAQQMNSAAGRGFIVPKISNRNIIPRPMQNMKRPSPASSASRSILERLSFGSHQPKLVRHADVCTVNNAGVTSEYQTKATDNSSSIEIRPYKDPKAIPAVHSVSVRDVGTEMTPIPSQDPSRTGTPLGSMTPTRSPNCSIPSTPVGGRSTASPGDDNTDDGPYFNRKGGTNEISDDEMRLKTRKEIAALGIQLGKMNIATWASKEELELVSASPSIADLERMKKEYAARAAAYEEAENFKHTARFKKEELKIEAWESLQKAKIESEMKRIEEHAEKLRSEAMAKMAEKLEMTRRLAEEKRASANARMNQQAAKAVHKAELIRQTGRVPGSCILCCSGCFCQH

SEQ ID NO: 16654 - protein, 203 aa, Oryza sativa
  Clone ID: TF_OSC401780j.C1.p8.fg
MAGEALKEAGATPAAANAGEEKAVIPAASTSPVISKTDDDTEPPADDSKALVVFVEKVADKPHAEKATATATPTRTSNDRDIALAKVETDKRESLIKAWEENEKAKAENRASKKLLDIISWENTKKAVIKTQLKKKEEELERKKAEYAEKAKNKEAIVHKEAEEKRAMVMARRGEEVIKAEEIAAKYRATGVTPKKHIGCFGA

SEQ ID NO: 16655 - protein, 182 aa, Oryza sativa
  Clone ID: TF_OSC402101j.C1.p10.fg
METQEAKRADVAAAPATATGGEAVKPAAGDAGAVTKTNAADGPSAPAGKAATPTGSVDRDAILANVELERKLSMIKAWEESEKSKAENKAQKKMSSILSWENTRKAAIEAKLRTQEEKLERKKAEYAEKMRNQVAAIHKAAEEKRATVEATRHEEIIKYEEMAAKHRSKGTTPTKFLSCFGS

SEQ ID NO: 16656 - protein, 171 aa, Oryza sativa
  Clone ID: TF_OSC408029j.C1.p2.fg
GGDQLTSIGEDELEETNPLAIVPDSHPIATPARSRASQLEVVPAAGPSPAPPVEARQVKKEEVETKVSAWQTAEVAKINNRFKREEVVINGWETEQVEKASAWLKKIERKLDEQRAKALERTQNDIAKARRKAEEKRASAEAKRGLKLAKVLELANFMKAVGRVPTKRSFF

SEQ ID NO: 16657 - protein, 510 aa, Oryza sativa
  Clone ID: TF_OSC401731j.C1.p33.fg
MEYERIEKPFPTQGGGFSPKRLRAMLLGVEKRRKGQEEEEEGDAGEVDDEYGAVPKSSVRSDADSDARRGGSMCEEYKDVDVVSTISESSSSLETGSGHRSRDTHSMGSRVRVPEEDSCDSESVASNFEFHKERGASARSVTAAIVPPFSKPAPSKWDDAQKWIASPTTNRPGRAGGVPQRKMEKTSFGGGRLPATKVVLEATEEIDTKRVDPSQEKREIGWQKAVNWAPPDPYPEVETCAKSALAEEITVADSAVTFSRHDSSATLQSATTCIPPPPTVRSVSMRDMGTEMTPIASQEPSRTGTPVRATSPDCSRPTTPRKTIGPNAIGAVIGHGECSNVELSEQELQMKTRREIMLLGTQLGKTNIAAWASNKEEEKDASLSLKGVPMDQSTQKVTEIRAAAWEEAEKAKYLARFKREEIKIQAWEDHQRAKIEAEMRKIEVDVERMRARAQDKLMSQLASARHTADEKRAAAELKRSRAAAKTAEQADHIRRTGRMPSSIGCWNWCS

SEQ ID NO: 16658 - protein, 426 aa, Oryza sativa
  Clone ID: TF_OSC101572j.C1.p8.fg
MLLGLEKNQHNGEDTSPEANDSGELDDQSKSTTPEMVLHSSIILIYGFTKSLIASTGSMECSTSTEMSSNSGHRSRNRAQDDDSFDSESSSSGPPTVKRPAAVTALLPPFSRPTPSKWDDAEKWISSPTANRGGRVGSAAGAAPKKSALAFPEHVSRPPAVAKVVAEVPINTGTLVKNSVALAQPISFNPAQSASIVDEPAPAVRSVSMRDMGTEMTPIASQEPSRTGTPIIASSPTSSRTPTPQRNAEISIGEFGPNKMEMSEEELQMNTRKEIMDLGQRLGKTTIAAWASKEEKSTTSFANVITDKAVEIDREARAADWEEAEKAKYLARFQREEVKIQAWENHQKAKIEAEMKRMEAKIEIKRAREQDRLSSKLAAARHKAEARREAAESRKNQEAARTEEQAAQIRKTGHIPSSISCWCWCL

SEQ ID NO: 16659 - protein, 171 aa, Oryza sativa
  Clone ID: TF_OSC400879j.C1.p25.fg
MAEVAPPAPAPEPTKDIAEERAAVPAPEESKAMTVVDDAEKAAATGGSHERDALLTTVATEKRISLIKAWEENEKAKADNKAAKKLADIASWENSKVAEIEAEIKKYQEYLERKKAEQVEKLMNGVAKVHRAAEEKRAATEARRGEEVVKAEEAAAKYRAKGEPPKKLLFG

SEQ ID NO: 16660 - protein, 493 aa, Oryza sativa
  Clone ID: TF_OSC402100j.C1.p4.fg
MEPKSSSSSHYLQPSATLPSTRRNSFQGVGAEAGGGGGGMNPFGPTFSDPLCSLNLKETSEFVRSSFPMATMARSNSSNGATGNGGHGYHRETSTASSSSSSSASAQRRRAEQQQQQVPATPGRPLLFFNSSSPAHHQLVSARRSVPSKWEDAEKWVRQASSDHHGGHHHHHGKGSKLQEEKRASAVRRSVDADVTALALYTAPAAEVFLKDKFTDNVEPSKESFVFRSSYCEPTKNTAAQAVAAGNGIDHRRDIGTEMTPLGSSTTSRCHTPIKSTSPARHNTPASRSGPLVPYAGGGGGAGQDISDLADCHFAKLDLGAQFDAMLINWSSKEEEEEEVSKSLRHFEASVAAVGEKRGGAGDCRWEDDDRAKSCIRYQREEAKIQAWINLESAKAEAQSRKLEVKIQKMRSNLEEKLMRRMTTVHRRAEEWRATAQAQHLQQLKRAAEQVRRAKATSHHHHHHHLAGSNASCGCFPCNGSNNIISGNLLNYY

SEQ ID NO: 16661 - protein, 206 aa, Oryza sativa
  Clone ID: TF_OSC400524j.C1.p27.fg
MAEEEAKKVEVEVTEAPPAAAAAAETEPAAKDVAEEKAVIPAPAPPAEEEKPPVDDSKALAIVEKVADEPPAEKPAQGGSNDRDVALARVETEKRNSLIKAWEENEKTKAENKASKKLSAILSWENTKKANIEAQLKKIEEQLEKKKAEYAEKMKNKVAIVHKEAEEKRAMVEAKRGEEVLKAEEMAAKYRATGHAPKKLIGCFGA

SEQ ID NO: 16662 - protein, 427 aa, Oryza sativa
  Clone ID: TF_OSC417639j.C1.p12.fg
MEYERIHKVQMGVMSPTKLRMKLLGSHGGSIGRVDEAKKSPRASPARLDADEDDDDHPKNSLLPQELDEDYPKDQSDSSRSRSDASHGRAGNGYDSGGFEFYREERPPPPPPAAVAVVGGTFFRQVPSKWNDAEKWLAGRHVVHSNPIFSKKAAAAAAAVSGRVAPEASASSSPPSVASRQRQQKRLRVSSEAAAVSMRDVGTEMTPMASKEQSRSGTPAGAATPSLSPLCSVPTSPRGAASASSASSERELQIRTRREIAALGLQLGKMNIASWASKDDDDELPRASPEKRPRPRPRPHSGDGGGEAKKREFEARAMAWQETHKCKLALRFQRKEVKIQEWESCQKAKFEAKMRHAEVQAEQMKARAKQKLSRRLSALSHKAEGKQARVEARRSRQAARLARQVHRIRETGAAPSRLRRCCSWLFL

SEQ ID NO: 16663 - protein, 245 aa, Oryza sativa
  Clone ID: TF_OSC900142j.C1.p22.fg
MWSEAHGISTSPLMKKVKVIDCLSCCEHFFNGYYEGRMYQNLWPEMLKLNDWPISNHFEELLPSHGVKYINSLPFQAYTNLKSGLLNVSTLLPDDILKLDMGPKSYIAYGYAQELGRGDSVTKLHCDLSDADANDLACPIKSESAEEGALWDIFRREDVPKLKLYLDKHSKKFRHIYCSAVQKVCNPVHDETFCLTKEQKRKLKEEHGYFTTRKSIFAGGGNSSSQADGRSTCSPKFTGGLEVRI

SEQ ID NO: 16664 - protein, 875 aa, Oryza sativa
  Clone ID: TF_OSC400337j.C1.p7.fg
MGLSDYDLMGVAVPGTGVGGPHPEALKERMLCNLWEVYTLAQRNRKFNELLNDEAIMMKPSKESKKRGAGKKQEEEENNTISIEDEMCDANNKKGKKMLTGENALMCHQCQRNDKGRVIWCKSCNNKRFCEPCMKRWYPGLSEVDFAAKCPYCRKNCNCKACLRMIGVEKPPEKKISEENQRRYAFRIVDLLLPWLKELQQEQMKEKELEGRLQGIGGFSNCLFTFLFAGVSMDEVKLEQADCDMDERVYCDRCKTSIVDFHRSCKACSYDLCLACCWELRKGEIPGGEEAKSVQWEERGQKYVFGNISKDEKKRVSSKRHMETPSTETCNDMAVAGDPNNPLLLWKANSDGSIPCPPKEIGGCGASSLVLRCLLPEIMLSELEHRANKVIKREAFDKAINETSDQCPCFYHTSKIRTNATREAANRKGSSDNYLYCPDANNIQEDDLSHFQMHWSKGEPVIVSDALRLTSGLSWEPLVMWRALREKKTNGDVEDEHFAVKAVDCLDWNEVEINIHMFFMGYMRGRRHPMTFWPEMLKLKDWPPSSMFDQRLPRHGAEFITALPFPEYTDPRYGPLNLAVRLPAGVLKPDLGPKTYIAYGCYEELGRGDSVTKLHCDMSDAVNILMHTAEVSYDTEQLDKIAKIKMKMREQDLHELFGVSESGAKGKADDEASKISCNMENKHTSNQSTKGLDINALPPDDSGSDIGDKPSFCQSEVSHPIHDQTFYLTVEHKRKLKEEHGVEPWTFEQKLGDAVFIPAGCPHQSCIKVALDFVSPENVGECVKLTGEFRRLPSDHRAKEDKLEIKKIALNALKEVVNFLDPLPKGSKNRDEVVEVTKPKRKYGNRRGDLKSGEDQPIDESIEERKPKKRGRSKR

SEQ ID NO: 16665 - protein, 997 aa, Oryza sativa
  Clone ID: TF_OSC400891j.C1.p23.fg
MPPKRKRGGGRPRKAPEDAAAKENGEKTNKEEETQASPEENGAGQTQASRTARKRRKGPVADPSSTELPPRKLRDRRNVPAVDYKENKHTKKMDGTSTMCHQCQRKDSGRVVRCRNGAEKNRRHRYCVKCIKRWYPHLTEDDFENCCPVCHNNCNCKTCLRTNVINKGDKEFADGKNKIKYSLRIARFLLPWLKQLHQEQMLEKSVEATIKGIDVTDLEVPQAQFNNDERIYCDNCRTSIVDFHRSCKSGHYDLCLSCCQELRQGLTTGTVVTCDTAVDVPEIEGKEGLQEGSSHSSAVGQGASDQQNDRLIGSAAPSEDCTPSLIWRAKSNGSIPCPPNAGGCGDCLLELRCLFKENFISDLLDKVNSVVNKETEQELGGSRCSCFTESGEVNNETSRKSACREDSNDNYIYCPTAREVQSGALDHFQQHWLNGQPVIVRDVLELTSGLSWEPMVMWRALREKRDKKEHERLSVIALDCLTWFEFMYHQDVLVVPVSYLGFNSTIETTLYFKLVDINIHMFFEGYSRGAVGSEDLPVLLKLKDWPQHSSFEERLPRHGAEFMSALPFREYTDPKSGPLNLAVKLPKHVKKPDLGPKTYIAYGVAQELGIGDSVTKIHCDMSDAVNILMHTDEVELKAERITAIEKKKESLRKDGKNLHVLRPDHDDDTSIALSESTEVPRSRGLENGSSIKQPAPNVAVMDQGGVHTDMVADEAEGNLSLSNGQSPNQSDAHNMDITFSKGETDHSICTINGGEEMGNGFGREDKCKSSHGVGSSESSDCQRRSRRRDACSSSATGEINETSMETNKFTISIEPKDDHPFVEGNQTEGGALWDIFRREDVSKLHDYLMKHAEEFRHYNYETVKQVSHPIHDQCFYLTNEHKRKLKEEHGIEPWTFEQKLGEAVFIPAGCPHQVRNLKSCIKVALDFVSPENVQECIRLTEEFRLLPKGHRVNEDKLEVKKIALYALDQAIDDITGKSCNERTKDEGEEEASAPSVS

SEQ ID NO: 16666 - protein, 595 aa, Oryza sativa
  Clone ID: TF_OSC420889j.C1.p1.fg
MGSAPLLGTTVDEEDFSPPSTSGRGRGGRKQGRGRGGNSCHQCKRVKPRPEEMVRCQLCGDKVFCAACIKNKYPEMQQAEVRDKCPFCRNICNCTRCNPSDKSDGPRNPFVRRCNSSSSVKRRVKTAASGLRCRVDTAALQAKAIDKLEANSRINNESAMLDKADTLDVRTDEVDTETKSKYANYMLHYLAPHLTKLNKDQMSEIEKEAKIQRLELSQLSVEQAACRHDERVFCDHCKTSIFDLHRSCPGCSYELCIVCCKELREAKLMGSCKEELFSYPNRGPDYMHGGDGDSVPELINYKQGDLSSNQSKDIQWRVDSDKIYCPPTELGGCGNHILQLRRIFSKDWLSKLEVDAFQMRKQLEPSDIIGRDTCECSCSTDHASSRKAASREDSTDNYIYCPTLDNGKPEDLTHFQKHWVKGEPVIVQQVLKKMSCLSWEPPDMWSKVHGTGTSPEMKNVKAIDCLSCCEVEICTQDFFNGYYEGRMYQNLWPEMLKLKDWPTSNHFEELLPSHGVKYMNSLPFQPYTNLKSGLLNVSTLLPDDILKLDMGPKSYIAYGYAQELGRGDSVTKLHCDLSDAFMKSPWASSFSSLKT

SEQ ID NO: 16667 - protein, 917 aa, Oryza sativa
  Clone ID: TF_OSC401978j.C1.p35.fg
MAAEEVEAAAIDGSGEEAKRKSGKQRGSGAKGRRRNGDRAFRPPAMRPEEEGRGVATRPGALRERKPPPNAFNAPDDDEDVEKTDQLLEPLNKPKRRDAGKKRGPRKKKVDQENIKTHRHNANAVKGKMLVNDKVSKTEKKQREENVDRYPDLPENEFAAKCPYCRKNCNCKACLRMRGVEEPPRKEISKENQIRYACHVLRLLRPWLIELRQEQMAEKELEAKIQGVSVDQIKVEQAELRKGEIPGGEEVEILDPEERDKDYAFGKILSDGENQRDSLKCRSDTQNSESNKGMASDENQKKALLLWKANSNGSIPCPRKEKEDCSFSSLDLKCLFPEKLLPELEDRSEKVFWSETFAKELGRTSELCPCFDHSGKIRSDSKKLRQAANREDSSDNYLYCPVATDIQDADLLHFQMHWAKGEPVVVSDTLKLTSGLSWEPMVMWRAVRERTKGKAEDEQFAVRAVDCLDWCEVEINIHMFFMGYTRGRTHPRTYWPEMLKLKDWPPSSSFDQRLPRHGAEFISALPFPEYTDPRYGPLNLAVKLPGGVLKPDLGPKTYIAYGFSEELGRGDSVTKLHCDMSDAVNILTHTAEVPCETYDAVQIKNTQKKMKMQDDMEIYGMIESGSELKPSACPVELGNKAVGEAPKASCSKENVHTLKDKSNGWWRKYTFGLDINASPPDDAGGDARDEALSYESVVHSDVAQCPNHNHETNNSDDARIGAQRCQKKAKGRPPKTGSGVSEHQESGGALWDIFRREDSEKLQDFLRKHAPEFRHIHCNPVKQVIHPIHDQAFYLTAEHKRKLKEEYGVEPWTFEQKLGEAVLIPAGCPHQVRNLKSCIKVALDFVSPENVGECVRLTKEFRRLPSSHRAKEDKLEIKKMAFHALNEVLNFLDPPSSEGSKEAAEKPRRGRGRPRKH

SEQ ID NO: 16668 - protein, 913 aa, Oryza sativa
  Clone ID: TF_OSC420010j.C1.p2.fg
MEAAAAAAAVPRGAAVQALRRQAVAMQRALMPDKTVCEKHYVQAKKRAASSALRASLRRSSASASAARGTTPPARMAVGRPISGRVAGEPVHVAELVVAPLRPPPRRRQPVHGLPMGNAAGARTAAELVGRGSAGLVACSSAAGAAAAATCHQCRRVANTICCTSCDRRGYCTNCISRWYSDIPIDDVRKARVQEISAVDKLEYLHSILASVLPVLKQIYSDQCFEIGVDTKAYGLRTDIIRAKVNPDEQMCCDTSNYPRSDFCKVPVFDYHRHCPRCLYDLCLDCCRDIRRSRTSVARGEYAEGRVVDRSKDTSNKRARMEPSAESANDKSVPQRRDIKNIDIRSLFPTWRVNNDGSITCGPHEAGGCGSSKLVLRRIFKINWISKLVKNSEEMVNGCKVHVLENGCSSCNDGRTLELTGHRNFGVSTCSNNGGIDRFCVFSPVLEDLKSEGIIHFRKHWIKGEPVVIRNAFEPSLSSSWDPLNIWRGIQEIMDEEVDDDVIVKAVDCSNQAEVDIELKQFIKGYSDGHKGEDGELMMLKLKEWPPPSVLEEFLLCQRPEFIVNFPLVDFIHSRWGLLNLSAKLPPDTLQPEVGLKLLIAYGRHQEAGKDPVRRFVLSSTRVKVHMLMHTAKGHDVCPKRLQPERSEKIANGMTMHVNAHAPVQNLNVDMGEQSPDHVSSKFDERAHASALRLQEKSSDAKLNCGFEGSSTELSCSSHSEEPKVNGSERSQAGSVWDVFRRQDISKLNEYLTANWEELAASSQVKNPIYEQSIYLNKYHKRILKDQYGIEPWTFQQHIGEAVFVPAGCPFQVKNLQSTVQLALDFLSPESLGESARMAQEIRCLPNDHDAKLKMLEIGKISLYAASSAVREIQRITLDPKFNLDLKFEDQNLTQAVSENLARVTKQRNVPCS

SEQ ID NO: 16669 - protein, 913 aa, Oryza sativa
  Clone ID: TF_OSC401726j.C1.p12.fg
MEAAAAAAAVPEELRCKRSDGKQWRCSAPSMPDKTVCEKHYVQAKKRAASSALRASLRRSSASASAARGTTPPARMAVARPIYGRVAGEPVYVAEPALPPPPPPPRRRQPVHGLPMGNAAGARTAAELVGRGSAGLVACSSAAGAAAAATCHQCRRVANTICCTSCDRRGYCTNCISRWYSDIPIDDVRKARVQEISAVDKLEYLHSILASVLPVLKQIYSDQCFEIGVDTKAYGLRTDIIRAKVNPDEQMCCDTSNYPRSDFCKVPVFDYHRHCPRCLYDLCLDCCRDIRRSRTSVARGEYAEGRVVDRSKDTSNKRARMEPSAESANDKSVPQRRDIKNIDIRSLFPTWRVNNDGSITCGPHEAGGCGSSKLVLRRIFKINWISKLVKNSEEMVNGCKVHVLENGCSSCNDGRTLELTGHRNFGVSTCSNNGGIDRFCVFSPVLEDLKSEGIIHFRKHWIKGEPVVIRNAFEPSLSSSWDPLNIWRGIQEIMDEEVDDDVIVKAVDCSNQAEVDIELKQFIKGYSDGHKGEDGELMMLKLKEWPPPSVLEEFLLCQRPEFIVNFPLVDFIHSRWGLLNLSAKLPPDTLQPEVGLKLLIAYGRHQEAGKGDSVTNLMINMADVVHMLMHTAKGHDVCPKRLQPERSEKIANGMTMHVNAHAPVQNLNVDMGEQSPDHVSSKFDERAHASALRLQEKSSDAKLNCGFEGSSTELSCSSHSEEPKVNGSERSQAGSVWDVFRRQDISKLNEYLTANWEELAASSQVKNPIYEQSIYLNKYHKRILKDQYGIEPWTFQQHIGEAVFVPAGCPFQVKNLQSTVQLALDFLSPESLGESARMAQEIRCLPNDHDAKLKMLEIGKISLYAASSAVREIQRITLDPKFNLDLKFEDQNLTQAVSENLARVTKQRNVPCS

SEQ ID NO: 16670 - protein, 678 aa, Oryza sativa
  Clone ID: TF_OSC900031j.C1.p1.fg
LRTDIIRAKVNPDEQMCCDTSNYPRSDFCKVPVFDYHRHCPRCLYDLCLDCCRDIRRSRTSVARGEYAEGRVVDRSKDTSNKRARMEPSAESANDKSVPQRRDIKNIDIRSLFPTWRVNNDGSITCGPHEAGGCGSSKLVLRRIFKINWISKLVKNSEEMVNGCKVHVLENGCSSCNDGRTLELTGHRNFGVSTCSNNGGIDRFCVFSPVLEDLKSEGIIHFRKHWIKGEPVVIRNAFEPSLSSSWDPLNIWRGIQEIMDEEVDDDVIVKAVDCSNQAEVDIELKQFIKGYSDGHKGEDGELMMLKLKEWPPPSVLEEFLLCQRPEFIVNFPLVDFIHSRWGLLNLSAKLPPDTLQPEVGLKLLIAYGRHQEAGKGDSVTNLMINMADVVHMLMHTAKGHDVCPKRLQPERSEKIANGMTMHVNAHAPVQNLNVDMGEQSPDHVSSKFDERAHASALRLQEKSSDAKLNCGFEGSSTELSCSSHSEEPKVNGSERSQAGSVWDVFRRQDISKLNEYLTANWEELAASSQVKNPIYEQSIYLNKYHKRILKDQYGIEPWTFQQHIGEAVFVPAGCPFQVKNLQSTVQLALDFLSPESLGESARMAQEIRCLPNDHDAKLKMLEIGKISLYAASSAVREIQRITLDPKFNLDLKFEDQNLTQAVSENLARVTKQRNVPCS

SEQ ID NO: 16671 - protein, 84 aa, Oryza sativa
  Clone ID: TF_OSC29814j.C1.p1.fg
MQFEDGGDVHVGAGEGEDGGRVTVDELTRCLRCGISANATPHMRRGPEGRRTLCNACGIAWAKGKVRKVIDSDTPMDNAMFAQM

SEQ ID NO: 16672 - protein, 1451 aa, Oryza sativa
  Clone ID: TF_OSC404332j.C1.p19.fg
MTMMTPPPLEPEEDEMLVPHQELVAADAAQPMEVVAQTEAASTAESQPAEDPQTSRFTWTIENFTRINAKKHYSDAFVVGGYKWRVLIFPKGNNVDHFSMYLDVADSANLPYGWSRYAQFSLAVVNQIQQKYTIRKDTQHQFNARESDWGFTSFMPLSELYDPSRGYLVDDTVVVEAEVAVRKMVDYWTYDSKKETGYVGLKNQGATCYMNSLLQTLYHIPYFRKAVYHMPTTENDMPSGSIPLALQSLFYKLQYSDNSVATKELTKSFGWDTYDSFMQHDVQELNRVLCEKLEDKMKVTNLRTVVEGTIEKLFEGHHINYIECINVDYKSNRKESFYDLQLDVKGCRDVYASFDKYVEVERLEGDNKYHAENHGLQDAKKGVLFLDFPPVLQLQLKRFEYDYMRDTMVKINDRYEFPLQLDLDRDDGKYLAPDADRSIRNLYALHRYKFDDERVTKEDTKKALEEQYGGEEELPQINPGFNNAPFKFTKYSNAYMLVYIRESDKDKIMCNVDEKDIAEHLRVRLKKEQEEKEHKKKEKAEAHLYTIIKVARDENLKEQIGKDIYFDLVDHEKVRSFRIQKQLLFTTFKEEVAKEYGIPVQFQRFWLWAKRQNHTYRPNRPLSPHEETQSVGQLREVSNKAHNAELKLFLEVELGPDLRPLPPPEKSKEDILLFFKLYNPEKEELCFVGRLFVKALGKPSEILTKLNEMAGFVPNEEIELYEARAKFMMLYLWDNLVYVTPLRRVLGEIKFEPNVMCEHIDKKATFRASQLEDGDIICFQKSPIPDSDTQMRYPDVPSYLEYVHNRQVVHFRLLEKPKDDDFSLELSKLHTYDDVVERVARQLGVDDPAKIRLTSHNCYSQQPKPQPIRYRGVEHLLDMLIHYNQTSDILYYEVLDIPLPELQGLKTLKVAFHHATKDEVVIHSIRLPKNSTIADVINDLKTKVELSSPSAELRLLEVFYHKIYKIFPLHEKIENINDQYWTLRAEEIPEEEKNLGPNDRLIHVYHFMKDPLQNQQIQNFGDPFYLAIREGETLAEVKERIQKKLQVPDEEFCKWKFAFISMNRPDYLQDSDVVSARFQRRDVYGAWEQYLGLEHADTAPKRAYTANQKKLTRITAAVSAALGSVIVIADEIFASTYILTILSKKLYLMSRIKFGVTRSIFFSRHYDLNKAPVHLTLQLPTSPMDNPTPSSSSGGGGAAAAANASSDEHRKTSPATAADFFDEEHTFDDILLPVDLFDFTHGLDAGDGCYVDDQAAIGQKPLSPAPEPAAEQQPSPAPEHGDDERLVMYYQGQEYIFDPVQPQKIENIFHHLNGQEMIPQSIRPQPTNLVRPITVPEDFDRFAALTRYREKKRNIKFIKKADYSARKEVALRMKRSKGKFAPRVQTSENSLAHRKGITFCTNCGESSDATPMMRHAPNGTKSFCNACGLMWANSRKIRKIRNPTSGEQEDQ

SEQ ID NO: 16673 - protein, 209 aa, Oryza sativa
  unsure (1)..(209): unsure at all Xaa locations
  Clone ID: TF_OSC30845j.C1.p1.np
IPAAPKFAIGYRDFAVLAVRHRWVQTKEAAELDYXSSAHAAMAAAAAPASAANNGGGNWPGQDSCLTAAPGRGAHSKRSCATAATAAAWHTLGPHPTFXSSLSSSRPSSDFPSSKKLSATRLNGSSGSRGKKSPGPAGVKVGMEAGVYVRCMHCASEKTSXLLTGPLGPKTLCNACGLRFMSGRLMPEYKAAAMPPLWLTTSGGDHSSI

SEQ ID NO: 16674 - protein, 295 aa, Oryza sativa
  Clone ID: TF_OSC413617j.C1.p3.fg
MASSTFSLFFPMSNGQCWPPSTVEESAAYDDHSTVTTSPSSPSSSSTGSVDCTLSLGTPSSRRAEPVAAAAPAANHGAPVPAHYPSLSAATVSWDATAESYYCGQQGRPATGAAKCAAGAGHDALLDRRCANCGTASTPLWRNGPRGPKVRRRRRSLSPSLFSISAVHFAVSPTYVVSLTLPPSYVSLQSLCNACGIRYKKEERRAAATTTTADGAAGCGFITAQRGRGSTAAKAAPAVTTCGEETSPYVVGGGGGGGEVADAAYLAWRLNVVPPAATATAFSVWPERASLYHYN

SEQ ID NO: 16675 - protein, 436 aa, Oryza sativa
  Clone ID: TF_OSC100956j.C1.p1.fg
TPLWRNGPPDKPVLCNACGSRWRTKGSLTNYTPMHARDDIDAEEPRASKLKPPTLKLKEQKQLKKNPSHITMENGPFSDQNFRKMGDPDLSNRSGSGSALSYSESCAPYGTADASEMTASAQSHAWESLVPSKRRSCVTRPKPSQMEKLAKDLNSIMHEEQLLYLSGSSEEDLIYHSATPVDSFEMGYGSMLLRPNSKSLEEESEASSIPADNKSYITSESYSGSVSFVYSESKATSNQNVITEQPKKFLVQTSDNARRANLHTENQDTLENANSPLVSLHMEGKDSEETRVKTSASNRLTKSTMNPLKRPHDTHFQSSVELRGTMRSPKRVSKYGDAMGLKCQASFMPKPGNGKDLACSDRALNLFMLPPDKLSMLVPPQYANTDSDQDLLLDVPLNARHPEAELLCQPSQLSSVAHSSTSEAGNAGGEGRLKQP

SEQ ID NO: 16676 - protein, 619 aa, Oryza sativa
  Clone ID: TF_OSC400173j.C1.p8.hg
MSGHHEAKPYQPRRGPAPADEEAAPAAAADEAEAEAEVEAMERYEQEQEYEEGEEGEEEEYEGGEGVPMDADASAAAVAGMDPHGEMVPVAGGEAGGGYPHVASNTLTLSFQGEVYVFESVSAERVQAVLLLLGGRELAPGSGSVPSSSAAYSKKMNFPHRMASLMRFREKRKERNFDKKIRYTVRKEVALRMQRNRGQFTSSKSKAEEATSVITSSEGSPNWGAVEGRPPSAAECHHCGISAASTPMMRRGPDGPRTLCNACGLMWANKGTMREVTKGPPVPLQIVPAATNDVNGIVEATGVEQHNSAVEEAVSAANGHESQSGVAVMRRPLDQGLTAQNASSSSCLPSPPRVRDETSATTAMAAAATAAGDEELESLLRNFHRFSQGYKDALVEAQALRVNCSSESERRQALESHVADLKSDNERLRRLYTETLFKFTNQMKFHTESRNLKEELEKANTRLLSMEEEYKREIEQLKLGSEMNSNDLENKLSCAVVQQATNEAVIKQLNLELEAHKAHIDMLNSRLEQVTADVHQQYKNEIQDLKDVVIVEQEEKNDMHRKLQNTENELRIMKMKQAEQQRDSISVQHVETLKQKVMKFRKENESLKRRLAISELDCS

SEQ ID NO: 16677 - protein, 375 aa, Oryza sativa
  Clone ID: TF_OSC404775j.C1.p2.fg
MEGEHHHHHQDHHQGHFQAFSLQPKDPPVLFPFVISRRSSSSSPSDSTTLSYGSDHHLTQQQQHQHQAMLEPQNMIGGSSAGIFATPFPTVKSIRDDMIERSQFDPYDTEKLQASCGLAKVVAGGKWSAVPAAKMKITRKMGEPSSGVTGGAATTVAPKKPRRRPAQAYEDHGHGGAMGQAFGVIRVCSDCNTTKTPLWRSGPCGPKSLCNACGIRQRKARRAMMASGLPASPNAAGPKAAAHSGAAAVAAAQPKVKKEKRADVDRSSLPFKKRCKVVQVEDHQTLPAATNAAAAAAMEETAESATVAPPPAPTTRGGTLVDSIGLSWSKTHAAATASCSFRPSPVAPGFAAAVQDEITDAAMLLMTLSCGLVRS

SEQ ID NO: 16678 - protein, 658 aa, Oryza sativa
  Clone ID: TF_OSC401181j.C1.p1.fg
MPDAAAAAAAAQDADAVMRDAPADAAAGGGDNDDDDGDDGTEEDEEEDDDEEGDEEELPPAEDPAAPEPVSALLPGSPNQLTLLFQGEVYVFESVTPEKVQAVLLLLGRSEMPPGLANMVLPNQRENRGYDDLLQRTDIPAKRVASLIRFREKRKERNFDKKIRYAVRKEVALRMQRRKGQFAGRANMEGESLSPGCELASQGSGQDFLSRESKCQNCGTSEKMTPAMRRGPAGPRTLCNACGLMWANKGTLRNCPKAKVESSVVATEQSNAAVSPSGIDNKELVVPNPENITASHGEVLHSFKGDWGEIGEIVTRFPRTRFPNYSTVSLRGSSAREITRDALLQKVSEERQLRSHLRRAAAAALSIQQLTKSANHLMWPFQKEVHRVIRHVAVVHMWRVWRRYSVIRIVSEQLHEEWEALINQPDINLTKQWISSMMLRPFLFFVTQPSSWYKGQQDKTLNSISACFKIILNSINSMDASKNLCSFAVGTPEERCNHSCCKDGNMVQITDTAMRLAVSLTDCKTWKKITSEDTRAADASVESLIEFIGASQSGTYSCLRRYIVNLGSHALEKKISSISTDDQFLITASAVTIALRPFHSMRAGRGADLNGASKEYFTLILTIPDLCKRLPPLLLPAIKHISILQPSLDILLGALFKG

SEQ ID NO: 16679 - protein, 1484 aa, Oryza sativa
  Clone ID: TF_OSC416374j.C1.p12.fg
MPDAAAAAAAAQDADAVMRDAPADAAAGGGDNDDDDGDDGTEEDEEEDDDEEGDEEELPPAEDPAAPEPVSALLPGSPNQLTLLFQGEVYVFESVTPEKVQAVLLLLGRSEMPPGLANMVLPNQRENRGYDDLLQRTDIPAKRVASLIRFREKRKERNFDKKIRYAVRKEVALRMQRRKGQFAGRANMEGESLSPGCELASQGSGQDFLSRESKCQNCGTSEKMTPAMRRGPAGPRTLCNACGLMWANKGTLRNCPKAKVESSVVATEQSNAAVSPSGIDNKELVVPNPENITASHGEVLHSFKGDWGEIGEIVTRFPRTRFPNYSTVSLRGSSAREITRDALLQKVSEERQLRSHLRRAAAAALSIQQLTKSANHLMWPFQKEVHRVIRHVAVVHMWRVWRRYSVIRIVSEQLHEEWEALINQPDINLTKQWISSMMLRPFLFFVTQPSSWYKGQQDKTLNSISACFKIILNSINSMDASKNLCSFAVGTPEERCNHSCCKDGNMVQITDTAMRLAVSLTDCKTWKKITSEDTRAADASVESLIEFIGASQSGTYSCLRRYIVNLGSHALEKKISSISTDDQFLITASAVTIALRPFHSMRAGRGADLNGASKEYFTLILTIPDLCKRLPPLLLPAIKHISILQPSLDILLISKDKIFEEITKLEKSGVSSGGSGTIPYCGWALGNLVTLATEHDDLSNSGCFVQGLDCCLYVDAINCVSQSLLKFFEENKEMLLSFGDSVDTSFIKENDTSDSCSRTLFMDLLKPIYQQWHLRKLLVLAKEDAVCKRQNNHDPDTQTHSRSLKLLDIVCFYYHMLRIFSLLSPSIGSLPILNMLSFTPGFLVDLWGALEIYIFGQAVHKLQGPKHERESATSSSGEHVSSMRQRRNFKDTSNKWSNVFQKITGKSNDAEDTNLVDNPLNSEQNGEALILWDIEAMRQGSECIGKDLMQMLYLFCATYGHLLLVLDDIEFYEKQVPFTLEQQRKIASSLNTFVYSTFIQNGGSSSKPLIDVTVRCLNLLYERDSRHKFCPISLWLAPARNGRIPIAAAARAHDAAFATLPGNQFFGIPIRSSVLTTIPHVYPFEERVQMFREFIELDKASRRVTGEVSGPGPGSIEIVIRRGHIVEDGYRQLNCLGSKLKSCIHVSFVSECGLPEAGLDYGGLSKEFLTDLSKAAFSPEYGLFSQASASDSSLIPSNSAKLLDNGIDMIEFLGRVVGKALYEGILLDYCFSPVFVQKLLGRYSFLDELSTLDSELYRSLMQLKHYEGDVEDLCLDFTLTEELGGRRIVHELRPGGKNISVTNENKLHYVHAIADYKLNRQILPFANAFYRGLGDLISPSWLSLFNANEFNQLLSGGLQDFDVDDLRNNTKYTGGYTESSRSVKLFWEVIKGFKPTERCMLLKFVTSCSRAPLLGFKYLQPSFTIHKVPCDVTLWATIGGQDVDRLPSASTCYNTLKLPTYKRSSTLRSKLLYAISSNTGFELS

SEQ ID NO: 16680 - protein, 271 aa, Oryza sativa
  Clone ID: TF_OSC417054j.C1.p4.fg
MRKPTPYVSLHDVVAFDFVDGDVPFDDLVDGEGLCCPDDPFEEVMRCLSAVDDPFLAAFKLDCSPPTPAADADVDSRSEEHMHADVGGGLDLQRAVGGGDEKAGTPSTVDDVPWLQASAVARKPRRAPAAVRKRVWSLVSPQLATAAAAAVDNSRDEVSSGGGGGGEGGEHCSRPAKRRRKCGEEKRCGHCQTTETPQWRVGPDGPSTLCNACGIRYRIDHLLPEYRPSTSPGFGSDGYSNRHRKVVKLREKKRKKAMLAATATALTSGPV

SEQ ID NO: 16681 - protein, 222 aa, Oryza sativa
  Clone ID: TF_OSC411828j.C1.p3.hg
PPHHDGRPRVAARVARIWTPGHKPPSSSPDIYLVRRTPKLPVTRPPRTKQAPPTAPAPAPPPPPPQPASPKTKTKAKAKKPKRKRSCVHCGSTETPQWREGPTGRGTLCNACGVRYRQGRLLPEYRPKGSPTFSPSVHAANHRQVLELRRQQRQSTNPSTPPPPPVSAAEPIPDEQKEEVVSVPVAAAAPATDGGAASSLDALLLDGPSAPLIVDGDDFLVS

SEQ ID NO: 16682 - protein, 353 aa, Oryza sativa
  Clone ID: TF_OSC404988j.C1.p3.fg
MSTIYMSQLPATLPLMEGDQDQGLYPAFHRAKDPPILFPFMIDSAVEHQGQIYGDQGLRRQQVLGESNQQFNDHMMMGGSDVFLTPSPFRPTIQSIGSDMIQRSSYDPYDIESNNKQHANGSTSKWMSTPPMKMRIIRKGAATDPEGGAVRKPRRRAQAHQDESQQQLQQALGVVRVCSDCNTTKTPLWRSGPCGPKSLCNACGIRQRKARRAMAAAANGGAAVAPAKSVAAAPVNNKPAAKKEKRAADVDRSLPFKKRCKMVDHVAAAVAATKPTAAGEVVAAAPKDQDHVIVVGGENAAATSMPAQNPISKAAATAAAAAASPAFFHGLPRDEITDAAMLLMTLSCGLVHS

SEQ ID NO: 16683 - protein, 225 aa, Oryza sativa
  Clone ID: TF_OSC401615j.C1.p47.fg
MGSSDQKVIGIAAAAAAAAEEAGRRCCVECGATTTPMWRGGPTGPRSLCNACGIRYRKKRRQELGLDKKQQQEHHPHHHQQQQQQYQRQQQQQQQEDHSDAASSVKDSSSSSSNKSSSLQVISEIVISRSKSDCEGAMEGNCVPLKRLVQQVDFLLSSTGITESCQCVAVSCANQMGLQKAANVLLFLVPIRVLTMENNSCDILHIIRIIGRGCGIESKTRIIDR

SEQ ID NO: 16684 - protein, 387 aa, Oryza sativa
  Clone ID: TF_OSC400622j.C1.p13.fg
MASEWEMAMGVDLGMGMSTYHNASGGIAAAPMMGHHGGGGGGGGYSAAHHHHHHYYGMPHQAAMGDAMRVDDLLDLSNTPGAHDFFPASAAAAAAGDHGHHHHHHIGGMGEPSGATPSATSSDHQTSMLSFADDFYIPTEDAAELEWLSKFVDDSYSDMPNYQSSAHAAMAAAAASAANNGGGSSAGQDSCLTAAPGRGARSKRSRATAAAAAAWHSLVPRPPSQSSPSSSCSSSDFPSSNKPSGTARPNGSGGGSRGKKSPGPAGAEVGMEAGVRRCTHCASEKTPQWRTGPLGPKTLCNACGVRFKSGRLMPEYRPAASPTFVLTQHSNSHRKVMELRRQKELLIIRGSHRDAAAAAAAAAAAAAAGSAAATGRPELMFRDYGVC

SEQ ID NO: 16685 - protein, 176 aa, Oryza sativa
  unsure (1)..(176): unsure at all Xaa locations
  Clone ID: TF_OSC400622j.C1.p23.gp
AAWHSLVPRPPSQSSPSSSCSSSDFPSSNKPSGTARPNGSGGGSRGKKSPGPAGAEVGMEAGVRRCTHCASEKTPQWRTGPLGPKTLCNACGVRFKSGRLMPEYRPAASPTFVLTQHSNSHRKVMELRRQKELLIIRGSHRDAAAAAAAAAAAAAAGSAAATGRPELMFRDYGVCX

SEQ ID NO: 16686 - protein, 308 aa, Oryza sativa
  Clone ID: TF_OSC405544j.C1.p2.fg
MAAEPPADGRDPPADDGAAGDGAVESAAAEALLSAASEQLTLVYQGEVYVFDPVPPQKVAPFFTPSKIFFHRVRLVLPFRPFGSSVPIFGEFENRVQAVLLVLGGSDMPPGLVSMAVPTTFDEKSTTVAARRVASLMRFREKRKERCFDKKIRYSVRKEVAQKMKRRKGQFAGRADFGDGSCSSAPCGSTANGEDDHIRETHCQNCGISSRLTPAMRRGPAGPRSLCNACGLMWANKGTLRSPLNAPKMTVQHPADLSKTGDTDDSKANLCAEHNQTTMKTDTEMVPEQEQKADVLPPTKEEDSMATS

SEQ ID NO: 16687 - protein, 219 aa, Oryza sativa
  Clone ID: TF_OSC400014j.C1.p11.fg
MVGDKDAAALAGELTGDAGASLNGFFDHTGLESAVVGEGQGEGEEEEELEWLSNKDAFPSVDTMAAEVESAAPGAPARAAVGPRTKGLRRRRRVTAPWSLAPLLSRPRQAAAAAADAGAPRRRCTHCAVDETPQWRLGPDGPRTLCNACGVRFKSGRLFPEYRPANSPTFSPLLHSNSHRRVMEMRLQSEEDASAASRVNAKARRAERAAARLAGKDKK

SEQ ID NO: 16688 - protein, 528 aa, Oryza sativa
  Clone ID: TF_OSC401803j.C1.p31.fg
MVVVDGLHDGGGGDLQALLDDAGVDDVAARGGGEVEEEVERPSNEDAFPAVEKMATAAAAKGLQCRHCGTTETPQWRHGPEGHRTLCNACSMRYRSGKLVPEYRPLRSPTFSPELHSNRHHRVLQLRRRPGPQSAAPSPAAVARYGGEAKEEEEELAWVSNKDAFATVETTMAPSPRVVETPPEHDHRPANTPTTSPEPHSDRPRRVVQLPRRLQEPSASANLAHAVAATARAGRECAHCGTTKTPAWRLGPDSRRKLCNACGNKYRSGQLNSTTFSQNSQEQKKKSKSSACSRERKRSAVAATVVVGGGLRDDAAAIADEHLDGGDLQALLDDVALDDVAARGGGDAGEAKEEEEELEWLSNKDAFPTVETMSPAPPENRTKAPVPPAGWQCRHCGSTETPLWRERDGPAEAEHVRKEETPPNITPATKHRRIVDLLRCSTALNTAAKAVERRCTHCGTTKTPAWLSGPDSRGKLCNACGKQYRKGRLVPEYRPLNCPTFSPELHSNAHAHRRRRESPVAIAIAGEK

SEQ ID NO: 16689 - protein, 202 aa, Oryza sativa
  Clone ID: TF_OSC102322j.C1.p22.fg
MGARAGALSVAVSGDRVLGRDCRVVLLWPAGEAGHRRRQVRRRRRARRAPRPPLRQLRHRVHAALEERPSRTQVHFAVSPTYVVSLTLPPSYVSLQSLCNACGIRYKKEERRAAATTTTADGAAGCGFITAQRGRGSTAAKAAPAVTTCGEETSPYVVGGGGGGGEVADAAYLAWRLNVVPPAATATAFSVWPERASLYHYN

SEQ ID NO: 16690 - protein, 309 aa, Oryza sativa
  Clone ID: TF_OSC418119j.C1.p10.fg
MDVHPPNAAASSLEELFPHQPATESDRSGIEWLSVYVEDCLSTSASCTNPVSAELPPITMASQGAAKPKLPPRSSTNARKKKRSLASVISDTDDQHCITLFVEPPLLLLDHKDWLAESELILPKKDKDEELVQEQEQEEEENYKMSAGMQFQQEQLVITCSYCLSSQSPQWWDGPSGPTCDACRLRIEARNGHTTSSKKRYGQEIDKEQDIGKRRDKKKIKKAVYVNDELLSEEPMKRCTHCLSYKTPQWRTGPLGPKTLCNACGVRFKSGRLLPEYRPANSPTFVSDIHSNSHKKVMQLRNSVPHPRK

SEQ ID NO: 16691 - protein, 214 aa, Oryza sativa
  Clone ID: TF_OSC413566j.C1.p12.fg
MAGGQYYYRQCGGVAEEDSRSPYGGGGAAVDCTLSLGTPSTRRAEAGAYGGGLQPWDVPSSARPGGGGGGKQDGAGVAPCNKEAPAAGRLPRRCANCDTMSTPLWRNGPRGPKSLCNACGIRYKKEERRAAAAVAPTPPPSLDTGAGYAYCYSRQPPPPPAPQWGCYGQAAAKSASYAMFDAADDGPCLSWRLNMMPSSPAFAVGERPGLFQYY

SEQ ID NO: 16692 - protein, 418 aa, Oryza sativa
  Clone ID: TF_OSC101319j.C1.p7.np
MAGVGFVEDMLREQSLLEATCGDLFDHIDDLLDFPKEESAADVLLLDAPAPGSPLSSRIIGGHATMAAAPPPPPQMMALPPPPAPAKDDASALFDAAGALGAEVFDRKDAHIGPCDELDMDMAQLEWLSGLFDDGTIPHEPSFPGVNCAAPIKASALTANAGVVLPDKAEEALFRSSSPISVLEHSGFNVATNGGSSSSSSSSASSSSESFSGSGRAWSAPVSPRPEPPVLVIPARARSKRSRPSAFPAVRGAPAATETTILVPTPMYSSTSSHSDPESIAESNPHPPPMKKKKKAKKPAAPAAASDAEADADAADADYEEGGALALPPGTVRRCTHCQIEKTPQWRAGPLGPKTLCNACGVRYKSGRLFPEYRPAASPTFMPSIHSNSHKKVVEMRQKATRTADPSCDLLQYIRRRD

SEQ ID NO: 16693 - protein, 136 aa, Oryza sativa
  Clone ID: TF_OSC900385j.C1.p23.fg
MDSSSVEKGSGSIDPDERTASGEPKACTDCHTTKTPLWRGGPSGPKSLCNACGIRYRKKRREALGLDAGEGGAERQEKKKSKRERGEEVTMELRMVGFGKEVVLKQRRRMRRRRRLGEEEKAAILLMALSSGVIYA

SEQ ID NO: 16694 - protein, 429 aa, Oryza sativa
  Clone ID: TF_OSC401000j.C1.p33.fg
MPSYAHHHSSLGDDEEENGRFLSLCLLGFWNFGNLWFLLCVYVGAFWTEKDGKMDALKSSCRSEEAADEGAAAAPSAWGMVERDGFSVEDLLDLEEFCEAEKDAAEENEQALALVAAPEEEKSKDDSQPSSVVTYELVAPPPPPPEIVDLPAHDVEELEWVSRIMDDSLSELPPPPQPPASVVASLAARPPQPRQLQRRPQDGAYRALPPASYPVRTPTICALSTEALVPVKAKRSKRSRATAWSLSGAPPFSDSTSSSSTTTTSSCSSSASFSSFSPLLKFEWHPLGGTSDLPDDHLLPPGKKSKHGKNGKNKPKKRGRKPKQLPPHPSGAAASAPAPGDRRCSHCGVQKTPQWRAGPEGAKTLCNACGVRYKSGRLLPEYRPACSPTFVSAIHSNSHRKVLEMRRKKEVGSGLLTAAAAAAPAVASF

SEQ ID NO: 16695 - protein, 387 aa, Oryza sativa
  Clone ID: TF_OSC401779j.C1.p10.fg
MSSFAHHHHGSLVEKDGRMSALRSSLRPYEAAEEMAAAAAAGGPAAAWGAVERGAGMMGDGFSVEDLLDLEELCEVDRDGGEQGEAAAAAAAAVEKERSSDSHGSSVVSYEPMPLLPPVMDLPAHDVEELEWVSRIMDDSLAELPLPQLPAAAAALAACGKPQHRRPHEGAASALLDPMRTPTICALSTEALVPVKSRRSKRSRASVWSLSGAPLSDSTSSSSTATTSSCSSSASFSPFLQYVDFPALVASDLLDEQPRSKKSKHGKNGKQKPKKRGRKPKHQQPPHLAAAAGGGAALPATGDRRCSHCGVQKTPQWRAGPEGAKTLCNACGVRYKSGRLLPEYRPACSPTFVSSLHSNSHRKVLEMRRKKETPVIVAAAAPAVASF

SEQ ID NO: 16696 - protein, 387 aa, Oryza sativa
  Clone ID: TF_OSC401064j.C1.p72.fg
MEVTAEFGGAYYGGAAGREKKALQQGCGDHFAVDDLLVLPYGEEDETTREGEATGGKEEAAGFGNASADSSTITALDSCSNSFGLADGDFPGELCEPYDQLAELEWLSNYMNEGDDAFATEDLQKLQLISGIPSGGFSTASVPSAQAQAASAAASMAVQPGGFLPEAPVPAKARSKRSRAAPGNWSSRLLVLPPPPASPPSPASMAISPAESGVSAHAFPIKKPSKPAKKKDAPAPPAQAQLSSVPVHSGGSAPAAAAGEGRRCLHCETDKTPQWRTGPMGPKTLCNACGVRYKSGRLVPEYRPAASPTFMVSKHSNSHRKVLELRRQKEMHQQTPHHHQPQVAAAGGVGSLMHMQSSMLFDGVSPVVSGDDFLIHHHLRTDFRPPI

SEQ ID NO: 16697 - protein, 386 aa, Oryza sativa
  Clone ID: TF_OSC900183j.C1.p21.fg
MEVAAADYAGGVRVKKEAGGCGGSGDMFLVDDLLDLPCDEEEEETGLCGAYGGGGAGLGAGVVGGGGDDRAAGNASADSSTVTAVDSCSNSFSGLADGDFSGGLCEPYEQLAELEWVSTYMGEETLPTEDLRKLQLISGIPAAPRAPPALAVSAVQLPAGGAGALPTEAPVPGKARSKRSRVAPCSWSSRLMVLPPPPASPPSPASAVISPSESGTAAPAFPAKKAAKSAKKKDGPSPAPAPNAAAQAAAEGRRCLHCETDKTPQWRTGPMGPKTLCNACGVRYKSGRLVPEYRPAASPTFVVSKHSNSHRKVVELRRQKEMQLLHHHQQPPPHVGAGGGGAAGGLLHVTSPLLFDGPTSSAPLFAGADEFLIHNRISPDYRRQAT

SEQ ID NO: 16698 - protein, 143 aa, Oryza sativa
  unsure (1)..(143): unsure at all Xaa locations
  Clone ID: TF_OSC225j.C1.p10.np
WLEWRLGWVVFXRSICGLQGSGSIDPDERTASGEPKACTDCHTTKTPLWRGGPSGPKSLCNACGIRYRKKRGGAGARRRRGRRGAAGGKRERGEEVTMELRMVGFGKEVVLKQRRRMRRRRRLGEEEKAAILLMALSSGVIYA

SEQ ID NO: 16699 - protein, 815 aa, Oryza sativa
  Clone ID: TF_OSC400773j.C1.p134.fg
MSLRPSERMGIRQKGYKASMDAAEGRRRREDITVILRKADRDRALKEKRRRPTATAAAEGLPQAAHSSAIEKKLESLPMMVQGLYSDDSSMQLESTTQFRKLLSVDHCPPIDEVIRSGVLPRFVEFLTREEYPQLQFEAAWALTNIASGTAANTMAVIEHGAVPIFVKLLSSPREDAVWALGNVAGDSTKCRNLVLMHGAMLPLLQQLNEHAKLSMLRNSAWTLSNFCRGKPQPDFKHVEPALPVLRELILSQDEEILTDSCWALSYLSDGSNDNIQAVIETGVCDWLVELLSHPSPVVLIPALRTVGNIVTGDDAQTQSKLTKTADTGQNYLQNYGFNPQYYGTTDLVLTLSMCIVGHPQALPCLFNLLTTTQKKSVKREACWTISNITAGTKEQIQAVIDSNIIAPLLHLLQHAEFDVKKEAVWAISNATSGGTFNQIEYLVSQGCIKPLCDLLVHQDSKTVLTCLEALDNILRVGEAKKNLGACNMNIFVPMVDEADGLDKIEDLQNHDNVEIYNKAVYVLESYWVQEDDQQPFLIPSVSESESDNEMFQFGSFGKVSVKCPIWMEMHRSCLFRGLSRIGESSYPSHGLVLLTCYEAAVRRLVHMDYGSPHKGVGTGNWSVGEGHTLACVVGLAITFTFLSVARKRLPVNRDTQSRCDDGTDPELGPITLPSLPFLSSPLSPVLMFSLVVGIGVAEEGRRSCVECRATTTPMWRSGPTGPRSLCNACGIRYRKKRRQDLGLDLNQPQKQEHGEVIPEVKDSNSNSNNCNSGSGNSSSNLQVVPKRRLLMGVEEAALLLMTLSSPSASTLLHG

SEQ ID NO: 16700 - protein, 332 aa, Oryza sativa
  Clone ID: TF_OSC101253j.C1.p2.fg
MSHHDGSKPYQPRRGPERPPPPAPADDAAAHVAPTVDHLAAVAAEAEAMARFEEEHRALGAEEEYEEEEDELEEEEEEMEEDEDAQHHEGVGGEVAVPMDAEAAAQLDPHGGMLAASGAVQPMASNQLTLSFQGEVYVFDSVSPDKVQAVLLLLGGRELNPGLGSGASSSAPYSKRLNFPHRVASLMRFREKRKERNFDKKIRYSVRKEVALRMQRNRGQFTSSKPKGDEATSELTASDGSPNWGSVEGRPPSAAECHHCGINAKATPMMRRGPDGPRTLCNACGLMWANKVKMPSSRCHANLGMLRDLSKAPPTPIQVVASVNDGPFLSSC

SEQ ID NO: 16701 - protein, 784 aa, Oryza sativa
  Clone ID: TF_OSC400406j.C1.p1.fg
MAIDGFLLLSNSLAAAAAAFSSALSATCTPEMRRRLASGPQDRCPHTSAISEGTGYSTRWERGVGGGDAMMHMLVAPDGGGGGEMPPPYGGAAAAPPPPMEQELELHRDNADDGLDGHVRCLRCGISGNATPHMRRGPDGPRTLCNACGIAYRKGKMRRMIEAEPPIDEAALAKLVPEVGMEFESEDKAYEFYNKYAGHVGFSVRKSTSHKSSGNITKVRTFVCSREGYNRDKKSLEAKKPRLDTRIGCPARLIIKVTPESKYRVTDFKADHNHQLAPPSTMHMLRSQRILTELQSGEAELSDDSVMTPTTKATGDLVVRQIGFLRSISLLPADYKNYLRSKRMKAMQLGDGGAILKYLQTMQMENPAFFYTMQIDEDDKLTNFFWADPKSREDFNYFGDVLCLDTTYKINGYGRPLSLFLGVNHHKQTIVFGAAMLYDESFESYRWLFESFKIAMHGKQPAVALVDQSIPLASAMAAAWPNTTQRTCAWHVYQNSLKHLNHVFQGSKTFAKDFSRCVFGYEEEEEFLFAWRSMLEKYDLRHNEWLSKLFDERERWALAYERHIFCADIISALQAESFSSVLKKFLGPQLDLLSFFKHYERAVDEHRYAELQADFQASQSYPRIPPAKMLKQAAHTYTPVVFEIFRKEFELFMDSVLFSCGEAGATSEYKVAPSEKPKEHFVRFDSSDCSCICTCRKFEFMGIPCCHMLKVLDYRNIKELPQRYLLKRWRRTAKSANEENQGTLLFLICMRIHFAEAHDAGDLNLNIIPSARCLLHDTGVEAVR

SEQ ID NO: 16702 - protein, 291 aa, Oryza sativa
  Clone ID: TF_OSC900101j.C1.p2.fg
MASATSTTPDLSLHISLPSGGAAVGTTAPPGLGNGGAVGGAGGGKAAGGGDPWRRLDGSTASTELSLSTPQQQQEGSTSAADVLPWRLRQPTAAAASVPVTLPTIPMDGATPKSVLELMDVKDLTLAHVKSHLQMYRTVKSTDKPAAASGPMDGSGSGSGSGDDELLAGDGRQATSSGADADRRMSFTEHRSSSEGAASHAGGGGDGDCSSSAVNSDTIRARSNSPRGLWALTSDLILADILEMCNQGPLPVLLCPLLSLPLLPVSTDTVADILRFNNRRNLCIGHQTLFF

SEQ ID NO: 16703 - protein, 141 aa, Oryza sativa
  Clone ID: TF_OSC31068j.C1.p1.fg
MATTTCSRRGATPKSVLELMNVKDLTLAHVKSHLQMYRTVKSTDRSSHIASGEAQLQQQAGMEVAMEAAAGGGGNGGGGGGGVVLPMMPACDDMVGICSSPAPPAAATSSAAAYFLCATTTSTATAPLAVVPSPPAPTIPT

SEQ ID NO: 16704 - protein, 286 aa, Oryza sativa
  Clone ID: TF_OSC400549j.C1.p9.fg
MGNLAAAAAASSAAAGGGGAGDAGGSGDGYLSDGGLLLSSGKRRRAQERKKAVPWTEEEHRTFLAGLEKLGKGDWRGISKNFVTTRTPTQVASHAQKYFLRQTNPNKKKRRSSLFDMMATDMSPAPNCPVLPPSMGKLHDMVAMTKQLQNSSLEGVSSSSTVNLAPQVARDLPPPIPSFKATNVDSSLSKMNHMDGFLRAPMLFRPIPRIAEGASSSTPATASIADLEFQANLTACSNALFASPRRKPKKADPPAEKDLDLTVAPPSQQTRASISSQNAVGVIQVV

SEQ ID NO: 16705 - protein, 265 aa, Oryza sativa
  Clone ID: TF_OSC422332j.C1.p27.fg
MEQHEEAAERKPSPPVIFRLFGVEVRGGGGGVDEEEYEEEEVEGGLFIKKSSSMPNLTSIDPLPVPADGGKRRASDDSELASGQQKRRRRKVQERKKGVPWTEEEHKKFLEGLRQLGKGDWRGISKNFVTSRTATQVASHAQKYFLRQTNPGKKKRRASLFDVVAECSDDQLPSPQSVGTKPPTQDIIHTDRGDVPILSYPVARGFRGDSVQVDELTEYVKRLKAAEDMSLSMISGLEMASSSISSLELSIAPPHCAIEAAIKVL

SEQ ID NO: 16706 - protein, 310 aa, Oryza sativa
  Clone ID: TF_OSC400601j.C1.p105.fg
MAATAAVAAIASSVKRATNNRRKQRRAKVQSGRQHRQRKRRLVWTDELQKMFREAFNQLSLTQNLNSYHSVLIIKIQEDYEKNTRCPQKYFKLMKLMIDPMNDLSLTRDNIASYLQKHKKRLQKEYQKHQNLLEQKDQQLPIVDNTNTSSIQQKNMHYESCYNEHSNKQPKLKEPTLLTANYHGLRNMHHHHKNIINMEPSNVLRPPNLNNAKGFNMPFNKEGVDEAIYQSQLMAHQVYANHVDATAQTTWEVTMTQDMRPISQVHQHGCETTPVDSSNNTNGISENNNYHVGRKNSRANMVGILWPLLR

SEQ ID NO: 16707 - protein, 300 aa, Oryza sativa
  Clone ID: TF_OSC401371j.C1.p1.fg
MGPDNGANNNSNLAARQRLRWTNELHERFVEAVTQLGGPDRATPKGVLRIMGVQGLTIYHVKSHLQKYRLAKYIPDSSADGNKAENKDPGDLLAGLEGSSGLQISEALKLQMEVQKRLHEQLEVQRQLQLRIEAQGKYLKKIIEEQQRLGGVKSETPAAGASVTLPSDQFPDSERTDPSTPAPTSESPTQGVPSNRDNGGQNEATKSPQRDDSLSRHEPLTPDSNCQPGSPTASPKHERAAKRQRGNGAEFSETDFALPHSIFESSSGSEFQQCSMSYSAVELGSLKVALCRGVDFCSSG

SEQ ID NO: 16708 - protein, 412 aa, Oryza sativa
  Clone ID: TF_OSC401174j.C1.p9.fg
MEVDHADRDGARRRCREYLLALEEERRKIQVFQRELPLCFDLVTQTIEGMRSQMDAAGSEETVSDQGPPPVLEEFIPLKPSLSLSSSEEESTHADAAKSGKKEEAETSERHSSPPPPPPEAKKVTPDWLQSVQLWSQEEPQQPSSPSPTPTKDLPCKPVALNARKAGGAFQPFEKEKRAELPASSTTAAASSTVVGDSGDKPTDDDTEKHMETDKDNDKDAKDKDKEGQSQPHRKPRRCWAPELHRRFLQALQQLGGSHVATPKQIRELMKVDGLTNDEVKSHLQKYRLHTRRPSSTGQSSAAAGVPAPPAPQFVVVGSIWVPPPEYAAAAAAQQHVQLAAAGNNASGSANPVYAPVAMLPAGLQPHSHRKQHQQQQQGQRHSGSEGRRSGDAGDGSSSSPAVSSSSQTTSA

SEQ ID NO: 16709 - protein, 376 aa, Oryza sativa
  Clone ID: TF_OSC405568j.C1.p3.fg
MVIDEDKCHADSTSYMLSAELNFSVTVFTSPIKALDFLQNHAEGVDLVLADVHMEEMNGFDFLKVARELHKSIQVIMMSTETTMYTMKRCVKLGAQFLVNKPLDAGTIKNLWQYVDLKVLRMEKIKDLLQGIGDESTCANETNSLAENPKNDTKKKYYLMWTPHLQKKFLHALQILGKDASPKNIKKIMGVDNIDCRQIAAHLQKHRLRLTKDLKKASFTTDTSKDESNSRIGPAESHHVCRNASTLQPRSNTQPTETTMQILSEDAEYDDVYAAMRRALQYGIVFDESKHSSDPSGDEDEQVVVGGDQDGCANEANDIDSSGDHHQVAAVVTKPCNANASQEIINKMTNSDGMQATKGSKAAVFRLVDYSESDSD

SEQ ID NO: 16710 - protein, 355 aa, Oryza sativa
  Clone ID: TF_OSC900405j.C1.p11.fg
MCVQGDSGLVLTTDPKPRLRWTVELHERFVDAVTQLGGPDKATPKTIMRVMGVKGLTLYHLKSHLQKFRLGKQPHKEFSEHSVKEAAAMEMQRNAASSSGIMGRSMNHDRNVNDAIRMQMEVQRRLHEQLEVQKHLQMRIEAQGKYMQSILEKAYQTLAAGDVAAAVACGPAGYKSLGNHQAAVLDVCSMGFPSLQDLHMYGGAGGGHLDLQQQQPPASTMESFFACGDGGGSLGKTAAKTRHYGGAGKSPMMWGVDDDDDDDDPAGKCGGGGHHQLQMPPPPMMDGGIDVMDSLAADVYETKPIMSGDSTGSKGGGYDVAAAASKLERPSPRRPPQLGSPSVMAGAQTRNLSYG

SEQ ID NO: 16711 - protein, 689 aa, Oryza sativa
  Clone ID: TF_OSC412867j.C1.p2.fg
MEERKGLMGRERDQFPVGMRVLAVDDDPVCLKVLETLLRRCQYHVTSTNQAITALKLLRENRDMFDLVISDVHMPDMDGFKLLELVGLEMDLPVIMLSVNGETKTVMKGITHGACDYLLKPVRIEELRNIWQHVVRRKFGNRERNNLDFSKECNKPQSADTDHGPYQPTCGSSDQNGRSSRKRKELHGEDDDEGDDNDYQENDEPSAAKKPRVVWSVELHRKFVAAVNQLGIDKAVPKRILELMNVEKLTRENVASHLQKYRLYLKRLGAVASQQASIVAAFGGRDPSFLHIGAFEGLQSYQPFAPSAALPSFNPHGLLTRTSAAAAFGLQELAAPSSTIQTSTGNVTVGHCLEENQQANLAQGLTAAIGQPQLQQNWIHQEGNGLSDVFSGSSLTNTLSSTLQRVPSSSLPPQELLECKQAKVSMPPSIRIPPSSSALLERTLGVSTNLGDSSISQQGALPIDGGFSADRLPLHSSFDGAVATKLDTSLAASQREIGQQGKFSVSMLVSPSDNLALAKNAKTGASSSGSTIILPLDTARHSDYLQFGGASNSLQKMDGQKQDHIQSSNIIWSSMPSTQLPSDTQIHNTQNQRLDSGSFNHNIGAHLADQTNASASILPQMKFDTRISEEKMKQKNTYDLGSSKLQGGFNSSGCNFDGLLNSIIKVEKDDLPFMDNELGCDLFPLGACI

SEQ ID NO: 16712 - protein, 396 aa, Oryza sativa
  Clone ID: TF_OSC417054j.C1.p12.fg
MVGGGRERNGGVRQYNRSKVPRLRWTPDLHHCFVHAIHKLGGQDKATPKRVLQLMGVGGLTISHVKSHLQMYRNMRNDLGMQGIQVQQVDQEHTYGGGVEVWTDMQQCDHDECDVPCCSCHSPKPRKEPLLHLQLKSSGMNIDEPGTRARIAAPNVRSCRDDAAASATETRRRRGGRPEEVDDDANASTSPRISQLQLLRLRGHGIRESDMSPSTSLQCYYVRSQRTTTMPPGAAAAAAGGDGGSQCYAAPRYSSSSKLKFLGFVVTSGPPPPRLPPPAACCCGSDDNIPFQVGTFAPHRVAPPTASCGGGGGGGRAEARPSSSYRSVWFEPAAAAAASNNGVAPDGEHDDGCSLSLSLALDTGCAGAGGSLVSSTTSSSSGSRISLDLSLSTLDS

SEQ ID NO: 16713 - protein, 288 aa, Oryza sativa
  Clone ID: TF_OSC417459j.C1.p2.gm
MVGGGRERNGGVRQYNRSKVPRLRWTPDLHHCFVHAIHKLGGQDKATPKRVLQLMGVGGLTISHVKSHLQMYRNMRNDLGMQGIQVQQVDQEHTYGGGVEVWTDMQQCDHDECDVPCCSCHSPKPRKEPLLHLQLKSSGMNIDEPGTRARIAAPNVRSCRDDAAASATETRRRRGGRPEEVDDDANASTSPRISQLQLLRLRGHGIRESDMSPSTSLQCYYVRSQRTTTMPPGAAAAAAGGDGGSQCYAAPRYSSSSKLKFLGLVSSTTSSSSGSRISLDLSLSTLDS

SEQ ID NO: 16714 - protein, 201 aa, Oryza sativa
  Clone ID: TF_OSC415628j.C1.p3.fg
MRWPEELHRRFVHAVRRLGGCHEATPKRIMQLMGAKGVSISHVKSHLQMYRNSNNSSNVNRRHPVTPQIDWTTTAQQDEQQRRQMSSFSFLATRTVPAAGIGSHSHQRPHRRQALHAGDDDGCELTLSISGGAAEESKDGGSSITDDDDELLIQPPAPNIINDDGSTRHGHRHPFACSTQPLPPAAINLELTISSPCCWLT

SEQ ID NO: 16715 - protein, 467 aa, Oryza sativa
  Clone ID: TF_OSC900208j.C1.p22.fg
MSTQSVIAVKQFSGPDKIAQAYTVPQPSAHVLSNANYDYDLCGSTNSTSLSCAIQSSNIKTESISSSSLPKILPFSTDSNGESSLSRMSQAEFSDPILSSSSTFCTSLYTSSPMNSGSCRKTGYLPFLPQPPKCEQQQNSAGQSSSSLMLLDADLRNSGHADDEHTDDLKDFLNLSSDCSFHGKCSAMAYNEQMEFQFLSEQLGIAISNNEESPRLDDIYDRPPQLMSLPVSSCSDQEDLQDARSPAKVQLSSSRSSSGTASCNKPRLRWTPELHERFVDAVNKLEGPEKATPKGVLKLMKVEGLTIYHIKSHLQKYRLAKYLPETKEDKKQEEKKTKSVANGNDHAKKKSAQMAEALRMQMEVQKQLHEQLEVQRQLQLRIEEHARYLQKILEEQQKARESISSMTSTTEGESPEFAPMEKTEDKAETSSAPLSKCRITDTDAECHSKVDNKKTKPQADLEMVHDE

SEQ ID NO: 16716 - protein, 249 aa, Oryza sativa
  Clone ID: TF_OSC400570j.C1.p9.fg
MFEGCYGGVGSAAAAAARDPKPRLRWTPDLHERFVDAVTRLGGPDKATPKSVLRLMGMKGLTLYHLKSHLQKYRLGRQSKKSAGLELAVADSGDALKYQVEVQRKLQEQLEVQKKLQMRIEAQGRYLKEILEKAQKNISLDANGSANLSSTRSQITDINLALSGFMDNATQVQEENNELMKPISDDNLKVNNLGFQLYHLGSQESKDVKCTPKTEELLLLDLNIQGGYELSSRGMQGCELDLKINQQRR

SEQ ID NO: 16717 - protein, 350 aa, Oryza sativa
  Clone ID: TF_OSC400084j.C1.p5.fg
MAVFGEALAVKLLSEPYVQRSIALKWQRGCQMYEPKPFSSIVLAHNDPVSHNQQIERINNNVVSNSGGNSSNSNFAARQRLRWTDDLHDRFVDAVTQLGGPDRATPKGILRIMGVQGLTIYHVKSHLQKYRLAKYIPDPTADGAKSDKKDLGDLLADIESSSGMEIGEALKLQMEVQRQLQLRIEAQGRYLQKIIEEQQRLSGVLGESGKLGALGPAPGEPYQDSNKTDPSTPVPTSESPIRDKAGSGLFKTISSHDDCREPLTPDSSCRAGSPLESPPRASKRIRVSSDIDHRGNNEFPPPLKVPEPSSGSDFRQESSVLLSSSAVHFDSLESLDADENVFTNGSGSDD

SEQ ID NO: 16718 - protein, 392 aa, Oryza sativa
  Clone ID: TF_OSC402805j.C1.p18.fg
MERHLFLHGGNTQGDSGLVLSTDAKPRLKWTPELHQRFVDAVNQLGGAEKATPKTVMRLMGIPGLTLYHLKSHLQKYRLSKNLQGQANVGTTKNALGCTGVADRIPGTSALAMASASAIPQAEKTIQIGEALQMQIEVQRQLNEQLEVQRHLQLRIEAQGKYLQAVLEQAQETLGKQNLGPASLEDAKIKISELVSQVSNECLSNAVTEIRESSSIHRLEPRQIQFVESSANNCLTAAEGFKEHRLQNHGVLKAYDDSTLFCRKQSQDQESQYSLNRSLSERRMGHLYSGKQYHKSEGSDSDTEVLHEYITPQKNGGGSTTSSTSGSKEINVEKLYLDEPSCKRQTVDYQRESKLLDFDQQSSGKNLDLNTHNIDDNDQGYRHFDLNGFSWS

SEQ ID NO: 16719 - protein, 288 aa, Oryza sativa
  Clone ID: TF_OSC404146j.C1.p1.np
VPSNGGNNNPNMAARQRLRWTNELHDRFVEAVTQLGGPDRATPKGVLRIMGVPGLTIYHVKSHLQKYRLAKYIPDPSADDNKNKDEDKDPGNLLSALEGSSGMQISEALKLQMEVQKRLHEQLEVQRQLQLRIEAQGKYLQKIIEEQQRVIGAGLPEPRQAQLPDSEKTNPPTPVPISESPVQENSQSQVEPTKSPSHDDALPCGEPLTPDSSCRPGSPTLSPKHERAAKRQRSDAGDVTAFADGEFVLPPGIFESSTGSEFLQAYAHLDAPIFGTKKSLQPCQYVNL

SEQ ID NO: 16720 - protein, 694 aa, Oryza sativa
  Clone ID: TF_OSC22451j.C1.p8.fg
MAATQATAARKFPEGLRVLAVDDSPVCLMLLEALLRRCKYQPTMTRDAATALRMLRERPGDFDLVISDVHMLDMDGFKLLELIGLEMDLPVIMQSANGELETMMKGVTHGACDYLVKPVSLKDIQNIWQHVWRKRKLDIRNHNGGYNDGGELVGATRTKRKYTRKMRNDGDNYGENKENMDSTLKRQRVVWTPELHRDFVIAVHELGVDRAVPRKILRMMKVDYMTRENIASHLQKYRLYLKRISTQTGMDPDQFPEKWKYMNELDALKNYCENGRYRLTPAIASSSSSNPFARMNSASALATNGFLPTHSVQLKNSQRNMAMGTVGHGGSPGNNPVFQPLQNSSNARKCFPSGPSGSSFANISNGLVLDTDDSGSSYAGMFCKSMWETSNGSPSCHSGNSSANKSNNGVSAPANQFQVQSKFGFSALANQFPVQSNCGFSAPANQYQVQSNGGFSVPANQFPVQSNGEFLAPTNQFPVQYPEVNNQPLVQMNQSSTNHFSTIGNDYQFPDLANCSKYWQPTAPSMFPDLGHNDGTSFRPSQANIANINQLSSFAASSGQEPMFGDELHGQMSPIMSTISLSDFDDQMGSFNIGNDTSPAEMMHDNFSLGSDSNISSSTPTDSSFGSTFPDFHLDSPEMPAQMLNGGDEDGILLPVLDDTVDQQDLFDQLDENNGREKLGSGRCVRKGPFECFF

SEQ ID NO: 16721 - protein, 691 aa, Oryza sativa
  Clone ID: TF_OSC6952j.C1.p2.fg
MAPVEDGRGVEFPVGMKVLVVDDDPTCLAVLKRMLLECRYDATTCSQATRALTMLRENRRGFDVIISDVHMPDMDGFRLLELVGLEMDLPVIMMSADSRTDIVMKGIKHGACDYLIKPVRMEELKNIWQHVIRKKFNENKEHEHSGSLDDTDRTRPTNNDNEYASSANDGAEGSWKSQKKKRDKDDDDGELESGDPSSTSKKPRVVWSVELHQQFVNAVNHLGIDKAVPKKILELMNVPGLTRENVASHLQKFRLYLKRIAQHHAGIANPFCPPASSGKVGSLGGLDFQALAASGQIPPQALAALQDELLGRPTNSLVLPGRDQSSLRLAAVKGNKPHGEREIAFGQPIYKCQNNAYGAFPQSSPAVGGMPSFSAWPNNKLGMADSTGTLGGMSNSQNSNIVLHELQQQPDAMLSGTLHSLDVKPSGIVMPSQSLNTFSASEGLSPNQNTLMIPAQSSGFLAAMPPSMKHEPVLATSQPSSSLLGGIDLVNQASTSQPLISAHGGGNLSGLVNRNPNVVPSQGISTFHTPNNPYLVSPNSMGMGSKQPPGVLKTENSDALNHSYGYLGGSNPPMDSGLLSSQSKNTQFGLLGQDDITGSWSPLPNVDSYGNTVGLSHPGSSSSSFQSSNVALGKLPDQGRGKNHGFVGKGTCIPSRFAVDEIESPTNNLSHSIGSSGDIMSPDIFGFSGQM

SEQ ID NO: 16722 - protein, 284 aa, Oryza sativa
  Clone ID: TF_OSC409883j.C1.p6.fg
MERAGYGVGVGGAGAVGAGVVLSRDPKPRLRWTPDLHERFVEAVTKLGGPDKATPKSVLRLMGMKGLTLYHLKSHLQKYRLGKQNKKDTGLEASRGAFAAHGISFASAAPPTIPSAENNNAGETPLADALRYQIEVQRKLHEQLEVQKKLQMRIEAQGKYLQTILEKAQNNLSYDATGTANLEATRTQLTDFNLALSGFMNNVSQVCEQNNGELAKAISEDNLRTTNLGFQLYHGIQDSDDVKCSQDEGLLLLDLNIKGGGYDHLSSNAMRGGESGLKISQHRR

SEQ ID NO: 16723 - protein, 178 aa, Oryza sativa
  Clone ID: TF_OSC404146j.C1.p3.fg
MGVKGLTLFHLKSHLQKYRLGKQSGKEMAEQSKDASYILGAQSGTNLSPTVPTPDLKESQELKEALRAQMEVQRKLHEQVEVQRHVQIRMEAYQNYIDTLLEKACNIVSEQLNGFSISDHDLTSAGVMLSSSDTLSPSIFHQLSVSSISLHSPGGKSSPFAADADLFFQKAPEKRKSY

SEQ ID NO: 16724 - protein, 299 aa, Oryza sativa
  Clone ID: TF_OSC900288j.C1.p13.fg
MALQAAALLSFFLSFFLFFFFLSVLASPDYPCKGNLCSDCILMMYHAKKFSVPFGPQSTQSNEHMSNIGAFGGSNMGSPANPAGSGKQRLRWTSDLHNRFVDAIAQLGGPDRATPKGVLTVMGVPGITIYHVKSHLQKYRLAKYIPESPAEGSKDEKKDSSDSLSNTDSAPGMQINEALKMQMEVQKRLHEQLEVQRQLQLRIEAQGKYLQMIIEEQQKLGGSLKACEEQKLPHSPPSLDDYPDSMQPSPKKPKMDNLSPDSVRDVTQSDFESHLIGPWDQEAAFRVDEFKADPGLNKS

SEQ ID NO: 16725 - protein, 217 aa, Oryza sativa
  Clone ID: TF_OSC11575j.C1.p2.fg
ATPKQIRELMKVDGLTNDEVKSHLQKYRLHTRRPMPSPAPPTAATPQLVVLGGIWVPPEYATQAAGPAIYGAHPATQPHYTAAVAAQEYYHHHHHHLQHHPAAAALVHHRAVAPPPPLPPQQQLAPPYSAKSSASARLGSPDSDGRGSGGGGGAAASGAGRDMSESIEEEGEGEEREDDDDDDEMAATNNAHAVDGDDDNDEINTTTTTSAGAITTN

SEQ ID NO: 16726 - protein, 243 aa, Oryza sativa
  Clone ID: TF_OSC101630j.C1.p11.np
VHMFPAGLRVLVIDDDCSYLSVMEDLLLKCSYKVTTYKNVREAVPFILDNPQIVDLVISDAFFPTEDGLLILQEVTSKFGIPTVIMASSGDTNTVMKYVANGAFDFLLKPVRIEELSNIWQHIFRKQMQDHNNNMVGNLEKPGHPPSILAMARATPATTRSTATEASLAPLENEVRDDMVNYNGEITDIRDLGKSRLTWTTQLHRQFIAAVNHLGEDKAVPKKILGIMKVKHLTREQVASHLQ

SEQ ID NO: 16727 - protein, 852 aa, Oryza sativa
  Clone ID: TF_OSC900310j.C1.p4.hg
MGSSSASAAQHEEAAAAAAFVLGGVDMRMLAARTATGALARAGGGEAAAAAAAAARFEDCIRSLEAEKAKMEVFRRELPISVHLIADVIEWLKDEVEKQRLLRRRQVEAPAAAPPPEMFAPPATAKRKSAASAAAEGVKAEADANDKRSWMSSAQLWSCGSHTSTSTSNGGSVKKQQHKVSNAFMPLATLPAFAKSLEKADAAVPDLSLSSRVAMADAPACPAAPSATSSAVTDVAVAQRQQAVQRKARRCWSPELHRRFVAALQRLGGPQAATPKQIRELMKVDGLTNDEVKSHLQKYRLHTRRASDGGDGGGDHQTVGGRLWPLPPEQYTTSQHSTSQSGSPQGPLQLTVSSSHAVSVTAGDSCDGGEEEEEDGNPIHSGSEGKTSTISRAAAAAAAVWLSTSPPALFPTGETSPACLWRFLLRGKLLRRLRRCGCGSGARRAAAAAMREAVTVQVGGFANYVGSHFWNFQDELLGLADDPDADPVFKNAALDMDVLYRSGETHQGVATYCPRLVSVDSRGSLGSLSSSGNLDFDKFDNYGSAQEVVSDWSQIEEMNERLRFFVEECDHIQGIQFIVDDSGGFSSVAAQFLENIADDYTNTLVLLYCVRDPMTLGPSRRNQRESIMRALHDAVSFSKLSSFCNLMNMVTALDVAMPAPSLTDRDAMGNIEMKLHSLTPEISDEDEDPYSVESLVVHGALDRGGQRTSISQVKDSVCSVYEARETKPKFSHLSASLCPLPVPLPFPSIFRGNIGRHGEILSDHTEESQPKGSLDIESIPMAARLRSSSAVLPFIERRSGSLQKHGVARGAIGSLVLHDWGFGREEVEDMGEHLAKLLRPFHPEMDLTSDSD

SEQ ID NO: 16728 - protein, 552 aa, Oryza sativa
  Clone ID: TF_OSC401249j.C1.p76.fg
MRRSGAPPQENYSESRVRLVQINLAYSAFIPTDWNNLETAESRPKSTGLNKVRAFEEPMRRACSAAPSGFQKTSLRIPSPSTHEAPTGAQQKTRKLKPGAENNQSYPVGVRLYKLELETKKNQISKENDSEDIMNTKKIKLHDCHFGSPLCDPSPAPHLLSSAAAAGLSFHPGLVSSAAQHQQHGAGGWLHEEYYAPRSSPPSSLLAQTCVGSNATAFYAAENLPQFDFPALGTAAAAAAKAPFRSSESELYRPVDPLLLRADHSVRTYYVRPQKRDSGERTPLPPPSQQQHQDRIHGLFAGAPTTRLLSGEPKIHSFPPQVAAKPILPAMDAPSLQNQMENQLTRNCIGAATPVTPTGNLAGSGAPSKTRIRWTQDLHERFVDCVNQLGGADKATPKGILKLMNSDGLTIYHIKSHLQKYRIAKYMPASSEGKQLEKRATGNDMQNLDPKTGMQITEALRVQLDVQRRLHEQLEIQRNLQLRIEEQGKRLQKMFEDQLKASRSVMEPQELDDVVAFAAGDGDDDAFDDVDVQLLAVAGSGYDDAGFQSKIS

SEQ ID NO: 16729 - protein, 331 aa, Oryza sativa
  Clone ID: TF_OSC900221j.C1.p21.fg
MREEEEPSWFARWEEQLPAPDELMPLSQSLITPDLAVAFDIPTHGGGGGGGVGGGVVGGDGVGGGGGGGGGGGGGVGAGEMNGGASSAAGSSGGGGGGGGGDEPARTLKRPRLVWTPQLHKRFVDAVAHLGIKNAVPKTIMQLMSVDGLTRENVASHLQKYRLYLKRMQGVGNGGGGGGGGGAGAGGSHSSGSGTDAATEHLFATGPVPFLPPGRAPAGGDPYPPFAPMGGHHHHPPQIGHFHHHPAARPLGHYGSGPGAGFDHGFLSRAVAGGGPPVGPPGMHHRMVGPAAGMAMMAPSPFAEELELGSRGGGGGGGRRELTLFPTTGDH

SEQ ID NO: 16730 - protein, 691 aa, Oryza sativa
  Clone ID: TF_OSC401801j.C1.p6.fg
MAPVEDGGGVEFPVGMKVLVVDDDPTCLAVLKRMLLECRYDATTCSQATRALTMLRENRRGFDVIISDVHMPDMDGFRLLELVGLEMDLPVIMMSADSRTDIVMKGIKHGACDYLIKPVRMEELKNIWQHVIRKKFNENKEHEHSGSLDDTDRTRPTNNDNEYASSANDGAEGSWKSQKKKRDKDDDDGELESGDPSSTSKKPRVVWSVELHQQFVNAVNHLGIDKAVPKKILELMNVLGLNRENVASHVQKFRLYLKRIAQHHAGIANPFCPPASSGKVGSLGGLDFQALAASGQIPPQALAALQDELLGRPTNSLVLPGRDQSSLRLAAVKGNKPHGEREIAFGQPIYKCQNNAYGAFPQSSPAVGGMPSFSAWPNNKLGMADSTGTLGGMSNSQNSNIVLHELQQQPDAMLSGTLHSLDVKPSGIVMPSQSLNTFSASEGLSPNQNTLMIPAQSSGFLAAMPPSMKHEPVLATSQPSSSLLGGIDLVNQASTSQPLISAHGGGNLSGLVNRNPNVVPSQGISTFHTPNNPYLVSPNSMGMGSKQPPGVLKTENSDALNHSYGYLGGSNPPMDSGLLSSQSKNTQFGLLGQDDITGSWSPLPNVDSYGNTVGLSHPGSSSSSFQSSNVALGKLPDQGRGKNHGFVGKGTCIPSRFAVDEIESPTNNLSHSIGSSGDIMSPDIFGFSGQM

SEQ ID NO: 16731 - protein, 432 aa, Oryza sativa
  Clone ID: TF_OSC401261j.C1.p3.gm
MGRVFPALLPGHIISGQIRQQLSGGVGVGGAAAAASSNDRPPLCVQGDSGLVLTTDPKPRLRWTVELHDRFVDAVTQLGGPDKATPKTIMRVMGVKGLTLYHLKSHLQKFRLGKQHKDFNDHSVKDAMDMQRNAASSSGIMGRSMNDVHVNEALRMKMEVQRRFHEQLEVQKHLQMRVEAQGKYMQTILEKAYQAISSSGDCATWHAGYKSLGSQAVLDIGSSMSFPSLQDDLQLYGGSHLDHLHQQHEQMEIRPSIDTFLAFNYSSSTGKSPMVWPGADDGGGEPAKISGDHQLQMAAPATTTMMMEAITMSGGDSMGSKGFEGQMSSKLDMRSPPPQQTVLPVGSERMSSPIVGAKARNISYGRNVHVNGADKKAQSQEQQEAEKHLQMRVEAQEKYMRSMMEKAHQALASGATWPAANEQAKISPPGRK

SEQ ID NO: 16732 - protein, 556 aa, Oryza sativa
  Clone ID: TF_OSC7339j.C1.p2.fg
MAATAAYLPLRAQAQVGLAPLRPSGSAAAGARLPGRTARRRLAARGGPEAAGIRAEAVPGGGGVARRAAMVPPYNVLITGSTKGIGYALAKEFLKAGDNVVICSRSAERVESAVTDLKKEFGEQHVWGIVCDVREGKDVKALVDFARDKMKYIDIWNHKKAGFSPYLCVPLAQINNAGSNAYSYKPLVETSDEALMEVITTNTLGLMICCREAINMMRNQPRGGHIFNIDGAGSDGRPTPRFAAYGATKRSVVHLTKSLQAELQMNEVNNVMVHNLSPGMVTTDLLMSGATTKQAKFFINILAEPANVVADYLVPNIRAIPTNQSMKPTYIRFLTGLKAYSRIFSRIAFGARRNKIMSNSQPAQEDDCMSSILVSRLIRAMQPTRSYLRWSDDLHKMFVEAVAYHGGPYEAKPTAVKETMQAMGVTSLTTHNIKSHLQKYRESFSSGVGSLHDHDLLRTTSPSKEALDLASEMVRDNDAAMAEIEMLNDLLLDHDIEMVETSFSVDDLQMMERELMSEIKLIEHNFEISESALDEYMDDLANYAFDLTGPANSSSP

SEQ ID NO: 16733 - protein, 448 aa, Oryza sativa
  Clone ID: TF_OSC900146j.C1.p4.fg
MCPDIEDRAAVAGDAGMEVVGMSSDDMDQFDFSVDDIDFGDFFLRLEDGDVLPDLEVDPAEIFTDFEAIATSGGEGVQDQEVPTVELLAPADDVGVLDPCGDVVVGEENAAFAGAGEEKGGCNQDDDAGEANVDDGAAAVEAKSSSPSSTTSSSQEAESRHKSSSKSSHGKKKAKVDWTPELHRRFVQAVEQLGIDKAVPSRILEIMGIDSLTRHNIASHLQKYRSHRKHMIAREAEAASWTQRRQIYAAGGGAVAKRPESNAWTVPTIGFPPPPPPPPSPAPIQHFARPLHVWGHPTMDPSRVPVWPPRHLVPRGPAPPWVPPPPPSDPAFWHHPYMRGPAHVPTQGTPCMAMPMPAARFPAPPVPGVVPCPMYRPLTPPALASKNQQDAQLQLQVQPSSESIDAAIGDVLSKPWLPLPLGLKPPSVDSVMGELQRQGVANVPPACG

SEQ ID NO: 16734 - protein, 232 aa, Oryza sativa
  Clone ID: TF_OSC416785j.C1.p7.fg
MPGVRLNHHHHHQPPAAAPFVGAAPLPHHPRSGGACYCDPCHVAGAWRRGGCGGGGARGVLPAKRAPRAPRMRWTSTLHARFVHAVELLGGHDRATPKSVLELMDVKDLTLAHVKSHLQMYRTVKNTERPAASSDQADGFENGSAGEICDENSLDLHGGCRPEAMSAAARHGREDWSGFHESNTGTMQTLKDMQSKSLEIISDMNSCVSETTSSTSELNLEFTLGRPQNRPN

SEQ ID NO: 16735 - protein, 587 aa, Oryza sativa
  Clone ID: TF_OSC415689j.C1.p8.fg
MSRPQPPPLLPVLPELGGLQALTSSSASLATWLRGGGREEVAAINLDGGDAVILVVVPPHLAGHGGQGRPPHYSIERRRSQPQFECHAYVKGVKYLVFEFRGVIRLTAIAHGVVGDVFLGSEAPVVTSSISKYAGLVFGGAHRDVSALGEEKLSFFGKSSQQKRISTNQLYNSGIPVTVPSPLPAIPATLDENIPRIPDGQNVPRERELRSTPMPPHQNQSTVAPLHGHFQSSTGSVGPLRSSQAIRFSSVSSNEQYTNANPYNSQPPSSGSSSTLNYGSQYGGFEPSLTDFPRDAGPTWCPDPVDGLLGYTDDVPAGNNLTENSSIAAGDELAKQSEWWNDFMNYDWKDIDNTACTETQPQVGPAAQSSVAVHQSAAQQSVSSQSGEPSAVAIPSPSGASNTSNSKTRMRWTPELHERFVDAVNLLGGSEKATPKGVLKLMKADNLTIYHVKSHLQKYRTARYRPELSEGSSEKKAASKEDIPSIDLKGGNFDLTEALRLQLELQKRLHEQLEIQRSLQLRIEEQGKCLQMMLEQQCIPGTDKAVDASTSAEGTKPSSDLPESSAVKDVPENSQNGIAKQTGMRIH

SEQ ID NO: 16736 - protein, 233 aa, Oryza sativa
  Clone ID: TF_OSC419196j.C1.p4.fg
MATTAATAPDLSLHISPPSPPDMAAGGETMEQLAEPKLCLGFGTAAAAAAEQYNNGGCNLQQQQRLHQPSQIQRFKKSASGGSPVCSGGATGTGGVAAARSGNGGGGGKRSSRAPRMRWTTALHAHFVQAVELLGGHERATPKSVLELMNVKDLTLAHVKSHLQATYLLDLVQMYRTVKGTTDRTCAEGHGQMRDMGFLRRGGGGVDGFDVLGNTSSIAIANIRAFNLKDANI

SEQ ID NO: 16737 - protein, 539 aa, Oryza sativa
  Clone ID: TF_OSC401660j.C1.p24.fg
MLEVSTLRSPKADQRAGVGGHHVVGFVPAPPSPADVADEVDAFIVDDSCLLEYIDFSCCDVPFFHADDGDILPDLEVDPTELLAEFASSPDDEPPPTTSAPGPGEPAAAAGAKEDVKEDGAAAAAAAAAADYDGSPPPPRGKKKKDDEERSSSLPEEKDAKNGGGDEVLSAVTTEDSSAGAAKSCSPSAEGHSKRKPSSSSSSAAAGKNSHGKRKVKVDWTPELHRRFVQAVEQLGIDKAVPSRILELMGIECLTRHNIASHLQKYRSHRKHLMAREAEAASWTQKRQMYTAAAAAAAVAAGGGPRKDAAAATAAVAPWVMPTIGFPPPHAAAMVPPPPHPPPFCRPPLHVWGHPTAGVEPTTAAAPPPPSPHAQPPLLPVWPRHLAPPPPPLPAAWAHGHQPAPVDPAAYWQQQYNAARKWGPQAVTPGTPCMPPPLPPAAMLQRFPVPPVPGMVPHPMYRPIPPPSPPQGNKLAALQLQLDAHPSKESIDAAIGDVLVKPWLPLPLGLKPPSLDSVMSELHKQGIPKVPPAASGAAG

SEQ ID NO: 16738 - protein, 432 aa, Oryza sativa
  Clone ID: TF_OSC405553j.C1.p18.fg
MLQRNLPNLSLRISPPAVSSAAAPVSSGTPTTAARTTLPTGVITDAEGGGEVAAFFGNPSSGSEPPGLSLGLGPTTPAHADAGGGRHGDHHLQPQGCAPFKRAAARASQLPAGSKRSVRAPRMRWTTALHARFVHAVELLGGHERATPKSVLELMNVKDLTLAHVKSHLQMYRTVKSTDRSSHIASGEAQLQQQAGMEVAMEAAAGGGGNGGGGGGGVVLPMMPACDDMVGICSSPAPPAAATSSAAAYFLCATTTSTATAPLAVVPSPPAPTIPTRFHECIYGDVDVVIQSISMLINVLLHGIDKSCLALTFLEHRRTDQTPALEKGVAIVDSLHRCQKHNYSPVLQDALHQGAEEDHLITGNLPMGGASAQASIEAMATTNSSSPASSSPSLASLEQLLPEDSFAPNLEISLGRHNWNMDHPEELSLKYL

SEQ ID NO: 16739 - protein, 322 aa, Oryza sativa
  Clone ID: TF_OSC417454j.C1.p3.fg
MGFYSSYHHPSTWPSTSPSPLAAPPGAASSPLDPTAAFLSSPHHRMLSAASGRLNGMLSVSDTLRSYGVPGAAAPGVIGGAHHHHHHLHGGQPFVGALASRFMPKLPAKRSMRAPRMRWTSTLHARFVHAVELLGGHERATPKSVLELMDVKDLTLAHVKSHLQMYRTVKSTDKPAASSGPADGGSGDEEFAGGGQAASGGGDSMCLRGGGGGGVAAAAFAEHGRSASEGAASSVGGGGGGDMDQSSAGNTSTTRWSNSSRDPWLSSNSCNMDAHRSVGLSSPIENLEPCRSSSSQVSNHELSSPSLEFTLGRPDWHGADHD

SEQ ID NO: 16740 - protein, 253 aa, Oryza sativa
  Clone ID: TF_OSC100626j.C1.p5.fg
MGISGERKGAARQYNRSKVPRLRWTAELHRSFVRAIDCLGGQQKATPKLILQLMDVRGLTISHVKSHLQMYRGTRHGIGQNDMQPQLHLKQHSFGSDEQSPKEFMCPPIKRAKVGTEASGKYRCMEGSSDMRSSAPPAGTRYFIDDCMRLQEVSMDRRRSDQHDAAAAARARAPAAAASSLHQALGFWVQGRREEPFMVHQISKPKAHQLNHMVRNMKISCKENHESRFFMSLVMVLLLISADLVSRETPSKL

SEQ ID NO: 16741 - protein, 1153 aa, Oryza sativa
  Clone ID: TF_OSC401719j.C1.p42.fg
MAMRGEPWRRQEGEQAQAEADRERELDLFRSGSAPPTVEGSMGALHAAAAADVFLEDELRADPAYHSYYYSNGNINPRLPPPLLSKEDWRSAQRLRPGLGGIGDGRKPRGGGGGRGGGGAGGMGPGDGLIGMPGLEIGRQNSFSGFGTIKRLSVAKVLVLKLLIILFKAKEITSDLYMMQDDSYQHDTDRQGANCNGTDLLSSSKVQYGLHRETGAISGLHSDSKAPCLPENQNESSHSYASIIGSSLSRSASPDPELVRRVPSPCLPPIGVKLGATDKKNNVGSSSFNCSSPNIIESDDLVSALSGMNLSSSRAMNGNTMDQSKLHQDVDDVRKFLFDQYMDQTNGNQRHSYMKRSEQGHVKVPQEYSGASMNPSVMRSQINAGGFTSFNNSSVGSGFASPRLGSRSPGGSLSSRQNLTGASNLPNYVGIGSPTAASAHQMPVDPLYVQFLRAAEIAALAANCEDPLMDRANLGGSYMDLFGPQKAYLSPLLQSQKQYSYYGNLGVGLGYAGNSLTSPILPSSPGGPGSPLRHGDRSMRYPSGMRNFGGSFGSWNSDLGGKMEANLVPSLLEEFKSNKSKSYELSEIAGHVVEFSADQYGSRFIQQKLETASTEEKDMVFAEIMPQALTLMTDVFGNYVVQKFFEHGSSAQIKELADQLIGRVLALSLQMYGCRVIQKAIEVVDLDQQTKMVAELDGQVMRCVRDQNGNHVIQKCIECIPQHAIQFIVSTFYGQVVMLSTHPYGCRVIQRVLEHCDDPKTQQIMMDEILQSVCLLATDQYGNYVVQHVLEHGKPHERSAIIEKLIGQIVQMSQQKFASNVIEKCLAFGNPVERQVLIGEMLGSSNESEHLEVMMKDQFANYVVQKVLETCDDQQREMILTRIKAHLNTLKKYTYGKHIVARVEKLVAAGENPSIMGEEAPEEYELGGGEDERVMEWETGLPGADELTPLSQPLVPAGLAAAFRIPPEPGRTLLDVHRASAATVSRLRRASSSSSSSFPAFASKGAGTGADEAESGGGADGGNGNTNNSSSKRARLVWTPQLHKRFVEVVAHLGMKNAVPKTIMQLMNVEGLTRENVASHLQKYRLYVKRMQGLSNEGPSPSDHIFASTPVPHASLHDQVPSPYHPHPHHHSYNNAAYAATVSSYHHYHHANH

SEQ ID NO: 16742 - protein, 741 aa, Oryza sativa
  Clone ID: TF_OSC900191j.C1.p18.fg
MAENNGAVPPGCKLPAGGFFGRLHVLVVDDDAAYLEELKLMLLLAGYAVTGKTTAEEALKEVDQNPEDYFHIVMTDVHMSGMDGFDLLHRINGRVPVIMFSEGEDVVMVMRTVMNGACDYMVKPMTSEAIKFIWKHVLRWRLSALPANASSSLQPSDHLAAALAAVAPPPPPAVQLPAAPAQAGNRDGEAHEEAELSTQPPALVPSGVQEAAAAVWSSRGDGQEAPPPAVAAAAKAPSKKRGASEVSDRGSNNLEATTGRKKVRTRFTWTTVSHTSFVRAYEQLKDQEGPKKIKQLMELDGIFVTKTQVSSHLQKYRSWLENERKKEEATSSSPCNPLSYTNCLDRGNYVGVGAKEIENFISSHQRSLGTAIGQESTIEQASLHSEITSVSRDAHENGNSQARGSAMSNGPKKIKQLMELDGIFVTKTQVSSHLQKYRSWLENERKKEEATSSSPCNPLSYTNCLDRGYSTWKQSSVITEGQQSSSFSGRPIHSMATSNGCLTTTDTQAGNYVGVGAKEIENFISSHQRSLGTAIGQESTIEQASLHSEITSVSRDAHENGNSQARGSAMSNGTSGTRGVLVTNENLLHVVSASLPSNMGQPTQPSQSFCTNELAANYSIISDQNPGTSHPTSSSAINNQNSKTQEMSVSQTVELGCGNDVMLDWPELVGLEDQLDNDVLMNSFFDGDLLQQGVVTAIDGTQEMLAFDSTGDLGSVPPRGLNNEIASHENTNGKNGASSGP

SEQ ID NO: 16743 - protein, 716 aa, Oryza sativa
  Clone ID: TF_OSC100899j.C1.p12.fg
MEELLGLVRGFVDVLVLAGGRTSSGAAATWRSGDVKKALQWALFFEEVFKNLRDDGQYDESASELDAALVQLASSPNFPKGIEDIRSKTLAMARELVVKHFLKTTNAENLGAVLQAVVEMDMDGISASGECNVCQEYVQSILDMNLPSLMRTKNARDVGHSTSSDEFCEESLFTGNSQILLKELQKKLDSGSCISLAERELNTLLKSMKKDSFDSAGSTLCTSATAQKTQIIDKFILWKQWKAKCLSYLLDERTIRIMSGTNMIFNAPKEQWMGLFEPLKVSADSSQSGIIEVMELCLLGLVARQWNSLIESIMSHTFSSFPISKQYADLHQLLQGTTQDECQDKLLGFKEMDICEYARQSLESEPYILWLLPPVLTAAAMPPRSSLFKIYLVEIDKQLGEAASKDRKCNCGGDGIDQHQNSSNFTSDLYINKSESPNGKLSSESYAIDTSGCDSSLPPTQSLYKGNPSSLRMVYPKVSEQNSWSQEPLPGPFVCPTSVDFFDQQDMTIFDQQIQDNIAASPSTNLAKQNEWFSSGTSLQYLESSVSAGSVLKAVDATSTTPSNYLHCHAQRNTSNPPNFNEICSEATPKAVQKVMKVDGLTIYHVKSHLQKYRTVHHRPQLSDGRGMETTCEGLRVQIGLQKQLHEQLEIQRKLQLQVEEHSKYLAMIIEKQSESLRQLGALPRSLDAPTQVLDNRETCEGQTGDADSAEQKPEK

SEQ ID NO: 16744 - protein, 306 aa, Oryza sativa
  Clone ID: TF_OSC900143j.C1.p24.fg
MQAEVNISEAIASNFTSDLYINKSESPNGKLSSESYAIDTSGCDSSLPPTQSLYKGNPSSLRMVYPKVSEQNSWSQEPLPGPFVCPTSVDFFDQQDMTIFDQQIQDNIAASPSTNLAKQNEWFSSGTSLQYLESSVSAGSVLKAVDATSTTPSNYLHCHAQRNTSNPPNFNEICSEATPKAVQKVMKVDGLTIYHVKSHLQKYRTVHHRPQLSDGRGMETTCEGLRVQIGLQKQLHEQLEIQRKLQLQVEEHSKYLAMIIEKQSESLRQLGALPRSLDAPTQVLDNRETCEGQTGDADSAEQKPEK

SEQ ID NO: 16745 - protein, 355 aa, Oryza sativa
  Clone ID: TF_OSC401119j.C1.p16.fg
MGLDVGEIGVGAADLSLDLKMFAAKSFGRVRGKDTTTTAMGDCIRRLEEEMGKIEVFRRELPLCVRLLADVIDVMKEEVEKKGGDRKEDEEDAAGDKSNWMSTAQLWTGNSGGPDAAAADPEKQDKVRISSEAKSNGGAFVGSGAPAFARPKQSLMRKEDMAYDVRMPDLSLLSPPASAAAADESRRQVVGFSQAAARAAAMAASGPALSLQPQPQPAAAQQQQQARKTRRCWSPDLHRKFVAALQQLGGPQVATPKQIRELMKVDGLTNDEVKSHLQKYRLHNRPRVPSSTIVNQPIVLMQGLCYIPQEQSSSQSGSPEGPLHFSGSGMAGGGSSAATVSCEEEDGRSESYGWK

SEQ ID NO: 16746 - protein, 321 aa, Oryza sativa
  Clone ID: TF_OSC1299j.C1.p1.fg
MGSAGKEEEEEDGGGGAPAAAANNYGSSTTSSTTEEEGSGESRRRTSSSSSVRPYVRSKNPRLRWTPELHLSFVRAVDRLGGQDRATPKLVLQLMNVRGLSIGHVKSHLQMYRSKKIDESGQVIGGESWRSDDHLQMQGGGHGGQAYNLGHLSLPALHHRSITAGSGTIFQSRFGNSWSPWRCHGSYWLPAGHHLLVGSKPYYPPAAEAEAPFRRSSARYVARANTSNHPDFVQGSSSSPDDNIMNHQRPVLKEMICSEGSNHQEGPLNLDLSLDICPRGEKRKRECSWRKQEEDHDHATVAIGADQEAESCATGLSLSLF

SEQ ID NO: 16747 - protein, 314 aa, Oryza sativa
  Clone ID: TF_OSC401056j.C1.p7.fg
MEKTSAGKEEGSESKTAAANNDGSSTSSTTEEEESGESQRRTSSSSSVRPYIRSKNPRLRWTPELHLSFVRAVDRLGGQDRATPKLVLQLMNVRGLSIGHVKSHLQMYRSKKIDESGQVIGGGSWRSSDEQQYHHLQMQGGGDGGQAYNLGHLSLPAALHHRHITAGSGTILQSRVANAWSPWRCHGSYWLRAGHHLLVGSKPYYPPPPAEARANTSSNHPDFVQGSSSSPDDHTMNHQRPVVLKEMIYNEGSNHQGGPLNLDLSLDICPRGEKRKRELISWRKHEEDHDHTTIAIGGDQEAESCATGLSLSLF

SEQ ID NO: 16748 - protein, 329 aa, Oryza sativa
  Clone ID: TF_OSC401238j.C1.p21.fg
MVRRERIEGVRQYNRSKVPRLRWTPDLHHCFVHAIHKLGGQHKATPKRVLQLMGVGGLTISHVKSHLQMYRNMRNDDLGMQGIQQMDDQEQTFAGGMQIWTDMQLQDHHHECNGPYCRCHSSSKHAKGSLLLLHHHHQQQQLQRPNEMETRRAEASTQTGFLRSQGICERDVSSGLPVPAAYYSYYTPMAHGAPPAAADGAGHDDPPRLLGLVVMATTTRRGSREEHKATPPPENGAIRHGRKARRTTAAAEEEERDGDGDELSLSLTLDSGLSCRSSGGAGAYCCSEGSSSNWLISSPSSTTSLVAGGCSRRSTPAMLSSVVSLDLSL

SEQ ID NO: 16749 - protein, 368 aa, Oryza sativa
  Clone ID: TF_OSC900191j.C1.p19.fg
MAGSCSVASSNKSKLADEEFSPVGMRVLLIDESTTYLKIITKLLLNCGYKGLTVTNFEITYVWRVDEVTPKTAARDAVEELHENPWSYDMVLTEVHAPAGIDGFNLLQYAGTDMDLPVVVFSADDDKRTVLKCVNSGACDYLVKPLRHEELKNIWQHVYRRKLRSGGRRAAAAGNSSKGEIKKRFRWPKELHERFVSVVLQLGVDKATPNQILPLLNREDLTRDQRFRIALTKSKALPSCSTIPIGETVHGIPLALQAIGTGNNQHLIVPFNRITFVRPRGVEIGQNGVVGGLVTGNNNVVVPTATSIIARAFGREIVNGADLFDHGTLIRDSSSTSHDGAQNELGETNLAFELMAKKGSDVEPRIGG

SEQ ID NO: 16750 - protein, 507 aa, Oryza sativa
  Clone ID: TF_OSC400151j.C1.p40.fg
MASSSSDLTLDDHHHLTAVAAASGQATQKLQEFLSRLEEERLKIDAFKRELPLCMQLLNHAMEAYRQQLEAYQMGSQHSAAAAAAARAPLVLEEFIPVKNIGIDVVAADKAAAAGGNSVSSEKASWMVSAQLWNAPASASAADTAAKGPQTPKEHSEHHPLDTSPKLITALDGGGGGGGAFLPFSKDNAMGDGSAAAAAALPELALAPAEKAADAITIAAGEVDKKPYAHDNGVVARSREAQNGGKPPSTPSDGQAVPPPPQPHRKARRCWSPELHRRFVNALQILGGAQVATPKQIRELMKVDGLTNDEVKSHLQKYRLHTRRPMPSPAPPTAATPQLVVLGGIWVPPEYATQAAGPAIYGAHPATQPHYTAAVAAQEYYHHHHHHLQHHPAAAALVHHRAVAPPPPLPPQQQLAPPYSAKSSASARLGSPDSDGRGSGGGGGAAASGAGRDMSESIEEEGEGEEREDDDDDDEMAATNNAHAVDGDDDNDEINTTTTTSAGAINY

SEQ ID NO: 16751 - protein, 642 aa, Oryza sativa
  Clone ID: TF_OSC101746j.C1.p5.fg
MRAAEERKGVVPAARRRDQFPVGMRVLAVDDDPVCLKVLETLLLRCQYHVTTTNQAAIALKMLRENRDMFDLVISDVHMPDMDGFKLLELVGLEMDLPVIMLSVNGETKTVLKGITHGACDYLLKPVRIEELRNIWQHVIRRKFSTRDRANLDFYEECNKPPNADSDHVHGHVTCGSPDQSGRPSKKRKEYCSEEEDEGEVNTQDIDDPSAPKKPRVVWSVELHRKFVAAVNQLGIDKAVPKRILELMNVEKLTRENVASHLQARNSFHYLLFISMYCPRNNPAALGTQGVPASKSIQTMSGSHTLSHSINDANKYHLSLPGNQKGNLGQGLATSLGQTQMQQKWIHEETDDLSTILSGNGLSNGMSGTLQSVTSSPLLPQELAECTQAKIVSQPSIRTSSVSSEHIEGAVGVSSGLLESRVSQQSTIPLSGFSANGLLIHGSFNNTCANKLGGTSSSCAPARSSNDLMVARDTKGGASSFGGAMLLPPDTEQKYLNFGGGNGLKQKFDDRTADSLFDLKFVWSSVPSSQLASNIGAHHAMSQRWNNSSSNSSNIGARMIGQATSSGSTVIPQMKTDFLVSGDMAMPKNASDLSIPKLQSELSSSSCSFDGLLNSIVKVEKDDVTFSDDLGCGDFYSLGACI

SEQ ID NO: 16752 - protein, 2135 aa, Oryza sativa
  Clone ID: TF_OSC400505j.C1.p2.fg
MAPPRELDLSDEVEGEEDGTTDFVFRLAGDPIPLLPTTSSPLPLFDLQSPPSRPLAVSNRRAAVFLAHPNGFMAATTKALIEASKEAREKGKSTTRCARDCCVADIPLPGVSLLELSRDESVLAACAGSVIHFFSASSLLTDKDVEPLSSCTLEGSSTVKDFKWLNHASKAFIVLSKDGLLSQGSLGEGLKDIMENVDAVDCCKEGTHIVLSKKNTLNILSSDFKEICCMPLLFQLWSDDSDSDDASIKVDSIGWVRDDSIVVGSVRLNEEGNEEGYLVQVIRSGGNTFFENSSKSVVFTYVDFFRGIMDDVLPSGVGPNLLLGYLHRWDLMVTSNKKSIDEHISLLKWSSATDDKKTVVYLEMLEDKYSPRIDLQENGDDNVILGFGVENVSLFQKITVTVGPEQKEVAPQHILLYLTGEGKLNIYYLARISDPSELPQTKLSAIEDSDVMKEISPVTVSGKEFTPSATSSLDKSIRPDGAELSSVQPDRDLHGSTDMKNSSPVSKAKEIVASSPAPASFLAPASNLKPGISFSFSTANSVSLSPAGSNTSSELGSSWQQSSSSNFVNNQLGKGSIPSTQPVGAFGGSQNSKKDGNLSFNKSSVFTSDGSTLVKPGERNEPGFGSHPLQSSYTTDKKVPSSVGLSSKSSPSISPIKPSSAGPSSTGFRTGNLEAFPTSRGSPLPQESIDKPHDRTHAVVDHSKNFKLGAMFDTEQDLSKKFYSINDMTKELDTLLSYIEKDGGFRDACITFQERPLSMFEGDLQNFLELLQIFKNKIAEQCSRVEDLRNKMFQGTSTTRVSARQAYMKGIVDQSSDTQYWDIWNRQKLSPEFEAKRQNILKANQNLTNQLVELERHFNNLEMNKFGETGRVASSRRAIYSSKARSSQTQISSVYNALNSQLAAAEQLSDCLSKQISALNISSPSTKRGSVAKELFESIGLDHTMDAAKFSGGTPSKSVKRYPSTREHITSISGPSKTAEPETARRRRESLDRSLASLEPQKTTVKRIAQQQRLKISSDLPFRSNKKIFDSQMAAMSQEKSSSSPTSSIVESYANKLHYPSEVLHEKTKPSGPQHNTLFKWVKESAGPSQGPQHKYPELPGQLKSSDQTPKLGSSSPLSFSYSHKDVWDNISSSNVPSSGTTHTMPKSSTLTFKTTVIPKTNTSTLPDLSPLMTGSKFSLSPLTVKTLSGDSGGASSIITKNKQGGQAMPYLGTTKGLDVSPQNMGGAFRDLNKPSLSPEPPKSALLQGKTVQLGKITETVQSPVKAKPEVAFQPPAFPPTPVAQSSPCSIKPTVPSSATSSSSTMQESAAKTSDVLSPTGPSILPSKESMTKPSSPLPDGTISSSLLSIPMPVKESSTGLNKIVSKPEVVTSEVTGTTVSASTSSSVPITEGKPSSIPATSGSLPSIPVSAPKVVPVSAESVVVTSTGKDVGPSNPSSDEDDMEEEVPSASSDLNLGALGGFGLGSVPSSSPPKSNPFGNSFTTSDNKSSGSSFTLTTSPGQLFRPASLSIPSSQPAQSSQSTSSSTFSSAFSSGLSGFGQSAQIGSAQQSGFGQPSQIGAGQQAGFGQPAQIQSGFGQPAQVGVAQQSGFGQPAQIGTAQQSGFGQPAQFGAQQALGSVLGSFGQSRQLGSFGAGGFGGFASASASGGFSSNSGFAGGATGGGFSAAAAPAGGGFAAAATGGGFAALASKGGGFAAAASSGGGFGGAAQGSGFSSVALMHAPKIVLRALAVAIVELPAPGIDTISQEHFAYLSTSDIRTWVSHQDSLTNLDEIVSNHPTTSRQTFQCMTGTEQMMYHQQQVQSDSQHLSSRPGLPPEKQFLLQGGADSSSGLVLSTDAKPRLKWTSELHERFVEAVNQLGGPDKATPKTIMRLMGIPGLTLYHLKSHLQKYRLSKNLQSQANASRAQGVLGCSTTEIDKPCEGNGSPASHLDLETQTNSSSMHINEALQMQIEVQRRLHEQLEVQRHLQLRIEAQGKYLQSVLEKAQEALGTIAVAETAATANASSSKRLQNEHTQLHHHQQQQQVGDGSVDSCLTACDCEGSHHSRSHGHRGEQDILSIGLPPFEPAAARSGKEHHYLLFPNEPSRRRSCSDERRREMSTLQASELDLSINGRSSSHSHRRENIDLNGAGWS

SEQ ID NO: 16753 - protein, 417 aa, Oryza sativa
  Clone ID: TF_OSC400832j.C1.p2.gm
MFPPGLIHHRPDGGEAGRAAGGGPSLVLTADPKPRLRWTADLHERFVDAVAQLGGPERIDPFRDTNVIGAVGDGANVIGAIMLDYSVNDVGTAKRVYSWKATPKTILRTMGVKGLTLFHLKSHLQKYRLGKQSGKEASEQSKDASYLLDAQGGMSVSPRVSTQDVKENQEVKEALRAQMEMQRRLHEQVEVQKHVQIRMEAYQKYIDTLLEKACKIVSEQLASSGFSISDNDLPELSGGVMCGSADTLSSSIFHQLSVSPINLHSPEGKPTPSGIEGQMILQKSPELKRNLALPSPPFVQPCVAPAPVVIVAQGSRRRDRQVVADLVRPSVVALGHRSTAVVVKPKVAAASSSPPSPSVDLPPPFWSPVSSPRRPQPVGAVRSRRRAVVRRRACAARAVVGDDVTADVIVAVSRGPP

SEQ ID NO: 16754 - protein, 417 aa, Oryza sativa
  Clone ID: TF_OSC405556j.C1.p2.gm
MFPPGLIHHRPDGGKAGRRAGGGPNLVLTADPKPRLRWTADLHERFVDAVAQLGGPERIDPFRDTNVIGAVGDGANVIGAIMLDYSVNDVGTAKRVYSWKATPKTILRTMGVKGLTLFHLKSHLQKYRLGKQSGKEASEQSKDASYLLDAQGGMSVSPRVSTQDVKENQEVKEALRAQMEMQRRLHEQVEVQKHVQIRMEAYQKYIDTLLEKACKIVSEQLASSGFSISDNDLPELSGGVMCGSADTLSSSIFHQLSVSPINLHSPEGKPTPSGIEGQMILQKSPELKRNLALPSPPFVQPCVAPAPVVIVAQGSRRRDRQVVADLVRPSVVALGHRSTAVVVKPKVAAASSSPPSPSVDLPPPFWSPVSSPRRPQPVGAVRSRRRAVVRRRACAARAVVGDDVTADVIVAVSRGPP

SEQ ID NO: 16755 - protein, 297 aa, Oryza sativa
  Clone ID: TF_OSC900052j.C1.p9.fg
MSSQQQHAGEAPASAAAAARARLRWTGQLHERFVLAVAELGGADRATPKSVLRAMAVPGLTLYHLKSHLQKYRQAVSRGGNGGGGGSGSLNDRSSSSERQPADHDGDSAADEPRTIAYDGDSDGDAKEGLRDSSRSMVQMQREVQRKLQEQIEVKRHLQLRMEAQGRYLQSVLRRAQQVLADHSLASSPEAATAELSELASAVDIECMSSSSPPRHHRQSAATDSCVTTTSSSEAESKAAGSKRLHTSDCTVEQPVQGKRAFNFLQRHNQADQEEEQEEEYAGAEDGSSSEIDLNSG

SEQ ID NO: 16756 - protein, 400 aa, Oryza sativa
  Clone ID: TF_OSC17597j.C1.p2.fg
MKEKEVLVEIVEDDELKRSIGRNQLDLNEEVMDVESEEGEVGDDEDDEDEEDDDDDDDGGSTTDVAGSRSSSNNSSTNNVSESKLKGDKDSGGGRLEGINGGEQRVPSVRQYNRSKLPRLRWTPDLHMAFVHAVERLGGQERATPKLVLQMMNVRGLSIAHVKSHLQMYRSKKLDHEGRQIRGAIASVFSPMDFHLMRGDRRFHDMLLQRAAALSSSRQEHGGFFSSRSGGGGGGLPPEASRLYGLLQHRQSPAIATMQTLDFKNSSFRNQEWSFSFNHQRKETMNPSSSSSTTAAIRRWPSAAGAVAVVAGERQRLAERFGYYTGNGGASSTSLPLITRAAMAAPPPMFAAAVAPPGRDHHRLPFGWHAGGGGGGGGNKNRSSSDPVVIDEALDSRRLE

SEQ ID NO: 16757 - protein, 543 aa, Oryza sativa
  Clone ID: TF_OSC400452j.C1.p14.fg
MGEVKENEVVEIFEHDHDNKIRSPENSVPPAMVLDLNEGFGEGSEEGGVGEDGDEEDDDEDDDDDDDDDGGSTSEVAGGGRSSSNNSSTNHNSGSDKDHDMNSSSSKADGGGDRVPTVRQYNRSKLPRLRWTPDLHMAFVHAVERLGGQERATPKLVLQMMNVRGLSIAHVKSHLQMYRSKKLDHESGHERGAISSVFSPMEFHMRRGDHRFHHHDMFFQRAAAAGVSPFSSRMLHENGGGFFASRNPGLPESSRLYGLFQRRQQAPMQKFDFKNCNSFSRNQEWAFNQQHAAARAAGAVNGHGPAKGLIHEMIFRKEGKPTSHLFDVRDAIASTRVTSATTAAAADHRLDGAGKAGNFDWIGSSSSRPLTRTMSAAAAATMGDHHHLRWRGGAAGSGNTTASSDPVVASEAALGSLLERAKTKATEAMRLETPVKMTAAAVAAEEINGRTPDLQLSLSPNAGDHRSAGEKRKFLSEQEVDSDKQQLPLTLSLSLRGGGDNGGGGGAEAAGRLEEEMTGSSSSKKAALGLSTLDLTMSIKALE

SEQ ID NO: 16758 - protein, 1196 aa, Oryza sativa
  Clone ID: TF_OSC400657j.C1.p5.fg
MSSQSVVAVKQITAPDKIVETCPSTKHSAHKLFDVKPDFQGLIDDNLSSSSQSSSIKIELIRSSSLPNILPFQKRSSEPEPESPLSHVSHPNVSEPVYSNSSTFCTSLFSSSSMETEPCRQLGTLPFLPHPPKCEQQVSAGHSSSSSLLVPGGDGDIGNAHDEPEQSDDLKDFLNLSGGDASDGSFHGENNAMAFAEQMEFQFLSEQLGIAITDNEESPRLDDIYGTPPQLSSLPVSSCSNQSVQKAGSPVKVQLSSPRSSSGSATTNKARLRWTLELHERFVEAVNKLDGPEKATPKGVLKLMKVEGLTIYHVKSHLQKYRLAKYLPETKEDKKASSEDKKSQSGSSGNDSVKKKNLQVAEALRMQMEVQKQLHEQLEVQRQLQLRIEEHARYLQRILEEQHKVSISSNSLSLKPPAESQPESPKPTSEKKEAESEAGAATSAQPSSEDKSPDAECKSSPPVCTTQDTQRRRLEKEKHGKTVDKETQKVSCNYCGKVVRTYNRLEHHLAGIRGNVYPCSLVPDSVRQSIKSSLEARKKDWIARKIGKHKSSELPPVRNLSLTSAHACRPLLQPITSGTDQEGSVSWHRCFVHFTNNLVQPGETTQVNAHDVSCNASSSQKGGQTIEVTRPPYQNPCMMNKPPEISSGQRIDPLSFSMENSSSQMQDSESSKEPTNDYLNSQARKSIGKLIFEAGLEPGILHLPSFKDMVDVLAWAQVAIPTYESIMEEQLREIQCHARDLKKHWEMNGCSVILDTWESRCGKSFISVLVHCSKGMLFIKSMDVSDIIDDVDELAVMLFRVVEEVGVLNIVQVITNDESPYMQAAEHAVLKRYGYSFFFTLCADHCINLLLENIAALDHVNEVLIKAREITRFIYSHAVPMELKGKYIQGGEILSSSNLKFVAMFITLGKLVSERINLVEMFSSPEWASSDLASRSSFRHVYEVVKTDNAFWSAAADILKLTDPLITVLYKLEADNCPIGILYDAMDCAKEDIKCNLRDKHGDYWPMVDEIWDHYLHTPVHAAGYILNPRIFYTERFSYDTEIKSGTNACVTRLAKNHYDPKKVAIQMDRYRRKSAPFDSDSAIQQTMEIPQVRWWSAHGTDTPELQTFAIRILSQTCFGASIYNIDRSISEQLHVVKRTYPEQERFRTMEYLHYNLRLAHCEPCVRGASGAQQHSRLTSQLGDWISSGQTTSYYK

SEQ ID NO: 16759 - protein, 339 aa, Oryza sativa
  Clone ID: TF_OSC405552j.C1.p1.fg
MGLDLSLDLKMFAARSAVRMAAAAAKEATGVEACIRSLEEERRKIEMFRRELPLCARLLADVIELMKEEAGKRRKDGDDAEAKAEDGDKTKWMSTAQLWVDSRGSDADSENDRRSGSTSPASRLLGGAEESSSRAVAPPPYFRREERVVLRPAMPLLPPASHRSPPPAAAAAATAAGDDHRHVVASSFATAVPSPVPAALSLQAQAQQQQQQARKSRRCWSPELHRQFVAALQQLGGPQVATPKQIREVMKVDGLTNDEVKSHLQKYRLHNRKSPGTASASHSIVLVGDLWASQEVSCSQSGSPQGPLQLSGSGVAVSAATAGDSCCEDDDKSEGYVRK

SEQ ID NO: 16760 - protein, 543 aa, Oryza sativa
  Clone ID: TF_OSC401760j.C1.p4.fg
MATAAATQSQPVRVVLRVRPHLPSEANSAEAPCVGLLGSHPGGEVTVQLKDQYTSRNECYKLDAFFGQESRVCEIFDQEVSAVIPGIFEGTNATVFAYGATGSGKTYTMQGTEDLPGLIPLAVSTVLALCTGTWCSVEISYYEVYMERCYDLLEPKAREIMVLDDKDGNLQLKGLAWVPVRSLEEFHEIYSIGVQRRKVAHTGLNDVSSRSHAVLSIRITTDVVKGKLNLIDLAGNEDNRRTCNEGIRLQESAKINQSLFALSNVISALNKKEPRIPYRESKLTRILQDSLGGNSHAVMIACLNPVEYQEAVHTVSLAARSRHVTNHMSSASKQETPKDKVDMEAKLRAWLESKGKTKSIQRMDGLLSPNAIKTPLSMSHKKQSASGRVSGRVVLPSLTPCKEDKTGSSLRKALSPISSNMDPQKQRTADDSNCLMLLELRTPMGSCNIVGKVTGATPLDKFIALGSNLKESLIQQYLDFLNVANKEELQKLKGIGERRAEYILELREDSPRPFKSLSDLGNIGLSSKQIQDILCKTATGIFK

SEQ ID NO: 16761 - protein, 978 aa, Oryza sativa
  Clone ID: TF_OSC410608j.C1.p11.fg
MARIKVHELRGKNKAELQAQLKDLKAELSLLRVAKVTGGAPNKLSKIKVVRTSIARVLTVISQKQKAALREAYKKKSLLPLDLRPKKTRAIRRRLTKHQLSLKTEREKKREKYFPMRKLAGSGKEVEDDVVRHGVEVDASLRGEREHVLGGIRATIGNEGVEEQMECGGRVGVEGWDGAEDDDCSVGARSGAEVVDDRGKHGGPEWAAVGVQCGEERGHEWEEARAGEAVQHAGGEGVVVEIDLHNPKNKRKNKILGMEQQQKQEPGGGGGGVRVVARICPCAPPPPPPDAALNFQVAALNDPALISFIPRRPTASAATAAASGRGDGPKDKQQQQQQKYRVDGCYLRDDPNHRVFHNEVKPLIDGRGGGGGGRGGAKACVVACGDAAAKRHLFMGSPDQPGLFTMAMAQLLDSSKAIGAAVTVSSYQVLQDTHILDLLEPKNHEVLILEDADGQTHLKGLSRVGVNSIEEFSQLCCCATNQQRHHPAKDSTQLQDWGHQGLIIYVSSFDQQGKECALAKINFLNLAGYVDPKQKKNEGLALLTGNKSMHALMNVVQALNSNQRFVPYRQSKVTRILQDSLCKSKTSGSVLIACLGCTKENSYQTSLTLTHAEDCCQDSVSTLALASRSSQVVNEQYYSLSLSAKKSSKSNMNLPTDAKTLSRTFIHKTMSMQEKNARPGFNNSGVKGGQTPTANRRTQPIISSTKKSGSSICTSIKMKENYAKPKISGRKLFCPSNNSLKEENATDVASTVVTETKSATEVQPLVGMEIRAALLNEDYALSNMEPENSCTDMGLTCSSITDNLVEKTPASSTLSSPKLSDRLREISNSLKLLSTRPVSVRAEKWDIECARRINTIAPEPKTPEVHLKFEQAEDPKDKLTARSTGIKKSLAQECLTFLNSANKEQLKSLKGIGDKRANYILELREESPELFKEISDLRDIIGMNSKELLLKSECFGQELAFCERISALQWFAAIMCSL

SEQ ID NO: 16762 - protein, 339 aa, Oryza sativa
  Clone ID: TF_OSC400896j.C1.p31.fg
MDGQWEEPQHAGRRRRQPEPGKNLIKIPSYQEVFGSGASSSAAPPSYNPPPTTAASSSSSSSSFSQAFSFLKSTEFYSPPPPPPQTTTPSLRYHLLHPDYLYYRIRELQKNFKLRVILCHIDVEDVVKPLHEVTRTSLLHDCTLLCGWSLEECGRYLETIKVYENKSADSIREHMDNDYLSRLTHALTSIRHVNKTDVVTLGSSFGSLSQVMNASMEELARCPGIGERKVKRLHDTFHEPFKRVSSRPNIVVPDTPDREKASGQPSSTNDGAQDAVEKPDASVNKKSSNVRSALTEAFAKYSEKIRNQNRDSTNVAGEDQTRRAISLLESDMIEGAALA

SEQ ID NO: 16763 - protein, 125 aa, Oryza sativa
  Clone ID: TF_OSC34362j.C1.p1.fg
MSTSAAASAAAEQQQEEGEHGPFPIEQLQASGIAALDVKKLKDSGLYTVESVAYTPRKDLLQIKGISEAKVDKIVEAGKNVLLVIIEQFYFDQTGGIETGSITEIYGEFRSGKTQLCHTLCVTCQ

SEQ ID NO: 16764 - protein, 352 aa, Oryza sativa
  Clone ID: TF_OSC401508j.C1.p12.fg
MASSAPSAAAGATPPDPLRRDRILSSKLYLDVPGSKAPVVYSPAYDIAFLGIEKLHPFDSSKWGRICKFLTKEGHLEKNRVVEPLEATKDDLLVVHSESYLNSLKSSLKVASIVELPPVAFIPNWLVQQKLLYPFRKQVGGSILSAKLALERGWAINVGGGFHHCSAEQGGGFCAYADISLCIQFAFVRLNISRVMIIDLDAHQGNGHEKDFANDGRVYTLDMYNAGIYPYDHVAKRYIDQKVELVSGTKTEDYLDQLDKALKVAESRFQPQLIVYNAGTDILDGDPLGRLKISPQGVVIRDEKVFRFAKDQSIPLLMLTSGGYMKSSARVIADSIINLSNKNLIELGSQLG

SEQ ID NO: 16765 - protein, 353 aa, Oryza sativa
  Clone ID: TF_OSC28316j.C1.p2.fg
MLEKDRIAYFYDDNLGEDCPVFDNLFEFCQIYAGGTLDAARRLNHKTCDIAINWAGGLHHAKKCEASGFCYINDLVLGILELLKYHARVLYIDIDVHHGDGVEEAFYFTDRVMTVSFHKYGDFFFPGTGDIKDIGEREGKYYAINIPLKDGIDDSGFTRLFKTVIAKVVETYLPGAIVLQCGADSLARDRLGCFNLSIEGHAECVKFVKKFNIPLLVTGGGGYTKENVARCWAVETGVLLDTELPNEIPDNEYIKYFAPDYTLKVSNVNMDNLNSKSYLSSIKVQVMESLRAIQHAPGVQMQEVPPDFYIPDIDEDELDPDERVDQHTQDKQIHRDDEYYEGDNDNDHEDGAR

SEQ ID NO: 16766 - protein, 623 aa, Oryza sativa
  Clone ID: TF_OSC400432j.C1.p32.fg
MASDMRSLNSQKGQSCGVSDQACHSKSKSGNDGKPSHAKANGVSSLSGSHNDEKILKENSGACNLNSDHANPLSVDGTKVSTARSELIDSSGHDGCLHVKNESCMACDDLLQESDKEQPGGTLEDLFSFNDEEDDDSDWEPSARLALSRWFCLNCTVPNMEGFTHCQNCDELKGSVVVGYDAFKAHLAQAALLSADAALPSVSTAVGFDERMLLHSEIEIKPNPHPERPDRLRAIAASLAAAGIFPSKCVMVPPREITKEELLRVHTSDHIDSVEQTKNMLYSYFTSDTYANGHSACAAKLAAGICADLANLIVSGRVRNGFAMVRPPGHHAGVKQAMGFCLHNNAAVAALAAQRAGAKKVLIVDWDVHHGNGTQEIFDGDNSVLYISLHRHEDGSFYPGTGAANEVGVMDGQGFSVNIPWSRGGVGDNDYIFAFKHVVLPIAAEFAPDITIISAGFDAARGDPLGCCDVTPAGYSRMASMLTACSQGKLLVILEGGYNLRSISSSATEVVKVLLGDSPVYDTDATEPSEEGIQTVLQVLSIQQQFWPVLVPSFASVLALQRSVFSRYTTEVNKMKRKHAGGAGPFWWKWGSKRLLYEVLFEGRCLRKTKDTGKEKLNDEAEP

SEQ ID NO: 16767 - protein, 384 aa, Oryza sativa
  Clone ID: TF_OSC400156j.C1.p3.fg
MAASGEGASLASAAGGEDGRRRRVSYFYEPSIGDYYYGQGHPMKPHRIRMAHSLVVHYGLHRLLELSRPYPASDADIRRFHSDDYVAFLASATGNPALLDARAVKRFNVGEDCPVFDGLFPFCQASAGGSIGAAVKLNRGDADITVNWAGGLHHAKKGEASGFCYVNDIVLAILELLKFHRRVLYVDIDVHHGDGVEEAFFTTNRVMTCSFHKYGDFFPGTGHITDVGAGEGKHYALNVPLSDGIDDDTFRDLFQCIIKKTAVAVGVEPDNKLPYNDYYEYFGPDYNLHIQPRSVENLNSTKDLENIKSMILDHLSKIEHVPSTQFHDRPSDPEAPEQEEEDMDKRPPQRSRLWSGGAYESDTEDPDNMKTETNDLSASSVMKV

SEQ ID NO: 16768 - protein, 371 aa, Oryza sativa
  Clone ID: TF_OSC10062j.C1.p2.fg
MGHNKEAHPETNKRVPAIVDALEKLELTSKHRGSQVLEIQDFQPASLDDIALVHSRSYITGLEKAMSRASDEGLIFIEGTGPTYATQTVMIYAHSLLFLFPQCFSRWKTFQECLLSAGAGITLVDSVVAASKLGPKPPLGFALVRPPGHHAVPEGPMGFCVFGNIAVAARYAQNQHGLKRVMIIDFDVHHGNGTCDAFYEDPDIFFLSTHQLGSYPGTGKIHQVGQGNGEGTTLNLPLPGGSGDYAMRCAFDEVIAPAAQRFKPDIILVSAGYDAHALDPLAGLQFTTGTFYMLAARIREVAAELCGGRCVFFLEGGYNLESLSSSVADTFRAFLGEPSLAARFDDPAMLYEEPTRKIREAIDKAKHLHSL

SEQ ID NO: 16769 - protein, 539 aa, Oryza sativa
  Clone ID: TF_OSC421577j.C1.p6.fg
MDPSSAGAGGNSLASASCGDAQKRRVCYFYDPEVGNYYYGQGHPMKPHRVRMTHALLAHYGLLAPAKMQVLRPLPARDRDLCRFHSDDYVAFLRAVTPETQFDQIRSLRRFNVGEDCPVFDGLYAYCQTYAGASVGAAVKLNHGTHDIAINWSGGLHHAKKSEASGFCYVNDIVLAILELLKLHERVLYIDIDIHHGDGVEEAFYTTNRVMTVSFHKFGDYFPGTGDIRDIGYSEGKYYCLNVPLDDGIDDDSYQSIFKPIISKVMEMYRPGAVVLQCGADSLSGDRLGCFNLSGKGHAECVKFMRSFNVPLLLLGGGGYTIRNVARCWCYETGVALGEELREKLPYNEYYEYFGPEYSLYVAASNMENRNTNKQLEEIKCNILDNLSKLQHAPSVQFEERIPETKLPEPDEDQDDPDERHDPDSDMLLDDHKPMGHSARSLIHNIGVKREITETETKDQHGKRLTTEHKVPEPMADDLGSSKQVPATSSYATDSCMLLVTYSEVLYDCFFCRSLQITTVSFVEEFQSVQAILDVETLV

SEQ ID NO: 16770 - protein, 508 aa, Oryza sativa
  Clone ID: TF_OSC17824j.C1.p4.gm
MDASAGGGGNSLPTAGADGAKRRVCYFYDAEVGNYYYGQGHPMKPHRIRMTHALLAHYGLLDQMQVLKPHPARDRDLCRFHADDYVAFLRSVTPETQQDQIRALKRFNVGEDCPVFDGLYSFCQTYAGGSVGGAVKLNHGHDIAINWAGGLHHAKKCEASGFCYVNDIVLAILELLKYHQRVLYVDIDIHHGDGVEEAFYTTDRVMTVSFHKFGDYFPGTGDIRDIGHSKGKYYSLNVPLDDGIDDESYQSLFKPIMGKVMEVFRPGAVVLQCGADSLSGDRLGCFNLSIRGHAECVRFMRSFNVPLLLLGGGGYTIRNVARCWCYETGVALGHELTDKMPPNEYFEYFGPDYTLHVAPSNMENKNTRQQLDDIRSRLLDNLSKLRHAPSVQFQERPPEAELPEQDEDQEDPDERHHADSDVEMDDVKPLDDSGSSYSGCSGTRLQFCLMTIHCGAAAVLLGLCCLPGGATPRVGQHKCRHTTLLQHALHNFIALTMVDLIWRKGHQS

SEQ ID NO: 16771 - protein, 528 aa, Oryza sativa
  Clone ID: TF_OSC900126j.C1.p11.fg
MDASAGGGGNSLPTAGADGAKRRVCYFYDAEVGNYYYGQGHPMKPHRIRMTHALLAHYGLLDQMQVLKPHPARDRDLCRFHADDYVAFLRSVTPETQQDQIRALKRFNVGEDCPVFDGLYSFCQTYAGGSVGGAVKLNHGHDIAINWAGGLHHAKKCEASGFCYVNDIVLAILELLKYHQRVLYVDIDIHHGDGVEEAFYTTDRVMTVSFHKFGDYFPGTGDIRDIGHSKGKYYSLNVPLDDGIDDESYQSLFKPIMGKVMEVFRPGAVVLQCGADSLSGDRLGCFNLSIRGHAECVRFMRSFNVPLLLLGGGGYTIRNVARCWCYETGVALGHELTDKMPPNEYFEYFGPDYTLHVAPSNMENKNTRQQLDDIRSRLLDNLSKLRHAPSVQFQERPPEAELPEQDEDQEDPDERHHADSDVEMDDVKPLDDSGRRSSIQNVRVKRESAETDAADQLLWLMCAQRCDGNRVAAENTKGTEPAADGVGSSKQTVPTDASAMAIDEPGSLKVEPDNSNKLQDQPSVHQKT

SEQ ID NO: 16772 - protein, 352 aa, Oryza sativa
  Clone ID: TF_OSC9612j.C1.p1.fg
MARAAAAGAPPPGAGRVGWRLGLACLAYLALWRMGGVFIHGGGGRSGGHWRGWRRLADVRGRRPVGRGSRATARHVLREVGRDDVVVVDGRAVSAQFAMAGVDPGTATVAGRRVYVRRPVGRGGTGVNGAKRRPVFDGLYSFCQTYAGGSIDGAIKLNHGHDIAINTLELACAATPSPSPTALPPPTPTSSSFSHLLGLSDPKTVGQGRGREPRRRPPAPTLTRRHPAPLLVTMPPAPSSMSPAAHYSAPDGRTLLLPRRSRSAPPPATVAAWEDGSERPCGTGNRCPTVSPRASASSPSSSSSTRRPPTPCAASPPPTPPSPMASAASSPVAYAALAGGLRSFPLRPEKIE

SEQ ID NO: 16773 - protein, 456 aa, Oryza sativa
  Clone ID: TF_OSC28291j.C1.p2.fg
MATGGNSLPSPSCADDKKRRVCYYYDPGIAHIKFSDDHVMVPARVAMAHSLVGVYGMLGDMRRLRTRPATEAEIRRFHSPEYVDLLRDLTPESYFNDAALRQKAEDDHGIGGDDDCPAFDRLWKYCRGYPGGSFAAARALVDGASDIAINWSGGMHHASACKATGFCYVNDIVLAINELLGTFRRVIYVDIDAHHGDGVQNAFLDSNRVMTLSFHRYGKITPHKDFFPGSGAINEIGDGAGEHYSVNVPLDAGVRDDVYHTLFKPIVGKAMEVFQPEAIVLQCGADSLSGDRLGGMELSVRGHAECVSFLRGFNLPLLLVGGGGYTINHVASAWCYETAVAVGKERKLPDDIEIPSHGYELMYKNQGNKLHYKTSTATAARKRSSSTEVTKGKVLEHLSQVKRAPSVQFQERRGGDNAAGVGLYYERPPSLEDDEPAQRLHRLCFPGLTKRIRLND

SEQ ID NO: 16774 - protein, 342 aa, Oryza sativa
  Clone ID: TF_OSC24451j.C1.p3.fg
MKPHRIRMAHSLVVHYGLHRLLELSRPYPASDADIRRFHSDDYVAFLASATGNPALLDARAVKRFNVGEDCPVFDGLFPFCQASAGGSIGAAVKLNRGDADITVNWAGGLHHAKKGEASGFCYVNDIVLAILELLKFHRRVLYVDIDVHHGDGVEEAFFTTNRVMTCSFHKYGDFFPGTGHITDVGAGEGKHYALNVPLSDGIDDDTFRDLFQCIIKKTAVAVGVEPDNKLPYNDYYEYFGPDYNLHIQPRSVENLNSTKDLENIKSMILDHLSKIEHVPSTQFHDRPSDPEAPEQEEEDMDKRPPQRSRLWSGGAYESDTEDPDNMKTETNDLSASSVMKV

SEQ ID NO: 16775 - protein, 510 aa, Oryza sativa
  Clone ID: TF_OSC421577j.C1.p3.fg
MDPSSAGAGGNSLASASCGDAQKRRVCYFYDPEVGNYYYGQGHPMKPHRVRMTHALLAHYGLLAPAKMEVLRPLPARGIDLCRFHSDDYVAFLRAVTPETQLGQVRALRRFNIGPDCPVFDGLYAYCQTYAGASVGAAVKLNHGTHDIAINWSGGLHHAKKSEASGFCYVNDIVLAILELLKLHERVLYIDIDIHHGDGVEEAFYTTNRVMTVSFHKFGDYFPGTGDIRDIGYSEGKYYCLNVPLDDGIDDDSYQSIFKPIISKVMEMYRPGAVVLQCGADSLSGDRLGCFNLSGKGHAECVKFMRSFNVPLLLLGGGGYTIRNVARCWCYETGVALGEELQEKLPYNEYYEYFGPEYSLYVAASNMENRNTNKQLEEIKCNILDNLSKLQHAPSVQFQERIPETKLPEPDEDQEDPDERHDPDSDMVLDDHKPTGHSARSLIHNIGVKREITETETKDQHGKRLTTEHKGPEPMAEDLGSSKQAPEFTIVSFVEEVHNVQAILDVEALV

SEQ ID NO: 16776 - protein, 166 aa, Oryza sativa
  Clone ID: TF_OSC401324j.C1.p28.gm
MLEKDRIAYFYDGHAECVKFVKKFNIPLLVTGGGGYTKENVARCWAVETGVLLDTELPNEIPDNEYIKYFAPDYTLKVSNVNMDNLNSKSYLSSIKVQVMESLRAIQHAPGVQMQEVPPDFYIPDIDEDELDPDERVDQHTQDKQIHRDDEYYEGDNDNDHEDGAR

SEQ ID NO: 16777 - protein, 131 aa, Oryza sativa
  Clone ID: TF_OSC401369j.C1.p85.fg
MVPARVAIAHSLVSVYGMLGDMRRLRTRPTTEAEIRRFHLPEYVNLIRNLTPKSYTNDVVLRQKAEDDHGIGLLGDDNDCPAFDRLWKYCRGYAGGSLAAARTLVNGASGSHRRRIVMFLFPFRSHIAPML

SEQ ID NO: 16778 - protein, 185 aa, Oryza sativa
  Clone ID: TF_OSC33840j.C1.p1.fg
MDPSSAGAGGNSLASASCGDAQKRRVCYFYDPEVGNYYYGQGHPMKPHRVRMTHALLAHYGLLAPAKMEVLRPLPARGIDLCRFHSDDYVAFLRAVTPETQLGQVRALRRFNIGPDCPVFDGLYAYCQTYAGASVGAAVKLNHGTHDIAINWSGGLHHAKKSEASGFCYVNDIVLAILELLKLHE

SEQ ID NO: 16779 - protein, 481 aa, Oryza sativa
  Clone ID: TF_OSC10030j.C1.p2.fg
MAGGGGNSLPSPSCGDDKKRRVCYYYDPGISTVDYGEGHVMVPHRVTMAHNLVAAYGMLGDMRRLRTAPATAAELADFHDEGYLALLQDLTPDGCGGDDGVGDMARARGIYAVEGKGGGRGVDNPVFDRLWDYCLRYSGGSLAAARTLGSGTADIAINWSGGMHHACRGGARGFCYVNDIVLAIRELLAHFRRVLYVDIDVHHGDGVQAAFEASNRVMTVSFHQHGGGFFPGSGAVADVGKKGPGRYCALNVPVSVGIGDEEYHRLFEPIMARVMEVFQPEAVVLQCGADSLAGDRLGELNLTTRGHAQCVSFIRSFNLPLLLLGGGGYTINHVASCWCNETAVAIGKEIPNDIPKHGFDVFYKNQEYKLHYKLETKHLHRNRNTANSIDGIRMAAMENLSKLKLEAAASVQFEERRHRSINVGDLYYDPREQEEEEESPTARLHRKLYFEPTGDQESPYTKHRCNVQPGESSSRKQRKLK

SEQ ID NO: 16780 - protein, 78 aa, Oryza sativa
  Clone ID: TF_OSC33846j.C1.p1.fg
MEMYRPGAVVLQCGADSLSGDRLGCFNLSGKGHAECVKFMRSFNVPLLLLGGGGYTIEMLHAAGVTRNTCCYSYGFIL

SEQ ID NO: 16781 - protein, 123 aa, Oryza sativa
  Clone ID: TF_OSC418633j.C1.p11.fg
MDAVGGGKVKKAAGGRKAGGPRKKAVTRSVKAGLQFPVGRIGRYLKNRRPVDLISAAPSPLAAPTLFPTTSVTPSTLFPIASVTPPPPPHWALLSASVMMAAAACRRRRPHEGDGEAGELTPP

SEQ ID NO: 16782 - protein, 1116 aa, Oryza sativa
  Clone ID: TF_OSC400014j.C1.p15.gm
MTMADGAGRDRSGLGPGKRKERVRPESTSRVLARAGSSDTTGLQCPYGQYEAPNCAVAVSCRLSSGHRAGRTTTRFSPASYNRKKGWLDNVLKKEDDTRSAVVVVRAVAGPELGGARQERLRELKTWFSGPLHAESAPGCGRSAAGESGDGRAAGKLQVAPCESRHRGRGDWWVWAAALLRLCPLLLAHHLLPEAGRRGLGGDDDDSPSSSPRLPPASSPTSPAGEEGDRREEGRRARKKAVTRSVKAGLQFPVGRIGRYLKKSRPVDLLSAAPSPSAAPTLFPTASVTPPTLFPTASVTPPTLFPTHAPQDIPLYPSSADMARKEGEGLDLVAMEEELDLYSWEPVVTLAISLLDRAISYLGEDTSWAEGRNKNRFGGFSSQMFYYLQPARGRFQDFRLRLINWPKSYCCGYEEIWKFRIAVELLEDLIEEIEHRRLEEDGRIPALFMNAKAKIAFKFATNDYFREEWDRLFQEFTTFRLEDLITDIEHLRLEESGKKISNKKFARSPDQYKQQARLFFLLERGVSRLRDQLPAVVEHVVSQDRELVDLEKEELHAELVGRDREKKQIVQCLIISTAGAEIKRVASAGHIQEYLSVRISRHCHNGKTPVIANEPGSAGADTAAGAAASIARAELPLPEPERVSDPAVPLPPPALVSEPPPTTATVAKVEDEEKPTAVAHQEAAPRDYAFQRALKTAENKSDPCGGRYIYVHELPPRFNDDMLRECERLSLWTNMCKFMSNEGLGPPLGNEEGVFSNTGWYATNQFMVDVIFRNRMKQYECLTKDSSIAAAVFVPFYAGFDVARYLWGHNISTRDAASLDLIDWLRKRPEWNVMGGRDHFLVGGRIAWDFRRLTDEESDWGNKLLFMPAAKNMSMLVVESSPWNANDFAIPYPTYFHPAKDADVLLWQDRMRSLERPWLFSFAGAPRPDDPKSIRSQLIDQCRTSSVCKLLECDLGESKCHSPSAIMNMFQNSLFCLQPQDGVRKGNVSIEDRLKSIHPDMVKKMREEVISLIPRVIYADPRSKLETLKDAFDVSVEAIINKVTQLRRDIIEDHEDKDFVEENSWKYDLLEEGQRTIGPHEWDPFFSKPKDKGGDSTNPSTNAAKNSWKNEQRGQN

SEQ ID NO: 16783 - protein, 153 aa, Oryza sativa
  Clone ID: TF_OSC33599j.C1.p1.fg
MAPKAEKKPAAKKPAEEEPAAEKAEKAPAGKKPKAEKRLPAGKGEKGSGEGKKAGRKKGKKSVETYKIYIFKVLKQVHPDIGISSKAMSIMNSFINDIFEKLAGESAKLARYNKKPTITSREIQTAVRLVLPGELAKHAVSEGTKAVTKFTSA

SEQ ID NO: 16784 - protein, 150 aa, Oryza sativa
  Clone ID: TF_OSC414554j.C1.p2.fg
MARTKQTARKSTGGKAPRKQLATKSDFDRWSYITISVQAARKSAPTTGGVKKPHRYRPGTVALREIRKYQKSTELLIRKLPFQRLVREIAQDFKTDLRFQSHAVLALQEAAEAYLVGLFEDTNLCAIHAKRVTIMPKDIQLARRIRGERA

SEQ ID NO: 16785 - protein, 232 aa, Oryza sativa
  Clone ID: TF_OSC100615j.C1.p3.np
QTRTKQTACKRDSRKQLATKATCKSAPATGGVKKPHRFRPGTVALREIRKYQKSTELLIRKLPFQRLVREIAQDFKTDLRFQSSAVAALQEAAEAYLVGLFEDTNLCAIHAKRVTIMPKDAARKSAPATGGVKKPHRFRPGTVALREIRKYQKSTELLIRKLPFQRLVREIAQDFKTDLRFQSSAVAALQEAAEAYLVGLFEDTNLCAIHAKRVTIMPKDIQLARRIRGERA

SEQ ID NO: 16786 - protein, 153 aa, Oryza sativa
  Clone ID: TF_OSC21552j.C1.p3.fg
MAPKAEKKPAAKKPAEEEPAAEKAEKAPAGKKPKAEKRLPAGKGEKGSGEGKKAGRKKAKKSVETYKIYIFKVLKQVHPDIGISSKAMSIMNSFINDIFEKLAGESAKLARYNKKPTITSREIQTAVRLVLPGELAKHAVSEGTKAVTKFTSS

SEQ ID NO: 16787 - protein, 40 aa, Oryza sativa
  Clone ID: TF_OSC401577j.C1.p1.hg
AEAYLVGLFEDTNLCAIHAKRVTIMPKDIQLARRIRGERA

SEQ ID NO: 16788 - protein, 118 aa, Oryza sativa
  Clone ID: TF_OSC420432j.C1.p1.fg
MSQRIHFLSRCQFESSQPLDPGVMVPKAEKKPAEKKPAEEKVHPDIGISSKAMSIMNSFVNDIFEKLEQEAARLARYNKKPTITSREIQTSVRLVLPGELAKHAVSEGTKAVTKFTSS

SEQ ID NO: 16789 - protein, 136 aa, Oryza sativa; identical to SEQ ID NO: 6937
  Clone ID: TF_OSC400405j.C1.p21.fg

SEQ ID NO: 16790 - protein, 137 aa, Oryza sativa
  unsure (1)..(137): unsure at all Xaa locations
  Clone ID: TF_OSC400405j.C1.p24.gp
MARTKQTARKSTGGKAPRKQLATKAARKSAPATGGVKKPHRFRPGTVALREIRKYQKSTELLIRKLPFQRLVREIAQDFKTDLRFQSSAVAALQEAAEAYLVGLFEDTNLCAIHAKRVTIMPKDIQLARRIRGERAX

SEQ ID NO: 16791 - protein, 155 aa, Oryza sativa
  Clone ID: TF_OSC401685j.C1.p36.fg
MAPKAEKKPAAKKPAEEEPAAEKAEKAPAGKKPKAEKRLPAGKGEKGSGEGKKDRAGRKKAKKSVETYKIYIFKVLKQVHPDIGISSKAMSIMNSFINDIFEKLAAEAAKLARYNKKPTITSREIQTSVRLVLPGELAKHAVSEGTKAVTKFTSA

SEQ ID NO: 16792 - protein, 135 aa, Oryza sativa
  Clone ID: TF_OSC13637j.C1.p1.gm
MVDPTETYNVCLFKVSKGVSRSTESTSSRKSVETYKIIFKVLKQTLTDTGVLSKAMPTMNSFFINIFEKLIQNTIKSIFGNMSALEWARVIVIETGLVQPSVWFGLNNYGGGALRIRGDPSTVASRTQVFNPLGT

SEQ ID NO: 16793 - protein, 417 aa, Oryza sativa
  Clone ID: TF_OSC401232j.C1.p26.fg
MAPKAEKKPAEKKPAAGEEKSAEKAPAGKKPKAEKRLPASKASSKEGGAGDKKGRKKAKKSVETYKIYIFKVLKQVHPDIGISSKAMSIMNSFINDIFEKLAQEAARLARYNKKPTITSREIQTSVRLVLPGELAKHAVSEGTKAGYHFTQQRKNLKMSSHHLALLRKVIGDGGDAVIGDGGGGLQRLPRRRPWSRGGGRAAPESTPPAKYARGRRPRRGSGGHAPHPESGGGGGGGGGAREWRDVGTTMRGGGGRGRGKSAQAADRCCRRMPMDGGPPTPTLAEVLSLSPPTTPRSRAPSSSRRRRMAAQTLATTAAGGQTAAEVARPPDSTPPAESGEEGGVGVHTGEEGKAAAAGEGSDPFFPIIAAPSLPSPTQPPLLLPRHRGALLVTEEIGRRRRCRWEAATARDGDGADR

SEQ ID NO: 16794 - protein, 99 aa, Oryza sativa
  Clone ID: TF_OSC3090j.C1.p1.fg
MRRRGGALEYGGYKRYVWRVLKQVHPDLGASAQTMDVLDMMMADMFERLADEASRLFKLSGRLTLTFREVQSAVRLVLPADLANHAISEGTKAISNYLS

SEQ ID NO: 16795 - protein, 146 aa, Oryza sativa
  Clone ID: TF_OSC402805j.C1.p30.fg
MARTKHPAVRKSKAEPKKKLQFERSPRPSKAQRAGGTPRQQTKQRKPHRFRPGTVALREIRKFQKTTELLIPFAPFSRLVREITDFYSKDVSRWTLEALLALQEAAEYHLVDIFEVSNLCAIHAKRVTIMQKDMQLARRIGGRRPW

SEQ ID NO: 16796 - protein, 153 aa, Oryza sativa
  Clone ID: TF_OSC401685j.C1.p34.fg
MAPKAEKKPAAKKPAEEEPAAEKAEKAPAGKKPKAEKRLPAGKGEKGSGEGKKAGRKKGKKSVETYKIYIFKVLKQVHPDIGISSKAMSIMNSFINDIFEKLAAEAAKLARYNKKPTITSREIQTAVRLVLPGELAKHAVSEGTKAVTKFTSS

SEQ ID NO: 16797 - protein, 124 aa, Oryza sativa
  Clone ID: TF_OSC400544j.C1.p6.gm
MVDPTETYNVCLFKVSKGVSRSTESTSSRKSVETYKIIFKVLKQTLTDTGVLSKAMPTMNSFFINIFEKLIQNNNKIYLWQYERARVQPSVWFGLNNYGGGALRIRGDPSTVASRTQVFNPLGT

SEQ ID NO: 16798 - protein, 320 aa, Oryza sativa
  Clone ID: TF_OSC419721j.C1.p9.fg
MSVQGLDLKTDLSLWVFGHTSVFRCCKPEQSAAAIVSFSLFRNCGGDIEPGPWRAYEVKKRMGSWIVNDSQQIRFWEDKWLGVTCYMTANLLATAHVLGELKIRFVILETGVGVPVMLFFTARDGNGESLQLVYFSIWKSYRSPMIVTGKPKFFFRWLVLSKLLASQLEERLPGSNLPPRYVFRHDTLHISIAKVLILLNCAKLTASVLIMSAARKSAPTTGGVKKPHRYPPWNCCSSYQKSTELLIRKLPFQRLVREIAQDFKTDLRFQSHAVLALQEAAEAYLVGLFEDTNLCAIHAKRVTIMPKDIQLARRIRGERA

SEQ ID NO: 16799 - protein, 393 aa, Oryza sativa
  Clone ID: TF_OSC400542j.C1.p17.fg
MAGKGGKGLLAAKTTAAKSAEKDKGKKAPVSRSSRAGLQEGGSMPVAPTVVVSATMEANHDRTLFPVGRIHRQLKQRTQANGRVGATAAVYSAAILEYLTAEVLELAGNASKDLKVKRITPRHLQLAIRGDEELDTLIKGTIAGGVVKSFVFFVTFHYFTLQADWIQHRYTVRGGWSTTQIRAKATNPNERLSFCSKSILASITNTSCPPAVYPQKLTYPLLSPLAVIQWCDCEGGGACMEGLTSEQMVAFQEAFLLFDKNGDGCITLEELAAVTRSLGLEPTDQELNDMMREVDTDGNGIIDFQEFLSLIARKMKDGDGDEELKEAFEVLDKDQNGFISPTELRTVMTNLGEKMTDEEVEQMIREADTDGDGQVNYDEFVIMMKNAERKISG

SEQ ID NO: 16800 - protein, 148 aa, Oryza sativa
  Clone ID: TF_OSC415633j.C1.p2.fg
MDVGVGGKAAKKAVGRKLGGPKKKPVSRSVKAGLQFPVGRIGRYLKKGRYAQRVGTGAPVYLAAVLELAGNAARDNKKNRIIPRHVLLAIRNDEELGKLLAGVTIAHGGVLPNINPVLLPKKTAEKADKPAKASKDKAAKSPKKQARS

SEQ ID NO: 16801 - protein, 153 aa, Oryza sativa
  Clone ID: TF_OSC21547j.C1.p2.fg
MAPKAEKKPAAKKPAEEEPAAEKAEKAPAGKKPKAEKRLPAGKAEKSSGEGKKAGRKKAKKSVETYKIYIFKVLKQVHPDIGISSKAMSIMNSFINDIFEKLAGESAKLARYNKKPTITSREIQTSVRLVLPGELAKHAVSEGTKAVTKFTSA

SEQ ID NO: 16802 - protein, 153 aa, Oryza sativa
  Clone ID: TF_OSC21552j.C1.p8.fg
MAPKAEKKPAAKKPAEEEPAAEKAEKALAGKKPKAEKRLPAGKAEKSSGEGKKAGRKKAKKSVETYKIYIFKVLKQVHPDIGISSKAMSIMNSFINDIFEKLAGESAKLARYNKKPTITSREIQTSVRLVLPGELAKHAVSEGTKAVTKFTSA

SEQ ID NO: 16803 - protein, 150 aa, Oryza sativa
  Clone ID: TF_OSC413661j.C1.p12.fg
MAPKAEKKPAEKKPAEEKAGEKAPAAGKKPKAEKRLPASKGEKGGEGKKERGRKKAKKSVETYKIYIFKVLKQVHPDIGISSKAMSIMNSFINDIFEKLAGEAAKLARYNKKPTITSREIQTSVRLVLPGELAKHAVSEGTKAVTKFTSS

SEQ ID NO: 16804 - protein, 136 aa, Oryza sativa
  Clone ID: TF_OSC900046j.C1.p14.fg
MARTKQTAKKSTASNVPRKLLVMKVARKSAPTMAGLKKPHRFKPGTVALREIRTYQKSTELLIRKLPFQRLVQEIAQDVRSYVRFQSSAVVALQEAAETYLVGLFKDTNLCVIHAKRVTIMPKDIQLARRIRGEKA

SEQ ID NO: 16805 - protein, 168 aa, Oryza sativa
  Clone ID: TF_OSC900015j.C1.p22.fg
MARTKQTARKSTGGKAPRKQLATKAARKSAPATGGVKKPHRFRPGTVALREIRKYQKSTELLIRKLPFQRLVREIAQDFKTDLRFQSSAVAALQEAAEAYLVGLFEDTNLCAIHAKRVTIMPKDIQLARRIRGLHPCLEQKMSLATCLISLAPNCSLLRFTSNFCKDA

SEQ ID NO: 16806 - protein, 130 aa, Oryza sativa
  Clone ID: TF_OSC100615j.C1.p8.gp
PHEADGVQVRDSRKQLATKATCKSAPATGGVKKPHRFRPGTVALREIRKYQKSTELLIRKLPFQRLVREIAQDFKTDLRFQSSAVAALQEAAEAYLVGLFEDTNLCAIHAKRVTIMPKDIQLARRIRGER

SEQ ID NO: 16807 - protein, 223 aa, Oryza sativa
  Clone ID: TF_OSC401217j.C1.p40.hg
MRGLGNRARLPEPRNFQSLPTPQNAKFSTAPARGLHSTENPAKRARSAPPPLTRGSLPDPTAGAAPPHHSRGSLPDPTAAHSPPNSIYIHPSQTKNPPHPNLATKKIPNSAVVFVAVAARMSGRGKGGKGLGKGGAKRHRKVLRDNIQGITKPAIRRLARRGGVKRISGLIYEETRGVLKIFLENVIRDAVTYTEHARRKTVTAMDVVYALKRQGRTLYGFGG

SEQ ID NO: 16808 - protein, 276 aa, Oryza sativa
  Clone ID: TF_OSC420396j.C1.p17.hg
MPQVLPGGSLLYRSLVRVRLFPSVDFVKDFLSVRGKYPYARGEKNLSKAKRQVPTPIVPWPRRRPNLAAPAGQNFELAASQTTKIPTIPPNHRSAPHATSTIRSSPRDPDPHRPFPPPSNGSRLPTPSSRPLLKPPPLSSPNPTPITTTSSPIPLAFLSLSCVEPPESSSSAAMSGRGKGGKGLGKGGAKRHRKVLRDNIQGITKPAIRRLARRGGVKRISGLIYEETRGVLKIFLENVIRDAVTYTEHARRKTVTAMDVVYALKRQGRTLYGFGG

SEQ ID NO: 16809 - protein, 153 aa, Oryza sativa
  Clone ID: TF_OSC27706j.C1.p2.fg
MAPKAEKKPAAKKPAEEEPAAEKAEKAPAGKKPKAEKRLPAGKAEKGSGEGKKAGRKKAKKSVETYKIYIFKVLKQVHPDIGISSKAMSIMNSFINDIFEKLAGESAKLARYNKKPTITSREIQTSVRLVLPGELAKHAVSEGTKAVTKFTSA

SEQ ID NO: 16810 - protein, 153 aa, Oryza sativa
  Clone ID: TF_OSC21545j.C1.p1.fg
MAPKAEKKPAAKKPAEEEPAAEKAEKAPAGKKPKAEKRLPAGKAEKGSGEGRKAGRKKAKKSVETYKIYIFKVLKQVHPDIGISSKAMSIMNSFINDIFEKLAGESAKLARYNKKPTITSREIQTSVRLVLPGELAKHAVSEGTKAVTKFTSA

SEQ ID NO: 16811 - protein, 260 aa, Oryza sativa
  Clone ID: TF_OSC900138j.C1.p3.gm
MNIKKINIKKTMAADILLHPCHRCNMVRAQPPSPRCTVSPPAGAGGGEKGRAQPLPLPSPWSAASPPTESGGGEGTAAATVITRGRRRLPSRYPPQAGSGEGEGGGKTSESSLVVKSIASLCAKAPAVGEVSCVAAVAWLGGAGSCKTGDDAVVLAAALALLALPDSITNLDTKEIRKYQKNTELLIRKLPFQRLVREIAQLFKHDMRFQSHAVLALQEAAEAYLVGLFEDTNLCAIHSKRVTIMSKDVQLARRIRGERL

SEQ ID NO: 16812 - protein, 103 aa, Oryza sativa
  Clone ID: TF_OSC400999j.C1.p2.fg
MAPRSVAISGRGTSGARRHRIVFRGYIQGIAKPVIRRLARKGGVKRISGLIYKETRGVLEIFLKNVICDAITYTEHAHRKTVMAMDVVYALKLQGRTIYDFGG

SEQ ID NO: 16813 - protein, 136 aa, Oryza sativa; identical to SEQ ID NO: 6802
  Clone ID: TF_OSC400785j.C1.p27.fg

SEQ ID NO: 16814 - protein, 650 aa, Oryza sativa
  Clone ID: TF_OSC21550j.C1.p1.fg
MAALTEDILLQIFSRVGSIKDLFKFAVTCRRWLRRFTDPAFLRGLCLDSGEGHRARLLGFFFQQTRFYRCEKMIKMRVTQQSSVCPPTFLPAPWSPLGLTDRTLTSFLAADDDTFNYAEPLAARCGIVLMRLVPRTALMIACSHLLGVCNPITGECHVLPPLNLSGLHRYLTSYAIITSTDSDLDGKQPPSSSSSGRSTFSQLYLVVQHKKDCNEYFYSYSAATCSWSAPTMCVDGRRFSLVGERSAVVHKGAAHWLFIDRVSSATQDDILYKLTAAVDTSEISLTRLPFVLEAHRSSAIPLAVPYPDYSHICQPREKWFNFNRGSMLVLYRSNGVFILDLEKKVMEKLLSRHGKATAERPSSSEGYIWKLSLLVITVTGLTPWQKAQNLNPKKEQPTTTALQKRGPLHIFLCNVSDPHGNASQPSNRKGTGRHTFIHVIDPRDKPLHQSAPTFTHYKLTAPVSSFHTAISQHISTHRSKAKPTDPLPLPEKKREASMAPKAEKKPAAKKPAEEEPAAEKAEKAPAGKKPKAEKRLPAGKGEKGSGEGKKAGRKKGKKSVETYKIYIFKVLKQVHPDIGISSKAMSIMNSFINDIFEKLAGESAKLARYNKKPTITSREIQTSVRLVLPGELAKHAVSEGTKAVTKFTSA

SEQ ID NO: 16815 - protein, 702 aa, Oryza sativa
  Clone ID: TF_OSC21552j.C1.p1.fg
MAALTEDILLQIFSRVGSIKDLFKFAVTCRRWLRRFTDPAFLRGLCLDSGEGHRARLLGFFFQQTRFYRCEKMIKMRVTQQSSVCPPTFLPAPWSPLGLTDRTLTSFLAADDDTFNYAEPLAARCGIVLMRLVPRTALMIACSHLLGVCNPITGECHVLPPLNLSGLHRYLTSYAIITSTDSDLDGKQPPSSSSSGRSTFSQLYLVVQHKKDCNEYFYSYSAATCSWSAPTMCVDGRRFSLVGERSAVVHKGAAHWLFIDRVSSATQDDILYKLTAAVDTSEISLTRLPFGAGGSPLLCVSGDGKLSVACVFPIHMRVWTQQDDTPATWLRTVIRIPLAVPYPDYSHICQPREKWFNFNRGSMLVLYRSNGVFILDLEKKVMEKVMDCLLPLFSDKLNRTAVAYEMDLVEFFVLQLSGYIWKLSLLVITVTGLTPWQKAQNLNPKKEQPTTTALQKRGPLHIFLCNVSDPHGNASQPSNRKGTGRHTFIHVIDPRDKPLHQSAPTFTHYKLTAPVSSFHTAISQHISTHRSKAKPTDPLPLPEKKREASMAPKAEKKPAAKKPAEEEPAAEKAEKAPAGKKPKAEKRLPAGKGEKGSGEGKKAGRKKGKKSVETYKIYIFKVLKQVHPDIGISSKAMSIMNSFINDIFEKLAGESAKLARYNKKPTITSREIQTSVRLVLPGELAKHAVSEGTKAVTKFTSA

SEQ ID NO: 16816 - protein, 438 aa, Oryza sativa
  Clone ID: TF_OSC413661j.C1.p14.gm
MARGLAVASLLLVALAVVARPPLALAVKDYPADASAVAKKSPASKADTPTTGKESVAGKTDVVTVAKKSPAGKADTSATYKEYAAAKADAVTVTKKSPAAKADTPTTSKESAAGKANAATVAKKSPAGKADTSATATGKEYAAAKADAITVTKKSPAAKADMPATGKESIAKVDAATVAKESTAGKTGKKAAAKEFTMSGKTNTEADAATVAKKSLAGKAGTPATGKEYAVTKADAATVAKKSPADKTGKESVVAKADTATVTKKSTAGKTGKKVAAKESPASHKTSMEAATKKSTANKTGTETAAKESTVSGKTDTETAAKESTAPGKTDTTAAVKESTAGKGDAPAMAEKSAAGPKVDKMRTCQTGERRDVVTHHEEIDGMFEKLVGEAAKLARYNKKPTITSREIQTSVRLVLLGELAKHAVSEGAKAVTKFTSS

SEQ ID NO: 16817 - protein, 102 aa, Oryza sativa
  Clone ID: TF_OSC420440j.C1.p11.fg
MAPKAEKKPVEKKPKAEKRLSESKASSKEGGAGDKKGRKKAKKSVEIYIFKVLKQVHPDIGISSKAMSIMNSFINDIFEKLAQEAAHLARYNKKPIATSREI

SEQ ID NO: 16818 - protein, 906 aa, Oryza sativa
  Clone ID: TF_OSC401115j.C1.p25.gm
MEMETLQLRAGTGCLWVCLLLCVAPSLVDYSIPLASVHRRSGEQVSGTSAFDVLHREKAAIRFLGSASCDCSLFNRDGSPSSPLACCTPSSTLATASSSCRATGLSATSIRVNLWLTAMKCFWVSTGKPMGVLNADQQKEFDEATTLFVGCILSVLGDRLVEVYMHMTDATELWDALNTKFGATDASNDLYIMEQFHVYKMADNRSVVEQAHKIQTMAKELKLLKCVLPDKFVAGCIIAKLSPSWRGFGTALKHKRQEYFVEGLIASLDVEEKAREKDVASKGDGGQSSTNVVHKAQNKSKGKYKAQQTTNFNKKKKNNNPNQDERTCFVCGQPGHLARKCPQRKGMKAPAGQTSKSANVTIGNTGDGSGYGRTGFHRPNGEWVTCFCSWCWHGRSEVYFGKDRAAEERVAYYWKEDVRSEMDSIIANGTWEVTERPYGCKPVGCKWVFKKKLRPDASHGLLIHQMDVKTTFLNEELDEEIYMDQPDGFVVEGFAVNEADKYVYYRHGGGEGVILCLVCLLLCVASSLVDYSIPLASVHRRSGEQVSGISAFDVLHWEKAAIRFLGSASCDCSLFNRDEGDAADRASNLTDATVDSLIESIIIKDGVKAKFFFNIMSLANSAGEKLLAFSQYILPMKFLERLLVKRLGWHVGKEIFMISGDTSADDREVAMDQFNNSADAKVLFGSIKACGEGISLVGASRVIILDVHLNPSVTRQAIGRAFRPGQQKKVFVYRLVAADSPEVKFHETAFKKEVIPKLWFEWSELCTTEDFKLNQVDIDDSEDELLEANAIRQDIKALYRRVGKGLSAAAAASKRRWTLALAAKKVVGRKLGGPKKPVPRSVKAGLQFLVSRYLENGRHAQRVGTGTPVYLAAVLGVAVAAAARRREGSSSSAGTPMAVAATAARW

SEQ ID NO: 16819 - protein, 280 aa, Oryza sativa
  Clone ID: TF_OSC4904j.C1.p4.gm
MPSLTYAVRLASGRSVPSVPWTGGGPLMWSRSTVDRPPRAAEMWGPLTGAAPSLDDLDPFLGTGGEGGHDGVGSAGVSSCPAAGFTAAQEGTAHCPLGVRAPAPADGVEVGTGHGGSGGREEAAAPAAGMRRQSTRGRNTGSGDGEESAAPAAGMRRQSTRGRSTGSGDGEESEALAAAVHAGKISREDAAARREIRKYQKNTELLIRKLPFQRLVREIAQHFKHDMRFQSHAVLALQEAAEAYLVGLFEDTNLCAIHSKRVTIMSKDVQLARRIRGERL

SEQ ID NO: 16820 - protein, 266 aa, Oryza sativa
  Clone ID: TF_OSC414180j.C1.p16.gm
MDDVGGGKVKKAAGGRKAGRPRKKAVTRSVKAGLQLPVSRIGRYLKKSRPVDLLSAASSPSAASTLFHAASMMPPTLFRTACLRNSVRLRTCTGRRAIKFLGSASSATALVLRGYCCCIGAFTKMSTEIGDKKMNDINGGNTALKSSAPSQPPKKGMKGYGSATAARPLPRLHLTNLAAAAAPDLRCPSRAARCPRPSRASTTASRSSPTRRPPPPGGPSPLPPPTGGPPRPRLRARRYDVVDESGTDNGEEYDATDDGECDPKTQ

SEQ ID NO: 16821 - protein, 115 aa, Oryza sativa
  Clone ID: TF_OSC4904j.C1.p5.fg
MQAAARKSAPCIGGVKKPHRYRPGTVALREIRKYQKNTELLIRKLPFQRLVREIAQLFKHDMRFQSHAVLALQEAAEAYLVGLFEDTNLCAIHSKRVTIMSKDVQLARRIRGERL

SEQ ID NO: 16822 - protein, 313 aa, Oryza sativa
  Clone ID: TF_OSC421349j.C1.p3.fg
MAACQQQIWQEGKQQQHLHHGGYDDLSSVYRGTVVLPRRQGGLAPEPPPPRPSSSSGRSAAAQATAMTIHSEAERRRRERINAHLATLRRILPDAKQDSDRNTIVKQRITKHRNCRLIGPQEKRRNQMREIDSEEMFQEMDKATLLASVVNQVKHLKTRATEATTPSTAATIPPEANEVTVQCYAGGEHTAAARTYVRATVSCDDRPGLLADIAATFRRLRLRPLSADMSCLGGRTRHAFVLCREEEEEEDAAAEARPLKEAVRQALAKVALPETVYGGGGRSKRQRLMMESRYSTAVVHTHVDPQYCWYNSR

SEQ ID NO: 16823 - protein, 383 aa, Oryza sativa
  Clone ID: TF_OSC400522j.C1.p16.fg
MEHHHLLLQLSPPPPPPPLPAAHLMMSPSFFDAGVFADVGGDWMEDLMHLGELFGVGVGGDDDDNGGVDGGVGGGDDRMQEWQNNCEGAGSPDHQPSCGDGDGDGDGDVSPRDGELGDGDGDNSATRKRRDRSKTIVSERKRRVRMKEKLYELRALVPNITKVRTQCLIARVGVAMAAPPCAIANTSLMIAWQMDKASIIADAVVYVKDLQAHARKLKEEVAALEEARPIRPPPPSAAAQRPQRQPRRVAAAAAQLARAADAAAVTTAAAAPHGARVAHVGAAQVGEGRFFVTVECEPAAAAARGGGGGVAAPVCAAVESLSCFTVESSTVGCSPDRVVATLTLKVSEAEEDVSAISECTVKLWVMAALLKEGFRPQPTVQIS

SEQ ID NO: 16824 - protein, 264 aa, Oryza sativa
  Clone ID: TF_OSC419674j.C1.p5.fg
MAGQQPQQQGPPEDDFFDQFFSLTSSFPGAAPGGRAAGDQPFSLALSLDAAAAAEASGSGKRLGVGDDAEGGGSKADRETVQLTGLFPPVFGGGGVQPPNLRPTPPTQVFHPQQSKQGGAAVGPQPPAPRPKLRRERIAERMRALQELVPNTNKTDRAAMLDEILDYVKFLRLQVKVLSMSRLGGAGAVAQLVADIPLSVKGEASDSGGNQQIWEKWSTDGTERQPAQWLTEFEHKMKWKMILMVMFIYLHFSKVEAEALVNGG

SEQ ID NO: 16825 - protein, 528 aa, Oryza sativa
  Clone ID: TF_OSC400961j.C1.p12.fg
MELCLLLAPSLKPCQGLPLTNTAIEASSSSLTNADLKLHLYRLRLSDGGHTMGKRERGDTKQKEDVGLWIRPLRGKEKVRVLGGGCSCGRPLISPCDRRFWSSGSEKEMNEKDATDLEERSEASEHGQALSFHGGAMFLQEAQIASPAAANNALTSMANPFPIPPGLWNPPSHNMGLGETSFSSLLGMLSAGAPPPFVATPGFVDSTAGFPCYNGGNLGAMINHPFPGIHQPLGDFQNGVEPCREIEDIEIEGSKNVSQTGEKQQGDGETTHAVDSSSKELSMPGRNGGAGHDEGTRVSCSKKRKRSGQDGGVKHAEGGEQLATVGSAQKNEDDEKGEPKRSSVASGKSSGKQIKDNAGSPKEDYIHVRREKISERMKYLQDLVPGCSKVTGKAVMLDEIINYVQSLQRQVEFLSMKLASVNPTLDFNIERILSKDIFQCRGTTASSAFGFFPDIVHPRLHPPKYTQVGMPSIVNPTDAFGRVIHAPLGTNSAFKEPKHQMPNNLNGEFQDVIEMPFTHDHHGSNDQP

SEQ ID NO: 16826 - protein, 68 aa, Oryza sativa
  Clone ID: TF_OSC32507j.C1.p1.fg
SDCGGGRKPEAGGGERKKERMKKMMRTLKGIIPGGDRMDTPAVLDEAVRYLKSLKVEVKKLGVRGSSS

SEQ ID NO: 16827 - protein, 330 aa, Oryza sativa
  Clone ID: TF_OSC401478j.C1.p51.fg
MPGELNFHLLHSLDAAAAAASSTAASASSQPTVDYFFGGADQQPPPPAAMQYDQLAAPHHHQTVAMLRDYYGGHYPPAAAAAAATEAYFRGGPRTAGSSSLVFGPADDESAFMVGPFESSPTPRSGGGRKRSRATAGFHGGGPANGVEKKEKQRRLRLTEKYNALMLLIPNRTKEDRATVISDAIEYIQELGRTVEELTLLVEKKRRRREMQGDVVDAATSSVVAGMDQAAESSEGEVMAAAAMGAVAPPPRQAPIRSTYIQRRSKETFVDVRIVEDDVNIKLTKRRRDGCLAAASRALDDLRLDLVHLSGGKIGDCHIYMFNTKVTTTN

SEQ ID NO: 16828 - protein, 177 aa, Oryza sativa
  Clone ID: TF_OSC415729j.C1.p2.fg
MAEEDNLALSVVCERSPGTAVEAASGRPPKAGSERARRQTMSRLYDELGALLPNLPPRASTTRIVEEAIACVGELRARTAELEAYSAVAAAAGRAARDGPAEVVASGKTSCFAVRLRAARARPGALTRVLEVFQRHGVAVLAATVARDGEETAVTVTTAAVAPRVLETIKAEIICAA

SEQ ID NO: 16829 - protein, 317 aa, Oryza sativa
  Clone ID: TF_OSC400284j.C1.p34.fg
MVKEEEIITEAAGARGYMEMLGLGEEAADYLMCLSPSSYLSSPAASTTTAVASPTCASYLAPHPYHHLLSFSGQDQYHGDDVFGLQYYGGDQVIPAVVPQKSSPTTECSSSVSSMSSSPTATAISSSKSPAFKKKGSRGCDQRKATAPAAATTTNKRPRVRRERLGERIIALQQLVSPFGKSDTASVLHEALGYIRFLHDQVQVLSSPYLQRLPPSARVPEQERGTPAAEEQPPALRPSDLRSRGLCLVPISCTEHVAGAGAGTGHGNGADLWSVAAGMAKATATVTAAVERSKEAAAAAAATAALLRADRPGQQLA

SEQ ID NO: 16830 - protein, 352 aa, Oryza sativa
  Clone ID: TF_OSC400996j.C1.p33.fg
MADEWWSASQRSHGTSACSAAPSPLTADRVSCGWTSPAAAAAAESTSSITFQDPSRSSAAHHQPLSDAASSLGDPHMVDWTQAFLSGRSDASFQAVLQDDMAASTRPFRAQPTAADEAVMTNPFRDMGVGQGLLLDQASAPLHGLSFDAGEPAVAPATHSITTSFGDYQHSASYDAAAAVMQFSQTPRAPSLPAAAQMQFLSGSYQLPFGGAPPLPSQLLLQAMQPKPSCSSNANTLLAKVRKEKLGDRITALQQLVSPFGKTDTASVLHEAIEYIKFLHEQVASLSSPYLKNGNPLQHFQQKGSESTKDAEQPKPDLRSRGLCLVPVASTYTVASETVPEFWHPTFGGTFR

SEQ ID NO: 16831 - protein, 323 aa, Oryza sativa
  Clone ID: TF_OSC900243j.C1.p6.fg
MADEHEWWNSPCSARTGDDEAACSTADADESAVGSTPMSFGHGGQPASLSDAAASSSSSSFLLAGQHMDYWTQDFMGGRAAAAATASFDTLLQLQLQGGDAASRRLLLGDHAAAPPRHLVVPGAPYGGGGGDDTAAPPRGLSPTPYEAADNLQQQQSFPGGHHVVSNTDRLHDHHQDAGSPSPATRSSPGSPAAAKKPRIEAPSPMPTFKVRKEKLGDRITALQQLVSPFGKTDTASVLHEAIEYIKFLHDQVASLSSPYLRCGRPVQLQHQQGSHKVNGNCEGKQLDLRSRGLCLVPVASTYTVASETATEFWHPTFGGTFR

SEQ ID NO: 16832 - protein, 87 aa, Oryza sativa
  Clone ID: TF_OSC4514j.C1.p1.fg
MSSRRSSRSSVSEEEINELISKLQSLLPSSRRRGANQASTTKLLKETCSYIKSLHREVDDLSDRLSDLMAGMDHNSPGAEIIRSLLR

SEQ ID NO: 16833 - protein, 273 aa, Oryza sativa
  Clone ID: TF_OSC407994j.C1.p7.fg
MVPRDRVNAAAAGGGGEGRLVQSGIVNKKCDKKAPKRIHKSEREKLKRDKQNDLFNELGNLLEPDRQNNGKACVLGETTRILKDLLSQVESLRKENSSLKNESHYVALERNELHDDNSMLRTEILELQNELRTRMEGNPVWSHVNTRPALRVPYPTTGVFPVQHLPHLPVTTTAAFPQQLPVIIEQHYAATPRELQLFPESATSEDSEPSQEHGISDHVTRPQPSKDAWQNRSRDAPTVAARESSLNRKIGYKVTLFVLTVFSEMGKSLYSVL

SEQ ID NO: 16834 - protein, 437 aa, Oryza sativa
  Clone ID: TF_OSC401215j.C1.p9.fg
MGDHQMMHAAPAAMYNGGGGTTSSHGVWWSNAVGVPAAATCSTTTELAGYTAWSSALAAGYDGMVADNGGKQAKSTTTASSESPGNNSSVTFQEPASIPDPAAVAAVPQPGLAGFTDWTQPFMNNGAGLHEFLQDGHHDMSASSLMNHSSNNLALQQAGHHHELLSSFGSDLLLSPTSPYGGFQSSLLRSLMEPTAKQQQQQPALAGLQQYHQYQQQMGHAPAAAAKFAQAVGARDSLQFTNDAPFWNPSAGFGMPAAVAVAAAAAQDQASVRSAKRSSPAPPRAAATLALKTAMEGVGDSSSVITKKETAFKKPRLETPSPLPTFKVRKEKLGDRITALQQLVSPFGKTDTASVLHETIEYIKFLHDQVGALSAPYLKNGAHQVPHLKNSSPDKSKHGEISLKGRGLCLVPISSTFAVASEVPVELWTPFGANFIR

SEQ ID NO: 16835 - protein, 530 aa, Oryza sativa
  Clone ID: TF_OSC401217j.C1.p16.gm
MPRRARARGGGGGGGEEVKVEDDFIDSVLNFGGGGGGEEDGDDGEEEQQQQQAAAAAMGKEFKSKNLEAERRRRGRLNGNIFALRAMSKEATLSDAIEHIKNLQNEVLELQRQLGDSPGEAWEKQCSASCSESFVPTENAHYQGQVELISLGSCKYNLKIFWTKRAGLFTKVLEALCSYKVQVLSLNTISFYGYAESFFTIEVKGEQDVVMVELRSLLSSIVEGEYSGGLFGHPVMDHAELTTEQVLKRDIPWESYMANKLISGTCLQLLRRYDHKPESQRGPLLDEDGPSYVRVFLNILRNISKEDTVEYVLALIDEMLAAVDYLSTTRVMPRLVEVVKGSTKEKVVRVVIMSIRNLLAKGAFAAQMIDLGLPHIVQNLKAQAWTDEDLLDALNQLEIGLKDNLKKLSSFEKYKQQVLLGHLDWSPMHKDPSFWRENINNFEENDFQILRVLMTIIDTSADTTALAVACYDLSQFLQYHPSGRIVVADLKAKDRVMKLMNHENAEVRKNALLCVQRLFLGAKYASFLQT

SEQ ID NO: 16836 - protein, 303 aa, Oryza sativa
  Clone ID: TF_OSC401884j.C1.p3.gm
MPWVRFLVRLVVFFRVIVRSSSETSAADAVMRSGAIAYYHTLTKVCQKKMQGDHGYYGGRDSPPQGYGYGGGYGYGGGYGYDAGGYYSGGGGGYPSAGAAAAAYEDPMVGRRTHDFPAPMNELEFQPSATCPKNYVIFDQTCTKSRVMFHPSLAHKFGGGSSAYDNNVYGGGGAHDAAKGAYRDSVGYDDDDSCSVRQKEDTDEIDALLSSEDGDEDDVVSTGRTPGYRDGSSPDSTCSSSYGGGQARPGRKKERMKKMVRTLKGIIPGGNQMDTPAVLDEAVRYLKSLKVEVKKLGVRGSDN

SEQ ID NO: 16837 - protein, 362 aa, Oryza sativa
  Clone ID: TF_OSC401860j.C1.p50.fg
MDQEKADGGGRRRRSRATSSSGSGASSTAAAAAAERKEMERRRRQDMKGLCVKLASLIPKEHCSMSKMQAASRTQLGSLDEAAAYIKKLKERVDELHHKRSMMSITSSRCRSGGGGGPAAAAGQSTSGGGGGEEEEEDMTRTTAAAAVVEVRQHVQEGSLISLDVVLICSAARPVKFHDVITVLEEEGADIISANFSLAAHNFYYTIYSRAFSSRIGIEASRISERLRALYTALATWSKDTYIAPTSKFGVGSGVELSSPWVPVWSDAAAGGGGGDARSEDRWMNRRKRLVPCGGGGGYIVVGNREKPAPCGGASCFVVGVRDVTVLMNRQKKLAPCGSVSGFVIGVREVAAPFLETAAAAS

SEQ ID NO: 16838 - protein, 265 aa, Oryza sativa
  Clone ID: TF_OSC403865j.C1.p1.fg
MESYYGAFHADEAAFFFPHHVPASPELPFGLIASPEPEPEPEQAAAEARQSAFQEYGGAVHAGAPAAAGAVTTGGTNIHRRVMDVLGRMGGGGGGGEKGEGEEMEEEEEVPQRRRRGQGADVESSRGFRHMMRERQRREKLSQSYADLYAMVSSRSKLQNVRNPPLIPLKWSVYQNRADKKPFVSLQGDKNSIVQSAAIYIHELKVARDQLQRRNEELKAQIMGHDEQQPCVTVQFEVDEPSSSIDSMIAALRRLKGMSVKARGI

SEQ ID NO: 16839 - protein, 359 aa, Oryza sativa
  Clone ID: TF_OSC401860j.C1.p28.fg
MASSSSSSSLCDNHLLQDDLIPWPSMPFAPAPNTFGLNHQWSQPPMLSSSTDQLSSYELESLQSVESQLAAAAPPTLSPHLQAHQLSTVLMMQELGFQWSSCAAPADQHSIASSTNNNSNVMMNEEELRPRPDQSLISNPRSCSATTLLPPPHLHLDGAVLPSINVSRLQKLAAGDEPLQICCKRQAAAAAVVGHSSIRDEHVPCPYAGPPAHLIQGPSNTLQLLRVTCVIFLPQKVLMKRNTNAAAQGRGGRHGSSTEHRSSTALPPSSKKPRLESHSSSMLPSFKVRKEKLGDRIAALQQLVSPFGKTDTASVLMEAIGYIKFLQDQVETLSGPYLRSSKNSKKLACRAAQQQRVKR

SEQ ID NO: 16840 - protein, 535 aa, Oryza sativa
  Clone ID: TF_OSC400570j.C1.p4.fg
MIVGAGYFEDSHDQSLMAGSLIHDSNQAPASSENTSIDLQKFKVHPYSTEALSNTANLAEAARAINHLQHQLEIDLEQEVPPVETANWDPAICTIPDHIINHQFSEDPQNILVEQQIQQYDSALYPNGVYTPAPDLLNLMQCTMAPAFPATTSVFGDTTLNGTNYLDLNGELTGVAAVPDSGSGLMFASDSALQLGYHGTQSHLIKDICHSLPQNYGLFPSEDERDVIIGVGSGDLFQEIDDRQFDSVLECRRGKGEFGKGKGKANFATERERREQLNVKFRTLRMLFPNPTKFISMMFFTDNSAMLLRVVLVLSQIMPYQIVGILKSYLAKFGLPPKLVKFWHYQYIDMVTNQNTPNCVHPNQNDRASIVGDAIEYIDELNRTVKELKILVEQKRHGNNRRKVLKLDQEAAADGESSSMRPVRDDQDNQLHGAIRSSWVQRRSKECHVDVRIVDDEVNIKLTEKKKANSLLHAAKVLDEFQLELIHVVGGIIGDHHIFMFNTKVSEGSAVYACAVAKKLLQAVDVQHQALDIFN

SEQ ID NO: 16841 - protein, 294 aa, Oryza sativa
  Clone ID: TF_OSC401768j.C1.p7.fg
MATGFVVVVAMCQLAGVRITQVCGNQNLGMVADTESSGSLGGSSNAASDKAVDGSLDKRSQEKAPKKTHKAEREKLKRDQLNDLFVELSNPERQNSGKATVLGDAARVLRDLVSQVESLRKEQSALLTERQYVGSENNELQEENIMLRAQILELHNEICARMGNNHLNQSNLAMSQPVANNGSNSATQPVPHHIWGNGPNLAMVHPTNTLSPLHNQHHQSAGASQVYASRPQELQLFPGTSVSTERERSRAGSGSTPATSSGLTDSLPGQLRLSLPQSSQEENSSGSKKGRKKG

SEQ ID NO: 16842 - protein, 431 aa, Oryza sativa
  Clone ID: TF_OSC418704j.C1.p1.fg
MASKKASPILYLSLSFCGPHAIGESERNYSANQIFLLMQSLKFGIEDLVAGIAVWVSVVAWQFFQGERAGVLMVWQPVAQTRFRVFKHENGIAVRVIACFQPSQDCQKILFAGCFLMGEKVNPWCHWSNPPWTESSANNLHPPDVSLDNTNSVALPTYLNSDGYIYSGVAASMPSIAASVTDRPVSFSSRFVTTLVPSVGLSTAETLRKRPLVFFHNVNNTFTVGPLLSKGTLDTVPELQGSNETNVTDVGAQNTECMHENTEEIDALLCSDSDEGCLKVQELNNRVRKYPMQNDTMSVESVASAGASQPAKKRRLSSGTDRSVVDTASSARPDHSVDQKHLSHDDDAQSCCIGEVESDHQFALREGEEAEGDDGPDDRKRRRERIQETVAALRKIVPGGIAKDATAVLDEAICYLKYLKLKVKTLGAVSL

SEQ ID NO: 16843 - protein, 262 aa, Oryza sativa
  Clone ID: TF_OSC402160j.C1.p8.fg
MVPSERGDVATAIRPAAADKLVHGPISDKKCRKKVPRKVHKSEREKLKRGHLNDLFGELGNMLASDQIQQPSAEADRQSNGKACILTDTTRILRDLLSQVKSLRQENSTLQNESNYVTMERNELQDENGALRSEISDLQNELRMRATGSPGWGHGATGSPLPVPPSPGTVFPSQQPMQPSPMTTSTVFPLQQPLPQPTVIEPSARQPLELKLFLEAPPAEDPEPSEDQEAPNNVARPQPRYPTEASSWPISLGLPRMEDEQM

SEQ ID NO: 16844 - protein, 467 aa, Oryza sativa
  Clone ID: TF_OSC401495j.C1.p1.fg
MYGGGAAAGGATTTTGSHGGGGGDWWSAAVSSCSAPAPETMQGFGGWSAAVVAVDGGGNTSRSAAGNTASSESPGSLATGSSITFQEPAGGVADPAAIAVHAQTVAGGGGGGWNQQPFLDGSGFHGYMSSSRNDHHTNHHHHQINTPSLMSNSSSNNGVMLQEHQHDQNYQFLSNLGFELLSSPTSPYGGGGGFRSSLLRSLTEPAAAAKPNDSPGFQQYHHHQPAMNLQPPAAAAGREPLQFTNSTAAPFWNPSSRFTVAAEGTALGGAGASPAQPTPASLAAKRALEGVGDSSSIITKKAKADSTPLKKSRTGTPSPLPTTFKACVYIYIIFNLSQMVIDFLPIKFHVRKEKLGDRVTALQQLVSPFGKTDTASVLHETIEYIKFLHDQVGALSAPYLKNRQQVPHLKNSTGVDNDGGGGGGEATAASKRDLTGRGLCLVPISSTFAVASETPVDFWTPFGAAFR

SEQ ID NO: 16845 - protein, 100 aa, Oryza sativa
  Clone ID: TF_OSC18429j.C1.p2.fg
MSSSRRSRTSSRLAAAPPPTDEQMAELISKLQAVLPTRGGEANAKASSAEVLQEACRYIRRLHREADALSERLAELLLLQPSDLAINGADVPDLIRSLLM

SEQ ID NO: 16846 - protein, 350 aa, Oryza sativa
  Clone ID: TF_OSC401762j.C1.p12.fg
MSQEGADLSQDVDESPYHTAVVTTNNLVRSIKAEKSNSSSSSGKPVETDIGLKVASPTMFGFNTKIEGTGKNMAVKREEGEGGGRPGVSSGVSTRDTNGKGKNAMDMEHALHIWTERERRKKMKNMFSTLHGLLPKIPGKVANAIEKFYISLIYQDLTDKASIVGEAIGYIKTLEDVVQKLETIKTERVRAHQWAAAAAAAVAANGGGEGSSHSHSQPPRHATAVTVAVAEPAPVAAAVNAQAPQKKAAAAAAPTLQTWSAPNITLTMAGVDAFINMCLPRQRASFTTVAFVLEKHQIDVVTSTISADHDKSLFSVHVRLNEASLQSTEGLTPEAKYKLAVSELMVRLAE

SEQ ID NO: 16847 - protein, 110 aa, Oryza sativa
  Clone ID: TF_OSC401615j.C1.p29.fg
MVAHATINNGRCDAAPAAAAKSRPAVMPPPASNHGAACKNSGSNKERRRMRRCVEVRRKMEALRRLVPGGGGGEDSGEELLFRAADYIARLQVQVKVMQLMVDVLEQTKD

SEQ ID NO: 16848 - protein, 395 aa, Oryza sativa
  Clone ID: TF_OSC401232j.C1.p30.fg
HRLQKQQLCRWIRHDDLDMLTDELERKRYRTLILMADTFLANDLRQFPSAKRKASLYTSTLANIFILMLKGSTGIQLLSLFSGYMKDDVSSAVETQLAESCRLESGVETCRLLVSSVAVKCEASNSPSTTVGFDRMIAADYDLFHHMSFSPSLQNLQSPTFFTTRSSESYLGESSIYGGGARPALAQFSYSQPIAATSAAHLVRWTAAGEPMTGDGGFRSSKRLKTATTATTQPPRHGVKCHAKPRNQTTKATCKKRSQKLGDRITALQQLVSPYGKTDTASVLHEAAACIRQLHQQIQILTAPYPGTSSSSASSQQQVVFSVLESCSHVMSFFTAIATVLWLQDAGGGGGTATELRRRGLCVAALSPAVVSLAAEGGRRRTDVEDQKRIWFSNQ

SEQ ID NO: 16849 - protein, 186 aa, Oryza sativa
  Clone ID: TF_OSC401860j.C1.p53.fg
MERKDVEKNRRLHMKGLCLKLSSLIPAAAPRRHHHHYSTSSSSSPPSSTKEAVTQLDHLEQAAAYIKQLKGRIDELKKRKQQAAALTTSTSNGGGGGMPVVEVRCQDGTLDVVVVSEAIREERERAVRLHEVIGVLEEEGAEVVNASFSVVGDKIFYTLHSQALCSRIGLDASRVSHRLRNLLLQY

SEQ ID NO: 16850 - protein, 1121 aa, Oryza sativa
  Clone ID: TF_OSC900050j.C1.p1.fg
MSRDFFSFAVDPWLRRLIRQKPRRSRVARNAGNKATTREHDFLSLYTTAAKDPSLQLHDAKPPPPSQGFFLRTHDFLQPLEKPTPAPTPPPTSQLQQQQQQAFPGGIGTFSISHVAGARPVAAAVVKAEPTPFVLWGQPAAAAAAHPVAALGHHHHHHQWTLPFAGVGQVAATAARQQQEWKGRVGGGGFMDSGSRSSGGAGFDDDDGVAARREVSSSLKGSVCVAERRREGRGEEGRRRSRELMEMEMEMYSRCARPSHIHQLHARLVVSGRLRCTSPSLALALLRAACRVRASPCLRPLAHHLLDHIPRPHPHLLHAAARLAYRLRLPSLALRHYVALRTHHPVFLPPAAAIADMLKSVRGRAAHAHALRVTAHAGDTRFLDNTLVAMYFACGDVQRARLVFEGMCDRDVISWTSLISGLVQNGSPLQGIQQFATMMHCDVRPDFVVLVTVAKAFMELDNLPGAESAHSLVVKGGFHDEQDVMITLTAMYASFGCLVAARALFDMVPPQQVNVILWNAMISGYSKNGFASEAVHLYKHMQLVARNLAPDSITLRSVIFACAQLGSTELAAWMEDCVCRSEYREDVLVNTALIDMYAKSGSISHARAVFERMHVDDRDVVVWSALITGYGVQGLVNEACTLFQDMKLAGVRPNDVTFLGLLSACNHAGAVEKGWSYFHSMKPDYGIEPQHQHYACVVDLLSRAGQLDRAYQFILNMPIKPEMTVWGALLHGCKMHGHSNMAMAECAAQHIFELEQSNAGHYVQLANMYASAGMWSQVAGMRVTMRERGVTKATGFSFIEVDGEMHSFHAWDHSHPRATEIFAMLCLLSPTPTGVGGVDSEGGWEGWELQWKWFQILRELLPHSDQKRDKATFLLEVIEYIRFLQEKVQKFEASVPEWNQENAKILPWSNIYFRSFWKNSQSKGQNPGDDLPDPSQFIRNGSSSGYNFTGKPDDNHNMVTSAAASGAQELVETDHAASVSYRSAETPTNITNNVTSQAQAQWASPAGVDDCAMNSEMLNNQQLAIDEGTISLSSQYSQQLLGTLTHALESSGVDLSQSSISVQINLGKRAVKRPGADGSSSSKELPSTSANNENMGHQLTMLGGGTEELPHPTKRHKSGNS

SEQ ID NO: 16851 - protein, 449 aa, Oryza sativa
  Clone ID: TF_OSC400070j.C1.p12.fg
MQLFQGEEPAHDFLSLRAGGGSSSPPFQHREEQHSSHSSRGYGMEIRRSLRPLDLAKQRGRSSGNGTAAGSAVDGASPAGSDSEEHVLPGGVGTFSIRHASGTPSREEAGSHGGVRRSAFAFAPALHGARMENAHETGGRSGSRAHRAPSTMWQDSAIDQRSIGQTPYEAFNSKTISYKYMVQEMCSKMQFFMLSFRLEILRELLPHTDQKRDKASFLSEVIEYIRFLQEKVQKYEEADPERNHEDSKSMPWAKVYYRSCWRNTKNTSQVQGEDLSPSTQDMNNEQYGPKHISAAQPALFNTQSVTSTTTSSSHMATGTPQNLEKNSTPSNQPPWLSMSTMRQESEPGNKMPNKHEKQTLHDENHSISSAYSQGLFNRLTEALKKSGLDPSQANIAVEINLAKRARDNTSDNSKIVCLIIILYLCPDFTSQINEDEEPIQITKRRCNKS

SEQ ID NO: 16852 - protein, 133 aa, Oryza sativa
  Clone ID: TF_OSC5610j.C1.p1.gm
AMELLLPTAAASGRRPRPAFPPRPHLVGAQAGFSAFASRWGLGGGSFPPPPSSSSKRKPDPASKGKAAAKKGKTAASGEDGGDGGEDEKPAYVHVRARRGQATDSHSLAERARREKINARMELLKELVPGCSK

SEQ ID NO: 16853 - protein, 249 aa, Oryza sativa
  Clone ID: TF_OSC400099j.C1.p2.fg
MEMTSYNDVDAGDMFAAADYYSAGAGGDLFDMVWPGRRRREEDNTSGCLPLSPPPPPELAVDDQLLAGGDGGGGKPVAVAVAEDDDSGERWTEDQVPTDEGICVMEKRRCKINENLKTLQQLVPVCDKSNNQASTLDKTIRYMKSLQQHAQAMSVGCSMKTAEAAGVTCPFLPPPPSSALLVIVEEGPTRPWDATARSTSAAATSFDHHHHGALIEKLLQVVQPYMLSLKTSVRENNAMVMQKPNFYHS

SEQ ID NO: 16854 - protein, 836 aa, Oryza sativa
  Clone ID: TF_OSC411335j.C1.p13.gm
MDAFGWSAPAAPCQPSCGPGGDDDDDVLLAAVLGASFELHSLVDGGGNGAAGAVRSDDAYGLDVDLPSHQMSLLRCQDGLSALHGDASPTAAAAAFLDSVDVLPVPAIAGATHDDGGLLDRFAFPNVAETTTVQAAASNTAFSGYSSNTTGGGNISSGESNTYTEVASTPCAVSTTTTTTALPPSKRKLPEKYPVVGTSPTTKTTTTSETAAERRSTKRGAGGSSSITFGGGCHGAGAAAALLGYGRGYEPDTEAIAQVKEMIYRAAAMRPVTLGGAASASDPDPQTVAARLRRERVSERLRVLQRLVPGGSKMDTATMLDEAASYLKFLKSQLEALETLGNGNGNGNLLHHGYYTGSRNATATAATEPVYEDSGYAALLGAHRGLILLPYRLAVAARHRRRSRPLDPPNHRRQSLGGLASYLPPPMAPLDSGGVTASSPLPPDPQSHPSNRVRIMRAPNPTPPRDSAMARRRKGSSYRRRRRRRRRAPAACGDNRIDDLTDDLLLIILRRLDTRSALATAALSRRWSGLARAGLEALDFMVGDILPPRYHRCIQLHESASGVFDGADELRTIVASIRRHERLAMRNMVASINNFLDADDGFAHGDGGGGAPRRRISRLRVEFIATHYHDCINRLVAKAVDTWGVEDLEVLGVPSSHQAGPARLAGLHTRGSLRSSVFSSCLQLQEVHLKSCPCKRGSSVFVDAPRSMIRQLVLECCGVPGFELHALPMLESIVVMQTWVRYKLGSFPRLVRLNLKRDGLRHKLNFCLPANLDLKPHLGFTPDITDQPSKLQHKRLKELVIIGFEGTERQIYFVNFVIEVSMVLELVSLSMAVFRK

SEQ ID NO: 16855 - protein, 211 aa, Oryza sativa
  Clone ID: TF_OSC412549j.C1.p7.fg
MEFDMAMDMMSQEQLMHIISQLDSALASSPSPSTSPSASPPRQSPAAHVPVPPGLLNTTMVSTSRAQAAPSAPLHPVAATAAVQSSSRGIMYTTTRQGVIDAAEEEEAAAPRPRRRNARVSSEPQSVAARLRRERVSQRMRALQRLVPGGARLDTASMLEEAIRYVKFLKGHVQSLERAAAALHMHGGHAAAAGFAGDAGDAVYSCPSYYA

SEQ ID NO: 16856 - protein, 191 aa, Oryza sativa
  Clone ID: TF_OSC400622j.C1.p23.fg
MKLRFVRKNNHKRRDRINQKMKTLQKLVPNSSKTDKASMLDEVIDYLKQLQAQVQVMSRMGSMMMPMGMAMPQLQMSVMAQMAQMAQIGLSMMNMGQAGGYAPMHMHTPPFLPVSWDAAASSSSAAAADRPPQPTGAATSDAFSAFLASQAAQQNAQQPNGMEAYNRMMAMYQKLNHQQQQQQDQPSNSRQ

SEQ ID NO: 16857 - protein, 338 aa, Oryza sativa
  Clone ID: TF_OSC400431j.C1.p55.fg
MAPPPPAPATTASPVAMLPAVTYMVIAAVLGSSSKGSSSSSARRFSTISMHLSMDDDDDQSAVYGVAMVDDLLTPSPSTHHAVAAAAGSFPSSSSSSASFRSASVSYSPDTSSSAAAAAATGFYPELSSQVAPLLPPPPLVRNEPQPGRYTAGLPPPPPPPVTGGAFRRYARHLGPRRAPKPGACGQRMFKTAMSALAKMHMETTYRRRQYYYQQAAAAAEAAPPPPSGNNQLQHTMSERKRREKLNDSFVALKAVLPPGSKKDKTSILIRAREYVKSLESKLSELEEKNRELEARLSTRPDDTKNDEEEVAAPPEAGGEVKREDPVEIEALDNFFIR

SEQ ID NO: 16858 - protein, 553 aa, Oryza sativa
  Clone ID: TF_OSC102138j.C1.p7.fg
MGRGDHLLMKNSNAAAAAAAVNGGGTSLDAALRPLVGSDGWDYCIYWRLSPDQRFLEMTGFCCSSELEAQVSALLDLPSSIPLDSSSIGMHAQALLSNQPIWQSSSEEEEADGGGGAKTRLLVPVAGGLVELFASRYMAEEQQMAELVMAQCGGGGAGDDGGGQAWPPPETPSFQWDGGADAQRLMYGGSSLNLFDAAAADDDPFLGGGGGDAVGDEAAAAGAWPYAGMAVSEPSVAVAQEQMQHAAGGGVAESGSEGRKLHGGDPEDDGDGEGRSGGAKRQQCKNLEAERKRRKKLNGHLYKLRSLVPNITKMDRASILGDAIDYIVGLQKQVKELQDELEDNHVHHKPPDVLIDHPPPASLVGLDNDDASPPNSHQQQPPLAVSGSSSRRSNKDPAMTDDKVGGGGGGGHRMEPQLEVRQVQGNELFVQVLWEHKPGGFVRLMDAMNALGLEVINVNVTTYKTLVLNVFRVMVVRDSEVAVQADRVRDSLLEVTRETYPGVWPSPQEEDDAKFDGGDGGQAAAAAAAAGGEHYHDEVGGGYHQHLHYLAFD

SEQ ID NO: 16859 - protein, 502 aa, Oryza sativa
  Clone ID: TF_OSC900412j.C1.p23.fg
LPGRAFARRGHVWLTGANEVDSKVFLRAILAKTVVCIPVVDGVLEIGTTEKVEEDMGLIQYARGIFMDQHGIHMKPTLSQHSTSNPVTHCTHQHPIQVQMQLGITSQTKFDYSDELNADEENDDTEEEGMSGSDTNNTDTERNSGQLQLQMQDQLNMVSNDHQTIPNNAVSSELMQCEMSEVVRDGCSNNILEDEIQMLMDCQNSNCQLNLQGPDEPCHSWHFLCEELQNDYQPATEDQVASPENTHYPKTLMTILHYNTLRQQEMNIKNYLPVSEKSSFSRWTTPEGIVTAVTGEQKHLNQGAGKAQVDAIQGDFSANHVLKERRRREKLNEKFIILRSLVPFMTKMDKASILGDTIEYVKQLRNRIQELESSSSSSRAAARAPSAAAAGRRRKRSAAAATATAAEGMSSSNGRNGGEAAEVVQVSIIESDALLELRCGCGGGGGGVVLLRVMQAMQELQLEVTAVQASCAGGELLAELRAKVVVMILICMKMQMQMQMQN

SEQ ID NO: 16860 - protein, 315 aa, Oryza sativa
  Clone ID: TF_OSC400903j.C1.p11.fg
MDEQRGRGGFDELVLLHQQQEQRRRREQQQEEEEEEEVRRQMFGAVVGGLAAFPAAAAALGQQQVDCGGELGGFCDSEAGGSSEPEAAAGARPRGGSGSKRSRAAEVHNLSEKRRRSKINEKMKALQSLIPNSNKTDKASMLDEAIEYLKQLQLQVQMLSMRNGVYLNPSYLSGALEPAQASQMFAALGGNNVTVVHPGTVMPPVNQSSGAHHLFDPLNSPPQNQPQSLILPSVPSTAIPEPPFHLESSQSHLRQFQLPGSSEFHKILFLHVLLSVKDGVSWRDNAKAPPIITSRKSARKRDELHQERIIHVEHQ

SEQ ID NO: 16861 - protein, 636 aa, Oryza sativa
  Clone ID: TF_OSC400765j.C1.p26.fg
MAGGEAHAALQAVAQSLRWTYSLLWQLCPHQGSSLVWGEGHYNGAVKTRKSTVMQPPPAEEEDDADHAARHRSRQLRELYDWLQQAGENSSGGVQTSSTTASRRPGAALSPEDLTETEWFFLMSASYSFPPGIGLPGRAFARRGHVWLTGANEVDSKVFLRAILAKTVVCIPVVDGVLEIGTTEKVEEDMGLIQYARGIFMDQHGIHMKPTLSQHSTSNPVTHCTHQHPIQVQMQLGITSQTKFDYSDELNADEENDDTEEEGMSGSDTNNTDTERNSGQLQLQMQDQLNMVSNDHQTIPNNAVSSELMQCEMSEVVRDGCSNNILEDEIQMLMDCQNSNCQLNLQGPDEPCHSWHFLCEELQNDYQPATEDQVASPENTHYPKTLMTILHYNTLRQQEMNIKNYLPVSEKSSFSRWTTPEGSDDNKTMISPGTTQRMLKSILMIVPSSHCSYRGAETPESRGGKGASGCHPRSESYPYPPMDKASILGDTIEYVKQLRNRIQELESSSSSSRAAARAPSAAAAGRRRKRSAAAATATAAEGMSSSNGRNGGEAAEVVQVSIIESDALLELRCGCGGGGGGVVLLRVMQAMQELQLEVTAVQASCAGGELLAELRAKVVVMILICMKMQMQMQMQN

SEQ ID NO: 16862 - protein, 310 aa, Oryza sativa
  Clone ID: TF_OSC423195j.C1.p3.fg
MESGGVIAEAGWSSLDMSSQAEESEMMAQLLGTCFPSNGEDDHHQELPWSVDTPSAYYLHCNGGSSSAYSSTTSSNSASGSFTLIAPRSEYEGYYVSDSNEAALGISIQEQGAAQFMDAILNRNGDPGFDDLADSSVNLLDSIGASNKRKIQEQGRLDDQTKSRKSAKKAGSKRGKKAAQCEGEDGSIAVTNRQSLSCCTSENDSIGSQESPVAAKSNGKAQSGHRSATDPQSLYARKRRERINERLKILQNLVPNGTKVDISTMLEEAMHYVKFLQLQIKLLSSDEMWMYAPIAYNGMNIGIDLNLSQH

SEQ ID NO: 16863 - protein, 209 aa, Oryza sativa
  Clone ID: TF_OSC401685j.C1.p98.fg
MSSSSGSGRSATEARALKIHSEAERRRRERINAHLTTLRRMIPDTKQMDKATLLARVVDQVKDLKRKASEITQRTPLPPETNEVSIECFTGDAATAATTVAGNHKTLYIKASISCDDRPDLIAGITHAFHGLRLRTVRAEMTSLGGRVQHVFILCREEGIAGGVSLKSLKEAVRQALAKVASPELVYGSSHFQSKRQRILESHCSIMSI

SEQ ID NO: 16864 - protein, 196 aa, Oryza sativa
  Clone ID: TF_OSC33102j.C1.p1.fg
MAGFSHLPQQMEHGLITNNGFLFCHGSHGGAATTTAPAIPEDASMETSSVVLDTSPQDKKRKPREEDTASLNSAHSKEAKENGRKRGGKKHSRDQMEEEAPQGFIHVRARRGQATDSHSLAERVRRERISERMRMLQALVPGCDKVTGKALILDEIINYVQSLQNQVEFLSMRIASLSPVLYGFGIDSDAFSDHSQ

SEQ ID NO: 16865 - protein, 291 aa, Oryza sativa
  Clone ID: TF_OSC400867j.C1.p1.fg
MADFSPHHSLLLKATAAGAAIATTNDPNISSFFLYNHSHGSQAPQPANAAAAAIVEDASLESSVSAVLDTSPSVDRKRKAAEDSAHSKDSCKDGKSRRGKKASKEVEEKSTTEDEPPKGYIHVRARRGQATDSHSLAERVRRERISERMRMLQALVPGCDKVTGKALILDEIINYVQSLQNQVEFLSMRIASMSPVLYGFGMDSDGLHDQKIGGMFQEALAMPNPVLNQSSPAPSQAIMDTTSTTSYSLQSQHGAISFSQDNGSYLMQAVGEPRQQEMLNQLVFNNMCSFQ

SEQ ID NO: 16866 - protein, 282 aa, Oryza sativa
  Clone ID: TF_OSC900128j.C1.p4.fg
MAGFSHLPQQMEHGLITNNGFLFCHGSHGGAATTTAPAIPEDASMETSSVVLDTSPQDKKRKPREEDTASLNSAHSKEAKENGRKRGGKKHSRDQMEEEAPQGFIHVRARRGQATDSHSLAERVRRERISERMRMLQALVPGCDKVTGKALILDEIINYVQSLQNQVEFLSMRIASLSPVLYGFGIDSDAFSDHSQKMEGMFHEAVAIPASVLNRGSSPAQSHAIMDTSNTSPTPYTLQVQGGSNNNSLSQDNGSYIMQTVGEPRQELFNQVVLNNYMCSFQ

SEQ ID NO: 16867 - protein, 499 aa, Oryza sativa
  Clone ID: TF_OSC900417j.C1.p6.fg
MAAAAAAGQISLDDLRNGGGVAANAGGGGGVHDDFLDQMLSSLPPSAWPDLAAGKAAEDDAEGMHHHHHQQQQQFGGPYDESAMLASRLRQHQISGGGGGGGGGAAAVKQMVLQQLADLRQGHHMMLQGLGGRSPAGGGGGGGDGGLLLPLTLGSGGSGGDVQALLKAAAANSAGGGDAGGVYGGGFAGSLHQQQQHFQPHPQTAPTIPTQSFGGGGGGGGGGTASGGGAAQPQAGAAGGGAPAPPRQRVRARRGQATDPHSIAERLRRERIAERMKALQELVPNANKLMQTDKASMLDEIIDYVKFLQLQVKASTYTKLLIHVLSMSRLGGAAAVAPLVADMSSEGRGGGAANGGAPAAAGSDSLTVTEQQVAKLMEEDMGTAMQYLQGKGLCLMPISLASAISSATCHLRPPVVAAAQQFPAGLGAAAAAAHHHQLSAAAAAAAMRGHLPGLNADGSVPASPSMSVLTAQSAMANGGGGAADGEGSQLKDAASVSKP

SEQ ID NO: 16868 - protein, 272 aa, Oryza sativa
  Clone ID: TF_OSC401648j.C1.p35.fg
MAETNHLLLLLLSPPRLRLLSWTPTTPLACAALSRAAKLSRDLVSEKGERGIRSFKKNIAEQHMHASLGLDQLAAIGSLYQFIRGGGEGKEAASQEEEQTPKLRSVIAHLVSRKRRRDRINEKLKALQELLPNCTKTDKVSMLDEAIDYLKSLQLQLQMLVMGKGMAPVVPPELQQYMHYITADPSQIPPIRPSEPRPFQITHATQQRQSNVESDFLSQMQNLHPSEPPQNFLRPPKLQLYTPEQQRRGLASSSGHNSGWITERNSSYNFLE

SEQ ID NO: 16869 - protein, 254 aa, Oryza sativa
  Clone ID: TF_OSC9961j.C1.p3.fg
MDDSSLFLHWAVSTLQHQHPAAVAVVADDDATFFSFQELCDTEEVVVVPVQEEVITEAHGAAERRRRWRRAGDGVRVTAGGRGIHHQEDLGAHGGAAAAYAQLEHVVAERKRREKINQRFMELSAVIPKLKKMDKATILSDAASYIRELQEKLKALEEQAAARVTEAAMATPSPARAMNHLPVPPEIEVRCSPTNNVVMVRIHCENGEGVIVRILAEVEEIHLRIINANVMPFLDQGATMIITIAAKASSSLLY

SEQ ID NO: 16870 - protein, 293 aa, Oryza sativa
  Clone ID: TF_OSC400878j.C1.p3.fg
MAGQQPPTGGAEDDFFDHFFSIPSAAAAGAGGVGGFGSGDHHPFPLALSLDAEGAGAARRLLDGGHDGGRTDRDPVQLAGLFAPVFGAAAGVQPPHLRAPPPPQVFHAQPKPGEGAMAAPQPQQPPAPRPKVRARRGQATDPHSIAERLRRERIAERMRALQDLVPNTNKTDRAAMLDEILDYVKFLRLQVKVLSMSRLGGAGAVAQLVADIPISVKGEASDSGSKQQIWEKWSTDGTEKQVAKLMEEDIGAAMQFLQSKALCMMPISLAMAIYDTQHSQDGHSVKPEPNTPS

SEQ ID NO: 16871 - protein, 477 aa, Oryza sativa
  Clone ID: TF_OSC407936j.C1.p27.fg
MAQQWRSLLFLLLLLLVPFAAAAGQDAPFVVAQKKVALSRPGPGVERLAVTLNLYNQGSATAYDVSLNDDSWPQEAFQLISGTTSKIVEKLDPGATASHNFILETKVQGKFQGSPAIITYRVPTKAALQEAYSTPMFPLDILAERPPQQKFELAKRLVGKYGSLVSVVSFVEPLPVPGFPAGCSNLEEKAAAAMAAYEYESSSCSSLDPTSMPMVYSPIVLQPQECPLSFVFDNAAAAAGDNKWVPGIQGSCPCSLGSTQDMDASWGKSRKHKRSNVGLKGLEEKKARRVVLHQHDDDVKKKAKEAAGGEPPAGYIHVRARRGQATDSHSLAERVRREKISERMKMLQSLVPGCDKVTGKALMLDEIISYVQSLQNQVEFLSMKLASLSPLMYEFGPGIDMHPDVLRQLAKMPHEMVQCMGQMGSTGISLQGLGGGPTGFAQDGSSHINMVVMQVGEQGQQQGSLHQVEMSSHCFFH

SEQ ID NO: 16872 - protein, 412 aa, Oryza sativa
  Clone ID: TF_OSC400431j.C1.p57.fg
MDSSSWIHGYTNANATGANSGFMCGYAASPVEFPQQQQLISMQMGMDDESAVYDGASMVGDLLMASSSAHHAGAGSFQYSSSTTSSSASFRSASVSCNPESSAAAAPELPAATGGAFSRYARHLRPRRPPKPGACGQRMFKTAMSVLANMHVAATYRRQYYYQQAAAAAAAEAAPAPPSDNQLQHMISERKRREKLNDSFVALKAVLPTGSKKDKASILIRAREHIKSLESKLSELEEKNRELEARLASRPAAKNDKGETAAAEAGDETKREDLVEIEVTTTSGGSGAAAAAATGGDQETCCTLNVDLRGGGGGGMSTTDVVLRTLQCLREQIGDGASLVAMSTSAGSGGRPPSANLTLQLKSPTYGRCSYKYEFTLFLVNRQKPTIKHIRYGSRKISMSLSMDDVTMISPR

SEQ ID NO: 16873 - protein, 370 aa, Oryza sativa
  Clone ID: TF_OSC400036j.C1.p73.fg
MSRVPTSWGFVYSRVNKVSEEPNVVNRITTAFWELQLPACSDEPISSGTPSSPSSPPTKETGDANTVVIDDLFLAHSDAILPAGGDQKEEHQLGDDLGQQQAATAMEIDDDVIYSLIRNWDNDSSSSWIELLDHAIVSPASCFVPWKRTELDKEAVAGGEAAQRLLKKVVGGGGAWMNRAAGSCSIKNHVMSERRRREKLNEMFLILKSLVPSIDKVDKASILSETIAYLKELERRVQELESGKKVSRPAKRKPCSETIIGGGGGGGGAGAVKEHHHWVLSESQEGTPSDVRVIVMDKDELHLEVQCRWKELMMTRVFDAIKSLRLDVVSVQASAPDGLLGLKIRAKYASSAAVVPAMISETLRTAVAGY

SEQ ID NO: 16874 - protein, 246 aa, Oryza sativa
  Clone ID: TF_OSC400710j.C1.p1.fg
MEFDMLNSNPEAQLELMNTMLQLEQLSAFPDHHGMVVPCSPTSPCMGAQGGHHHFSSVNHQPAHGVVSSGGANTGDGYRDQYYTQLLPAAAYSNAAGGGRGSEYHTTTTTRPASGGGGDGGVGPAAMREMIFHIAALQPVNIDPETVRPPKRRNVRISTDPQSVAARMRRERISERIRILQRLVPGGTKMDTASMLDEAIHYVKFLKTQVQSLERAAAANGHRPPPPTATSAAAATVAYPGLNGQW

SEQ ID NO: 16875 - protein, 304 aa, Oryza sativa
  Clone ID: TF_OSC6188j.C1.p1.gm
MEGGGLIADMSWTVFDLPSHSDESEMMAQLFSAFPIHGEEEGHEQLPWFDQSSNPCYYSCNASSTAYSNSNASSIPAPSEYEGYCFSDSNEALGVSSSIAPHDLSMVQVQGATEFLNVIPNHSLDSFGNGELGHEDLDSVSGTNKRKQSAEGEFDGQTRGSKCARKAEPKRAKKAKQTVEKDASVAIPNGSCSISDNDSSSSQEVADAGATSKGKSRAGRGAATDPQSLYARKRRERINERLKTLQNLVPNGTKVDISTMLEEAVHYVKFLQLQIKLLSSDEMWMYAPIAYNGMNIGLDLNIDT

SEQ ID NO: 16876 - protein, 361 aa, Oryza sativa
  Clone ID: TF_OSC400269j.C1.p50.fg
MAYSTNQIMILQHAWMLVGEANSQLIISTVAHSWYQSNSIEVVLWWFWSRIAQTPTEYGFFGQAMACRTDEENDDDPRALEHLDPLSMQQLAESLANELFNQPQEQQEEQHGYHNPSLRVLPFVGDINKPEGHTPAAAAIRDSFFSLTNGSSSSLNFSALEQQQDSGPMTKFCSPLSEMKRGGRRATSSMQEHVIAERKRREKMHQQFTTLASIVPEITKTDKVSVLGSTIEYVHHLRERVKILQDIQSMGSTQPPISDARSRAGSGDDEDDDGNNNEVEIKVEANLQGTTVLLRVVCPEKKGVLIKLLTELEKLGLSTMNTNVVPFADSSLNITITAQIDNASCTTVELVKNLKSTLRNF

SEQ ID NO: 16877 - protein, 776 aa, Oryza sativa
  Clone ID: TF_OSC401665j.C1.p25.fg
MKLRLRSMDQRGGAGGAAETHRVQLPDTATLSDVKAFLATKLSAAQPVPAESVRLTLNRSEELLTPDPSATLPALGLASGDLLYFTLSPLPSPSPPPQPQPQAQPLPRNPNPDVPSIAGAADPTKSPVESGSSSSMPQALCTNPGLPVASDPHHPPPDVVMAEAFAVIKSKSSLVVGDTKREMENVGGADGTVICRLVVALHAALLDAGFLYANPVGSCLQLPQNWASGSFVPVSMKYTLPELVEALPVVEEGMVAVLNYSLMGNFMMVYGHVPGATSGVRRLCLELPELAPLLYLDSDEVSTAEEREIHELWRVLKDEMCLPLMISLCQLNNLSLPPCLMALPGDVKAKVLEFVPGVDLARVQCTCKELRDLAADDNLWKKKCEMEFNTQDTCGCMMCKCIYSDQRKDIVLADKYTCGNYMQKPVTQPGRWLIILVYHSLLCQYITIGLSLLWYHLVDLVQDAPAAGIHFDCIIPLPINPYQLPPSAGACCSTTQASASAKDGGNMYSPPCSAAASSQGHCFAVGANQLASLDLAMDFDEPILFPVHNASLQEGIQFYNPTGDTQLSRNMSIDKCLKGSKRKGSGEGSSSLHSQEETGEMPQRELSMEHAGEKAGDADASREEYVHVRAKRGQATNSHSLAERFRREKINERMKLLQDLVPGCNKITGKAMMLDEIINYVQSLQRQVEFLSMKLSTISPELNSDLDLQDILCSQDARSAFLGCSPQLSNAHPNLYRAAQQCLSPPGLYGSVCVPNPADVHLARAGHLASFPQVYI

SEQ ID NO: 16878 - protein, 492 aa, Oryza sativa
  Clone ID: TF_OSC400641j.C1.p23.fg
MGQAGYFLCSEITASKLLTVTATRELKPPPPPRPSGRVLSRRARRRRSSVLAWRHRRCFGGLILQTWKKNHTISAVQQRSHLERFAALDEAPPPAPEETVVTGGEMVDYMLGQPPPTTPGPQSQVSFDKLTFSDVLQFADFGPKLALNQPAASDNGGGGGDDGDDDDDSYFLRFQSLPSLPAVPPPRGGAAAAHQVVDEQEGSKQTVDAGGVSESTTLVQQADGGGGRAEKAGEQGKSGRRKRPRTVKTSEEVESQRMTHIAVERNRRRQMNEYLRVLRSLMPGSYVQRGDQASIIGGAIEFIRELEQLIQCLESQKRRRLYGGDAPAPPARPVADGAVLPAPMQQPPPATPPFFPPSIPFPASSGAGDGTGAGVAKVALDLDASGGGEVGGGVREEMAENKSCVADIEVRVVGVDAMIKILSRRRPGQLIKTVAALEEMHMSILHTNITTIDQTVLYSFNVKIAGDARFSAEDIAGAVHQILSFIDVNYTL

SEQ ID NO: 16879 - protein, 412 aa, Oryza sativa
  Clone ID: TF_OSC401583j.C1.p44.fg
MASLLGLLFSSLLFSERCEARRRARSGGEVAMDEAEAAAAAAKMDELAGGGGGGGGDWSYLAADALAAASFTAFPFHHHHHHHHRDVLSASTPSSLLLNMDAATAAAMFDFQAAFPSSSVPPPPPTTTAALPPFHDFASSNPFDDAPPPFLAPPGQKLGFLGPPGGAFGGGMGWDDDDEIEQSVDASSMGVSASLENAAPVAAGGGGGGGGGGGRGKKKGMPAKNLMAERRRRKKLNDRLYMLRSVVPKISKMDRASILGDAIEYLKELLQRINDLHNELESAPSSSLTGPSSASFHPSTPTLQTFPGRVKEELCPTSFPSPSGQQATVEVRMREGHAVNIHMFCARRPGILMSTLRALDSLGLGIEQAVISCFNGFAMDVFRAEQCRDGPGLGPEEIKTVLLHSAGLQNAM

SEQ ID NO: 16880 - protein, 83 aa, Oryza sativa
  Clone ID: TF_OSC9102j.C1.p1.fg
RRRDRINEKLRALQELVPHCNKTDKASILDEAIEYLKSLQMQVQIMWMTTGIVPMMFPGTHQLMPPMGMGLNTACMPGVKLKA

SEQ ID NO: 16881 - protein, 584 aa, Oryza sativa
  Clone ID: TF_OSC416036j.C1.p25.gm
MEEDCKCIDRAKVAQPHAIITNGYHAGAVCWRWLGKCGGGPSGWRHRATAHRGSAAAVTAMALAAGDAEPLHVAGEWIAPEIGMGGFAYPFTPSPAWSRDAVFAGSPWAAGGVSSLADALVSYGAVDDEEAAFLGKTAASSPSTARLHEQQQLLLEAELLRHGDGLGFAAMDDDGGAAMLGALEPCAMPLTDSGGPPVICSSSSNDSSGSEHSAAMPAGGGFLVGEQQQHVPPAAYAAGGVLPSMAAGEETPQSFGFGSLFNGDLLQEATVSKYHHHQQQQQLGVVPSSQPHHLNDDIDFNTGKLMSFASGQQHVTPSIDSLQIDQKEFSSGLHHLNLSSLISGPLASFNATQSHRQPAEACGGKNGGAAPFVNLSEVLPKGNGSGSAGNGAPKPRVRARRGQATDPHSIAERLRREKISDRMKDLQELVPNSNKTNKASMLDEIIDYVKFLQLQVKSPGFLLSPRSSSGERQAGAGAVTGGLPGDQPELLDGGAMFEQEVVKLMEDNMTTAMQYLQSKGLCLMPVALASAISAQKGTSSAAVRPEKKKNGDGDGGGDEEDVKGEFDAPRRPPVGRPKEMRSRV

SEQ ID NO: 16882 - protein, 363 aa, Oryza sativa
  Clone ID: TF_OSC400621j.C1.p27.fg
MWEGGSHDAAAQLLPWFVGEPAAAAVGGYGGCVDVVGQGGVFGFGFEAAAAPVVTRQQRGGAAAAEGSSRGGGGKPAVVSGLLGSLQAELGRVTAREIMDAKALAASRSHSEAERRRRQRINGHLARLRSLLPNTTKTDKASLLAEVIEHVKELKRQTTAIAAAAAAGDYHGNDEDDDDAVVGRRSAAAQQLLPTEADELAVDAAVDAEGKLVVRASLCCEDRPDLIPDIARALAALRLRARRAEITTLGGRVRSVLLITADEQQQQHCDDVDDDEDGHRLLLRHGIDGAGAAADDDDECAASHRRHECIATVQEALRGVMDRRAAASSGDTSSSGGAVVAGGGGGSIKRQRMNYGVHEQCSV

SEQ ID NO: 16883 - protein, 215 aa, Oryza sativa
  Clone ID: TF_OSC900054j.C1.p12.fg
MVAARSGDDAELRLDVECLAAAPRWTRARRSHSEAERKRRERINAHLDTLRGLVPSASRMDKAALLGEVVRYVRKLRSEAAGSAAVVPGEGDEVVVEEEEVEVEGCSCDAGERQAARRVKASVCCADRPGLMSELGDAERSVSARAVRAEIATVGGRTRSDLELDVARTAAAGGGSNGASQLPALQAALRAVIMSQEELLAVESYKQRRFSADFA

SEQ ID NO: 16884 - protein, 937 aa, Oryza sativa
  Clone ID: TF_OSC400525j.C1.p17.np
MVSKRCSASTGNRIGRYRIKRRYILVLSSCQARVKNSKLLPYKDGVQNTAIVSINWADLVRSHQLGRYDTSSAYRSIGYRVLTSFYYLSLLVAESNQLSHEHTRTHERRLVLKYKSARRQGLTCRARVYSSSTHQPLGDNTSIIVPRDATYISKSTRDTLHPCARNDRSSCCAAGALRVCRTRSYYVVKHGSSAVGCIYIRRDAWELAPRHACTAMENDDDVEHPFYYFVHDDAAAGVDDHEELLASLGFLLPPPPPPPPPPQPDQGRSAFAAYQSTAAMASSSSSSESLSRRYHSSASNVHRRMHRFLRSIYDDAGDDAGATAEMQPAEGEQQQAAPSGGSARFRHIMRERLRRERLSQGYADLQAILPTGASSSKVLVKSLIRNYMSGGKNGGKNTIVAAAANYIRELEGRKGWLCAQNELLERTTPKPGAGMVVKVRAESELGSTVDVFEAVLRRLKAMDELQVTAIQSWFGAGGMWMDVAVESKRRAACTYAPPRWKLLRETRRVKRGRSSRIVKLIFLQLSVASTSANDSPIASRHAICTTEYSAFQLDRPPTSRPRHGHAPCSHRPSHARGHGRKIKGSQRFGAFLRGVRACSRLAGGARHVDAHVRTYVYARRYTVGSSNGPTDTCHVRADGAAVDRVRPIAAVSSSCPMHTARGVTPAGESGEGGGQGRDAARRRTHARTPGEQWTAGRHVISHMSPDIRAVVDRETQLLVCFRRRAVRYVLYRNEHDCSIVAGRQDDDGKRQRRDDNVCRGVVGRAGMQSGGGEYVDDNVCRGVVGRAGMQSGGGEYVRSSGGPSSPHRRGDRSSGGPSSPHRRGDAMDELDCGEHQLNGTTSVEIHLEDGPRVCACTALASALRLPALHPLPLHPAQVPIEVGGVEGGDGGKVEAGAVEDVTKEVKGEEEHEEVANGDKESVVDPFLDVEVGGDYRY

SEQ ID NO: 16885 - protein, 424 aa, Oryza sativa
  Clone ID: TF_OSC400283j.C1.p44.fg
MSSSSNNNKKMKAPLSFASSRQGSGGLSQISEDGIPDLTDSIHGAAHHHGRSEENVSTHDHVVRSFSSGGFSIGSWEDSNSIVFSTSTGKSGAHGNDDIIATLSNYESQLVAPREMAGVEKYLQMQHDQVPFRVRAKRGCATHPRSIAERERRTRISEKLRKLQALVPNMDKQTSTSDMLDLAVDHIKGLQSQLQIIRHYPENLQCWSGVATCMGPWKGRFTTLAGRSVLVQSVLFSIPVHESMAIGLPVWVIKAIDNKRRAFLWTALRAPLLGWPKGPSLADRLRHVRGIHFLCAGKWFFLWFAFQRRCWTADLIQKRGIDSHLGCPFCVQDLDTANHILFDCMFARWFQDWWSSFRACLPEHLYDSFDSLVFLVSWRLWKERNSRVFDSALSSISVVLEFIHSEGHMWSLAGVVAFGDLLGV

SEQ ID NO: 16886 - protein, 494 aa, Oryza sativa
  Clone ID: TF_OSC900117j.C1.p7.fg
MNQFVPDWSNMGDASRTLGEDDNLIELLWCNGHVVMQSQNHHRKLPPRPPEKAAAAAVQEDEAGLWFPFALADSLEKDIFSDLFYEAPVAATAEAAPAGPGAGADGEGKTCKGDAAMAEEERGGPGAASEAPRELMPPPKSTNASCSRQQTMSLADGGDNAGDLSELVRARRSSGGAARRKAEAGGGGGGASSSMLSAIGSSICGSNQVQVQQRTASEPGRRGAPPSAVGSANAIPCGGRDHGHGHEATTVASSSGRSNCCFGTTTTTEPTSTSNRSSKRKRLDTTEDSESPSEDAESESAALARKPPAKMTTARRSRAAEVHNLSERRRRDRINEKMRALQELIPHCNKTDKASMLDEAIEYLKSLQLQLQMMWMGSGMAPPVMFPGVHQYLPRMGVGMGAAAAAMPRMPFMAAPQPVVPTPPVNHLDLGVNHLQPPPTQGVGYYPLGAKAVQQQQNPPLHVPNGSIMPPPENAPNTGSGMGSFYFYFYFSSD

SEQ ID NO: 16887 - protein, 395 aa, Oryza sativa
  Clone ID: TF_OSC412646j.C1.p13.fg
MDGGRVGGDYISSLLSSSPRLDFGVPVLDAIVAPGGGGGGGDCGLDKLCGDPGFAERAARLSSFNNGGGGVGQRYGGAGAGLFGMPPPAPGDFAGGGSREASSVSDPASSAMKDAAANAKKRKSTAAAAAAAKGKGKEPPVGEEKESDGKRCKTGNGEKESSVKPKAEQAGSDSSVEDGGGGGQKQGKGKNAKPVEPPKDYVHVRARRGQATDSHSLAERVRRERISQRMKVLQDLVPGCNKVIGKALMLDEIINYVQSLQRQVEFLSMKLATVNPLDFSNLPTLLQKDMFQACGPSASSVFSLESSNSAFRFAEQGDVFQQFAQNSMESQCTLNQLDLALSQATNAAQYAFQDGTAGANLQQRNFWEDDLQSVFHIENGQSQENGVSAPNFHGW

SEQ ID NO: 16888 - protein, 236 aa, Oryza sativa
  Clone ID: TF_OSC406614j.C1.p6.fg
MASPEGSTWVFDCPLMDDLAAAAGFDAAPAGGFYWTTPAPPQAALQPPPPQQQPVAPATAAPNACPRSESGTRPSSKACREKVRRDKLNERFLELGAVLEPGKTPKMDKSSILNDAIRVMAELRSEAQKLKESNESLQEKIKELKAEKNELRDEKQKLKAEKESLEQQIKFLNARPSFVPHPPVIPASAFTAPQGQAAGQKLMMPVIGYPGFPMWQFMPPSDVDTTDDTKSCPPVA

SEQ ID NO: 16889 - protein, 256 aa, Oryza sativa
  Clone ID: TF_OSC32412j.C1.p18.fg
MDPAPSLAAELWRPHHHRHHFEASSVVTDQGSGSRGGGGSGRRRPRSDAGPEDDDLSKVVSTSAASGGGGGGGQDSDAPEAKRLKPMKSSDKNDSLRTEAGTDSGNSSKAADKNATPPEPPKQDYIHVRARRGQATDSHSLAERARREKISERMKILQDLVPGCNKVIGKASVLDEIINYIQSLQHQVEFLSMKLEAVNSHMINGIVAFPSKDFGAQPYNTAAGLTFDPQTTREFAQGSTSEWLHMQIGNAYERVT

SEQ ID NO: 16890 - protein, 362 aa, Oryza sativa
  Clone ID: TF_OSC400939j.C1.p8.fg
MALDTLCSAGGDVLIYDTFNASAAAAAAVVPPASFLFGNNNAGGAAGTETRVQVAAGAVPEVDQLLKQAQQPGRRKRRRRARSCKSREDAESQRMTHIAVERNRRRQMNEYLAVLRSLMPESYVHRGDQASIVGGAIDFVKELEQLLQSLEAQKRTLLMQPPPPPQQQREPKCDAADSTSAADQETPAAAAAAAAADGPPFARFFTYPQYVWCHNPAQDGGGGGGAAAENRAGVADIEVSLVETHASIRVMAARRPGQLLKMVAGLQALRLTVLHLNVTALGSLALYSISVKRFHGGKAIASLGPLGVFFLCALYLWYSTTVVEEGCGMATVDDIAAAVHHVLCIIDAEAASQMLLAGEASG

SEQ ID NO: 16891 - protein, 484 aa, Oryza sativa
  Clone ID: TF_OSC401130j.C1.p60.fg
MFRSAVAVSQLATTTTVWMDRGFNEMILSESVWNGGGGGGDGDGGAVVLPPEVGGVNAVDGSGMTMLERLVLDEALAAAILELQGIQAPGCGGGGGKVAVVPPPTAGDGGVEAAVAFAAMATGTPAYADVDADVLQRQRQHHHRHQGAMGMAAEYDVAPATPAVTLSAVPPPPPPPAFATAAASVDGGGAMDATVFSGIGNDDVVDAVSATVAMTTATATTSQCERVRGGGGGGGCGRKQRRPGRKRKAAEPTAAAAAADMSSQDNPLCSLLASNTAGADGGIQIAFSTSAPASKRAKPSLSSSSSSISFDGRGPGGNCGGGGGDDPLYEPDTEALAQVKEMIYRAAAMRPVTLGAEDAGERPRRRNVRISSDPQTVAARQRRERISERLRVLQKLVPGGAKMDTASMLDEAANYLRFLKSQIRELQTLDRRNYPNAAMSINTAAATTMATSSSPTYNNSNAAMPAFAFPETLGCGGGGVEQLI

SEQ ID NO: 16892 - protein, 291 aa, Oryza sativa
  Clone ID: TF_OSC29597j.C1.p1.np
LQSPSPQTHHQYATPPSPSSSSFRSFSAGTTTTTTSRDDNSSLMLAAAAASCHHQTTEVSSQILLPRPDKQHGGAAAAMAPPPPPAFRPYSRYLGPRRPPPPAAAGQRAFKKAISVLSPYSRYLGPRRPPPPAAAGQRAFKKAISVLSKIHAARLAQYYQIMEMAARASPAATAGGGGGENQQLQLQHVLSERKRREKLNDSFKALRDVLPPATKKDKASVLMRAKDYVNVLKARIAELEEKNRKLSESQQLHAGDGDGERDDGPDDDKIGQHEQISGRSGQFTEQVSRAS

SEQ ID NO: 16893 - protein, 360 aa, Oryza sativa
  Clone ID: TF_OSC29597j.C1.p3.hg
MEEHDHQYATPPSPSSSSFRSFSAGTTTTTTSRDDNSSLMLAAAAASCHHQTTEVSSQILLPRPGQAARRSSGGHGAAAAATAFRPYSRYLGPKKHLLRRPGAATTATGGGGGQRAFKKAISVLSKIHAARLAQYYQIMEMAARASPAATAGGGGGENQQLQLQHVLSERKRREKLNDSFKALRDVLPPATKKDKASVLMRAKDYVNVLKARIAELEEKNRKLSESQQLHAGDGDGERDDGPDDDKIEVNTSRSAADQGSSPNKCQELHLKIVLGSSSGCSAMDAVAGILQGLNEKRDVSLLATGHNSSSSSSSGRRRLLPRAKSSQQPASSSCDEEILKESVVKDDSPAAVKDVMQSET

SEQ ID NO: 16894 - protein, 223 aa, Oryza sativa
  Clone ID: TF_OSC412252j.C1.p6.fg
MVTDGECSAAAVRKGGSPAVRSHSEAERKRRQRINAHLATLRTLVPSASRMDKAALLGEVVRHVRELRCRADDATEGADVVVPGEGDEVGVEDEDDDEGERDEGCYVVGGGDRRWRRRVRAWVCCADRPGLMSDLGRAVRSVSARPVRAEVATVGGRTRSVLELDVVVASDAADNDRAVALSALRAALRTVLLNREELLAAAAAAATDGYKRPRFSPRCSSLT

SEQ ID NO: 16895 - protein, 312 aa, Oryza sativa
  Clone ID: TF_OSC401035j.C1.p20.fg
MELLLPTAAASAPPPPPAFPADPHLVDRAARFSAFASPSPPSPPPPPPPPPSSSSKRKPDPASKGKAAAKKGKTAASGEDGGDGGEDEKPAYVHVRARRGQATDSHSLAERARREKINARMELLKELVPGCTVSVRSKGTLGVQQRVMPSVGVQQQQHVVAPFFISKTEVSGTALVLDEIINHVQSLQRQVEYLSMRLAAVNPRVDFGGLDNFLTTECGRITGLNYKNGMDLEQVTWPDMGVHGARNLMQLQQQFWHGDLAHPLQPPSQWEKRTDTNPPVFSNSSSSLFGYDLASSALIGPQLLSLSLFQSV

SEQ ID NO: 16896 - protein, 393 aa, Oryza sativa
  Clone ID: TF_OSC400044j.C1.p26.fg
METFGWAGGGQLMHHDDIYLPRSVGCGRPFELDDAFLGACFGAQLQCDGGVGGGDGGGCLQGTSGFGAVAGDPLGLLCSGDVFASVAEGAGGAHDDGLLDAALAFSRNQLGGAACDGSDGGAVSNGAMLSSYSGTTGGNISSGESNNYSGGGGGYDAEVVSPTSTMSAATQSLHPKRKLYDDHHHPAGIAAAAAAPPLAPCPRPTTGAVAAKRRASTSATSITFGHQPHHHHAGATTAGYEPDMEAMAQVKEMIYRAAAMRPVHLGTEAAADKPRRKNVRISSDPQTVAARLRRERVSDRLRVLQKLVPGGNKMDTASMLDEAASYLKFLKSQVQKLETLGTTTTTSKLPQQYYSGNINSSNNHHGFLGFAANNNTISAGYANSNAGNATKLL

SEQ ID NO: 16897 - protein, 654 aa, Oryza sativa
  Clone ID: TF_OSC401892j.C1.p33.fg
MPGSREMSIISGGMWSDGNDFAELLWENGQAVVHGRKKHPQPAFPPFGFFGGTGGGGGGSSSRAQERQPGGIDAFAKVGGGFGALGMAPAVHDFASGFGATTQDNGDDDTVPWIHYPIIDDEDAAAPAALAAADYGSDFFSELQAAAAAAAAAAPPTDLASLPASNHNGATNNRNAPVATTTTREPSKESHGGLSVPTTRAEPQPQPQLAAAKLPRSSGSGGGEGVMNFSLFSRPAVLARATLESAQRTQGTDNKASNVTASNRVESTVVQTASGPRSAPAFADQRAAAWPPQPKEMPFASTAAAPMAPAVNLHHEMGRDRAGRTMPVHKTEARKAPEATVATSSVCSGNGAGSDELWRQQKRKCQAQAECSASQDDDLDDEPGVLRKSGTRSTKRSRTAEVHNLSERRRRDRINEKMRALQELIPNCNKACYVLQIDKASMLDEAIEYLKTLQLQVQMMSMGTGLCIPPMLLPTAMQHLQIPPMAHFPHLGMGLGYGMGVFDMSNTGALQMPPMPGAHFPCPMIPGASPQGLGIPGTSTMPMFGVPGQTIPSSASSVPPFASLAGLPVRPSGVPQVSGAMANMVQDQQQGIANQQQQCLNKEAIQGANPGDSQMQIIMQNVPVLKRSMAEEFHMVEDATRLQAVILDFQCSFL

SEQ ID NO: 16898 - protein, 566 aa, Oryza sativa
  Clone ID: TF_OSC413680j.C1.p2.fg
MGLQGNKATHDFLSLYAAAATATDYSPLPRHPDSKPSAPAPPPAQDFFLKTHDFLPQVEKRADQTPPPPPPPPPHAAVTAEKQLLHQHALAAAGAFTINHAVAAAATAVKQEPPFAPWCQPVAAVDPRGHQWSLPFAARAVAVASSRPQQQQQQPPPPERKGGGGFMDAGSRSSGGAGFDDDDGHAARREVSSSLKELTVRVEGKGGSCSGSAGTDQMPNTPRSKHSATEQRRRSKINDRFQLLRDLLPHNDQKRDKASFLLEVIEYIRFLQEKVQKYEVSYPEWNQENAKVVPWTNIYFRSSWKNAQNKGQVPADHSPDPPELLKNGSPYMFPFTGNSDNNNAVETAAASGAQDQAETDPMSRVSYRSVDTPSPNNVADKVTSQPHAQLVRPSPAENHTVNCDKLNNSDLAIDEGTISLSSQYSQELLNKLNHALENSGIDLSQASISVQINLGKRAMKRSTPAATSTSKVGFMSRIDTKSHYIMFVVIEIGAGNGCYTWSSLIRHLIVKQWAVSLGWVMALKNIDKPQSDTNQITADGLLLKTPDIQPFFAPNCVRGAPRFYVY

SEQ ID NO: 16899 - protein, 372 aa, Oryza sativa
  Clone ID: TF_OSC409193j.C1.p3.fg
MAQCGGGDVSRHRKGHLDTVESLCQGLLDDVMLDDDKCRAMFGYLQEWQDLASMCYGSLGGEPPLAPEASNGSGSSGGGGSFRKRRPDDAKGESNSICKRQRGKQQQQQQPCHPDQMAAAVGKGRPERARPGAKKKAEVASPKDSPATSASTVTAGQKTDYIHVRARRGQATDSHSLAERVRRERISERMRYLQELVPGCNKVTGKAGMLDEIINYVQSLQKQVEFLSMKIAASNPVVNFNIVEDLFGRQLSQAACNPAALPAMALPMAQVEPSCLQMSPLQQMQTSAGSSGYGLEMVVSNQYSPPGGPMSVPAGASVEPCLNVNGAAGWDIGSHGLFSGFDAPFQSVQSDCLLDNLKMEMSRSKKASDLRI

SEQ ID NO: 16900 - protein, 386 aa, Oryza sativa
  Clone ID: TF_OSC413853j.C1.p5.fg
MAFMNRQDPEASGFFSDDDSGQTAAIAAAAAMENEDFSYMLREFDYYTSSEDLFELMWQGGGGGGASSFDQPPPPVSYHRLSPPPPAMGTTTTTLLPEQPLVDDHHLPAAAAAPPSEEEMAAWLYPIVSGHEVAGGGWRSPEAQDDRRAAPAPEKKQMEKMPAAASPTTTMNKDETSDDSGERKKKKASSAAGKSKQASPRGCRSSQPYRKSGDSIDELFTKFHRRRFKITERFRTLQRLVPGCDKSNQASTLDQTIQYMKSLQHQLKAMSVVGSPPALLYPAAVHPQSYMHPPPPPPPVTMPMHPGMVLAAPPPGAAPPPGPPAMVPFGAMLPYPPYPAVLLPPAAATLYGRPPAPAPGVAARRHGSSGGGRISKSSSSSLCKKL

SEQ ID NO: 16901 - protein, 253 aa, Oryza sativa
  Clone ID: TF_OSC400346j.C1.p17.fg
MSGTPADGGGGGGGGGGGSGDDWFLDCGILEDLPAAACGAFPWDASPSCSNPSVEVSSYVNTTSYVLKEPGSNKRVRSGSCGRPTSKASREKIRRDKMNDRFLELGTTLEPGKPVKSDKAAILSDATRMVIQLRAEAKQLKDTNESLEDKIKELKAEKDELRDEKQKLKVEKETLEQQVKILTATPAYMPHPTLMPAPYPQAPLAPFHHAQGQAAGQKLMMPFVGYPGYPMWQFMPPSEVDTSKDSEACPPVA

SEQ ID NO: 16902 - protein, 475 aa, Oryza sativa
  Clone ID: TF_OSC101884j.C1.p4.fg
MDEVWCSLDSMPADIAAGIHQPPPPDLHDPSFWPAFADCAASFIAGGGGDNACFDELMAGGSSGDTRMVAMDDGDDGSGFLVGDAEAEHLMLSSSSPSSLSSGRSLSIDSAGSMSSFSLDAAAALAMSTLAVPHPYPPPVAHGMFASGDGGGGGGGAVDDHEDAIMRAMMAVISSASASPSSSGGSASSPTPFSRDSGAHHQPAGQPAMAAPQQPRGGNGGHVVVKSSSSSGGLAVPMDQKPGGGGRGRQQEEAAAASATNSSQLYHMMSERKRREKLNDSFHTLRSLLPPCSKLYTVFEWLPGNNLFHGNGSDNKDKTTVLINAAKYLKSLETEITELEGTNTKLEKHIAGGGGAADAAMRARRAQQRAKVQISKAADSQSQQLVSLTVMVMVECDVVELVLHILECLRWMKEISVLSVYADTYSPQLLLKAIANIKLQIVGGDWNEASFHEAMTKAANDATISCAPLAITAAQ

SEQ ID NO: 16903 - protein, 365 aa, Oryza sativa
  Clone ID: TF_OSC400608j.C1.p9.fg
MDANGGNGFGVESNASAVHGGMAMAWQWHGGQMSGGSSCAAAPPPVQQPAMDSLAWSSTVSPSTGAATAASGAGFLLPPAAVRGGFGSFPVNSGGIVEPAGDCSSESKKRRSDEIAGTDHANASNALADSGNETECSKDVNGEVIGPPATAAAGGKSKGKGAKDAGEAQKEGYSHVRARKGQATNNHSLAERLRREKISERMKLLQDLVPGCSKVTGKALMLDEIINYVQSLQRQVEFLSMKLSAVNPRIDLDIESLVNNSKDVLRFPGQPSSAPMGFSFSTEMMPGLQLSRPGILQGGVHGMINPDVFTSLMQKQQQNDKGAFREPQMHQTLDGSFRNTAQMPYPQVMSSEELSIRQDQDGFHM

SEQ ID NO: 16904 - protein, 315 aa, Oryza sativa
  Clone ID: TF_OSC102356j.C1.p4.fg
MGLDRCESEVGVRCPRLIRSDAGGDLAALGSSESEQPTRPARPRGKRSRAAEVHNLSEKRRRSRINEKMKALQSLIPNSSKTDKASMLDDAIEYLKQLQLQVQMLSMRNGLYLPPVNLSGAPEHLPIPQMSAALDQNSAKASDPSVVLQPVNQTSGALLPFELASQHKPLFLPGVPNATALEPRFLVESSRSNLQSLRFTEPAEMIYPDEMMLKHRLTSASESTIVPGTDEKSVRQNTYMMNADRFDRYALSKDQLQHIMPKNTESVLDMPHLQRILTKVLIVSDYKLTIQLPILDRLQTSDTKVRVEGRIKVNP

SEQ ID NO: 16905 - protein, 272 aa, Oryza sativa
  Clone ID: TF_OSC404982j.C1.p1.fg
MVLSKLRRRLRSVTPGERTPTATADDRDARAQRSGGGDDEDATAAPPPPTSSQLHHMISERRRRERLNESFEHLRGLLPPGSKKDKATVLAKTLEYMNLLIAQISELEAKNRALQTQIHQRANGSSSSRSSMIRTVNEVHHHHNHQWLAVAAAAGGSPERVQVHVIGGGDHDGGASASSSSSAPEVTVRVAVRAPERGGADVSELVLRVLALLKAMGGFTVVAVDARQPGGGGGNGVAQASLTLRATVRMLTLLKRMFRAKNHSSSDQIIRL

SEQ ID NO: 16906 - protein, 373 aa, Oryza sativa
  Clone ID: TF_OSC400679j.C1.p12.fg
MSTLVDALCAPCSDTALIYDTFNASAAASFLFDNAAAFCDADILGATATGEKEATSSAAAAAAEAAPPRKKRRRRAKSCKSREETETQRMTHIAVERNRRRQMNEYLAILRSLMPEPYVQRGDQASIVGGAIEFVKELEQQLQSLEAQKRTLLPHHKARCDDATPMHNASGSNVGAGGCMEPTTTTSNCSSSVTEDAPSADAPPFAQFFAYPQYVWCHSPRDSTTTTTAASASASASASSSSPATVAAALQSEHRSGLADIEVSLVETHASVRVMSPRRPGQLLKMIAGLQALRLTVLHLNVTTLDSLVLYTLSVKVEEGCSLTTVDDIAAAVHHVLCIVDAEAAASEHLLAAGQLATTATAVAKRELATYMY

SEQ ID NO: 16907 - protein, 310 aa, Oryza sativa
  Clone ID: TF_OSC400284j.C1.p3.fg
MAVDWIWERRRREEEYNHQMSQDELQQPGQVQWTPAPEEKSEIAVQFFTAPYPCQNGQLDHGEHHALGGIGACSSVHWQPDRGTCYWPPPLSGDGGGGSGSGSSGTGEGSYIGERCYYVGEPDVPIGLNLLVGDNDGAGVVLRDAAPQAKRRTQAGHGGDLGRQKKKARVSDKRNQESMQSGSCSDNESNCSQVNRRKVDRVAGGGNGKVPARRRSATIAQSLYARRRRERINGRLRILQKLVPNGTKVDISTMLEEAVHYVKFLQLQIKVEVQIVCHDQMLSSDELWMYAPIVYNGMDLGIDLNISPPR

SEQ ID NO: 16908 - protein, 362 aa, Oryza sativa
  Clone ID: TF_OSC401091j.C1.p1.fg
MWEAVGGGDGTALLPWPGSAAAAPLYMPPAAAAAAPFAAGEQLPVEQPFYFDGGGGVAGHNHHPHHHQYGMEAPPPMTMMQMGGGGSSSSRMVVSGLLGTLQAELGRMTAKEIMDAKALAASRSHSEAERRRRQRINGHLARLRSLLPNTTKFRKIHAFQSNNVHIFIMTDKASLLAEVIEHVKELKRQTSAMMEDGAAGGEAAAAPVVLLPTEDDELEVDAAADEGGRLVARASLCCEDRADLIPGIARALAALRLRARRAEIATLGGRVRSVLLIAAVEEEDPDEAGNDDDGEHGYGVAASHRRHELVASIHEALRGVMNRKAASSDTSSSGAGGGGGSIKRQRMISAHDQQGSFNSSGW

SEQ ID NO: 16909 - protein, 236 aa, Oryza sativa
  Clone ID: TF_OSC401731j.C1.p31.fg
MDGGGDPVDEFLIGGGGEDGDLGVFCDGVPTLPCDGGLGIDDVSGDTCCLDQSVLGKRGRDESSSSGPKSKACREKIRRDRLNDRFLELSSVINPDKQAKLDKANILSDAARLLAELRGEAEKLKESNEKLRETIKDLKVEKNELRDEKVTLKAEKERLEQQVKALSVAPTGFVPHLPHPAAFHPAAFPPFIPPYQALGNKNAPTPAAFQGMAMWQWLPPTAVDTTQDPKLWPPNA

SEQ ID NO: 16910 - protein, 447 aa, Oryza sativa
  Clone ID: TF_OSC26607j.C1.p1.fg
MDAGATARSSSSSAMMMNQKKPLLSDGELVELLWQDGGVVGHAQTRHRSSDVLARSGVTGEEETASAWFADGGGGGGGDDDALGLGMGRDIYSQLWHSFANVDGHAAGALALATPTPTPRAAARSDDVSSRLDEADLSICGSNAVVAPALPADDDDDIDAAAPREEEEEEEEGPGAARAAGASSSGGSGSGSGSYPLFKRGREELVDSLSEVADETRPSKRPAAKRRTRAAEVHNLSERRRRDRINEKLRALQELVPHCNKTDKASILDEAIEYLKSLQMQVQIMWMTTGIVPMMFPGTHQLMPPMGMGLNTACMPGAQAQGLNQMQRTTYYMNNSLPNQMPQIPSPAMNAPSVPDDMQNDNRIRGPRNPFLHCNDTLTATAQVDYYVKFHHYRSFRLQFLFILQYQFFSGARHRQYVKNIVAVWTQLEPASQKLHKNTTVTVSLFF

SEQ ID NO: 16911 - protein, 198 aa, Oryza sativa
  unsure (1)..(198): unsure at all Xaa locations
  Clone ID: TF_OSC26607j.C1.p1.np
TRPSKRPAAKRRTRAAEVHNLSERRRRDRINEKLRALQELVPHCNKTDKASILDEAIEYLKSLQMQVQMPPMGMGLNTACMPGAQAQGLNQMQRTTYYMNNSLPNQMPQIPSPAMNAPSPWSHQSIKCPFSFKLYNIIEYVCRIIGRLVGRKKYMPPQXVQIVQPHPISSLSGDIAAPPAGRVLRPAFIGGMELPTFG

SEQ ID NO: 16912 - protein, 173 aa, Oryza sativa
  Clone ID: TF_OSC418437j.C1.p9.np
VFLVGFIWAVHADISQQQQHLHVSISNSTAKICILFLKKKSLAPATATPRRGLGGRVQEGARLLFSSSQQQHARTHHTRSSRAMAAAMATRPSKRPAAKRRTRAAEVHNLSERRRRDRINEKLRALQELVPHCNKTDKASILDEAIEYLKSLQMQVQIMWMTTGVPMMFPGTQ

SEQ ID NO: 16913 - protein, 567 aa, Oryza sativa
  Clone ID: TF_OSC400235j.C1.p1.fg
MASAPPVQEEPLQPGTNHFRSLLAAAVRSISWSYAIFWSISTSCPGVLTWNDGFYNGVVKTRKISNSADLTAGQLVVQRSEQLRELYYSLLSGECDHRARRPIAALSPEDLADTEWYYVVCMTYSFQPGQGLPGKSYASNASVWLRNAQSADSKTFLRSLLAKTIICIPFTSGVLELGTTDPTFIIAYACHNMEQVLEDPKLVNRIVAYFQELQFPICLEVLMSTSPSPNETEDADIVSEGLITHNAIEEGQMVVSDECVSNANRDPITMEIDELYSIYEDLDLDMDLDLDTVRFLEDNGWPVNPSSFQLVPASSTEAVAAAAAANDVDGVANSQVSCFMAWKSAKSNEMAVPVVTGIESQKLLKKVVDCGARMSTGRGSRAALTQESGIKNHVISERRRREKLNEMFLILKSIVPSIHKVDKASILEETIAYLKVLEKRVKELESSSEPSHQRATETGQQRRCEITGKELVSEIGVSGGGDAGREHHHVNVTVTDKVVLLEVQCRWKELVMTRVFDAIKSLCLDVLSVQASAPDGLLGLKIQAKFACSGSVAPGMISEALQKAIGG

SEQ ID NO: 16914 - protein, 473 aa, Oryza sativa
  Clone ID: TF_OSC400431j.C1.p63.fg
MEDCSSWIHGYANANATAGNNGFMCGYAASCSPVEFQQQQQLVGSQIEHHLNQASLICNLFDQETMHKIKEILGFNLVGVAFYYGMQISMQMGMDDESAVYDGASMVDVLLMASSSPHHHAGAGSFQYSSPTSSSASFRSASVSCSPESSAAATTHFLGPPAPSAAAAGFHYPEVSSQAPLPLPLPPYEPQHGQYTTVLSPPPPAPELPATTTPATGGAFRRYARHLRPRRLPKPGGCGQRMFKTAMSVLTKMHVAATYNRQYYYQQAAAAAASASAAEAPPSGNQLQHMISERKRREKLNDSFLALKAVLPPGSKKDKTSILIRAREYVKSLESKLSELEEKNRELEARLASRPAAAAKNDKGETAAAPAPEAGDETKRKDLVEIEVTTSGGGAGAADAAAAAGGDQETCTLNVDLRGGGGGGGMSTTDVVLRTLQCLREQIGDGASLVAMSTSAGSGGRPPRANLTLQLKV

SEQ ID NO: 16915 - protein, 226 aa, Oryza sativa
  Clone ID: TF_OSC400099j.C1.p6.fg
MMSFPYSSGDLGEATTAAAAAVDMITLDQMFRDYDASTGDDLFELVWESCGGGEIDSGAGEVQPAGVPCCRRLLPGSSPEPTSEDEMAAWLSTIVTGSGGGGGDDVAAGGDHQDPAVKKPDGEPLTEKMDKKLPTRTEERRRVKHKARRNPGYAETHGLTEKRRRSRINEKFKMLQRLVPGCDKCSQSSTLDRTIHYMKSLQQQLQVDPPAAIYNRISVERIDMII

SEQ ID NO: 16916 - protein, 799 aa, Oryza sativa
  Clone ID: TF_OSC413939j.C1.p3.gm
MGHSNVWNSHPKNYGPGSRVCRVCGNPHGLIRKYGLMCCRQCFRSNAKDIGFIKAAACSGSLAGVGAQATMDLSLRGEAEAAPVYRPNSKHFTIEIHHGGFFCGMGVNRSYVDGKVSWFDYVNSREWGSSLHLLDLVAMLGYAAGPRLEVYWLLLGKRLADGLRIVDNEVEINVMNSVCNRVKNFVLYLDHSDHVSGSNHEDIVLSLISQLPKVMSPVRGCQQKEHGNQGGSNVGEPVCVVVDEEAEEIEDHGDYDSNDSEADDLDFVDIDYELQDDDDDLFEDNVDGDVLDQGLAPKKFNHKKVAGSKLKGKEVLREEGSDEESSDEEILELPDNTDEINLRFKSFNPEDMNNPVFKVGMVFPSLELLRKAITEYSLKNRVDIKMPRNDITRIKAHCAEGCPWNMADCKMTLPSFAKTVQKEWNLTPSRSKLARARRLALKEIYGDEVAQYNMLWDYGHELRRPIICLDGCHIKTKFGGQLLTAVGIDPNNCIFPIAMAVVEVESLTTWSWFLQTLKDDLGIVNTYIVDVMTKHCDCRRWSSLLAEVHDNMLDHMLLETPWLLAASSLNLADSGRNQPVSDRYLLVPHFAAAHRPLVASPASATNPRTILLAYKAIERFEYESIAFDVVFLHETEFIGLVITGNKRMFPMDEHFEQQQKKPKKKTRTSRSVSSSSTITDYETSSELVNPSCSSGSSVGEDSIAATDGSVVLKQSDNSRGHKQCSKDTQSLYAKRRRERINERLRILQQLVPNGTKVDISTMLEEAVQYVKFLQLQIKAKKTPPSPHLAALPPLPLRQI

SEQ ID NO: 16917 - protein, 187 aa, Oryza sativa
  unsure (1)..(187): unsure at all Xaa locations
  Clone ID: TF_OSC5815j.C1.p1.np
HGKGSNNKIXEMPDTAAGSSHARRAASPSSRRRRRPVASTSYRRATGRAATLLVGSGRRPAGDEDTKPVAGDAGHGGNGKGKVLDAAGEPPKDYIHVRARRGQATDSHSLAERVRREKVRREKISERMKLLQDLVPGCNKVTGKAVMLDEIINYVQSLQRQVEFLSMKLSTVNPQLDFDVDNFIPKD

SEQ ID NO: 16918 - protein, 348 aa, Oryza sativa
  Clone ID: TF_OSC401748j.C1.p10.fg
MELDEQAFLEELFSLRRDAWEYNAMGDFFSPACAAMDGFQERHQSTTTVSVLPTFTASYEQPPPAPAAGFDCLSEVYGNAAAAFGPNAGGGGGEYGGGGDMGFLDVVEPKASMVVDGGGLGVCKVEPGLQAEGGFSAAAAAPASKKKRVEGMPSKNLMAERRRRKRLNDRLSMLRSVVPKISKMDRTSILGDTIDYMKELLERIRQLQEEIEEQQQQETPGVLSVFRELNPNEMLARNTPKVAASIHCWIYNEEDDGINGVCEVQFDVERKEGGDTRVEIYCAAKPGLLLSTVSTLETLGLDIQQCVVSCFNDFGMHASCSEMQRERMSADMIKQELFKNAGYGGGCL

SEQ ID NO: 16919 - protein, 363 aa, Oryza sativa
  Clone ID: TF_OSC400265j.C1.p4.fg
MALEAVVFSEGYYFGCGGAMAAEAAAGGAWSWSHGYGGGVDQGKGAMELVVDDGVVNAFWDGGGGGASSSPVMAAVSGFIEEPDGGNSSVADAAPPPEHGGASVVGRDGSAAAPAAAAGRRKRRRARTVKNREEVESQRMTHIAVERNRRKQMNEYLAVLRSLMPASYVQRGDQASIIGGAINYVKEMEQLLQSLEAHRHARRARTDAAAALPFAGFFTFPQYSMSAVPTTTTTTVAAAATENGNAVAGAGAGDDADADVSGSKPSSVADIEVTMVESHANLKVLSRRRPRQLLRMVAGLQHHRLAVLHLNVASAGHMALYSLSLKVEEDCQLTSVDDIAAAVHGIVETIEQEQQQQQKQSCS

SEQ ID NO: 16920 - protein, 375 aa, Oryza sativa
  Clone ID: TF_OSC900037j.C1.p3.np
YENQGYVVQEVYVLSNQNYCCSEDDGLVELLWCNGHVVMQSQAPRKPPRPEKTAAAAAAMAEDESASWFQYPVDDLEKDLFTELFGEMTAAGGGGGDVRRAACKEERGAVAAFQSRMMPPPWPARGKAEFGDVDDVCGVSEVTVGESSMLTIGSSICGSNPAGVSEVTVGESSMLTIGSSICGSNPAGGEREGRRRHRRRRQKGARTATVASSSMRSRSCTAKAEPRDVAAGRQAEAARRRRHAGSPSEDVEFESAAATCSPAQKTTTAKRRRAAEVHNLSERRRRDRINEKMKALQELIPHCNKTDKASMLDEAIEYLKSLQLQLQMMWMGGMMWMGGGMAPPAVMFPAASTSIVPQRMLQGLKFRPKYPKFPV

SEQ ID NO: 16921 - protein, 663 aa, Oryza sativa
  Clone ID: TF_OSC400964j.C1.p82.fg
MTEILSPTKTILLADCSSKKAHAFNPRKGGGCKDAKGISLPCQPCDSKVFSHPLANRNRNGLVINCVLRQLQQQQQQLHKIKSAARQQFIPLSPLPLFTHLLPVQVLLFHSFTVPPLFLALSRTRKAPAFTLSPLAFPHPRRSGIWWLLASRVSFAGLGRSWELGNSGGLVGFRGELRQIFEMNCGPPDQLPPATAPSCFLNLNWDQSMDAAAGGHLDPALSSMVSSPASNSTGALHGISPQPHYGGGTPLSSPPKLNLSMMGQFHHYAAPPQVGGGGGGGGGLPILENLMPMGHLDQFLADPGFAERAARLSGFDARGGGGGGGYGGAGPAQFGLPDAGAAGASKEMELGNTRDESSVSDPAPGGAEIPPKGASDGNARKRKASGKGKGKDSPMSTSAAKEDSSGKRCKSTEESNAAAEENSGKGKAAQSNSENGGGKKQGKDSSSKPPEPPKDYIHVRARRGEATDSHSLAERVRREKISQRMKLLQDLVPGCNKVVGKAVMLDEIINYVQSLQRQVEFLSMKLATVNPQLDFNNLPNLLAKDMHQSCSPLQSSHFPLETSGAPLPYINQPQQGNPLGCGLTNGMDNQGSMHPLDPAFCRPMGSHHPFLNGVSDAASQVGAFWQDDLQSVVQMDMGQSQEIATSSNSYNGSLQTVHMKMEL

SEQ ID NO: 16922 - protein, 323 aa, Oryza sativa
  Clone ID: TF_OSC27232j.C1.p1.fg
MGAHGDHRHHHHHQEAGVLVDEEEEEVIEQACGGPTSGVVEQEVGGDGGGVCQDAAGMVFEATSSVGSVSATMGPPPIMCWPPPAQPVHGAIHHHHNLGGGGGQQSPFFPLLPPLPPQPPPPPPFFADFYARRALQYAYDHSGGASSSSDPLGLGGLYMGHHGSHVAGMMMPPPFAPSPFGDLGRMTAQEIMDAKALAASKSHSEAERRRRERINAHLARLRSLLPNTTKTDKASLLAEVIQHVKELKRQTSEITEEACPLPTESDELTVDASSDEDGRLVVRASLCCDDRTDLLPDLIRALKALRLRALKAEITTLGGRVKN

SEQ ID NO: 16923 - protein, 353 aa, Oryza sativa
  Clone ID: TF_OSC9960j.C1.p2.fg
MEDSSLFMEWAMETLQHLHPLPATPPPAGGGYAGDNATFPSLQALRESSVSQNGMAPPEPTAHEGHRASNSWSSGDTDSVSGGGGGAVMEHDGWSTSPNSVRCAAGGGGGGGGGGLWPVSWNFSSAMTQPCNDQATPSNPPTTTRARYGGGGVRYLPAAVSPSPSAQTRRASSKGNGGGGSGSSSAAPYAQEHIIAERKRREKINQRFIELSTVIPGLKKMDKATILSDAVRYVKEMQEKLSELEQHQNGGVESAILLKKPCIATSSSDGGCPAASSAVAGSSSSGTARSSLPEIEAKISHGNVMVRIHGENNGKGSLVRLLAAVEGLHLGITHTNVMPFSACTAIITIMAKE

SEQ ID NO: 16924 - protein, 190 aa, Oryza sativa
  Clone ID: TF_OSC17447j.C1.p1.fg
MSHIAVERNRRRQMNDHLKVLRSLTPAFYIKRGDQASIIGGAIDFIKELQTLLQSLEAQKKRRQQPQAHLISPASISASGGGSPSPTPSPRSLITSCSPTAAAGSSAGSSSSISPKDENKQQLQLVAELAACCNSPMADVEARISGANVLLRTLSRRAPPVRIIALLESLHLEVLHLNITTMDDTVLYSF

SEQ ID NO: 16925 - protein, 512 aa, Oryza sativa
  Clone ID: TF_OSC401546j.C1.p6.gm
MHAAHGGGGRQPVTILPISSSQLVVTGGDWPLLAYLEKALMALEAVVFPQEHLSCAAAMYAAPPSSLGCGVDMDEFEENGGVVLQEEAGVAVHGGGGGGAGGMMSLWVNAATCARSIAASGAVEEFWDERQYPVSSPPAAPTPAASGGGGGHAKAAARRRRRRPKVVKNKEEAESQRRNHIAVERNRRRQMNEYLAVLRSLMPPSYAQRGDQASIVAGAINFVKELEQLLQSLEAQKRRAEHAPPAPPFAGFFTFPQYSTTVGDNNAAGSGAADGEGGCGARPGAADIEVAMAESHANVRVLAPRRPRQLLRMVVALQCLGLTVLHLNVTTTADHLALYSFSLKMEDECRLSSVDEIAGAVNQMMSESEDEKSLSDEITDTSHLPWDPFWTRKCKYPSGGRSDNGWQRTEGWRAVGGASAGRRRGAAGGSEASAGRWVEQWGGRWKWSVGGAVGRATAGTRGGGRSERSGARRREIGETAGGREEHRAVGLPSSPSVIRGEEMGWKRGRSEQ

SEQ ID NO: 16926 - protein, 267 aa, Oryza sativa
  Clone ID: TF_OSC401369j.C1.p46.fg
MGSAPFGDAVAGGGLYEYQGYHGGFAGGHGLGQPAGRAPALDDGETEGMDASAAAAVAAMEMAKRNCGGGREEKAAMALKSHSEAERRRRERINAHLATLRTMVPCTDKMDKAALLAEVVGHVKKLKSAAARVGRRATVPSGADEVAVDEASATGGGGEGPLLLRATLSCDDRADLFVDVKRALQPLGLEVVGSEVTTLGGRVRLAFLVSCGSRGGAAAAAMASVRHALQSVLDKASSGFDFAPRAASLLGSKRRKVSTFESSSSSS

SEQ ID NO: 16927 - protein, 374 aa, Oryza sativa
  Clone ID: TF_OSC401762j.C1.p11.fg
MSQEGPNNHPQGTQETHDCPFTIATNTPLGSTKMGYSDSRKSDENNTSSKPASPVVSSDVVEIKETWENVVVADEEGEGGEDGFASDASESKSKSSSDEVDYELLDLLAGASEGCSGGNNNDEVKNFAYADHKMHVLRERERRKEMKNKFEILHALIPNLPEKTDKATIVEATINYIKNLQDKIHKMEMLKVEREHAIALATAATATAAASADTALQAPPPSEEENEEHDSVVAAATREMALADMVHAWEQQQEAAATGGSHGGHAVPPPPPAASLQTWTGPNMTASLTGDDGFITLSLPHQGGQKNLVAGAVSVLERHHIDVVTATVSASEQGDNLISLHCHLSPGSSSSQNLTPLDKFKLAMSELMLWVISV

SEQ ID NO: 16928 - protein, 266 aa, Oryza sativa
  Clone ID: TF_OSC413853j.C1.p7.fg
MAAWLYPIVGGHQVAAGGWLSPEAGDDRRAAPPAPEKKQMDNMPAVASPTMNKDEASDDSGERKKKKKKASSAAGKASRHRHAAGAHNLTEKRRRFKITERFRTLQRLVPGCDNKSNQASTLDQTIQYMKSLQHQLEATSAVGSPAAAVLYPAAVHPQSYMHPPAPPPPVAGAAAPVTMAPMPAGMVLAAAPPGAAPPPGPPATMMPFGAMLPYPPYPEVLLPPPPATLYGRPPAAAPSVAARRHGSTSGGGRISKSSSSSLRKEL

SEQ ID NO: 16929 - protein, 175 aa, Oryza sativa
  Clone ID: TF_OSC19716j.C1.p1.fg
VVQKKGNKNAQSKKAQKGACSRSSNQKESNGGGDGGNVQSSSTNYLSDDDSLSLEMTSCSNVSSASKKSSLSSPATGHGGAKARAGRGAATDPQSLYARKRRERINERLKILQNLIPNGTKVDISTMLEEAVHYVKFLQLQIKLLSSDDMWMFAPIAYNGVNVGLDLKISPPQQQ

SEQ ID NO: 16930 - protein, 324 aa, Oryza sativa
  Clone ID: TF_OSC900178j.C1.p3.fg
MEDSEAMAQLLGVQYFGNDQEQQQPAAAAPPAMYWPAHDAADQYYGSAPYCYMQQQQHYGCYDGGAMVAGGDFFVPEEQLVADPSFMVDLNLEFEDQHGGDAGGAGSSAAAAAAATKMTPACKRKVEDHKDESCTDNVARKKARSTAATVVQKKGNKNAQSKKAQKGACSRSSNQKESNGGGDGGNVQSSSTNYLSDDDSLSLEMTSCSNVSSASKKSSLSSPATGHGGAKARAGRGAATDPQSLYARKRRERINERLKILQNLIPNGTKVDISTMLEEAVHYVKFLQLQIKLLSSDDMWMFAPIAYNGVNVGLDLKISPPQQQ

SEQ ID NO: 16931 - protein, 303 aa, Oryza sativa
  Clone ID: TF_OSC417480j.C1.p2.fg
MTHNSSSSSSWDLDMSLGSHHHPLLFDQPPPPPPPPPPPPLPFHLHHHPLDPSPSSSLVPPPPHHHHHAHHLHHPLDLDQRRGHHDYGGGDQGGDEELRLQQEAAAGGGGGGQDGGGGGDQDADEELGAMKEMMYRIAAMQPVDIDPATIKKPRRRNVRISDDPQSVAARHRRERISERIRILQRLVPGGTKMDTASMLDEAIRYIKFLKRQVQELQHQPGPPPPPYPAGAAPAAGPSTSAVGPPGRPFLPLGGGGPMIDWVGLTRPVDIHGPTSSSSSSSMGGALGFGFGCGGGGQSSHGMH

SEQ ID NO: 16932 - protein, 303 aa, Oryza sativa
  Clone ID: TF_OSC417550j.C1.p1.fg
MTHNSSSSSSWDLDMSLGSHHHPLLFDQPPPPPPPPPPPPLPFHLHHHPLDPSPSSSLFPPPPHHHHHAHHLHHPLDLDQRRGHHDYGGGDQGGDEELRLQQEAAAGGGGGGQDGGGGGDQDADEELGAMKEMMYRIAAMQPVDIDPATIKKPRRRNVRISDDPQSVAARHRRERISERIRILQRLVPGGTKMDTASMLDEAIRYIKFLKRQVQELQHQPGPPPPPYPAGAAPAAGPSTSAVGPPGRPFLPLGGGGPMIDWVGLTRPVDIHGPTSSSSSSSMGGALGFGFGCGGGGQSSHGMH

SEQ ID NO: 16933 - protein, 399 aa, Oryza sativa
  Clone ID: TF_OSC400812j.C1.p6.fg
MYGSPVSKDLNLPVQPPAMSSSGLLRYRSAPSTLLAEFCDDFLPPAAAPRAASPDADNVFSRFLADHQIRDKSPPATAAAAAAAAHFPDDPTMATQHHHQQQMMFQHHPQQMASVEGLYRTVSSTGIDAATAAANAAGGGGGGLLRQSSSPAGFLNHLNMDNGYGSMLRAGMAAAGGGVGFRNGANAAAAADSPGGSGGRLKGQLSFSSRQGSLMSQISEMDSEELGGSSPEGAGGGGGGGGRGYLSGYPMSSGWEESSLMSDTNISGVKRQRDSSEPSQNGGGGGGLAHQFSLPKTSSEMAAIEKFLQFQDAVPCKIRAKRGCATHPRSIAERVRRTRISERIRKLQELVPNMDKQTNTADMLDLAVDYIKDLQKQVKGLNDSRANCTCSAKHQQYSG

SEQ ID NO: 16934 - protein, 236 aa, Oryza sativa
  Clone ID: TF_OSC900200j.C1.p12.fg
MDFDLFNSYPESQLDLMSTMLQLEQLTALSDQSLFMAAPTSPPVSPMGTPSPQFSPPPQMSVTTTTAGGGYQDQYNSMPATYGAGAGVHQLDFAMSSPGSDSGAPQGSSSSSSSEAMREMIFHIAALQPVEIDPEAVRPPKRRNVRISKDPQSVAARLRRERISERIRILQRLVPGGTKMDTASMLDEAIHYVKFLKSQVQSLERAAAATGAAAHRAAAFGAAYPAALPMQHHAPW

SEQ ID NO: 16935 - protein, 138 aa, Oryza sativa
  Clone ID: TF_OSC403397j.C1.p2.hg
HRIGADQDAHGNNVQAYASANTSRQRPPPSSNQLQHTMSERKRREKLNGSFVALQSRPYVLPPGSKLDKTSSILIGAREYVKFLESKLSELEEKNRELEARLVSSPAVVAKNDAEEAAAPPEAGGESRFKYPVLKIDF

SEQ ID NO: 16936 - protein, 265 aa, Oryza sativa
  Clone ID: TF_OSC400741j.C1.p5.fg
MVSEDPNLVNRIVAYLKELQFPICLEVPSSTPSPDETEDADTVFDGLIEEDQMVILQGEDELGDVVVAECETNGANPETITMETDEFYSLCEELDLDLGSYQLVPTSARETVAAAAAAANDVDGVAYSHASCFVSWKRANPAEKVVAVPMTAGIESQKLLKKAVGGGTAWMSNIDDRGSVAITTTPGSNIKSHVMSERRRREKLNEMFLILKSLLPSVRKVDKASILAETITYLKVLEKRVKELESSSREPSRWRPTEIGQGKAP

SEQ ID NO: 16937 - protein, 478 aa, Oryza sativa
  Clone ID: TF_OSC400736j.C1.p3.fg
MDYSAGSYMWPGNSGSENYNFVDGSSESYAEEGSLPPSGYFMGAGSDRSLKITENERNPTMLANGCLPYNTQAHPLSGQILPKGELPNNLLDLQQLQNSSNLRSNSIPPGVLQCNSTSGTFDAKLDTPGLAELPHALSSSIDSNGSDISAFLADVHAVSSAPTLCSAFQNVSSFMEPVNLDAFGFQGAQNVAMLNKTSLPNGNPSLFDNAAIASLHDSKEFLNGGSIPSFGTVLQALGAGGLKAAQQEQNIRNIPLPTFTSGSHLAVTDAQGPPLPSKIPPLIHDHNSEYPINHSSDVEPQANSAPGNSANAKPRTRARRGQATDPHSIAERLRREKISERMKNLQVLVPNSNKADKASMLDEIIDYVKFLQLQVKVLSMSRLGAPGAVLPLLRESQTECHSNPSLSASTISQGPPDMPDSEDSSAFEQEVVKLMETSIISAMQYLQNKGLCLMPIALASAISNQKGMAAAAAIPPEK

SEQ ID NO: 16938 - protein, 463 aa, Oryza sativa
  Clone ID: TF_OSC401380j.C1.p29.fg
MQPNARQMRGGGGGGGGGQDDFFDQMLSTLPAVWSELGSGKPAWDLTAGAVGGGGGASDDHSAAAFDDSALLASRLRQHQIDGGGDKPIMLQLSDLHRHHGLAAGDDSGGAAGFLPLSLFADRSQDDIDAAFKSPNGARGDHALYNGFGAAGMHGAAAMQPPPFGQGGSMPAQSFGGGAAASGGGGGGSASAAAAAGASSGGGAAAPPRQRQRARRGQATDPHSIAERVYHSPTTFPFSPPFFIASMPCCLRRERIAERMKALQELVPNANKTDKASMLDEIIDYVKFLQLQVKVLSMSRLGGASAVAPLVANMSSESNGNGNATSSSGNGEAANGSSNGDNNGGGTLRVTEQQVAKLMEEDMGSAMQYLQGKGLCLMPISLATAISSATSSSLLPRTGGGAGGSLHEGGNGTSPPLVNGTATGCDDAGVFFSVKFVVELSFLLLNEDCRGKEESKLLVQKGP

SEQ ID NO: 16939 - protein, 451 aa, Oryza sativa
  Clone ID: TF_OSC400506j.C1.p47.fg
MAICSTDNELVELLWHNGGVVAQPQAAQARVVSSSGRGQSASVLTGDDTETAAWFPDTLDDALEKDLYTQLWRSVTGDAFPAAAAAGPSSHHAPPPDLPPPAARPPMRSGIGSSWTGDICSAFCGSNHIPETAAQRCRDAGAALPPERPRRSSTHDGAGTSSSGGSGSNFGASGLPSESASAHKRKGREDSDSRSEDAECEATEETKSSSRRYGSKRRTRAAEVHNLSERRRRDRINEKMRALQELIPHCNKTDKASILDEAIEYLKSLQMQVQIMWMTTGMAPMMFPGAHQFMPPMAVGMNSACMPAAQGLSHMSRLPYMNHSMPNHIPLNSSPAMNPMNVANQMQNIQLREASNPFLHPDGWQTVPPQDKEFNVGFAQRVVFLEIAENIDMMNRLHPYCCYQQQEQQLGEPEDYVWEPYHHCKLPSSQQKPEGGDLEFMSKLVASIISC

SEQ ID NO: 16940 - protein, 28 aa, Oryza sativa
  Clone ID: TF_OSC403417j.C1.p1.gm
HMISERKRREKLNDSFVALKAVLPTGSK

SEQ ID NO: 16941 - protein, 263 aa, Oryza sativa
  Clone ID: TF_OSC401007j.C1.p1.fg
MDELVLSPSSFSATACFPTLDFEFCEVPDQWLLGLGHDELDKDAAASALAAAAASQSASNDDVPRNPPATTTTTKRRGRKPGPRSGGGGAPPIGHVEAERQRREKLNRRFCELRAAVPTVSRMDKASLLADAVDYIAELRRRVERLEAEARRAPLAPSAAAAAAWAAGLGAGAIGRDDLVVRMIGRDAAILRLTTAAAAARHAPARMMCAVRALNLAVQHASVARVGGATVQDVMVDDVPAALQDEARLRAALLHTLQLADTT

SEQ ID NO: 16942 - protein, 485 aa, Oryza sativa
  Clone ID: TF_OSC401238j.C1.p2.gm
MELMDDDGSSSLLEELMAPLRRGTPTTTPEDLWLQAYPMMMSPMCGDGVMLGDLLVGGGNARNTLASPPPPSFPLPVPLTTTTPCPPLHEVSFEFDSIDCLGEVCNPYKRSGGAVRATAAAQVMVAAMDPRREAASSAVAVAAVEEEERCKARRGAGGGGDSGELAPMFVFGGGGGAAASVRPRSCRPPQPGAPSKNLMAERRRRKRLNDRLSMLRSVVPRISKMDRTSILGDTIGYVKELMDRIKNLQVEAATGDSSSSSTENLSMLKLNTLKPPPSSSSGEETPLIRNSTRFEVERRENGSTRIEMACAAIPELLPSTLAALEALGVEIEQCVISCFDDFAMQASCLQAAAREQRSRFYIFRRCVAMLLCWYKYRNITPLRAPKTATPTGSSSSHLGRLLHRRPRLSAPSRPPPPDAPLAPIRPPSIGCASRAKPASISAARASRAEPASAAIGCASLRQAGLRPFHQTMPRRPEAAVSHALG

SEQ ID NO: 16943 - protein, 329 aa, Oryza sativa
  Clone ID: TF_OSC410031j.C1.p10.fg
MALEAVVFPQGHFGYGCGRDSPAYGMPWCDVLAAAGGGGGFGEFYGVDEWDDQLQVASVDEWEVASKDNSDASTEGKAAAAERAEPVAAGRRKRRRTKVVKNKEEIECQRMTHIAVERNRRRQMNEYLAVLRSLMPASYSQRGDQASIVGGAINYVKELEQLLQSLEVQKSLKNRSGAMDAAGDSPFAGFFSFPQYSTSPRTGCSAAASAGSSGSASSVVMDDTAGSAESGRQSAAIADIEVTMVEGHASLKVLARRRPKQLLKLVVGLQQLRIPPLHLNVTTVDAMVLYSFSLKVEDDSKLGSVEDIATAVHQILGSIQQQEAVLSIS

SEQ ID NO: 16944 - protein, 401 aa, Oryza sativa
  Clone ID: TF_OSC401398j.C1.p3.fg
MYGAPVSKDLSLQPAGVRTPPQMSSPGLLRYRSAPSTLLGEVCGDFVLPGGGGGGGQLQLQLQQQRPGSPDHAADTVLARFLAGHGGHDNKPPRPAAHFAPPEDSMASHQQQLMYQSHQQQQQMASAMEGLYRTVSSGGTESTAAAAGNSLLRQSSSPAGFLNHLTMDNGYGNMLRAGMGGGGGGGDPRLKGQLSFSSRQGSVMSQISEMGSEDEELAGGGGSPEAGSNGGGAARGGYGGGYAMGSSAWEEPSPPATSLLPDSSLPSKRPRDDLPRQLSLPAASKNSSKPPSSASAAASPEMAAIEKFLQFQDAVPCKIRAKRGCATHPRSIAERVRRTRISERIRKLQELVPNMEKQTNTADMLDLAVDYIKELQKQVKVLNDSRSSCTCSASKQKHFAG

SEQ ID NO: 16945 - protein, 549 aa, Oryza sativa
  Clone ID: TF_OSC400741j.C1.p8.fg
MADELVLQRSEQLRELYDSLLSGECGHRARRPVAALLPEDLGDTEWYYVVCMTYAFGPRQGCVWLPGKSFASNEFVWLTNAQSADRKLFHRALIAKTIVCVPFIMHGVLELGTTDPISEDPALVDRIAASFWDTPPRAAFSSEAGDADIVVFEDLDHGNAAVEATTTTVPGEPHAVAGGEVAECEPNSDNDLEQITMDDIGELYSLCEELDVVRPLDDDSSSWAVADPWSSFQLVPTSSPAPDQAPAAEATDVDDVVVAALDSSSIDGSCRPSPSSFVAWKRTADSDEVQAVPLISGEPPQKLLKKAVAGAGAWMNNGDSSAAAMTTQGSSIKNHVMSERRRREKLNEMFLILKSVVPSIHRGNTNYYFIRFTIFITINMNMGNARMTYIMKRRECNFFRTKFVKVDKASILAETIAYLKELEKRVEELESSSQPSPCPLETRSRRKCREITGKKVSAGAKRKAPAPEVASDDDTDGERRHCVSNVNVTIMDNKEVLLELQCQWKELLMTRVFDAIKGVSLDVLSVQASTSDGLLGLKIQAKVVISAAK

SEQ ID NO: 16946 - protein, 328 aa, Oryza sativa
  Clone ID: TF_OSC401695j.C1.p30.fg
MALEAVVYSHGGHFGGYGGGLMGGAPAAPWDVFAAAGGGGSWDDPGLFAAEASLDVIQGVDEWEVDQDQHASSSSKVAARPPVKAAAAAGKRKRRRAKAAKNREEIESQRMTHIAVERNRRRQMNEYLAVLRSLMPPSYAQRGDQASIVGGAINYVRELEQLLQTLEARRTIKDHIDGGAGESPSPFAGFFAFPQYSTATSGHGGGGDAHSRIVVKPAETTTTAAGGGAGAAIADIEASMVEGHASVKVQARRRPRQLLKLVAGLHQLGLTTLHLNVTTVAAMAMYSFSLKVEDGCKLGSVEEIATAVHEILERMQEEQAFADAKTSL

SEQ ID NO: 16947 - protein, 613 aa, Oryza sativa
  Clone ID: TF_OSC100243j.C1.p15.fg
MEADEDGANGGTGGTWTDEDRALTASVLGTDAFAYLTKGGGAISEGLVAASLPVDLQNRLQELVESDRPGAGWNYAIFWQLSRTKSGDLVLGWGDGSCREPHDGEMGPAASAGSDEAKQRMRKRVLQRLHSAFGGVDEEDYAPGIDQVTDTEMFFLASMYFAFPRRAGGPGQVFAAGVPLWIPNTERNVFPANYCYRGYLANAAGFRTIVLVPFETGVLELGSMQQVAESSDTLQTIRSVFAGAIGNKAGVQRHEGSGPTDKSPGLAKIFGKDLNLGRPSAGPGTGVSEADERSWEQRTGGGSSLLPNVQRGLQNFTWSQARGLNSHQQKFGNGILIVSNEATPRNNGGVDSSTATQFQLQKAPPLQKLPQLQKSHQLVKPQQLVSQQQLQPQAPRQIDFSAGTSSKPGVLTKKPAGIDGDGAEVDGLCKDEGPPPALEDRRPRKRGRKPANGREEPLNHVEAERQRREKLNQRFYALRAVVPNISKMDKASLLGDAITYITDLQKKLKEMEVERERLIESGMIDPRDRTPRPEVDIQVVQDEVLVRVMSPMESHPVRAIFQAFEEAEVHAGESKITSNNGTAVHSFIIKCPGAEQQTREKVIAAMSRVMNSG

SEQ ID NO: 16948 - protein, 613 aa, Oryza sativa
  Clone ID: TF_OSC22065j.C1.p1.fg
MEADEDGANGGTGGTWTDEDRALTASVLGTDAFAYLTKGGGAISEGLVAASLPVDLQNRLQELVESDRPGAGWNYAIFWQLSRTKSGDLVLGWGDGSCREPHDGEMGPAASAGSDEAKQRMRKRVLHRLHSAFGGVDEEDYAPGIDQVTDTEMFFLASMYFAFPRRAGGPGQVFAAGVPLWIPNTERNVFPANYCYRGYLANAAGFRTIVLVPFETGVLELGSMQQVAESSDTLQTIRSVFAGAIGNKAGVQRHEGSGPTDKSPGLAKIFGKDLNLGRPSAGPGTGVSEADERSWEQRTGGGSSLLPNVQRGLQNFTWSQARGLNSHQQKFGNGILIVSNEATPRNNGGVDSSTATQFQLQKAPPLQKLPQLQKSHQLVKPQQLVSQQQLQPQAPRQIDFSAGTSSKPGVLTKKPAGIDGDGAEVDGLCKDEGPPPALEDRRPRKRGRKPANGREEPLNHVEAERQRREKLNQRFYALRAVVPNISKMDKASLLGDAITYITDLQKKLKEMEVERERLIESGMIDPRDRTPRPEVDIQVVQDEVLVRVMSPMESHPVRAIFQAFEEAEVHAGESKITSNNGTAVHSFIIKCPGAEQQTREKVIAAMSRVMNSG

SEQ ID NO: 16949 - protein, 186 aa, Oryza sativa
  Clone ID: TF_OSC7102j.C1.p1.gm
PGTGVSEADERSWEQRTGGGSSLLPNVQRAGIDGDGAEVDGLCKDEGPPPALEDRRPRKRGRKPANGREEPLNHVEAERQRREKLNQRFYALRAVVPNISKMDKASLLGDAITYITDLQKKLKEMEDEVLVRVMSPMESHPVRAIFQAFEEAEVHAGESKITSNNGTAVHSFIIKCPGAEQQTREK

SEQ ID NO: 16950 - protein, 279 aa, Oryza sativa
  Clone ID: TF_OSC400553j.C1.p15.fg
MAQFLGAHGDHCFTYEQMDESMEAMAAMFLPGLDTDSNSSSGCLNYDVPPQCWPQHGHSSSVTSFPDPAHSYGSFEFPVMDPFPIADLDAHCAIPYLTEDLISPPHGNHPSARVEEATKVVTPVATKRKSSAAMTASKKSKKAGKKDPIGSDEGGNTYIDTQSSSSCTSEEGNLEGNAKPSSKKMGTRANRGAATDPQSLYARKRRERINERLRILQNLVPNGTKVDISTMLEEAVQYVKFLQLQIKLLSSDDTWMYAPIAYNGVNISNIDLNISSLQK

SEQ ID NO: 16951 - protein, 294 aa, Oryza sativa
  Clone ID: TF_OSC400390j.C1.p14.fg
MAAQASSKRGMLLPREAVLYDDEPSMPLEILGYHGNGVGGGGCVDADYYYSWSGSSSSSSSSVLSFDQAAVGGSGGGCARQLAFHPGGDDDDCAMWMDAAAGAMVENTSVVAGGGNNYCHRLQFHGGAAGFGLASPGSSVVDNGLEIHESNVSKPPPPAAKKRACPSGEARAAGKKQCRKGSKPNKAASASSPSPSPSPSPSPNKEQPQSAAAKVRRERISERLKVLQDLVPNGTKVDLVTMLEKAINYVKFLQLQVKVLATDEFWPAQGGKAPELSQVKDALDAILSSQHPNK

SEQ ID NO: 16952 - protein, 294 aa, Oryza sativa
  Clone ID: TF_OSC400498j.C1.p30.fg
MAMVAGDEAMSVPWHDVGVVVDPEAAGTAPFDAGAGYVPSYGQCQYYYYYDDHHHHPCSTELIHAGDAGSAVAVAYDGVDGWVHAAAAATSPSSSSALTFDGHGAEEHSAVSWMDMDMDAHGAAPPLIGYGPTAATSSPSSCFSSGGSGDSGMVMVTTTTPRSAAASGSQRRARPPPSPLQGSELHEYSKKQRANNKETQSSAAKSRRERISERLRALQELVPSGGKVDMVTMLDRAISYVKFMQMQLRVLETDAFWPASDGATPDISRVKDALDAIILSSSSPSQKASPPRSG

SEQ ID NO: 16953 - protein, 565 aa, Oryza sativa
  Clone ID: TF_OSC401508j.C1.p13.fg
MGRAAARLPGCLYLCLWAPAAAIAGGVQPNHLFCLDAWIGGGGGVGAGGGGGDRALELFEAYRGALCAAVSGCVPGWAYKEGAACMELTEHDLAASASLQVQQQFYHETGTKMAVFMGCDSGEIEVGLSAASATATAAVVGEMQQSILEELLQMPPPPPSPSSSSLLSLSVGSPEYSSLVRSMATSVGASAAADPSPVHGGLLAPVYGEFPGSDDDAAMAQAMLAVISTPAPPPPLWRPPRRRARSSSSPRRATAFKAYNAALSPRARPRPGAPGQRMIKTGISLLASVHMQTRSRELAAARQRDTHAAPPPPPPPPPPSSSQLHHMISERRRRERINDSFQTLRALLPLPPDSKKDKAAILASTTEYMDKLISQVSELGEKNRQLEAQLAARSGEAQWPAASGGGGGESSSERVQVDVVIAGSSASTDQPREVSIRVTVRAECDVSELVVAVLARLREMGRFAVVSVDAGRRSSSFAQASLTFRVMNYKYKTNSVTVGKSQLIVHTEKYKAGDVCDETSLKEAVAKAVDGAAFFKFQRTPFMHSKNYDQSDDLEGEAKLLPLDS

SEQ ID NO: 16954 - protein, 396 aa, Oryza sativa
  Clone ID: TF_OSC1723j.C1.p7.gm
MGDALCDQLLLVDSDGGEFIPHHADADADDLFTILETWEGCANVVAGGAPATTTTLGSPIAAAACISGVVGGQNHQQLPEPAAAKTVPATNNKRREEEVADRDGDGDDDDGSPQKRRKCCSPESSTTDVAAATTPKTAHIAVERNRRKQMNENLAVLRSLMPCFYVKRGDQASIIGGVVDYIKELQQVLHSLEAKKQRKVYTDQVLSPRPPATVAASCCSPRPPQLSPRLPPQLLKSTPPLSPRLAVPISPRTPPTPGSPYRLLRLPPPPPPASGSNYASPAMTPTHHETAAPSLDAIAAELSAYASRQALGGGLLLPDVKVEFAGANLVLKTVSQRSPGQAVKIIAALEGRSLEILHAKISTVDDTAVNSFTVKIGIECELSAEELVQVIQQTFT

SEQ ID NO: 16955 - protein, 401 aa, Oryza sativa
  Clone ID: TF_OSC400822j.C1.p1.fg
MGDALCDQLLLVDSDGGEFIPHHADADADDLFTILETWEGCANVVAGGAPATTTTLGSPIAAAACISGVVGGQNHQQLPEPAAAKTVPATNNKRREEEVADRDGDGDDDDGSPQKRRKCCSPESSTTDVAAATTPKTAHIAVERNRRKQMNENLAVLRSLMPCFYVKRGDQASIIGGVVDYIKELQQVLHSLEAKKQRKVYTDQVLSPRPPATVAASCCSPRPPQLSPRLPPQLLKSTPPLSPRLAVPISPRTPPTPGSPYRLLRLPPPPPPASGSNYASPAMTPTHHETAAPSLDAIAAELSAYASRQALGGGLLLPDVKVEFAGANLVLKTVSQRSPGQAVKIIAALEGRSLEILHAKISTVDDTAVNSFTVKYIFGQIGIECELSAEELVQVIQQTFT

SEQ ID NO: 16956 - protein, 372 aa, Oryza sativa
  Clone ID: TF_OSC400032j.C1.p27.fg
MPAAGGLARYGSAPGSLLASIADSVIRGRGVGVVDQLHHHQHQHQLPPPPPPQQQQMVGRYFSAESSGLTSCESSCRTTTTTSTAAAADVGRHPLERAYGGSGEIHVDASSAAVPLFRHSSSPAGLLSRLMADPHGNGMAATRGMGGYSGGGGDAGAMAHRRLSSQWSFSRQDLPQISEMGGLIPDIGESIVTGGGGNSSSDGAGHGAQSSSFLSSRNFSMSSWDDTNSIMFSPPSSSKKARVAAAAAGDHGDDMVSSFSNIDSQFGLSKQSSLEMAGMDDFLQLQPDSVACRARAKRGCATHPRSIAERERRTRISKRLKKLQDLVPNMDKQTNTSDMLDIAVTYIKELQGQVEKLKHDQANCTCSGKHDC

SEQ ID NO: 16957 - protein, 426 aa, Oryza sativa
  Clone ID: TF_OSC400853j.C1.p7.fg
MDAEMAMGESFAYYWETQRYLESEELDSMYLPTQDDSNYESSSPDGSHSSSAPAPAAVGGDAAAAVAGSGGGMTTMMMGGGGGGGDDAGGANKNILMERDRRRKLNEKLYALRSVVPNITKMDKASIIKDAIEYIQRLQAEEQQMLREVAALESAAAASAAPAAANPFAGLGADEEHEYGHHHPSSSSERTKKVKRALSVSSISDALLAAAAPAPPVEIQELRVSEVGDRVLVVSVTCSKRRDAMARVCRALEELRLRVITANITSVAGCLMHTLFVEVDHMDSVQMKQMVEAALSQLVATGRCGSASHDYLLFVDHGAVVNVRYCEFFLLCSSRTLANLPPRLSLEAVAAHTPMPPLTRVEVGATGTGVRFMWESLPSLMRMVPIGSLKPAANVRACAEVAATSGESNLTCSQQQVHLRLKLSCA

SEQ ID NO: 16958 - protein, 338 aa, Oryza sativa
  Clone ID: TF_OSC418099j.C1.p14.fg
MDDSSFFMQWAMDTLHQLPSDSTAAAAYATDVAGDSGAFPSLQALRNASAAGGGGGFRDLTVQVDQVHRANSWSSSDSPGGGAATAAAGWSPHVTGGGGRGHRPMSWNFSAASAQPTTEDSGGGGGGGVVPAPLQAMETTATARAAVKKGGGGGSSSSAAAPGYVQDHIIAERRRREKINQRFIELSTVIPGLKKMDKATILGDAVKYVKELQEKVKTLEEEDGGGRPAAMVVRKSSCSGRQSAAGDGDGEGRVPEIEVRVWERSVLVRVQCGNSRGLLVRLLSEVEELRLGITHTSVMPFPASTVIITITAKASSLSNHPALLCLYICIKLPCVISS

SEQ ID NO: 16959 - protein, 688 aa, Oryza sativa
  Clone ID: TF_OSC401909j.C1.p20.fg
MEAFMASADLPAFPWGAASTPPPPPPPPHHHHQQQQQQVLPPPAAAPAAAAFNQDTLQQRLQSIIEGSRETWTYAIFWQSSIDVSTGASLLGWGDGYYKGCDDDKRKQRSSTPAAAAEQEHRKRVLRELNSLIAGAGAAPDEAVEEEVTDTEWFFLVSMTQSFPNGLGLPGQALFAAQPTWIATGLSSAPCDRARQAYTFGLRTMVCLPLATGVLELGSTDVIFQTGDSIPRIRALFNLSAAAASSWPPHPDAASADPSVLWLADAPPMDMKDSISAADISVSKPPPPPPHQIQHFENGSTSTLTENPSPSVHAPTPSQPAAPPQRQQQQQQSSQAQQGPFRRELNFSDFASNGGAAAPPFFKPETGEILNFGNDSSSGRRNPSPAPPAATASLTTAPGSLFSQHTPTLTAAANDAKSNNQKRSMEATSRASNTNNHPAATANEGMLSFSSAPTTRPSTGTGAPAKSESDHSDLEASVREVESSRVVAPPPEAEKRPRKRGRKPANGREEPLNHVEAERQRREKLNQRFYALRAVVPNVSKMDKASLLGDAISYINELRGKLTALETDKETLQSQMESLKKERDARPPAPSGGGGDGGARCHAVEIEAKILGLEAMIRVQCHKRNHPAARLMTALRELDLDVYHASVSVVKDLMIQQVAVKMASRVYSQDQLNAALYTRIAEPGTAAR

SEQ ID NO: 16960 - protein, 277 aa, Oryza sativa
  Clone ID: TF_OSC400825j.C1.p44.fg
MLQLSELHRQAGGGEEDGSGAFSPLPLFTDRTNVPPREEMEGGFKSPNAAAGGEHALFNGFGVHGGSGGAGQPPFGQLRRERIAERMKSLQELVPNANKTDKASMLDEIIDYVKFLQLQVKVLSMSRLGGAAGMAPLVASMSSEGNSNGSSNGGGGKASKGGTGGEGGGGGGGGGGGGTGGGMRVTEQQVAKMMEEDMGTAMQYLQGKGLCLMPISLASAISSATSSASLLSRPSIRHAGAPPQTMLDAAGPTSPAAMSNGDDPRHAKADGGAGGTQ

SEQ ID NO: 16961 - protein, 367 aa, Oryza sativa
  Clone ID: TF_OSC412868j.C1.p5.fg
MQPSSRDTVAGGGGEGTQDDFFDQMLSTLPSAWADLGGGGGGAAGKSPWEVDPAAAAAASQVFDESALLASRLRHHQIGGAGGGGGEKPVMLQLSELHRQAGGGEEDGSGAFSPLPLFTDRTNVPPREEMEGGFKSPNAAAGGEHALFNGFGVHGGSGGAGQPPFGQLRRERIAERMKSLQELVPNANKTDKASMLDEIIDYVKFLQLQVKVLSMSRLGGAAGMAPLVASMSSEGNSNGSSNGGGGKASKGGTGGEGGGGGGGGGGGGTGGGMRVTEQQVAKMMEEDMGTAMQYLQGKGLCLMPISLASAISSATSSASLLSRPSIRHAGAPPQTMLDAAGPTSPAAMSNGDDPRHAKADGGAGGTQ

SEQ ID NO: 16962 - protein, 198 aa, Oryza sativa
  unsure (1)..(198): unsure at all Xaa locations
  Clone ID: TF_OSC400803j.C1.p1.np
TKVEQATEVSSQQERISMEEDNQKSCSKMQSKEDSSDGDGTKEDYVHVRAKRGQATNSHSLAERLRRKKISERMKLLQDLVPGCSKITGKAVMLITGKAVMLDEIINYVQSLQRQVEFLSMKLATVNPELSFDIEQILSKQSFSVLSRVYLSRLNLKTSPFMQFFIQQKSXNIVFCXYSSNKXRNGNMHPLEELKLNK

SEQ ID NO: 16963 - protein, 351 aa, Oryza sativa
  Clone ID: TF_OSC900340j.C1.p13.fg
MALEAVLLSRGDLFGRRRCAMEGGGGGWSSPFSGFEGVMDLDGGNWDAAACSSMLLHGFQELEIPAAAAAAAAMAPPPPPVEPANCAENAGGVGGHQEDQAAVAAAATAVQSGRRKRRRARAAKNKEEVESQRMTHIAVERNRRKQMNEYLAVLRSLMPPSYAQRGDQASIVGGAINFVKELEQLLQSLEARKSSRQCAAHDAAAAAAPFASFFTFPQYSMSAAAAAAPVAPVVNELHGRDDGGAGTAEAEASGSKPSAVADVEVTMVESHANLRVLSRRRPRQLLRLVVALQGHRLTVLHLNMTSAGHMVLYSFSLKVEDDCQLTSVDEIATAAHQIIEKIQEEQGCSLD

SEQ ID NO: 16964 - protein, 248 aa, Oryza sativa
  Clone ID: TF_OSC400376j.C1.p32.fg
MEQLFVDDPAFASSMSSLEADIFSGAGQLPSSPWLDLDLDDDVQDLSMAPTTANAVSSGYGSGGSGSHRKLSHNAYERDRRKQLNELYSSLRALLPDADHTKKLSIPTTVSRVLKYIPELQKQVENLERKKKELTTTSTTNCKPGVLGSQLMSEGMAPIVSATCINDMEIMVQVSLLSNVAGSVLPLSKCIKVLENEGLHFISSSTSSGFGNRTFYSIHLQRSEGTINEECPAFCERLEKVVRNKAKL

SEQ ID NO: 16965 - protein, 430 aa, Oryza sativa
  Clone ID: TF_OSC19437j.C1.p1.fg
MELDEESFLDELMSLRRDGSAPWQAPPYPGGGGGGGGGGMMMSDLLFYGGDGGSAEARGGMDASPFQELASMAAPPPQHPHEEFNFDCLSEVCNPYRSCGAQLVPSEAASQTQTQLTPLRDAMVAEEETSGDKALLHGGGGSSSPTFMFGGGAGESSEMMAGIRGVGGGVHPRSKLHGTPSKNLMAERRRRKRLNDRLSMLRSIVPKISKMDRTSILGDTIDYVKELTERIKTLEEEIGVTPEELDLLNTMKDSSSGNNNEMLVRNSTKFDVENRGSGNTRIEICCPANPGVLLSTVSALEVLGLEIEQCVVSCFSDFGMQASCLQEDGKRQVVSTDEIKQTLFRSAGYGGRNYSRSSTIYEFIFISSGSTSFLNTPESKLKICSSIVSFAFVNRYGNRPCDLSNIGFELNAKKWFIWFCPELYIICARI

SEQ ID NO: 16966 - protein, 215 aa, Oryza sativa
  Clone ID: TF_OSC401716j.C1.p98.fg
MHDPRGFPIHPQPYHLHPTAGGLGEGRMRGGGRRRPGAKLSTDPQSVAARERRHRISDRFRVLRSLVPGGSKMDTVSMLEQAIHYVKFLKAQVTLHQAALVQHEEGCQHADVAAAFSAADADLALELNHRHGGAGDDDAGMTTLEMAPMQEAVGYGDGPAHQMMQQALDPAGQLMMGGAHQLPPLPCCVFVQETDPSCYSVCNVHGEESGAQGSY

SEQ ID NO: 16967 - protein, 298 aa, Oryza sativa
  Clone ID: TF_OSC400780j.C1.p2.gm
MARRCGNTHSFVVAFLSCCPCPPVADLDLLESCVTQAAAPPVTAPATRAERRRKRPRPRPRAAPPPEKRKKPEEAENQRMTHIAVERNRRRLMNDHLASLRSLIPSNYIPRGDQATVVGGAIDYVKQLEQQLVALQAAAAERSGVGVVAAAATAASDGVFVSPQYTSYSEARGGSGVDVEATAAVGGHVRVRVAGRRWTGRLVRAVAAMEDLRLTVLHLAVTSVGHDAVVYCFNLKMEEGCEMATADEVATVVHQIFAWAQDHGSSGHSWQSQAHAGLLLEEDLYCSKRESVKVQSSV

SEQ ID NO: 16968 - protein, 66 aa, Oryza sativa
  Clone ID: TF_OSC29119j.C1.p1.fg
IRGYVVVAVPCKDKAPFVTKAEKLKAEYTKKIDAYNNKQAGGPATSGDSDKSKSEVNDEDEGSGDE

SEQ ID NO: 16969 - protein, 75 aa, Oryza sativa
  Clone ID: TF_OSC16612j.C1.p1.fg
VSKAAGEKWRAMSEQEKAPYVDKAGQKKQDYEKTKANFDKKESTSSKKAKTHDDGEGSDKSKSEVDDDQDGGSDE

SEQ ID NO: 16970 - protein, 203 aa, Oryza sativa
  Clone ID: TF_OSC400021j.C1.p5.fg
MAGKSGARTRKRVEATDSAVLKRARDGSAFTRCEACGKSVSVVLIDMHNCSLDDKIRISLEAQVVEQAVEVAASKKKSGKNNNNNGEGAKKGKRPPTAFFLFMSDFRKEYKAEHPDNKSVSAVAKEGGERWKSMSDEDKKPYLDKAAELKAEYHNGERSDENNVGGNAGEQEVDQPPKKGTDEDDQEDEDGAEEEKNELDDDI

SEQ ID NO: 16971 - protein, 145 aa, Oryza sativa
  Clone ID: TF_OSC423122j.C1.p6.fg
MKGKADASKKGEGRLKAAGGAGKRKKAAASGKPKRPPSAFFVFMSEFRQEYQAAHPDNKSVAAVSKAAGEKWRAMSEQEKAPYVDKAGQKKQDYEKTKANFDKKESTSSKKAKTHDDGEGSDKSKSEVDDDQDGGSDEENEDDEE

SEQ ID NO: 16972 - protein, 105 aa, Oryza sativa
  unsure (1)..(105): unsure at all Xaa locations
  Clone ID: TF_OSC408633j.C1.p3.gp
KVGGAAAAADPNRPKKPASSFLLFSKEARRQLAEERPGVASSTLTALVSVKWKELGEAEKQAWNGKAAEAMAAYKRDMEEYTKAAASGGGGGDASPCTSSSASSX

SEQ ID NO: 16973 - protein, 684 aa, Oryza sativa
  Clone ID: TF_OSC400426j.C1.p30.fg
MDLGFLPDAVDAVNGALKLNWKIEWNPLSFEAKMENGLESSVSFEAKLENRLESSNPGQFKVYSGGLAWKRQGGGKTIEIEKSDLTSVTWMKVPRAYQLGVRTKDGLFYKFIGFREQDVSSLTNFMQKNMGLSPDEKQLSVSGQNWGGIDINVTLSIVGNMLTFMVGSKQAFEVSLADVSQTQMQGKTDVLLEFHVDDTTGGNEKDSLMDLSFHVPTSNTQFLGDENRTAAQVLWETIMGVADVDSSEEAVVTFEGIAILTPRGRYSVELHLSFLRLQGQANDFKIQYSSIVRLFLLPKSNNPHTFVVVTLDPPIRKGQTLYPHIVIQFETEAVVERNLALTKEVLAEKYKDRLEESYKGLIHEVFTKVLRGLSGAKVTRPGSFRSCQDGYAVKSSLKAEDGLLYPLEKGFFFLPKPPTLILHEEIEFVEFERHGAGGASISSHYFDLLVKLKNDQEHLFRNIQRSEYHNLFNFINGKHLKIMNLGDGQGATGGVTAVLRDTDDDAVDPHLERIKNQAGDEESDEEDEDFVADKDDSGSPTDDSGGEDSDASESGGEKEKLSKKEASSSKPPVKRKPKGRDEEGSDKRKPKKKKDPNAPKRAMTPFMYFSMAERGNMKNNNPDLPTTEIAKKLGEMWQKMTGEEKQPYIQQSQVDKKRYEKESAVYRGAAAMDVDSGSGGNESD

SEQ ID NO: 16974 - protein, 146 aa, Oryza sativa
  Clone ID: TF_OSC900350j.C1.p14.fg
MATPGEFCWWFCACARGWFRLSVRKTKAEKDPNKPKRPPSAFFVFMEQFRKDYKEKHPNVKQVSVIGKAGGDKWKSMTDAIRGYVVVAVPCKDKAPFVTKAEKLKAEYTKKIDAYNNKQAGGPATSGDSDKSKSEVNDEDEGSGDE

SEQ ID NO: 16975 - protein, 133 aa, Oryza sativa
  Clone ID: TF_OSC400934j.C1.p22.fg
MKTRSQTAPKPLKTVRLPPVKPRPKPPPPQPQPPPSRKKGQPLVDRRRPKKPPTAFFYFMEDFRKTYKEENPSVKSMQEVGKACGEKWNTMTFEERVKYYDIATEKRAEYEKAVAEFDKKKESGELSEESDYD

SEQ ID NO: 16976 - protein, 646 aa, Oryza sativa
  Clone ID: TF_OSC15468j.C1.p2.fg
MTDGHHFNNISLGGRGGNNPGQFKLYSGGLAWKRQGGGKTIEVEKSDITSVTWMAIPRSYQLGVSTKEGLFYRFFGFREQDISSLTNFMEKNMRITPEEKQLSVGGHNWGGIEINGNMLSFNVGSKEAFEVSLADVAQTQMQGKTDVVLEFHVDDTTGGNEKDSLMDLSFHVPTSNTQFPGDENRPSAQVLWQAILNKADVGSSEEAVVTFDGIAILTPRGRYSVELHLSFLRLQGQANDFKIQYSSILRLFVLPKSNNPHTFVVITLDPPIRKGQTLYPHIVIQFETEAVVQRDLTLSDEVLAEKYKDRLENSYQGLIHEVFSKVLRGLSGAKVTRPSTFRSCQDGYAVKSSLKAEDGCSIRWRRASSFYQSPQHSFCMRSCSSLWQIEYVEFERHGAGGASISSHYFDLLVKLKNDQEHLFRNIQRNEYHNLFNFISGKHLKILNLGEAQGRAGGVTAVLQSTDDDAVDPHLERIRNQTGDDESDEEDEDFVADKDDSGSPTDDSGEEGSDASLSGGEKEKSSKKEASSSKAPLKKRKPKGGDAAEGSEKRKPKKKKDPNAPKRAIAPFMYFSKAERANLKNSNPELATTEIAKKLGERWQKMTAEEKQPYVEQSQVDKKRYAEESAAYRGAAAMDVDSGPASD

SEQ ID NO: 16977 - protein, 504 aa, Oryza sativa
  Clone ID: TF_OSC408633j.C1.p1.fg
MATAGSRKGGRGRKALTAVLDNDANISAGKADVAAAAGILSPPQKAKRATSKSSKGKAAAAAAAEEQASVVDAVSELQGMLEELRLEKEKAEEMVRERDEVIRRKEEEQGRLQAELKKVQRAKEFKPTVSIPLVKALIEKDQEGEKKKGKGKAGHERKKPCPAYVLWCKDQWNEIKKESPDADFKEVSNALGAKWKALGAEEKQPYEERYRQEKEAYLQVVGQEKREAEAMKLLEEEQMQRTAKELLEQYLKFRQEADDDGDGGDNKKASKKGKKKKKEKDPSKPKQPMSAYFVYTQQRRAALVAEKKNVPEIGRITGEEWKAMSEAEKAPFEAAARKQREEYQVEMAAYRQRKQEEAACQEKEEEEQKKIMKQEALQLLKKKEKTDNIIKKTKEEQRKKKVGGAAAAADPNRPKKPASSFLLFSKEARRQLAEERPGVASSTLTALVSVKWKELGEAEKQAWNGKAAEAMAAYKRDMEEYTKAAASGGGGGDASPCTSSSASS

SEQ ID NO: 16978 - protein, 603 aa, Oryza sativa
  Clone ID: TF_OSC25282j.C1.p3.fg
MSSAAGGGGGYGGGGGEHQHQQQQHHLLLGQAAGQLYHVPQHSRREKLRFPPDHPAESPPPPPPGSWPLPPAFYSYASSSSSYSPHSPTLAHAQLVAHGMPPGAATSGGAQIPSQNFALSLSSASSNPPPTPRRQFGGPGGGGGAAGPYGPFTGYAAVLGRSRFLGPAQKLLEEICDVGGRPAQLDRGSDEGLLDVDAMDAAGSVDHEMDGSDRAVADAVTVSGAEQQWRKTRLISLMEDFKALLSSLLKLAGGDPQFIYNQKVCKRYRQYYQQLQAVVSSFETVAGLSNAAPFASMALRTMSKHFKYLKGIILNQLRNTGKGATKDGLGKEDTTNFGLMGGGAGLLRGNNVNSFSQPHNIWRPQRGLPERAVSVLRAWLFEHFLHPYPTDSDKQMLAKQTGLTRNQVSNWFINARVRLWKPMVEEIHNLEMRQLQKNPSLDKNQLSMQHTQHSSDSSGKPCDPSNSLQGQSSSMTRNHSISASRHIEDGLSQMPHDISGQVSFAYNGLAAHHSIAMAHHHQPDLIGTGGAANAGGVSLTLGLHQNNNRAYIAEPLPAALPLNLAHRFGLEDVSDAYVMSSFGGQDRHFTKEIGGHLLHDFVG

SEQ ID NO: 16979 - protein, 603 aa, Oryza sativa
  Clone ID: TF_OSC401969j.C1.p5.fg
MSSAAGGGGGYGGGGGEHQHQQQQHHLLLGQAAGQLYHVPQHSRREKLRFPPDHPAESPPPPPPGSWPLPPAFYSYASSSSSYSPHSPTLAHAQLVAHGMPPGAATSGGAQIPSQNFALSLSSASSNPPPTPRRQFGGGGGGGGAAGPYGPFTGYAAVLGRSRFLGPAQKLLEEICDVGGRPAQLDRGSDEGLLDVDAMDAAGSVDHEMDGSDRAVADAVTVSGAEQQWRKTRLISLMEDFKALLSSLLKLAGGDPQFIYNQKVCKRYRQYYQQLQAVVSSFETVAGLSNAAPFASMALRTMSKHFKYLKGIILNQLRNTGKGATKDGLGKEDTTNFGLMGGGAGLLRGNNVNSFSQPHNIWRPQRGLPERAVSVLRAWLFEHFLHPYPTDSDKQMLAKQTGLTRNQVSNWFINARVRLWKPMVEEIHNLEMRQLQKNPSLDKNQLSMQHTQHSSDSSGKPCDPSNSLQGQSSSMTRNHSISASRHIEDGLSQMPHDISGQVSFAYNGLAAHHSIAMAHHHQPDLIGTGGAANAGGVSLTLGLHQNNNRAYIAEPLPAALPLNLAHRFGLEDVSDAYVMSSFGGQDRHFTKEIGGHLLHDFVG

SEQ ID NO: 16980 - protein, 1075 aa, Oryza sativa
  Clone ID: TF_OSC21053j.C1.p5.gm
MPDGHGGHDPLRPRPSRQFSHQPTKPHRDRDSDVSATGQSRKIEGTFPSPSRGGRTVAQEGARGYCCFRSKLQVPVRFCFPTTSRWSRCPLRSAGSSITIIGTPGGLLGSFKIELTGATVPGEPDPPIVLHYNVRLLGDKLTEDPVIVQNTWTIADDWGSEDRCPSPGSDAKDIAKVDELEKCGSMVGNDQKQAWATKLKSNVSSIQPAWKKNTEPKKYFPFRQGYLAIAILRVGAHGIHMTVDGKHVTSFAFREDLEPGFVGEAPPVPMDKPLDLFIGIFSTANNFKRRMAVRRTWMQYDAVRSGKAAVRFFVGLEWPEESYPPWAHGPGYIVSQDIAKEVYRKHKRGELKMFKLEDVAMGIWINEMKKDGLDKYGDNAGIDGVSSPMTLRRYYKEQGNVMPGEDFLELDLRAARGGGGGGRTAAEAAEDERDNGGCARRRLTAAHAHLSRLYLGYNPFLKAFIQDFPKLIKTDLSVPTEEKVFPEAASFLNGSKQIDASDLPSDDSADNDYDPTLAQGHKVDEEKSSGEDGGEGLDSDDSSSEDSESSEKEKSKTSQNGRTVDDLGLPSEDSEDGDFDPAGPDSDKEQNDESNSDQSDESDFTSDSDDFCAEIAKSCGQDEISGPSSSQIRTVDRTDGSGFDASSSSLPTGGGARRRRLRPMRAGREGAAPCDLRRGVVVVVVADPAAVRARRKTEAGTQTEGGRRWSSPACGGRAAASRARRKEEAGARGVPPDPPLAHHHGLSSTTVAPLPRHRAHRRRHDSSAPPPPQLGVAAPTDRRRPAPHQTAAALHLHSGRRRGCTSRRCRRLLSSPPPPPQIVAAAPSDRRRLGPPQSAAAAALHHNEWAPAGQRLMVKHHLIQVTMKSGMEIVHPKKKLKAHFKEDPYPSRATKENLAQELGLTFNQVTKWFSSTRHYARVAATKKENNIENHTAENNNNTNTVDSIQLRGSNDIVSVDRNDMVSEERTGQSNLNEGTPLRSDTSCGQSVAVTPMVHPENQGNDSSSNVRTPNAKSAEKLIPGLENSDEARRKAVQRELRKMKTGRISDKMTLGSTSCSTPVTGMGSVDCNSLA

SEQ ID NO: 16981 - protein, 798 aa, Oryza sativa
  Clone ID: TF_OSC401975j.C1.p17.fg
MPPVIGRNGVAYESPSAQLPLTQADMLDSHHLQQALQQQYFDQIPVTTTAAADSGDNMLHGRADAGGLVDEFESKSCSENVDGAGDGLSGDDQDPNQRPRKKRYHRHTQHQIQEMEAFFKECPHPDDKQRKELSRELGLEPLQNQHERHENAQLRAENDKLRAENMRYKEALSSASCPNCGGPAALGEMSFDEHHLRVENARLRDEIDRISGIAAKHVGKPPIVSFPVLSSPLAVAAARSPLDLAGAYGVVTPGLDMFGGAGDLLRGVHPLDADKPMIVELAVAAMDELVQMAQLDEPLWSSSSEPAAALLDEEEYARMFPRGLGPKQYGLKSEASRHGAVVIMTHSNLVEILMDVNQFATVFSSIVSRASTHEVLSTGVAGNYNGALQVMSMEFQVPSPLVPTRESYFVRYCKNNSDGTWAVVDVSLDSLRPSPVQKCRRRPSGCLIQEMPNGYSKVTWVEHVEVDDSSVHNIYKPLVNSGLAFGAKRWVGTLDRQCERLASAMASNIPNGDLGVITSVEGRKSMLKLAERMVASFCGGVTASVAHQWTTLSGSGAEDVRVMTRKSVDDPGRPPGIVLNAATSFWLPVPPAAVFDFLRDETSRSEVPNLPPIPREFIQFADQILYVIKFIPDEFGFPQWDILSNGGAVQEMAHIANGRDHGNSVSLLRVNSANSNQSNMLILQESCTDASGSYVVYAPVDIVAMNVVLNGGDPDYVALLPSGFAILPDGPSGNAQAAVGENGSGSGGGSLLTVAFQILVDSVPTAKLSLGSVATVNSLIACTVERIKAAVCRDSNPQ

SEQ ID NO: 16982 - protein, 678 aa, Oryza sativa
  Clone ID: TF_OSC900171j.C1.p8.gm
MAAYYHGGAGTDIQSGTDGLQTLYLMNPSYAGYGDAAAAAAAPGAAANMMLLNSAVTSMTPVSFGHQPSPSSSSAAQHFVGIPLQAPPASGYNLWTPAAATGAGDMSPPTPQHQHQQAHGGGAAGVSAVLSLSSREAAPPVTVAAVVAAGDEGKYLQAVAQGAASHGQMVMSSKYLKAAQELLDEVVSVSKGVDDVKAAAAAKSPASVKKKEDSEGVSGGGTEDGGGAKSGGAPPPPEMSTAERQELQMKKGKLINMLDEVEQRYRQYHQQMQVVVASFEAVAGGGSARTYTALALRTISRQFRCLRDAIAGQVRAASRALGEAVDADGGCGRTVGSRLRYIDHQLRQQRALQQLGMMQSSAWRPQRGLPERSVSILRAWLFEHFLHPYPKDSDKIMLAKQTGLTRSQVSNWFINARVRLWKPMVEEMYLEETKDQDGGGGAGAGDEGSKPGGSKGGGAGVNGGVVDSAAKMDSKAAHMESGGGVHPSLLELAGDHQAQAGFYDDDDEDGGAAAALQQKLKKARTEEQQQAAFHVSDVATLHAHAAAAAAARHDEVSHRELLMKFMESGSAGAGAGAAARDHHHEHHGGVGYSLFAPAPYGQFATEQFAFAGHGGGGGGGGVSLTLGLPHGAEQTASFLMTSSNGSDGAGHVAGGGGYDMNMQSTKSFAAQLMRDFVA

SEQ ID NO: 16983 - protein, 647 aa, Oryza sativa
  Clone ID: TF_OSC401411j.C1.p9.fg
MATYYSSPGSERDSQTMYSRDPGSASYPMSSALGNLLYLNNPSSGPYTEFSGILQPQQNCMEMPGPGHASAMSQDPSSRESDMLSSHQGQRSFSHVKDMKNEMLMHMMDGAQGSGSELIHDDAHTGSQLEFGVLNNHNSSSVPSMQSQGLSLSLNTQIMAPSLPYWSIKPDMLTPQSYHDNLRGEDMRMKNLQSEASRAIRNSRYLKAAQELLDEVVSVWKSIKQKAQKEKVESGKADGKETDGGPKSEGVSSNPQESGANAAPELSTAEKQELQNKMAKLMAMLDEVDRKYKHYYHQMQTVVSSFDVVAGPGSAKPYTAVALQTISRHFRCLKDAINDQINVIRKKLGEEENSSGKEGKLTRLRYIDQQLRQQRAFQQYGMIPQNAWRPQRGLPENSVTILRAWLFEHFLHPYPKDSEKLMLARQTGLTRSQISNWFINARVRLWKPMIEDMYKEEIGDLEQDSNSSSDNAPRSKDKMASSEDKEDLKNSRARICETSQLSESRTSIGAMNVGGAPVGFQNEPNPDDSFMNLMLKDQRSNEVDGGLLLHNTVAQHSDENARFMAYHLAELGRYGNGNVSLTLGLQHSSSNLVPNAQPGFPGVNEDDIYNATAPLGVTVASSDYDSMNQMDQRQRFEHSPLLHDFVA

SEQ ID NO: 16984 - protein, 642 aa, Oryza sativa
  Clone ID: TF_OSC401247j.C1.p7.fg
MATYYSSPGNERDSQAMYPADSGNSSYPVPSAIGNMLYPGNGSSGPYTEFSGIIQHQQNFMELPGHPTAISQDSSSREPNMVASYMDQRSFGPAKDMRNEMLMHLMDGAHNAGADLIHNDTHSSAQIEFGLLNNHNSMSVAPAPGQGLSLSLNTHILAPSYPYWSAKTELLTPHSYHGDDNRMKNMQSEASQAIRNSKYLKAAQELLDEVVSVWKSIKQKAQKDQAEAGKSDNKEAEGGSKGEGVSSNPQESTANAAPEISAAEKQELQNKMAKLMAMLDEVDRKYKHYYHQMQIVVSSFDMVAGSGAAKPYTAVALQTISKHFRCLKDAINDQINVIRKKLGEEESSSGKEGKLTRLRYIDQQLRQQRAFQQYGLLQQNAWRPQRGLPENSVSILRAWLFEHFLHPYPKDSEKLMLARQTGLTRSQISNWFINARVRLWKPMIEDMYKEEIGEADLDSNSSSDNVPRSKDKIATSEDKEDLKSSMSQTYQPSQLGESKANIGMMSLGGAPAGFHNEGNQDDSFMNLMLKDQRPGEAEGSLLHDAVAHHSDENARFMAYHLSGLGRYGNSNVSLTLGLQHPDNRLSVQNTHQPGFAGAGEEIYNSTASLGVAAASSSDYESTNQIDQRQRFEPSPLMHDFVA

SEQ ID NO: 16985 - protein, 884 aa, Oryza sativa
  Clone ID: TF_OSC401273j.C1.p3.fg
MWTLHVILSLFFLPLFPFSLSTSAFCKRRWRQRQRRRRWREGRRWRHWSGGGDGRGPEWRRRFGLELAWMEAEAATEEMAGGRGPERRRVGGEPGGRWWLAGRELVAKAAPIFLPPRRAPHAPAPIGGADYAVGSVPRAAKGGRLGLRGGLTDGDAGLAEEGCGRRATITAEESAVANRTAAGTRLAISTSSNFHKAASAKKKRRSQKKTTRETTQLQESLGSSLSPFWVVSVILQELSCSSSLLGLKVDFCTGTAKALGIVLQKAQQSEAYCPSLSLLLLLKTMATFFSSSTNQRDLTGGGGDGGDMSFQHYPPPSNPYSDSSAGGLIPLPASIVSHSHIAHGGGDEPAAFREAATADGGEMGLQTQLLMAHGAAARGHQGGLSLSLGTQVPVSLYQYRPAGMAAASLLSPSQSSPMAGRSAQNSIYVQNSRFLRAARELLDEVVNVRDAIKRKGDKNQGKDSGECKGGDAAGDDKAGSNPQEQESNSAPELSPSERQDLQNKVTALMAMLDQVDRRYRHYHHQMQIVMSSFDAVAGGGAARPYTALALQTISRHFRSLRDAIGAQAQAARRGLGEQDASAQGGGGLSRLRYIDQQLRQQRAMQQFGMMQQPQHAWRPQRGLPESAVSVLRAWLFEHFLHPYPKDSEKLMLARQTGLSRGQVSNWFINARVRLWKPMIEEMYKEEFGAEMDSNSSSENGGGGGGKGKDEAISSEDRDEFQSPSSAAAARHAGVAGQLNNPFKSEAMGGAALDVGVGVVGLSSCLGGAMGTYATGLNLNHHVHHPGAGGTSLLHDALHHHHHGGGGDARFVSYGDMADFGGGGGYDGGSVSLTLGLQHCNNAGPVPAEQQGLLYGSAGDFDYINGSDDRQRFGPASQLLHDFVA

SEQ ID NO: 16986 - protein, 884 aa, Oryza sativa
  Clone ID: TF_OSC410066j.C1.p3.fg
MWTLHVILSLFFLPLFPFSLSTSAFCKRRWRQRQRRRRWREGRRWRHWSGGGDGRGPEWRRRFGLELAWMEAEAATEEMAGGRGPERRRVGGEPGGRWWLAGRELVAKAAPIFLPPRRAPHAPAPIGGADYAVGSVPRAAKGGRLGLRGGLTDGDAGLAEEGCGRRATITAEESAVANRTAAGTRLAISTSSNFHKAASAKKKRRSQKKTTRETTQLQESLGSSLSPFWVVSVILQELSCSSSLLGLKVDFCTGTAKALGIVLQKAQQSEAYCPSLSLLLLLKTMATFFSSSTNQRDLTGGGGDGGDMSFQHYPPPSNPYSDSSAGGLIPLPASIVSHSHIAHGGGDEPAAFREAATADGGEMGLQTQLLMAHGAAARGHQGGLSLSLGTQVPVSLYQYRPAGMAAASLLSPSQSSPMAGRSAQNSIYVQNSRFLRAARELLDEVVNVRDAIKRKGDKNQGKDSGECKGGDAAGDDKAGSNPQEQESNSAPELSPSERQDLQNKVTALMAMLDQVDRRYRHYHHQMQIVMSSFDAVAGGGAARPYTALALQTISRHFRSLRDAIGAQAQAARRGLGEQDASAQGGGGLSRLRYIDQQLRQQRAMQQFGMMQQPQHAWRPQRGLPESAVSVLRAWLFEHFLHPYPKDSEKLMLARQTGLSRGQVSNWFINARVRLWKPMIEEMYKEEFGAEMDSNSSSENGGGGGGKGKDEAISSEDRDEFQSPSSAAAARHAGVAGQLNNPFKSEAMGGAALDVGVGVVGLSSCLGGAMGTYATGLNLNHHVHHPGAGGTSLLHDALHHHHHGGGGDARFVSYGDMADLGGGGGYDGGSVSLTLGLQHCNNAGPVPAEQQGLLYGSAGDFDYINGSDDRQRFGPASQLLHDFVA

SEQ ID NO: 16987 - protein, 1123 aa, Oryza sativa
  Clone ID: TF_OSC400780j.C1.p27.fg
MAHDPNLGFADYFSAADASASSVTTLMPAMDEAAPELFGLQAGMELLGVRGLGMSMMPGAAGKVAALVADAGDDGGGGSTMRFLSEQHQQPSQAPLSLSLCRPDGVLHLGGAARPQHQLAPAAPWMTHHDASSSAPQVHGAWHLRSSRFLLPTQQLLQEFCSLPVDSTKRGNGAKAATQQEDGRGDGSSSSSASWTPSPQIQAMEALELQRLKDKLYIMLEEVDRRYRRYCEQMRAVAGGFEAVAGERAAGAYTAVAARTISRHFRSLRDGIVAQLQAARKALGEKDVSAAGTTRGQTPRLRVIDQCIRHHKSLQGVAAMDSHPWRPQRGLPDRAVTILRAWLFEHFLHPYPSDVDKHILARQTGLSRSQVSNWFINARVRLWKPMVEEMYVEEMKGQDGGDGSGGQGSLNPKPTCSHASEARGGQQLVVGDGDGGEQKPTRAQLRHDAGSLASVVNVDVAAGAGGVARLHQAENFGIMDHLDFDAYDDSHHQQQHGGFGGVSLTLGLQQHGSHGGGGVNIAFGAPGSAHGGAGFLYPGEQMAPDAMHPGHGHHVVGGQFGVAMDGDAASHAQERNIILAKMFTKIYPAAQVESGKALFGMKGGGGDRHHHKDAIVMHAAGKAPKCKASFFLCSLLLYFLLPVLALYVVALAVSPFYSGSSCPEESLASGDVAHLAAAGDAGNRRNDSSPPSDDAAPTGLGHIVFGIAASSELWKSRREYIRTWWRPEQMSGFVWLDKPVYEFYSRNASTGLPGIKISGNTTKFPYTHGRGSRSALRITRIVSESFRLGLPGARWFVMGDDDTVFFPDNLVDVLSRYDHTQPYYIGNPSESHIQNLIFSYGMAFGGGGFAISRALAAQLAHMQDGCIDRYPALYGSDDRIHACVAELGVPLTRHLGFHQCDLWGDVLGLLGAHPVVPLVTLHHLDFLQPVFPTTRSRTAALRRLFEGPARLDSAGVAQQSVCYDGDKQWTVSVSWGFAVVVTRGVLSPREMEMPMRTFLNWYRRADYTAYAFNTRPVARQPCQTPQVYYMRQSRLDRRRNTTVTEYERRRVAPVKCGWRIPDPAALLDRVIVLKKPDPNLWKRSPRRNCCRVLSSPRQGKDRKMTIDVGVCRGGEFARIEVAR

SEQ ID NO: 16988 - protein, 1227 aa, Oryza sativa
  Clone ID: TF_OSC400992j.C1.p51.fg
MELVPFKPEAGALVESGGGAHGDSIPAMVAAQQELLHAQVDQLQLLVVAQCRLTGVNPLAQEMAAGALSIKIGKKPRDLLNPKAVKSMQSLFAMKDTIGKKETREISASFGVTVTQVREFFASQRTRVRKFVRLSREKALRIESSKAPDNVCSISTEQTPVDIEAHAQVIEPLRTLEPLEAQQISLPHLVVPQISLQLPVVLQSCAIPVAPIGVMQPTEAKTNPDPIQKETKQEEVAGVESEDKKFLESIFVLMRKENTFSGQVKLMESILQINNVTVLSWFLTMGGLAIVSTWLGQAVTEEQTTVILVVFKVLLHLPLHKALPAHMSTVLQTINRLRFYRTQDISSKARNLLSRLSKVLVRSQALKKSQKDLICKQRISEILRDESWKSEVDITEDILALTDDASESRMPEPRKTPLLLTASADESNKKSSLQTKSKEKRKVLLVEHPNRKAAGKNVNPVRSTSTNNSRPLSADDIQKAKMRAMFMQEKYGKVDTSKVIEKPHMMEIQKPSGLVDSNVPLVPRTPLTSIIKQPVDPSPSTSKQSTLSPPDKPEIAVSLKLNVTAKENFIEKLDSKRVIWQIPPAWNKHPAIKLLEEQGMAIFCSDMRIEKLPVIPHKQTWGSYYHNFRQFIATVPLFVGRLAKVWIDPAWSLGAGENSKEFEVQTQRNRREKETFYASLKDIPLNPKGPWDVEMDFDDSLTPEIPIEQPPDADAMETDSVSTAPPNIVVPVVDKQIGSTSSVSPAVAAGANGATSEPDLELLAVLLKNPQLVFALTSNQGGTLPSEQTVALLDMLKQTGLGLSELVNSLANNSGVQKEPESGPEAIPASLPSPTPPKDLIARDGWSSEFPSQVRTQNLQHAHLPNRANAPPVASSVQQSFSNVVSSLPSQPYASASALPAQTRTNMTSLPQSMISVNPSTQHVAPMNNLLSRATVHQHTQSYALTSDPVAVAVHHQPAVNKLAHEVQSISHPAVSHSSVAESHASYTSYTWQSSVATIAATGRNATPDRWAAPARTTNSFNAAPSNSNHVTYPNQNAYSNHSTQATTYNSYGSAPVSSHSLHPGQGLDRNGYTHAAEYQTTMARDALWRNSRSPELGAGAVYGSSSQGYVPEPSRQWNYGQQSYNPEPYSRQWSSGQQSYNTVTAEPSRQWSSGQQSYSNPAEPSRQWSSSAHAQPSYNPEPSRPWNSGHQSQNPEASRQWSHHHGKQERYNPTDGRNSYDQHWRR

SEQ ID NO: 16989 - protein, 357 aa, Oryza sativa
  Clone ID: TF_OSC401196j.C1.p32.fg
MDTYGWMMEWKVDRRYRRYREQMRAVEVSFEAVAGGGAAQVYTKLAMRAMSRHFRCLRDALVGQVRALRNAMGESQRDAAGGVAAAAPGATKGDTPRLRVLDQCLRQQRAFQQSGAVDSFPWRPQRGLPERAVAVLRAWLFEHFLHPYPNDVDKHILARQTGLSRSQVSNWFINARVRLWKPMIEDMYKEETKPESSDGNNKLNPSAAGNKQQHRDDPKKNYTATTAEASLVQQSSYHLHLRSSGNRNSSSLMIPAAASTSIDHHHDSSHQLLGGHSYSSAAGLHHGHGGAVSLTLGLQQQQQPFAASMMHQHQQHQHQHQQQQSFMVEAAEEEEDDVLPYRNLMESQLLHDFAGAS

SEQ ID NO: 16990 - protein, 331 aa, Oryza sativa
  Clone ID: TF_OSC22451j.C1.p13.fg
MAFHYQDHALAMDAAAAAAETGGHHHPGFVGAGGVVGGGGGGGWEREKAAIAAHPLYERLLEAHVACLRVATPVDQLPRIDAQIAARPPPLAAATAAAAAAAAGGAPSGGEELDLFMTHYVLLLCSFKEQLQQHVRVHAMEAVMACWELEQTLQSLTVVTLTAGASPREGSGATMSDDEDNQVDSESNMFDGNDGSDGMGFGPLMLTEGERSLVERVRQELKHELKQGYREKLVDIREEILRKRRAGKLPGDTASTLKAWWQAHSKWPYPTEEDKARLVQETGLQLKQINNWFINQRKRNWHSNPASSSSDKSKRKRKRSNAGDGKAEQSW

SEQ ID NO: 16991 - protein, 346 aa, Oryza sativa
  Clone ID: TF_OSC401247j.C1.p8.fg
MVASKQLHSQRCGGHYCQLHHHRPEEIAGAGAESHRRDGSSGCGGAGPMVVLTLGSGAAAAEDDGGGRSRCCCGAGGAAPATMVSALRGSRYLLPAQELLREAVSAAAASARGGDDDDEAVASFPHDGKSTGIGGGGGGVQAKLLSLLSELESRHEHYFGELRRVSASFEPALGAGATAGYTALMAQAMSHHFGSLRRAILRKLRLHAAAAARTRSALLRLARDAMEEDDEGDGEEEEEVVNRVVRRTKQAAAARAEQAWRPLRGLPEDAVGVLRAWLFDHFLHPYPNDNEKLMLAVATGLSRTQISNWFINARVRLWKPMVEEMYNDEFDDDDAGSGGGGASSSS

SEQ ID NO: 16992 - protein, 306 aa, Oryza sativa
  Clone ID: TF_OSC400780j.C1.p16.gm
MEMGVGSFTGGGGGGECSSSSATAAAAAAAAAAAAAAEAEERQLLKGEIAVHPLCEQLVAAHVGCLRVATPIDHLPLIDAQLAQSSGLLHSYAAHHRPFLSPHDKQELDSFLAQYMMLLCSFREQLQQHVRVHAVEAVMACREIEQSLQDLTGATLEEGTGATMSEDEDETAPMLEGPMDMGSDGHDLMGFGPLMPTDSERSLMERVRQELKIELKQGFKSRIEDVREEILRKRRAGKLPGDTTTILKQWWQQHSKWPYPTEDDKAKLVEETGLQLKQINNWFINQRKRNWHNNSQTSTLKSKRKR

SEQ ID NO: 16993 - protein, 203 aa, Oryza sativa
  Clone ID: TF_OSC900358j.C1.p14.hg
PERKARLARDLGLQPRQVAVWFQNRRARWKTKQLERDYAALRHSYDSLRLDHDALRRDKDALLAEIKELKAKLGDEEAAASFTSVKEEPAASDGPPAAGFGSSDSDSSAVLNDVDAAGAAPAATDALAPEACTFLGAPPAAGAGAGAAAAASHEEVFFHGNFLKVEEDETGFLDDDEPCGGFFADDQPPPLSSWWAEPTEHWN

SEQ ID NO: 16994 - protein, 594 aa, Oryza sativa
  Clone ID: TF_OSC400320j.C1.p15.fg
MSGNPSFSQLGAVDAAMNGGYFMAASGNGADVPLFHPAMAPPHDHGGSFGYGDAAAAAMDVGAHFAAANNLVLASLATQLFGAAPAAAAHGHGDYLGATTPPEEEMGGGYDVAVGDSSGGAVSLACLGHGQPGDMAAGWCSTSARKPSCNWSSSNAGVHGGSYYLAGVPEAAGFVSAAAAASELSLSLCSKSSSDSMLNAGGDQCSSAASRSGLTQMSRVVVVEPEPPLVPYYPAANFAVVVARSRYAAVAQQVLNDAVGCVLGGVADAAADSASGVDSGSSRPSSCSVAGGAPSSAVSSNNQLIASSGEHTHGGGDASAQRLRSELLTMLQLVSSPFSTRLPRHQFKQISYYHFESNLKPSFDDDTNSNAQMDQKYNQCLDEIQSTTARFNTLTHATARAAGMSSSSICAPFAHRAVSAMYHGLRRRIAGEIMSAAAAAGRPCRGGESSSAVTGGERERSWESAFIQKHWAVQQLRRGEQQCWRPQRGLPEKSVAVLKAWMFENFLRPYPKDSEKEMLAARSGLSRNQVSNWFINARVRLWKPMIEEMCEELKRSSGGGAGNQALAMEHMNSQDVVQKCGAGLSAFAALNPAT

SEQ ID NO: 16995 - protein, 124 aa, Oryza sativa
  Clone ID: TF_OSC401238j.C1.p6.fg
MSSSLFLLPPLFLSLFSPLRLAAGSTGWGGSGRGQERRRELKRRRRRHTLSSLSGKRGAPSAAAAAVGGSDDEDSDDGSRKKLRLSKDQAAVLEDTFNKHNTLNPKQKAALARQLNLKPRQVEV

SEQ ID NO: 16996 - protein, 201 aa, Oryza sativa
  Clone ID: TF_OSC900153j.C1.p1.fg
MDGEEDSEWMMMDVGGKGGKGGGGGGAADRKKRFSEEQIKSLESMFATQTKLEPRQKLQLARELGLQPRQLEKLAEMLQEPRGKYGDNAGDDARSGGVAGMKKEEFVGAGGAATLYSSAEGGGTTTTTTAKLMPHFGSDDVDAGLFLRPSSQHHPPPPHAGAGFTSSEPAADHQSFNFHSSWPSSTEQTCSSTPWWEFESE

SEQ ID NO: 16997 - protein, 618 aa, Oryza sativa
  Clone ID: TF_OSC400292j.C1.p1.fg
MSTSSNPSYHQLGLDAISCCFVAGGGGAEAAAPFFGFGFGDVDGEFLVASPVAAVGDELACAVPLRRPQGSVSEEEVNAAAVAAAAAGGAESCSTVHSVLGSVEFGCGTSSGVTIAQASRMGRLAGEAPCGDAGGGGWIYGGSGIAPLHGAYYLSGFSSGAGAGFLSPFAASSVAAAAPAASELSLRLGATKCSSPSSMANASSEVSCSGLTHVSSGGGLGYHQAAAAGAGAALFHPTHGDDAAAAAAGELRQAYHSRAPPHFSQVVSRSAVLAHVAQELLNGFVACLLQDVAADAASGVDGGEASQALLVGLFGEDHDGADGGCLTRERRCEVGGGGAASEEATPTGEFLAQFLVEHLRNRFLVRTNGDEMQVDEKCNQCVEEMQSTAARFNSMVRSTGGGGGGLTAAFAGRAVAAAYRRVRRRVMGQLVAAATARSSSSAAAAALEEKERSWESSFIQKHWAMQQLRRGDQQSWRPQRGLPEKSVAVLKAWMFENFLRPYPKDSEKDMLAARSGLSRSQVSNWFINARVRLWKPMIEDMYEELKKTSGGSDGAAEIEHLSSKDVLSLERSKKPSHLAVQCDGKHHDRFAVTQMEGVFEEKGIEEIGKIRKTRVVIL

SEQ ID NO: 16998 - protein, 177 aa, Oryza sativa
  Clone ID: TF_OSC8589j.C1.p1.np
PKACAEGMCGGSGGGSKGGGAATPSTRWCPTPEQLMILEEMYRSGVRTPNAAEIQQITAHLAYYGRIEGKNVFYWFQNHKARERQRSAAASARGTSSNPPPSSTVPPAPTAAAAGAVVRCTPPPPPPPPSPIRCGRRCPKSSPAAAAAAATAAVDYCSTASASASATAADMAIPPCY

SEQ ID NO: 16999 - protein, 289 aa, Oryza sativa
  Clone ID: TF_OSC32301j.C1.p11.fg
MDHMQQQQRQQVGGGGGEEVAGRGGVPVCRPSGTRWTPTTEQIKILRELYYSCGIRSPNSEQIQRIAAMLRQYGRIEGKNVFYWFQNHKARERQKKRLTTLDVTTTTAAAADADASHLAVLSLSPTAAGATAPSFPGFYVGNGGAVQTDQANVVNWDCTAMAAEKTFLQDYMGVSGGGGAAAAAPTPWAMTTTTREPETLPLFPVGGGGGDGAHRHAGHGGFPSNFQRWGSAAATTNTITVQQHLQQHNFYSSSSSQLHSQDGPAAGTSLELTLSSYYCSCSPYPAGSM

SEQ ID NO: 17000 - protein, 289 aa, Oryza sativa
  Clone ID: TF_OSC401125j.C1.p10.fg
MDHMQQQQRQQVGGGGGEEVAGRGGVPVCRPSGTRWTPTTEQIKILRELYYSCGIRSPNSEQIQRIAAMLRQYGRIEGKNVFYWFQNHKARERQKKRLTTLDVTTTTAAAADADASHLAVLSLSPTAAGATAPSFPGFYVGNGGAVQTDQANVVNWDCTAMAAEKTFLQDYMGVTGGGGAAAAAPTPWARTTTTREPETLPLFPVGGGAGDGAHRHAGHAGFPSNFQRWGSAAATTNTITVQQHLQQHNFYSSSSSQLHSQDGPAAGTSLELTLSSYYCSCSPYPAGSM

SEQ ID NO: 17001 - protein, 200 aa, Oryza sativa
  Clone ID: TF_OSC401161j.C1.p1.fg
MEALSGRVGVKCGRWNPTAEQVKVLTELFRAGLRTPSTEQIQRISTHLSAFGKVESKNVFYWFQNHKARERHHHKKRRRGASSPDSGSNDDDGRAAAHEGDADLVLQPPESKREARSYGHHHRLMTCYVRDVVETEAMWERPTREVETLELFPLKSYDLEVDKVRYVRGGGGEQCREISFFDVAAGRDPPLELRLCSFGL

SEQ ID NO: 17002 - protein, 284 aa, Oryza sativa
  Clone ID: TF_OSC401921j.C1.p7.fg
MDRTATASWEVMSRRGEQQQQLMMQAPASHNGGSGGGEPARSRWAPKPEQILILESIFNSGMVNPAKDETARIRRLLERFGAVRDANVFYWFQNRRSRSRRRARQLQQACGAALHQLPSAAAAAGAGGGGDYYHHHHQPSSSPFLMHGGGGGGVVTSTTAAPAVAASGHFLADEVDGGGDDDLFAISRQMGLMARHGGGDHHYSSYADSDATQLSYQPTGTIQVFINGVAYDVPSGGALDMAGTFGRDAMLVHSSGEVLPVDEHGVLINSLQMGECYYLVSKSI

SEQ ID NO: 17003 - protein, 328 aa, Oryza sativa
  unsure (1)..(328): unsure at all Xaa locations
  Clone ID: TF_OSC19014j.C1.p1.np
IVVVSHGSISHAHPPAPSXLTHKHTMPTLLHDKHATPANGYLPLPSPQQQRFCGRLQQNQNNYPARKSNKPNKNKRNTLDDIGGGGEDDDDALEALFKQLEEDLKNDDLSVEDDDDGISEEDMARFEQELAEAIGDIADADSGEGSSLGSEAYGNDEKTDEIKRPLKNWQLKRLARALKIGRRKTSIKNLAGELGLDRTLVIELLRNPPPKLLFMSDSLPDEDPSKPEIKEIEPSPVVDNADVTETKPQTELPVHVMCAEWSSQKRLKKVQLETLERVYSRTKRPTNTMISSIVQVTSLPRKTIVKWFEDRREQDGVPDHRVAFKRSL

SEQ ID NO: 17004 - protein, 514 aa, Oryza sativa
  Clone ID: TF_OSC33862j.C1.p2.fg
MAAMVGAPLAVAAAAAAPGARVFLARPLLRRSPRGVACALRRRPSKYKNKIQNEEVVVEDDIGGGGEDDDDALEALFKQLEEDLKNDDLSVEDDDDGISEEDMARFEQELAEAIGDIADADESGEGSSLGSEAYGNDEKTDEIKRPELKNWQLKRLARALKIGRRKTSIKNLAGELGLDRTLVIELLRNPPPKLLFMSDSLPDEDPSKPEIKEIEPSPVVDNADVTETKPQTELPVHVMCAEWSSQKRLKKVQLETLERVYSRTKRPTNTMISSIVQVTSLPRKTIVKWFEDRREQDGVTFSTLLDQTHALPYFNRNRVAIFNMEKFRSSSEGNYVETGEGGSIWGPARLQHRDSERGVVVLVVQMMAGLQRSATTFRRSGSSGLVWDERFLTEDAEAAKAGDGDGGGGTEEPQPELRHSKSVGSIGMMRRVAADDGDDSEKTTKQQRKKKKKKKKDGQKEDDNRSQQVFRTKDIAPDVDPPSPRVSGCILCSIFSGSGSSSSATSRRAKPRKK

SEQ ID NO: 17005 - protein, 601 aa, Oryza sativa
  Clone ID: TF_OSC401166j.C1.p11.fg
MAHDPSLGYADYFAAEVDGTGATELYGLQQHQQGVGVAEMFGVRGLMPAAHAHEQSKGVGALVVGGGGVDDGGATTLPTVHFGGLGELHHHQHRQSQAPLSLSLHRPEAAATSLLMQQQQQHLHHQPSPPAGAASTWQLQQGAWHLRGSRFLLPTQQLLQEFCSLPVKSTTSPSSASKATKPPQEEAASGGGSSSWTAPTQIQSMDAAELQRLKGKLYTMLEEVDRRYRRYCEQMRALAASFEAVAGERAAASYTRLASRTISRHFRSLRDGVVAQLQAVRKQLGEKDTAVPGMTKGETPRLRVLDQCLRQHKAYQAGMLESHPWRPQRGLPERAVSILRAWLFEHFLHPRMFAGFVTMLKLSPRYPSDVDKHILARQTGLSRSQVANWFINARVRLWKPMVEEMYAEEMKDEEGSGQSTQASNPQNPNPSSYTSEVRGGGGGGEDRGEQKPSRAQLLHDAGSLASVVSIGHGGAGRTMVDHHHHQSLNFGTMDQLDFDAYEAAGGGQGFGAGGGVSLTLGLQQQHADPHDGVNVAFAAAAAPPNSSGVAAEYLFMGGGEHQQQLPQTAQFGAVMEGDAASHYRGLSATAAGFHLLHDLAG

SEQ ID NO: 17006 - protein, 306 aa, Oryza sativa
  Clone ID: TF_OSC9739j.C1.p1.fg
MMALGVPPPPSRAYVSGPLRDDDTFGGDRVRRRRRWLKEQCPAIIVHGGGRRGGVGHRALAAGVSKMRLPALNAATHRIPSTSPLSIPQTLTITRDPPYPMLPRSHGHRTGGGGFSLKSSPFSSVGEERVPDPKPRRNPRPEQIRILEAIFNSGMVNPPRDEIPRIRMQLQEYGQVGDANVFYWFQNRKSRSKNKLRSGGTGRAGLGLGGNRASEPPAAATAHREAVAPSFTPPPILPPQPVQPQQQLVSPVAAPTSLSSSSSDRSSGSSKPARATLTQAMSVTAAMDLLSPLRRSARPRQEQRHV

SEQ ID NO: 17007 - protein, 157 aa, Oryza sativa
  Clone ID: TF_OSC9739j.C1.p2.np
YPSDPHHHPRSSLPNAASKSRPPDRRRRLLPKSSPFSSGMGEERVPDPKPRRNPRPEQIRILEAIFNSGMVNPPRDEIPRIRMQLQEYGQVGDANVFYWFQNRKSRSKNKLLRRDRPRGARARRQPQQLVSPVAAPTSLSSSSSDRSSGSSKPARAN

SEQ ID NO: 17008 - protein, 552 aa, Oryza sativa
  Clone ID: TF_OSC413563j.C1.p7.fg
MASPNRHWPSMFRSNLACNIQQQQQPDMNGNGSSSSSFLLSPPTAATTGNGKPSLLSSGCEEGTRNPEPKPRWNPRPEQIRILEGIFNSGMVNPPRDEIRRIRLQLQEYGQVGDANVFYWFQNRKSRTKNKLRAAGHHHHHGRAAALPRASAPPSTNIVLPSAAAAAPLTPPRRHLLAATSSSSSSSDRSSGSSKSVKPAAAALLTSAAIDLFSPAPAPTTQLPACQLYYHSHPTPLARDDQLITSPESSSLLLQWPASQYMPATELGGVLGSSSHTQTPAAITTHPSTISPSVLLGLCNEALGQHQQETMDDMMITCSNPSKVFDHHSMDDMSCTDAVSAVNRDDEKARLGLLHYGIGVTAAANPAPHHHHHHHHLASPVHDAVSAADASTAAMILPFTTTAAATPSNVVATSSALADQLQGRLFRDWTCAWHPSSQKDAFNIASLSGLDFRMHRYASFLAVINLPEGGAAPPPPSATVVAVSRDDETMCTKTTSYSFPATMHLNVKMFGEAAVLVRYSGEPVLVDDSGVTVEPLQQGATYYVLVSEEAVH

SEQ ID NO: 17009 - protein, 507 aa, Oryza sativa
  Clone ID: TF_OSC400934j.C1.p31.fg
MAGSPPSLLSGSSAGSAGGGGYSLKSSPFSSVGEERVPDPKPRWNPRPEQIRILEAIFNSGMVNPPRDEIPRIRMQLQEYGQVGDANVFYWFQNRKSRSKNKLRSGGTGRAGLGLGGNRASAPAAAHREAVAPSFTPPPPILPAPQPVQPQQQLVSPVAAPTSSSSSSSDRSSGSSKPARATSTQAMSVTTAMDLLSPLAAACHQQMLYQGQPLESPPAPAPKVHGIVPHDEPVFLQWPQSPCLSAVDLGAAILGGQYMHLPVPAPQPPSSPGAAGMFWGLCNDVQAPNNTGHKSCAWSAGLGQHWCGSADQLGLGKSSAASIATVSRPEEAHDVDATKHGLLQYGFGITTPQVHVDVTSSAAGVLPPVPSSPSPPNAAVTVASVAATASLTDFAASAISAGAVANNQFQGLADFGLVAGACSGAGAAAAAAAPEAGSSVAAVVCVSVAGAAPPLFYPAAHFNVRHYGDEAELLRYRGGSRTEPVPVDESGVTVEPLQQGAVYIVVM

SEQ ID NO: 17010 - protein, 278 aa, Oryza sativa
  Clone ID: TF_OSC401231j.C1.p4.fg
MDGGHSPDRHAAAAAGEPVRSRWTPKPEQILILESIFNSGMVNPPKDETVRIRKLLERFGAVGDANVFYWFQNRRSRSRRRQRQLQAQAQAAAAAASSGSPPTASSGGLAPGHAGSPASSLGMFAHGAAGYSSSSSSSWPSSPPSVGMMMGDVDYGGGGDDLFAISRQMGYMDGGGGSSSSAAAGQHQQQQLYYSCQPATMTVFINGVATEVPRGPIDLRSMFGQDVMLVHSTGALLPANEYGILLHSLQMGESYFLVRMHTCCLPNIGLRLQPPRKQ

SEQ ID NO: 17011 - protein, 468 aa, Oryza sativa
  Clone ID: TF_OSC14111j.C1.p1.gm
MTLPSAERCLRPCKSFSCCCILSISRFVEPTDSTARRAPTRLLGLEPAPPVSSVVGRAFAHRGSVATGGARHSRALSWLWRAPARALGRARDMYVRGMTGCARCVPADAAFGYPVFVPSSAAASMRSNSFGSDSRFGGGADDDLRELIRAASQRRAAEQEREARAVARSQSMASGISMARIDEDAPCEEFGDAGVMHYPRSQSCVGGVGGRIAHCHRKRCNPKKYEGILKKQILIQSLLFLCCQPIPNTQHLSAQSSSRPIRHPHPRPIHAASSSRPGARTAPAFTKTTEQGDDNIAALHHASCAALLYHDGLLDLVVASTGGGRRRHPPELPPAGGGGGGGGRADPAPDAGGSAVVPPPFPCGGSGEGGEGGNFGGGGGRSGGWRQRWRCPMRSGSGSDGSGYDKAGMDSGKYVHYTPGQVEALERVYAECPKPRFSRRQQLLCELSILANIEPKQKIKVWFPKQKQ

SEQ ID NO: 17012 - protein, 236 aa, Oryza sativa
  Clone ID: TF_OSC407921j.C1.p3.fg
MRLHHLHVAYLDHKASSSSSSPAPPSISPSSIPGSAAFPAFSFKCLRPLAPKISLPEPRKMIAPPDFVVPRARNASKLLNYTVQVPAAGTTRWNPSAEQIKVLEMLYRGGMRTPNSVQIERITEELGKYGRIEGKNVFYWFQNHKARERQKQKRAALLTLSTLDPSLLPATANETKEAPEKKEKDVEDGLASCKRRCKAWGDGAGDGDAVVATEAAGGCTDEVTLELFPLHPQGKA

SEQ ID NO: 17013 - protein, 262 aa, Oryza sativa
  Clone ID: TF_OSC407922j.C1.p1.fg
MRLHHLHVAYLDHKASSSSSSPAPPSISPSSIPGSAAFPAFSFKCLRPLAPKISLPEPRKMIAPPDFVVPRARNASKLLNYTVRHIKPYLFLIDRSIRFMIVYIFGLQVQVPAAGTTRWNPSAEQIKVLEMLYRGGMRTPNSVQIERITEELGKYGRIEGKNVFYWFQNHKARERQKQKRAALLTLSTLDPSLLPATANETKEAPEKKEKDVEDGLASCKRRCKAWGDGAGDGDAVVATEAAGGCTDEVTLELFPLHPQGKA

SEQ ID NO: 17014 - protein, 375 aa, Oryza sativa
  Clone ID: TF_OSC900018j.C1.p17.fg
MESFASLAGGGSSSTTARLPELISPENPDHISPPPLLYQLLAGPESSARQHGHDGHHHGGGGGEAAAAAVQGQVSPAGAEAAVKAEIMSHPQYSALLAAYLGCKKVGAPPDVLTKLTAVPAAQQLDEADGHPRRRHEPQRDDDPDQLDQFMDAYCSMLTRYREELERPILEAAEFFSRVETQLDSLAESNCEGTGSSEEEQDPSDKQLKHQLLRKYGGSLGDLRQVFSKRTKKGKLPKEARQKLLHWWELHYKWPYPSVRTHHIPFDQFNHIFCTKLTRLKMREIYGVVYEQEMEKMTLAQTTGLDQKQINNWFINQRKRHWKPTPVAGTAFPTMEAAGGGFRHSGHGGGLAAAAALPLYMGRPFVVDGMYRLGS

SEQ ID NO: 17015 - protein, 85 aa, Oryza sativa
  unsure (1)..(85): unsure at all Xaa locations
  Clone ID: TF_OSC900018j.C1.p27.gp
MAAAVAMXMRSGSGSDGSGYDKAGMDSGKYVHYTPGQVEALERVYAECPKPRFSRRQQLLCELSILANIEPKQKIKVWFXQNRRX

SEQ ID NO: 17016 - protein, 219 aa, Oryza sativa
  Clone ID: TF_OSC100557j.C1.p1.fg
MNQNEYPCLKLNDSNCEGTGSSEEEQDTSCPEAEEIDPSDKQLKHQLLMKYGGSLGDLRQAFSKRTKKGKLPKEARLKLLHWWELHYDKWPYPSVRTHIYASHLINSTTFFCTKLDLMKMRELLGCTCVYEQEVEKMTLAQTTGLDQKQISNWFINQRKRHWKPTPVAGMTFPTVEAAGGGFRHSGHDGGLAAAAAAAALPLYMGSWPFVVDGMYRLGS

SEQ ID NO: 17017 - protein, 778 aa, Oryza sativa
  Clone ID: TF_OSC31211j.C1.p5.fg
MVFGLNCPAKQIVYVEKKRRWGPCIHQLRASSFGSESLVRKTAFLIAFAHEKAGHREKGEKLTKKDIRSIGIGMDLGAASAVAVSSSGGRRATGEIGQRQVESAGELGLTDKQLQMWFCHRRLKDRKPPPKRQQLEEEVHVPVMAPPPVLPPPLPHSELTMAPGGMYGEQLLPSSSRRGTGRPSAILDMSDLQCLPLLTSHATLKLIDCIPHQGKAWQIVQLDALDERMEHFPGLEDFYEEKHRAPQIASGERLKTLRVRGHTAHILFDDRYVPYLRRAKLLAFVTMAQRPVPLYNAAALTALVDRWRPETHTFHLPCGELTVTLEDVAMILGLPIRGQAVTGDTASGNWRERVEEYLGLEPPVAPDGQRQTKTSGVPLSWLRANFGQCPAEADEATVQRYCRAYVLYIFGSILFPDSGGDMASWMWLPLLADWDEAGTFSWGSAALAWLYRQLCDACRRQGGDANLAGCVWLLQVWMWMRLPVGRPMWRTHQAWPHQDADRRPTVAHLWESVPSPVVGRRNLAYYHYTNEMDYLQPEHVVWMPYQAQEVLELELNPMCHIEDALKTLRCPLICFYAVEFQMCHRRLRQRCRKLAARLGCRSTDVVEHAHAHQEGDEEGEVGDEEGEQDKEAEEGDEEEEGDEDREEEADELGPSQLEDAPESSQPDISQPGPSRPRSRRAPSQDWRYTPDVPRPRTRAPVHLALRSQPSHPEGLLGWATAETAKSHLSARLAGAEFPNVSAILAGAEVPARKPSRRLAGQGHGRNGQVPPQRQVGWR

SEQ ID NO: 17018 - protein, 349 aa, Oryza sativa
  Clone ID: TF_OSC401214j.C1.p9.fg
MDPGRVVFDSGVARRACPGGAQMLLFGGGGSANSGGFFRGVPAAVLGMDESRSSSSAAGAGAKRPFFTTHEELLEEEYYDEQAPEKKRRLTAEQVQMLERSFEEENKLEPERKTELARRLGMAPRQVAVWFQNRRARWKTKQLEHDFDRLKAAYDALAADHHALLSDNDRLRAQVISLTEKLQDKETSPSSATITTAAQEVDQPDEHTEAASTTGFATVDGALAAPPPGHQQPPHKDDLVSSGGTNDDGDGGAAVVVFDVTEGANDRLSCESAYFADAAEAYERDCAGHYALSSEEEDGGAVSDEGCSFDLPDAAAAAAAMFGAAGVVHHDAADDEEAQLGSWTAWFWS

SEQ ID NO: 17019 - protein, 362 aa, Oryza sativa
  Clone ID: TF_OSC900339j.C1.p7.fg
MELGLSLGEAMADAGRELVLGLGMGRREEAAEAGRRDHEVRRELEFGSMSSRCGGSSPEPTVRLTLLPMVPGLGLPWPPPPPPSSESRHLEASTRGFDVNRPPSSGGGGGGGGAEEEQDDVAGAALSSSPNNSAGSFPMDDFSGHGLGGNDAAPGGGGGDRSCSRASDEDDGGSARKKLRLSKEQSAFLEESFKEHSTLNPKQKLALAKQLNLRPRQVEVWFQNRRARTKLKQTEVDCEYLKRCCETLTEENRRLQKELAELRALKTVHPFYMHLPATTLSMCPSCERVASNSAPATASSAATSSTAAPPAAPSSGGIAATSSSAAAAAAPDHRPSSFAALFSSPRGFPLSVAPQAQPPTSS

SEQ ID NO: 17020 - protein, 290 aa, Oryza sativa
  Clone ID: TF_OSC400630j.C1.p3.fg
MESDCQFLVAPPQPHMYYDTAAAAVDEAQFLRQMVAAADHHAAAAGRGGGDGDGGGGGGGGGERKRRFTEEQVRSLETTFHARRAKLEPREKAELARELGLQPRQVAIWFQNKRARWRSKQIEHDYAALRAQYDALHARVESLRQEKLALADQVRAPLPTNHQLYLLHTCTHGDNARFAFLQVDELRGKLNERQDQSGSCDGGGAEGDDDDKRNSVMNASSSGLVEEDYVSCLAVPVVDVSEDGSAACGGSSYEYDHHLDYLGGGQLPDPFCGMPDLWEIWPMVEWNAVA

SEQ ID NO: 17021 - protein, 871 aa, Oryza sativa
  Clone ID: TF_OSC11879j.C1.p12.fg
MSFGGMFDGAGSGVFSYDAGGGGGGGGVHNSRLLPTPPVPKPGGGFAAPGLSLGLQTMDGSQLGDVNRSLAMMGNGGSGSGGDGDSLGRGREEENDSRSGSDNLDGASGDELDPDNSNPRKKKKRYHRHTPQQIQELEAVFKECPHPDEKQRMELSRRLNLESRQVKFWFQNRRTQMKTQIERHENALLRQENDKLRAENMTIREAMRNPMCASCGGAAVLGEVSLEEQHLRIENARLKDELDRVCALAGKFLGRPISSISSPGPPSLQACSGLELGVGSNGGFGLGALGASAAMQSIPDLMGGSSGLTGGPVGSAAMRLPAGIGGLDGAMHAAAADGGAIDRAVLLELALAAMDELVKVAQMDEPLWLPSLDGGFETLNYDEYHRAFARVVGQCPAGYVSEATRESGIAIISSVDLVDSLMDAPRWSEMFPCVVARASTTDIISSGMGGTRSGSIQLMHAELQVLSPLVPIREVVFLRFCKQHAEGLWAVVDVSVDAVLRPDQNGGGGSSSSSYMGCRLLPTGCIVQDMNNGYSKVTWVVHAEYDETAAHQLYRPLLRSGQALGARRWLASLQRQCQYLAILCSNSLPARDHAAITPVGRRSMLKLAQRMTDNFCAGVCASAAQKWRRLDEWRGEGGGGGGGGGGDGEDKVRMMARHSVGAPGEPPGVVLSATTSVRLPGTLPQRVFDYLRDEQRRGDWDILANGEAMQEMDHIAKGQHHGNAVSLLRPNATSGNQNNMLILQETCTDSSGSLVVYAPVDVQSMHVVMNGGDSAYVSLLPSGFAILPDGHNNGASPSPAEVGSGASPNSAAGGGGGSNNTGSLVTVAFQILVNNLPTAKLTVESVDTVSNLLSCTIQKIKSALQASIISP

SEQ ID NO: 17022 - protein, 351 aa, Oryza sativa
  Clone ID: TF_OSC400138j.C1.p4.fg
MASNGAAAGAMAPFFPPNFLLQMQQPLPLHHQHLQDHAHGGHGGHHLLPPPPPSLSPFLPDLAMDAPPPPMYEASGGDGGGGGAASEDEEDGCGGGGGGGGGEKKRRLSVEQVRTLERSFESGNKLEPERKAQLARALGLQPRQVAIWFQNRRARWKTKQLEKDFDALRRQLDAARAENDALLSLNSKLHAEIVALKGGAAAAGGGGSSCRQEAASELINLNVKETEASCSNRSENSSEINLDISRPAPPPPPPPANESPVNRGIPFYASIGRGGAGGVDIDQLLLRGGHSPSPAAVTTPPPPKMELGITGNGGGADAAAAGAGSFGGLLCGAVDEQPPFWPWADGHHHFH

SEQ ID NO: 17023 - protein, 871 aa, Oryza sativa
  Clone ID: TF_OSC900153j.C1.p15.fg
MSFGGMFDGAGSGVFSYDAGGGGGGGGVHNSRLLPTPPVPKPGGGFAAPGLSLGLQTMDGSQLGDVNRSLAMMGNGGSGSGGDGDSLGRGREEENDSRSGSDNLDGASGDELDPDNSNPRKKKKRYHRHTPQQIQELEAVFKECPHPDEKQRMELSRRLNLESRQVKFWFQNRRTQMKTQIERHENALLRQENDKLRAENMTIREAMRNPMCASCGGAAVLGEVSLEEQHLRIENARLKDELDRVCALAGKFLGRPISSISSPGPPSLQACSGLELGVGSNGGFGLGALGASAAMQSIPDLMGGSSGLTGGPVGSAAMRLPAGIGGLHGAMHAAAADGGAIDRAVLLELALAAMDELVKVAQMDEPLWLPSLDGGFETLNYDEYHRAFARVVGQCPAGYVSEATRESGIAIISSVDLVDSLMDAPRWSEMFPCVVARASTTDIISSGMGGTRSGSIQLMHAELQVLSPLVPIREVVFLRFCKQHAEGLWAVVDVSVDAVLRPDQNGGGGSSSSSYMGCRLLPTGCIVQDMNNGYSKVTWVVHAEYDETAAHQLYRPLLRSGQALGARRWLASLQRQCQYLAILCSNSLPARDHAAITPVGRRSMLKLAQRMTDNFCAGVCASAAQKWRRLDEWRGEGGGGGGGGGGDGEDKVRMMARHSVGAPGEPPGVVLSATTSVRLPGTLPQRVFDYLRDEQRRGDWDILANGEAMQEMDHIAKGQHHGNAVSLLRPNATSGNQNNMLILQETCTDSSGSLVVYAPVDVQSMHVVMNGGDSAYVSLLPSGFAILPDGHNNGASPSPAEVGSGASPNSAAGGGGGSNNTGSLVTVAFQILVNNLPTAKLTVESVDTVSNLLSCTIQKIKSALQASIISP

SEQ ID NO: 17024 - protein, 610 aa, Oryza sativa
  Clone ID: TF_OSC101881j.C1.p2.fg
MAGARSAPSVAAAPLPMPLPRPSSSGSTLQKLVGPAAPSLAPLTLRAAFVSFPALLPRPGTSGSALPRPARAGFPPRCPLSHASTAAPFPTQPPFPSSLPLPSSTRFGQPDPLAGRLGRQIRKPSLMRGGTGRRWREKGRRREEGEGWERGVERREAEGPREEGESRREFGGCWILIASKFILQWRPLPTVSENPIFAGGHLRGVKPMSFGNLGGGGGAGGSGKAAASSFLQLPLSTAAAATAYYGTPLALHQAAAAAGPSQYHGHGHPHHGGGHHHSKHGGAGGGEISAAEAESIKAKIMAHPQYSALLAAYLDCQKVGAPPEVLERLTATAAKLDARPPGRHDARDPELDQFMEAYCNMLAKYREELTRPIDEAMEFLKRVESQLDTIAGGAHGGGAGSARLLLADGKSECVGSSEDDMDPSGRENEPPEIDPRAEDKELKFQLLKKYSGYLSSLRQEFSKKKKKGKLPKEARQKLLHWWELHYKWPYPSETEKIALAESTGLDQKQINNWFINQRKRHWKPSEDMPFVMMEGFHPQNAAALYMDGPFMADGMYRLDGWFELKSKLLVKLLDLDVLLPRAVNFIVSGFGNQACLVKHLEIMYTFPDDN

SEQ ID NO: 17025 - protein, 228 aa, Oryza sativa
  Clone ID: TF_OSC401329j.C1.p51.fg
MGATSPSGLELTMAVPGLSSSGSEGAGCNNNNAGGGCNMRDLDINQPASGGEEEEFPMGSVEEDEEERGVGGPHRPKKLRLSKEQSRLLEESFRLNHTLTPKQKEALAIKLKLRPRQVEVWFQNRRARTKLKQTEMECEYLKRCFGSLTEENRRLQREVEELRAMRVAPPTVLSPHTRQPLPASALTMCPRCERITAATGPPAVRPPPSSAAAAAPSPFHPRRPSAAF

SEQ ID NO: 17026 - protein, 357 aa, Oryza sativa
  Clone ID: TF_OSC21192j.C1.p3.gm
MKRPTSSSRKSKKQGEDLAFSEEGSLPAVTMEQKDEAEMEEVDEEEEEEVDEDMAGGHAAQSPSPSCGLGEKKRRLALEQVRALERSFDTDNKLDPDRKARIARDLGLQPRQVAVWFQNRRARWKTKQLERDFAALRARHDALRADCDALRRDKDALAAEIRELREKLPTKPADTAASVKVEAGNDAAAGAAAATVCKDGSSDDSDSSVVFNDEASPYSGAAFIGFGPSFLVDDASAATVGCSSSLPALESKWHGPYSDDSCKGGVYGFTEEWLAACSGEMAGNDAAGFFSDEHASNLNFGWDRLISFSFGSTMPRIHLGMDGYRYAKSELSHDHGGIREEGDVVVAAAGSAWFGTA

SEQ ID NO: 17027 - protein, 344 aa, Oryza sativa
  Clone ID: TF_OSC412751j.C1.p2.fg
MESGRLIFSTAGSGAGQMLFLDCGAGGGGVGGGAMFHRGARPVLGMEEGGRGVKRPFFTTPDELLEEEYYDEQLPEKKRRLTPEQVHLLERSFEEENKLEPERKTELARKLGLQPRQVAVWFQNRRARWKTKQLERDFDRLKASFDALRADHDALLQDNHRLHSQVMSLTEKLQEKETTTEGSAGAAVDVPGLPAAADVKVAVPDAEEPALEEAAAAFEEQQEQQVKAEDRLSTGSGGSAVCEHGRANWVVGCGRQHLAAVDSSVESYFPGGDEYHDCVMGPMDHAAGGIQSEEDDGAGSDEGCSYYADDAGVLFADHGHHHHHQHADDDEEDGQQISCWWMWN

SEQ ID NO: 17028 - protein, 343 aa, Oryza sativa
  Clone ID: TF_OSC900058j.C1.p14.fg
MESGRLIFSTAGSGAGQMLFLDCGAGGGGVGGGAMFHRGARPVLGMEEGGRGVKRPFFTTPDELLEEEYYDEQLPEKKRRLTPEQVHLLERSFEEENKLEPERKTELARKLGLQPRQVAVWFQNRRARWKTKQLERDFDRLKASFDALRADHDALLQDNHRLHSQVMSLTEKLQEKETTTEGSAGAAVDVPGLPAAADVKVAVPDAEEPALEEAAAAFEEQQEQQVKAEDRLSTGSGGSAVVDTDAQLVVGCGRQHLAAVDSSVESYFPGGDEYHDCVMGPMDHAAGGIQSEEDDGAGSDEGCSYYADDAGVLFADHGHHHHHQHADDDEEDGQQISCWWMWN

SEQ ID NO: 17029 - protein, 250 aa, Oryza sativa
  Clone ID: TF_OSC401108j.C1.p35.fg
MEWDKAKASSGEAVDDRGGGEGGLGYVKVMTDEQMEVLRKQISIYATICEQLVEMHRALTAQQDSIAGMRLGNLYCDPLMVPGGHKITARQRWTPTPMQLQILENIFDQGNGTPSKQKIKDITAELSQHGQISETNVYNWFQNRRARSKRKQAALPNNNAESEAEADEESPTDKKPKSDRPLHQNIAMRDHNSERISEMHHFDTEHEQIRRMMYASNDSSSRSSGSLGQMSFYDNVMSNPSTSYKHPCFI

SEQ ID NO: 17030 - protein, 320 aa, Oryza sativa
  Clone ID: TF_OSC900132j.C1.p22.fg
MAASSEVSIDPDQWFYIYSLERVAYVCERVGSPVMEEAELRRRRRKRPFLTTTHDELELQMEDLVDELYGVDEQGSSSAAARKRRLTAEQVRALERSFEEEKRKLEPERKSELARRLGIAPRQVAVWFQNRRARWKTKQLELDFDRLRAAHDELLAGRTALAADNESLRSQVILLTEKLQANGKSPSPSPAPAEQTAVPAAPESAKSFQLEEGRRLYDAAGSTTTTNGGGGGVAMPAARVAAARAASNDSPESYFAGARSPPSSSEDDCGGAGSDDDYPSSSVLLPVDATLVGDAFEHAVAATVAADEEAPLNSWEWFWN

SEQ ID NO: 17031 - protein, 247 aa, Oryza sativa
  Clone ID: TF_OSC418226j.C1.p10.fg
MMERAEDLRLSLSLSSPLIAPRTHHVAMLFHAPPEKRFLEMPLLPAAKRSEVVAAEEERAGLRGGGGSDEEDGGCGIDGSRKKLRLSKDQSAVLEDSFREHPTLNPRQKATLAQQLGLRPRQVEVWFQNRRARTKLKQTEVDCEFLKRCCETLTEENRRLQKEVQELRALKLVSPHLYMNMSPPTTLTMCPSCERVSNTNNNSSAAAAADRRGIRTTTAAGGGSVVDTAADGGILCHRPIAVRPQQS

SEQ ID NO: 17032 - protein, 311 aa, Oryza sativa
  Clone ID: TF_OSC422332j.C1.p24.fg
MEMMVHGRRDEQYGGLRLGLGLGLSLGVAGGAADDEQPPPRRGAAPPPQQQLCGWNGGGLFSSSSSDHRGRSAMMACHDVIEMPFLRGIDVNRAPAAETTTTTARGPSCSEEDEEPGASSPNSTLSSLSGKRGAPSAATAAAAAASDDEDSGGGSRKKLRLSKDQAAVLEDTFKEHNTLNPKQKAALARQLNLKPRQVEVWFQNRRARTKLKQTEVDCELLKRCCETLTDENRRLHRELQELRALKLATAAAAPHHLYGARVPPPTTLTMCPSCERVASAATTTRNNSGAAPARPVPTRPWPPAAAQRSSA

SEQ ID NO: 17033 - protein, 973 aa, Oryza sativa
  Clone ID: TF_OSC900395j.C1.p10.fg
MGMVRKIGRAGREADASSSPELLPGPAQPASRTSQDGSLPPTVTPLKRLNIRVEQAADAAPTVGSAVGPHIRRSLGRRTHRPRRGQWLRAALTPASITSPLLIPDLRVRGAKDTDRGPFGYRGAQRHGLARLGSSESGCEACGRGGVDPRKRTFSSLRRGVLLRRGGGGMSFGGLFDGGGGGGMQFPFASGFASSPALSLALDNAGGGIGGRMLGGGAGAGSSAGGAMTRDTEAENDSRSGSDHLDAISAAGEDDVEDAEPSNSRKRKKRYHRHTPQQIQELEALFKECPHPDEKQRAELSRRLSLDARQVKFWFQNRRTQMKTQLERHENALLKQENDKLRAENMTIREAMRSPMCGSCGSPAMLGEVSLEEQHLRIENARLKDELNRVCALATKFLGKPISLLSPPPLLQPHLSLPMPNSSLELAIGGIGGLGSLGTLPGCMNEFAGGVSSPMGTVITPARATGAAIPSLVGNIDRSVFLELAISAMDELVKMAQMDDPLWVPALPGSPSKEVLNFEEYLHSFLPCIGMKPAGYVSEASRESGLVIIDNSLALVETLMDERRWSDMFSCMIAKATVLEEVSTGIAGSRNGALLLMKAELQVLSPLVPIREVTFLRFCKQLAEGAWAVVDVSIDGLVRDHNSGTAPTGGNVKCRRVPSGCVMQDTPNGYCKVTWVEHTEYDEASVHQLYRPLLRSGLAFGARRWLATLQRQCECLAILMSSATVTANDSTAISQEGKRSMLKLARRMTENFCAGVSASSAREWSKLDGATGSIGEDVRVMARKSVSEPGEPPGVVLSAATSVWVPVAPEKLFNFLRDEQLRAEWDILSNGGPMQEMTQIAKGQRDGNSVSLLRASAVSANQSSMLILQETCTDASGSIVVYAPVDIPAMQLVMNGGDSTYVALLPSGFAILPDGPRIGATGYETGGSLLTVAFQILVNNQPTAKLTVESVETVNNLISCTIKKIKTALQCDA

SEQ ID NO: 17034 - protein, 855 aa, Oryza sativa
  Clone ID: TF_OSC417639j.C1.p20.fg
MAAAAVGGRGERLSSSSPTAAAPQVDAGKYVRYTPEQVEALERVYTECPKPSSLRRQQLIRECPILSNIEPKQIKVWFQNRRCREKQRKEASRLQTVNRKLNAMNKLLMEENDRLQKQVSRLVYENGYMRTQLHNPSAATTDTSCESVVTSGQHHQQQNPAVLHPQRDANNPAGLLAIAEETLAEFMSKATGTAVEWVQMVGMKPGPDSIGIIAVSHNCSGVAARACGLVSLEPTKVAEILKDRPSWYRDCRCVDIIHVIPTGNGGTIELIYMQTYAPTTLAAPRDFWTLRYTSGLEDGSLVICERSLTQSTGGPSGPNTPNFIRAEVLPSGYLIRPCEGGGSMIYIVDHVDLDAWSVPEVLRPLYESPKILAQKMTIAALRHIRQIAHESSGEIPYGAGRQPAVFRTFSQRLSRGFNDAVSGFPDDGWSLLSSDGSEDITISVNSSPNKLVGSHVSPNPLFSTVGGGILCAKASMLLQNVPPALLVRFLREHRSEWADPGVDAYSAASLRASPYAVPGLRTSGFMGSQVILPLAHTLEHEEFLEVIRLEGHGFSHDEVLLSRDMYLLQLCSGVDENATSASAQLVFAPIDESFADDAPLLPSGFRVIPLDTKMDGPSATRTLDLASALEVGPGGASRASVEASGTCNRSVLTIAFQFSYENHLRESVAAMARSYVRAVMASVQRVAVAIAPSRLGPQIGMKHPPASPEALTLASWIGRSYRAHTGADIRWSDTEDADSPLALLWKHSDAILCCSLKPAPMFTFANNAGLDILETTLVNLQDISLEMILDDEGRKALCSEFPKIMQQGFTYLPGGVCKSSMGRQASYEQAVAWKVLSDDDAPHCLAFMLVNWTFM

SEQ ID NO: 17035 - protein, 256 aa, Oryza sativa
  Clone ID: TF_OSC413762j.C1.p6.fg
MEGEDLGSWLGLGIGGGGYAYGGDDCRRSPSSPSPVQMLFSQHVKEEITRGYDHGRDEEQASGSKIMKGERGARLRVMRSIRNSGGDGSRSRVLSLGDDGGDGGSGGGGGGGTRKKLQLTKEQSTLLEDSFRVHNILSHAQKHELARQLKLKPRQVEVWFQNRRARTKLKQTEVDCEFLKRCCESLTEENKQLKHELMELRRLASPAAAAAGSQLYVQFPRAAAAAMVNVCPSCEKVTVMGGGGGETGKSSSSYSS

SEQ ID NO: 17036 - protein, 749 aa, Oryza sativa
  Clone ID: TF_OSC900292j.C1.p25.fg
MQSLLDGHHHQLPSLLQQHHNGHHLLDQHQQHQHQLPPQATTTSESDGRAPRDELEMSKSGGSDNLESGGGGGGGGSGGDQDPNQRPRKKRYHRHTQHQIQELEAFFKECPHPDDKQRKELSRELGLEPLQVKFWFQNKRTQMKTQHERHENNALRAENEKLRAENMRYKEALANASCPNCGGPAAIGEMSFDEHHLRLENARLRDEIDRISAIAAKYVGKPAAAVSAAYPPLPPSNRSPLDHMGIPGAGADVFGADFDKPLVIELAVAAMEELVRMAQLGEPLWAPALGGEALGEEEYARTFPRGLGPKSPELRSEASRETAVVIMNHVSLVEMLMDVGQWTALFSSIVSRAATLEVLSTGVAGNHNGALQLMSAEFQMPSPLVPTRETQFLRYCKQHPDGTWAVVDVSLDGLRAGAGGGCQPAAARGHRRRPSGCLIQEMPNGYSKVTWVEHVEADDQMVHNLYKPVVNSGMAFGARRWVATLERQCERLASAMASNVASSGDAGVITTSEGRRSMLKLAERMVASFCGGVTASTTHQWTTLSGSGAEDVRVMTRKSVDDPGRPPGIILNAATSFWLPVPPSRVFDFLRDDSTRSEWDILSNGGVVQEMAHIANGRDHGNAVSLLRVNNANSNQSNMLILQECCTDATGSYVIYAPVDVVAMNVVLNGGDPDYVALLPSGFAILPDGPDGGGGSLLTVAFQILVDSVPTAKLSLGSVATVNSLIACTVERIKAAITGDNGVAPPCPR

SEQ ID NO: 17037 - protein, 239 aa, Oryza sativa
  Clone ID: TF_OSC400277j.C1.p16.fg
MSREEDEKLLFPSFAFPAECFPEAATSGGEQKKARQRRRRKVKPEAAAALAGESGGDEQAKKRRLSDEQARFLEMSFKKERKLETPRKVQLAAELGLDAKQVAVWFQNRRARHKSKLMEEEFAKLRSAHDAVVLQNCHLETELLKLKERLADVEEEKAKLAAVAAATTGGGGGGGGGSSSPTSSSFSTVTYHPALAGQFGVEAAAEEADLTYMSEYAYNSYMLELAAAGYCGGVYDQFS

SEQ ID NO: 17038 - protein, 237 aa, Oryza sativa
  Clone ID: TF_OSC401489j.C1.p8.fg
MDSVVDGGLDTRLSLAVGCCPPRRRPVLLFGEVLPSPEKKVAAAAVVAAGKRGREQRGEAEAEATTTRQRRSCKKGRRGRGDDDDDDGDRRSPSGGGGDEEGASRKKLRLTGEQATLLEDSFRAHNILSHAEKQELAGKLGLSARQVEVWFQNRRARTKLKQTEADCDLLRRWCDHLAADNARLRRDLAELRRSSSSPPVSGLAVATPVVCPSCAHDDKRRLAFATAAAAAGDMASN

SEQ ID NO: 17039 - protein, 300 aa, Oryza sativa
  Clone ID: TF_OSC900242j.C1.p3.np
MEDLYSIHPGISRGGGGGGGGPADPADPPPPATTAAAADLTELMKAQIAGHPSYPSLLSAYIECRKVGAPPEVTTLLEEIGREGRGGGGGATAGGEIGLDPELDEFMETYCRVLERYKEELTRPFDEAASFLTGIHTQLASLCGGAPPPTDNSDEMVGSSEDEPCSGDADAADFGQEHSSRLADHELKEMLLKKYSGCLSRLRSEFLKKRKKGKLPKDARSALMDWWNTHYRWPYPTEEDKVRLAAMTGLDPKQINNWFINQRKRHWKPSEDMRFALMEGVTGGSSSGTTLYFDTGTIGP

SEQ ID NO: 17040 - protein, 268 aa, Oryza sativa
  Clone ID: TF_OSC400269j.C1.p52.gm
MAQDDEDVGLALGLSLGSGGHRRQRESRDEAPSSAAASLLTLRLPAESGGQPQVVVKREVVRAEEEEYEYEYERALYSSSAAAADDDEGCNSRKKLRLSKEQSALLEDRFKEHSTLNPKQKVALAKQLNLRPRQVEVWFQNRRARTKLKQTEVDCELLKRCCETLTEENRRLHRELQQLRALTHSTAAGFFMATTLPVPAATLSICPSCERLATAAAAGASPTAAADRTNKPTAPHLFSPFANAHGKDGQWAWAVGKDGDVDGGAHRR

SEQ ID NO: 17041 - protein, 321 aa, Oryza sativa
  Clone ID: TF_OSC416036j.C1.p10.fg
MGDEEDLELVLGVRATRRDEQDDQTTCTQSSEEAMEGEEDETRPHGEAPVESLSFPLFVSSAETGSANSEMCTRGFDVNTRPADGGAEAGRPSSPSSMQEASTRQQVADQEAADDEDNGGGGARKKLRLSKEQSSFLEDSFKEHSTLTPKQKSDLANRLNLRPRQVEVWFQNRRARTKLKQTEVDCEHLKRCCERLTRENRRLQREVAELRGTLRTTTSSYPPLYGLHHLPAAAGTVFRVCPSCEHSKVVAAAASESFSPRVFAGGGAPAAITAAAAVPSPGAGSPPSSSAALFGARRPHFGPFAAAVIPPVLRRQPSATS

SEQ ID NO: 17042 - protein, 397 aa, Oryza sativa
  Clone ID: TF_OSC13680j.C1.p2.fg
MELGLSLGEAMADAGRELVLGLGMGRREEAAEAGRRDHEVRRELEFGSMSSRCGGSSPEPTVRLTLLPMVPGLGLPWPPPPPPSSESRHLEASTRGFDVNRPPSSGGGGGGGGAEEEQDDVAGAALSSSPNNSAGSFPMDDFSGHGLGGNDAAPGGGGGDRSCSRASDEDDGGSARKKLRLSKEQSAFLEESFKEHSTLNPVSFSSSHRSNTMASSSSSSSSRSPNVASRLRCVASRTEAALAKQLNLRPRQVEVWFQNRRARTKLKQTEVDCEYLKRCCETLTEENRRLQKELAELRALKTVHPFYMHLPATTLSMCPSCERVASNSAPATASSAATSSTAAPPAAPSSGGIAATSSSAAAAAAPDHRPSSFAALFSSPRGFPLSVAPQAQPPTSS

SEQ ID NO: 17043 - protein, 125 aa, Oryza sativa
  Clone ID: TF_OSC100841j.C1.p3.fg
MDNGSQQESSDLHVHHLPIASIIGVEDRTEEADDAAVDYHDDSSEGQDEVSNKRMKRHTDDQIKHLESVFERCTYLGGNQRVQLAKKLGMEERQVKFWFQNRRTRKKVATWVDKIQLSVRNGGSP

SEQ ID NO: 17044 - protein, 851 aa, Oryza sativa
  Clone ID: TF_OSC401894j.C1.p34.fg
MQFPFSGAGPGVFTSSPALSLALADAVAGRNSGGGGKMVTAAHGGVGGGGGGGRAKARDALEVENEMSRSGSDHLDVVSCGDAGGGGGDDDDDEDAEHGNPPKRKKRYHRHTPQQIQELEAMFKECPHPDEKQRAELSKRLGLEPRQVKFWFQNRRTQMKMQLERHENSLLKQENDKLRSENLSIREATSNAVCVGCGGPAMLGEVSLEEHHLRVENARLKDELSRVCALAAKFLGKSISVMAPPQMHQPHPVPGSSLELAVGGIGSMPSATMPISTITDFAGAMSSSMGTVITPMKSEAEPSAMAGIDKSLFLELAMSAMDELVKMAQMGDPLWIPGASVPSSPAKESLNFEEYLNTFPPCIGVKPEGYVSEASRESGIVIIDDGAALVETLMDEFEFLRQRRWSDMFSCMIAKASTTEEISTGVAGSRNGALLLMQAELQVLSPLVPIREVKFLRFSKQLADGVWAVVDVSADELMRDQGITSASSTANMNCRRLPSGCVLQDTPNGFVKYLVQISVFSEVYNLSIDQFLDLPPAFMVTWVEHTEYDEASVHPLYRPLLRSGLALGAGRWIATLQRQCECLALLMSSIALPENDSSAIHPEGKRSMLKLARRMTDNFCAGVSTSSTREWSKLVGLTGNIGEDVHVMARKSVDEPGTPPGVVLSAATSVWMPVMPERLFNFLHNKGLRAEWDILSNGGPMQEVTSIAKGQQNGNTVCLLKASSSVPLTKNFTVQPTKDKQNSMLILQETCADASGSMVVYAPVDIPAMHLVMSGGDSSCVALLPSGFAILPAGPSIGADHKMGGSLLTVAFQILANSQPSAKLTVESVETVSNLISCTIKKIKTALHCDV

SEQ ID NO: 17045 - protein, 790 aa, Oryza sativa
  Clone ID: TF_OSC400544j.C1.p1.fg
MNGELKLMASYVSKLKFILQKDQQQEPHTANLLVLLGSSNQDKRNGLSQGENRMDTCTRKKPRRYQLLTMQQKETLNRAFQSCPNPDRNDLKKLAKELNMTETQIKYWFQNCRTKMKKFKNNEERKLLQKENEELKKENAELRNRMKNSTCRACDLPLFHIDCRHWENPMLNKGNHGVTSNLIPQAVSSLLPSSSGFVASGSNLSSNAVLMPVSAMPSSVLQPAPAVSGANFPILHNLSANANDGYTEKNVLLDLANRAMEEFFSLMKENESLLVKKKENGPLWLPHMDILGVESLNYQEYLAKSRTIGQKPVDFKVVVTRDTAIVNGSCVDLVKSLLDANRWRELFPGIVASANTTKIISTGPSNLHDGLLQLKNLQMRAELQVMSPEVPVCDVTFLRQSVQFGSGLWCVVDVSIDTILPGESKTAQSSVQTSSTAARRMEVRLLPSGCVIEEMENGYSKVTWMVHAAYDERAVPVLYHSLLRSAKALGACRWVASLQRHSQFLSGLHKYIFCPDSTMTEVVMRRKVLYLVKQMTSSFTGLFASMSKATLQDGDDTHFAHQIVGGATGEPAGLLLSATTTIWLPGVNPRHVYDHLRDEQCHGEWRCLLGEQLHQGNALPYGAPLNGETVPEFYRMVNGLHEGHAISLISPREMGGNISNTLLLQEARTDLSGSLIVYARTDVNTVHSIMNSGLNPATVFLVSSGCAILPDCLESFPLHPAATADQAGTSSAAIASRSETGGSFVTVTYQMFFSSQGGAAPASSSIHQGRDALKKATDIFKVVLDTLTVA

SEQ ID NO: 17046 - protein, 390 aa, Oryza sativa
  Clone ID: TF_OSC401896j.C1.p7.fg
MASNGMASSPSSFFPPNFLLHMAQQQAAPPHDPQEHHHHHHHGHHGHHHEQQQQQQHHHHLGPPPPPPPHPHNPFLPSSAQCPSLQEFRGMAPMLGKRPMSYGDGGGGGDEVNGGGEDELSDDGSQAGEKKRRLNVEQVRTLEKNFELGNKLEPERKMQLARALGLQPRQVAIWFQNRRARWKTKQLEKDYDALKRQLDAVKAENDALLNHNKKLQAEERRSMWVSVLAERLLESVPFSPPRIVALKGREAASELINLNKETEASCSNRSENSSEINLDISRTPPPDAAALDTAPTAHHHHHGGGGGGGGGGGMIPFYTSIARPASGGGVDIDQLLHSSSGGAGGPKMEHHGGGGNVQAASVDTASFGNLLCGVDEPPPFWPWPDHQHFH

SEQ ID NO: 17047 - protein, 295 aa, Oryza sativa
  Clone ID: TF_OSC401695j.C1.p34.fg
MAIIHDTSDQQEDNMRSYMDGGGAAAYEEEEEEVEDDDGGGGGGGGGGGGGLGEKKRRLAAEQVRALERSFEADNKLDPERKARIARDLRLHPRQVAVWFQNRRARWKTKQIERDFAALRSRHDALRLECDALRRDKDALAAEIADLRDRVDGQMSVKLEAVAADEHQPPPPPPPPPLAYNSKVVDGSTDSDSSAVFNEEASPYSGAAIDHHHHQTPASYDTAGFTSFFAPSTTLTSSLSFPSMFHASSHFDGHQELLVGGGGAGAVADADLGGAGFFAGDEHAGGLSWYGAEGW

SEQ ID NO: 17048 - protein, 866 aa, Oryza sativa
  Clone ID: TF_OSC401909j.C1.p27.fg
MAGAASSADALFASPLIPNPALAGFMSSSAAMPFHHFSNAAATLIPKEEGLMGGLHVAKDEGMDLEMDMELSGGSGSAHLDGLLSFADVDDDHKPQHSGHDQPPDAAQPSGAAGGNAKKKRYHRHTAHQIQQMEALFKECPHPDDKQRLKLSQELGLKPRQVKFWFQNRRTQMKAQQDRADNVILRAENENLKSDNFRLQAAIRNVVCPNCGHAAVLADMSYEEQQLRIENARLKDELDRLACIATRYGGGGGRQPVLSTSALSCISAPPPVLMPPLDLDMNVYSRHFAEQAPVMGCGDLIPPPVVPQHDGAAAYMGAMMAPVQEQDKQLVVDLAATAADQLARMCRAGEPLWVRQRGAEVMAVEEHARMFSWPVDGAKQGDGGAVARAEGTRDNAVVIMNSINLVDAFLDANKWMELFPSIVCKARTIQIINHGAASGHLGSGTLLLMQAEVQFLSPLVAAREVVFFRYCVHNADEGSWAIVDFPAEGFEEGLLQASVVRCRRRPSGCIIQDMPNGYSRVVWVEHMEMVGEEKPLQPVFRDYVASGAAFGATRWLSILQRQCERLASELARNIADLGVIRTPEARTNMMKLSQRMITTFCANISASGTQSWTALSDSTQDTIRVTTRKNTEPGQPSGVILTAVSTSWLPFTHQQVFELLADEQQRCQLEILSNGGSLHEVAHIANGSHPRNCISLLRINAASNSSQNVELLLQESSTHPDGGSLVVFATVDVDAIQVTMSGEDPSYIPLLPLGFAIFPATSPSPAAAPTISSSTTTTTGNGNGETSSTPPRNSSSNNNNADELLPPNGCLLTVGMQVLASAVPSAKLNLSSVTAINSHVCNAIHQITAALKSSAGGAGGEPASDQ

SEQ ID NO: 17049 - protein, 945 aa, Oryza sativa
  Clone ID: TF_OSC401024j.C1.p1.fg
MDSSGDGGDEGAGAAPAGVEEESPAPASAPAPAPASASAPVPAAVGGGAGASGSSGKVKRVMKTPYQLEVLERTYTEDPYPNETMRAELSVKLGLTDRQLQMWFCHRRLKDRKPPPKRQQLEEEVPVPVMAPPPVLPPPLPHSELTMGTGGMYGEPLLSPSSRRGTGRPSAVPRISASEVARRYYEPPQVMLPPLAPMQLTRAEHRVIDSVERLIGEPLREDGPVLGVEFDPLPPGAFGAPIVPEQQRQPFRSYEAKMFSGHDTKHIKASAFLPSIDPFVPSTVSGKRKSMTGSSSHLGSRAVREYQFIPEQSSDIYERTTQSRYYDVLTEASDSRMSTGSRFLHGVEKAPGYTFHGQISGSSHLSLHGRPPVFSSGSTDYEMDPSNINSSSVPNESQYGIPQVAGFENSVAPSDRMVYHDDDAFRMERKRKHSEEVKIAKEVEAHEKRIRKELEKQDMLNRKREEQVRREMERNDRERRKEEERLLREKQKEEERFQREQRREHKRMEKYLLKQSLRAEKIRQKEELRKEKEAARQKAANERATARRIAREYMELMEDERLELMELVSRSKGLPSMLSLDSDTLQQLDSFRGMLRQFPSEIVRLKVPFSIKPWTSSEDNIGNLLMVWKFFITFADVLGIPSFTLDEFVQSLHDYDSRLLGELHVALLKSIIKDIEDVARTPSVASGMTANPGGGHPQIVEGAYDWGFNILAWQRHLNLLTWPEILRQFGLSAGLGPQLRKRNAENVNNHDDNEGRNGEDVISILRSGSAAVNAAAKMKERGYGNRRRSRHRLTPGTVKFAAFHVLSLEGSQGLTILEVAEKIQKSGLRDLTTSKTPEASISAALSRDSKLFERTAPSTYCVKTPYRKDPADSEAVLAAAREKIRVFQNTISECEEVEKDVDDAERDEDSECDDADDDPDGDEVNIEEKDVKTSLVKAQDGGMQA

SEQ ID NO: 17050 - protein, 269 aa, Oryza sativa
  Clone ID: TF_OSC401651j.C1.p19.fg
MRSPAALLPVVADGGGGVGVEEEMDVDEDMAMCGGRGGGGGEKKRRLSVEQVRALERSFETENKLEPERKARLARDLGLQPRQVAVWFQNRRARWKTKQLERDYAALRQSYDALRADHDALRRDKDALLAEIKELKGKLGDEDAAASFSSVKEEEDPAASDADPPATGAPQGSSESDSSAVLNDAEILPHKPAPAAAADAAASEETEAVVTGAALLHHAEVFFHGQLLKVDDDEAAFLGDDGAACGGFFADEHLPSLPWWAEPTEQWTT

SEQ ID NO: 17051 - protein, 886 aa, Oryza sativa
  Clone ID: TF_OSC401367j.C1.p6.fg
MDASKYVRYTPEQVEALERLYYECPKPSSLRRQQLVRECPALANVDPKQIKVWFQNRRCREKQRKESSRLQALNRKLTAMNKLLMEENDRLQKQVSQLVYDHGRHGVAAAGMMRRVPAFPPQAAAAAGHQLATATDTSCESVVTSGHHHQQQQHNVVQPPPRDASPAGLMSIAEETLTEFLSKATGTAVEWLQMPGMKPGPDSIGIIAISHGCAGVAARACGLVGMEPAKVAEILKDRPLWLRDCRSMDVVNVLPAGANGTIELLYMQARTHKPENSEPEPEILKLKFVFDLQLYAPTTLAPARDFWLLRYTSILDDGSLVVCERSLSSKQGGPSMPLVQPFIRGEMLPSGFLIRPSDVGGSVIHIVDHMDLEPWSVPEVVRPLYESSAMVAQKISMAALRYLRQVAHEDTRSVITGWGRQPAALRALSQKLTRGFNEALNGLADDGWSVIESDGVDDVCISVNSSKVIGCNATFSSGLPIVSTGVLCAKASMLLQDVSPPSLLQFLREHRSQWADSNLDAFFASTMKPNFCNLPMSRLGGFSGQVILPLAHTFEPEEFLEVIKLGNASNYQDTLVHRDLFLLQMYNGVEESSAGTCSELIFAPIDASFSDDSPLLPSGFRIIPIDSPLDTSSPNCTLDLASTLEAATPRSRISGVNGGGGGCAAAAASSSSKAVMTIAFQFAFDGHLQDSVAAMARQYMRNIISSVQRIAVALSSSRLVPPGAGAAAAQLSPVTPEAATLPRWICQSYRFHFGDELIKSVDANSSNESILKAVWHHPSAILCCSLKAMPVFTFANQSGLDMLETTLVALQDMTLEKVFDDQGRKNLCTELPNIMEQGMACMEGGVCVSSVGRAASYEKAVAWKVVDGDGGGAHCICFMFINWTFL

SEQ ID NO: 17052 - protein, 218 aa, Oryza sativa
  Clone ID: TF_OSC13680j.C1.p1.np
RPAAAAAAAAEEEQDDVAGAALSSSPNNSAGSFPMDDFSGHGLGQRRGPWRGGGDRSCSRASDEDDGGSARKKLRLSKEQSAFLEESFKEHSTLNPRTEAALAKQLNLRPRQVEVWFQNRRARTKLKQTEVDCEYLKRCCETLTEENRRLQKELAELRALKTVHPFYMHLPATTLSMCPSCERVASNSAPATASSAATSSTAAPPAAPSSGGIAATSS

SEQ ID NO: 17053 - protein, 264 aa, Oryza sativa
  Clone ID: TF_OSC418063j.C1.p13.fg
MTNAGSTPTIDDGYGGVGMEAEGDVEEEMMACGGGGEKKRRLSVEQVRALERSFEVENKLEPERKARLARDLGLQPRQVAVWFQNRRARWKTKQLERDYAALRHSYDSLRLDHDALRRDKDALLAEIKELKAKLGDEEAAASFTSVKEEPAASDGPPAAGFGSSDSDSSAVLNDVDAAGAAPAATDALAPEACTFLGAPPAAGAGAGAAAAASHEEVFFHGNFLKVEEDETGFLDDDEPCGGFFADDQPPPLSSWWAEPTEHWN

SEQ ID NO: 17054 - protein, 196 aa, Oryza sativa
  Clone ID: TF_OSC900340j.C1.p3.fg
MTNAGSTPTIDDGYGGVGMEAEGDVEEEMMACGGGGEKKRRLSVEQVRALERSFEVENKLEPERKARLARDLGLQPRQVAVWFQNRRARWKTKQTLASDSSAVLNDVDAAGAAPAATDALAPEACTFLGAPPAAGAGAGAAAAASHEEVFFHGNFLKVEEDETGFLDDDEPCGGFFADDQPPPLSSWWAEPTEHWN

SEQ ID NO: 17055 - protein, 292 aa, Oryza sativa
  Clone ID: TF_OSC410830j.C1.p4.fg
MAQEDVGHLSDAGLALGLSLGGGGGGTTDAAAAHRGGCRRPSPSSQCPPLEPSLTLSLPDDAAAGAAATATATASGGGGPAHSVSSLSVGAAAAAAVKRERAEEADGERVSSTAAGRDDDDDGSTRKKLRLTKEQSALLEDRFREHSTLNPKQKVALAKQLNLRPRQVEVWFQNRRARTKLKQTEVDCEFLKRCCETLTEENRRLQRELQELRALKFAPPPPSSAAHQPSPAPPAPFYMQLPAATLTICPSCERVGGPASAAKVVAADGTKAGPGRTTTHHFFNPFTHSAAC

SEQ ID NO: 17056 - protein, 713 aa, Oryza sativa
  Clone ID: TF_OSC400884j.C1.p2.fg
MDFGDEPEGSDSQRRRKRYHRHTPRQIQQLEAYAFSLFFFLLLFFYVLLAFVRHGGGAMDGGMKWMFKECPHPDENQRAQLSRELGLEPRQIKFWFQNRRTQMKAQHERADNCFLRAENDKIRCENIAIREALKNVICPTCGGPPVGEDYFDEQKLRMENARLKEELDRVSNLTSKYLGRPFTQLPPATPPMTVSSLDLSVGGMGGPSLDLDLLSGGSSGIPFQLPAPVSDMERPMMAEMATRAMDELIRLAQAGDHIWSKSPGGGVSGGDARETLNVDTYDSIFSKPGGSYRAPSINVEGSRESGLVLMSAVALADVFMDTNKWMEFFPSIVSKAHTIDVLVNGMGGRSESLILMYEELHIMTPAVPTREVNFVRYCRQIEQGLWAIADVSVDLQRDAHFGAPPPRSRRLPSGCLIADMANGYSKVTWVEHMEVEEKSPINVLYRDLVLSGAAFGAHRWLAALQRACERYASLVALGVPHHIAGVTPEGKRSMMKLSQRMVNSFCSSLGASQMHQWTTLSGSNEVSVRVTMHRSTDPGQPNGVVLSAATSIWLPVPCDHVFAFVRDENTRSQGLNASQNSMLILQESCTDASGSLVVYSPIDIPAANVVMSGEDPSSIPLLPSGFTILPDGRPGSAAGASTSSAGPLAAARGGGGGGAGGGSVVTVAFQILVSSLPSSKLNAESVATVNGLITTTVEQIKAALNCSAHGHHP

SEQ ID NO: 17057 - protein, 170 aa, Oryza sativa
  Clone ID: TF_OSC5271j.C1.p1.fg
AFFKECPPPDDKQRKELSREIGLQPLQVKFWFQNKRTQMKTQHERHENNALRAENEKLRAENMRYKEALANASCPNCGGPAAIGEMSFDEHHLRLENARLRDEIDRISAIAAKYVGKPAAAVSAAYPPLPPSNRSPLDHMGIPGAGADVFGADFDKPLVIELAVAAMEEP

SEQ ID NO: 17058 - protein, 342 aa, Oryza sativa
  Clone ID: TF_OSC400615j.C1.p41.gm
MDRYGEKQQQQQMFASYVDASLLAASGEVQGERPRARRRRRRGARCVGGGGGGGEVDGGDPKKRRLSDEQVEMLELSFREERKLETGRKVHLASELGLDPKQVAVWFQNRRARHKSKLLEEEFSKLKHAHDAAILHKCHLENEVLRLKERLVVAEEEVRRLRSAAGSHTASGEGGDIMGLGGSGACVAGSPSSSFSTGTCQPPSFGGGDHLGDDDLVYVPEYGGYADNSVVEWFSLEVIVVNGGTTSRAFGKRTMAAPPLIVVQVWDHDLDVCRQQEKVAREDGYRFCHPIAISVSSVSVSGPNKSGTLDSEADHVNCWLGAKVKPRVHGPGQYHARPQVCL

SEQ ID NO: 17059 - protein, 726 aa, Oryza sativa
  Clone ID: TF_OSC400998j.C1.p6.fg
MGDEWETWIAADMGQNKGALINDGEQRMSIPARELFAAIEADSGLLPVNSSNTNEKRKRRLQRLTGKQSEVLEGFFSICGHPDDGQKRHLSETTGLGLDQVKFWFQNKRTQVKTMCWKEENYKLSVENEILRDENRRVKIAHCTAVCLTCCNSSVQNQLAVEMERLMGQSEWLQQEIARSNGTPPAANLAFQLNSSADYVFSGQHDQQMIAELAKNAMHALIILAESHVALWFPVPGCSYEVLNKMAYDQAYPGDNSANAIGFKTEATRAVSMVMMDYKSVVDFLMDPYNYRTFFPEVISGAVTNRIYTWPTSDGYNGVIQLMTVEMMFPSPLVPARKCTFLRYCNVLNEGLVVVIDVSLDDGSIFSKCRKMPSGFLIQSIRPNSCKVTAIEHVLADDTGVHELYQPCMNGLVFGARRWVATMARQSARMRDVHHNKTAPQVSTKGRKNLMKLADDLLASFAGGIAATGGGTWTVVIGAGTEKDIRVAYRRTTEGSSSYNAILSVTASLRLPLPMRKTFDLLRNLTHRCKWDVLVHGSVVKEEVTIARGVGNDDTVTVLHCKRAGREDRGRTMILQNNGYDASGSFMVYSQIDSELMNTMVLSPSDLPPGRGGPSLYPTGFSLLPDVEAAQDSSGIALGEVGGTLMTMGFQIPVKLASGDRMYSRSAASAIRLMTDTIALVKKTLMNEHSGIYGGEKGGPCADKNQEHAKGIHRLRSPCISQNLLN

SEQ ID NO: 17060 - protein, 307 aa, Oryza sativa
  Clone ID: TF_OSC34011j.C1.p2.fg
MDLGLSLGLGLASQGSLTSSTTTTSSPGAGSSSPWAAALNSIVGDVRRDQAAAHAAAAVGVGVGGEEMYQGRASTSPDSAAALSSASGKRERELERSGSGVDDDDGADGAGGRKKLRLSKDQAAVLEECFKTHSTLNPKQKVALANRLGLRPRQVEVWFQNRRARTKLKQTEVDCEYLKRWCERLADENKRLEKELADLRALKAAPSPASASAMQPSSSAAATLTMCPSCRRVATAGAPHQPNHQQCHPKSNTTISSSSTAAAAVAVAGGNVLPSHCQFFPAAAAAADRTSQSTWNAAAPLVTRELF

SEQ ID NO: 17061 - protein, 166 aa, Oryza sativa
  Clone ID: TF_OSC11877j.C1.p1.fg
MDGEEDSEWMMMDVGGKGGKGGGGGGAADRKKRFSEEQIKSLESMFATQTKLEPRQKLQLARELGLQPRQVAIWFQNKRARWKSKQLEREYSALRDDYDALLCSYESLKKEKLALIKQARTSSSSSILDRFLSCLPFASILTRDRCVLAAGEAGGDAAGATGEVRR

SEQ ID NO: 17062 - protein, 1108 aa, Oryza sativa
  Clone ID: TF_OSC401616j.C1.p2.fg
MAAVRKMAANGLAAKRENTGTKKSPLQIQMLERFYSEVQYPQSEDIAEYATSVGLTYNQVRIWFKERRRKERRETESLGAHMEKQLSARSNGFRCSSSRSSSFSRSTMYRTVNLQPEDDRYVDKGMSFTGEKHTLRSQVLFPKDYILRKVFRKDGPPLGSEFDPLPHSAPGHLRDTTDDHFYQNQRVIKKRKIVEPTTQRSSLPCGDNGPVRKHGAGKGLMTVWHAMYSHSSKIQDGSNFIDETGCLRSLRPLDDCGRIEDCDDGKLIQVPSSRVTDPKKHPPMECHLSVDESQSPVLQANQVTLVDDEELELRELQAGPNPLRCSAHLSSSGRHGCPLCKDLLSRFPPSSVKMKQPFSTRPWGSSPEMVKKLFQVVRFIYNRFGYMDVHPFTLDELAQAFHDKVREQEFDMNFWIKSLNSLTWVEILRQVLVASGFGSKHHMLNRDFFNKEKNQMVKYGLRPRTLKGELFALLSKKGSGGLKVSELAKSPEIVDLSISSTEIEQLIYSTLSSDITLFEKIAPSAYRLRVDPRIKGKEDSGSDTEDSGSVDDHSDASSGADESDGSHEMSFSEHEHRILRRKWKNGHENVNRCSEIDESYSGERWLLGLMEGEYSDLSIDEKLDCLVALMDVVSGADSAPRLEEPSRVVPSIPRAQPHVSGGKIKKSTRNICQSSDECFNASGSMYGLDSSMHEQSRSLRSRDYVAYSGRNDTSTGVAHQPQVVLLGSDRRYNNYWLFLGPCRADDPGHRRVYFESSEDGHWEVIDSPQELLSLLASLDSRGTREAYLLASMKKRQTCLFEAMKKHYENRDAVQPAMPSDTSHSETSSGDGASPKLSSGDGASPTSDIDNASVPTNPAENMINASSAIAIEVGRRGDEKILKWERSQTFDKWIWTSFYSCLTAVKCGKKSFKESLVRCESCHDLYWRDEKHCRICHSTFEVSFDLEERYAIHVATCRDPEDVYDVPNHKVLPSQLQALKAAIHAIEAHMPEAAFAGLWMKSSHKLWVKRLRRTSSLAELLQVLVDFVGAMDEDWLYKSSSSVSFCSYLDDIVIYFQTMPQTTSAVALWVVKLDALITPYLERADSDRALGEESVQTRTRACGEIARNR

SEQ ID NO: 17063 - protein, 214 aa, Oryza sativa
  unsure (1)..(214): unsure at all Xaa locations
  Clone ID: TF_OSC401000j.C1.p17.np
SSSTSSXCHRLRRAAAAVHAGDDADEQYMDLGGRGGGGAGGGGAGERKRRFTEEQIRSLESMFHAHHAKLEPREKAELARELGLQPRQVAIWFQNKRARWRSKQLEHDYAALRSKYDALHSRVESLKQEKLALTQRRELIMLPGGEDGGKHRGATADDRRDRGLAERPMRHRRGCGGAPRAGAVPEGGGSSSPSCSSSPSCTAPHCSWWPCSSP

SEQ ID NO: 17064 - protein, 224 aa, Oryza sativa
  Clone ID: TF_OSC34011j.C1.p4.fg
MAEQEVIRRDDVVAATAAEDERFACSPGSPVSSGSGKRGSGSGSGDEVDDAGCDVGGGGARKKLRLSKDQAAVLEECFKTHHTLTPKQKVALAKSLNLRPRQVEVWFQNRRARTKLKQTEVDCEHLKRWCDQLADDNRRLHKELAELRALKATPTPPAAAPPLTTLTMCLSCKRVANAGVPSPAAAIFPGHPQFLCGFRDHAGAASSSYGGASSGLAKAVRAAR

SEQ ID NO: 17065 - protein, 289 aa, Oryza sativa
  Clone ID: TF_OSC410031j.C1.p13.gm
MAGGHAAQSPSPSCGLGEKKRRLALEHVRALERSFNTDNKLDPDRKARIARDLGLQPRQVAVWFQNRRARWKTKHLERDFAALRARHDALPRRMRPPGPRQGRPFPPRYAPTAKPAMTRRPAPRPATVCKDGSSDDSDSSVVFNDEASPYSGAAFIGFGPSFLVDDASAATVGCSSSLPALESKWHGPYSDDSCKGGVYGFTEEWLAACSGEMAGNDAAGFFSDEHASNLNFGWDRLISFSFGSTMPRIHLGMDGYRYAKSELSHDHGGIREEGDVVVAAAGSAWFGTA

SEQ ID NO: 17066 - protein, 177 aa, Oryza sativa
  Clone ID: TF_OSC6947j.C1.p1.fg
MAQEDVGHLSDAGLALGLSLGGGGGGTTDAAAAHRGGCRRPSPSSQCPPLEPSLTLSLPDDAAAGAAATATATASGGGGPAHNVSSLSVGAAAAAAVKRERAEKADGERVSSTAAGRDDDDDGSTRKKLRLTKEQSALLEDRFREHSTLNPKHKVALAKQLNLRPRQVEVWFQNRRA

SEQ ID NO: 17067 - protein, 301 aa, Oryza sativa
  Clone ID: TF_OSC401481j.C1.p34.np
MEDLYSIHPGISRVGGAASEASGVGVVVGGGGGSSSSDLTELMKAQIAGHPRYPTLLSAYIECRKVGAPPEVASLLKEIGRERRAGGGGGGAGQIGVDPELDEFMEAYCRVLVRYKEELSRPFDEAASFLSSIQTQLSNLCSGATSPPATTATHSDEMVGSSDEDQCSGETDMLDIGQEQSSRLADHELKEMLLKKYSGCLSRLRSEFLKKRKKGKLPKDARSALLEWWNTHYRWPYPTEEDKLRLAARTGLDPKQINNWFINQRKRHWKPSDGMRFALMEGVAGGSSGTTLYFDTGTIGP

SEQ ID NO: 17068 - protein, 781 aa, Oryza sativa
  Clone ID: TF_OSC2844j.C1.p3.fg
MERREIFQVADLAHILRGKPVDHLQQPNLLDNHQFQQAFQHQQQQHHLLDQIPATTAESGDNMIRSRASDPLGGDEFESKSGSENVDGVSVDDQDPNQRPRKKRYHRHTQHQIQEMEAFFKECPHPDDKQRKELSRELGLEPLQVKFWFQNKRTQMKNQHERHENSQLRSDNEKLRAENMRYKEALSSASCPNCGGPAALGEMSFDEHHLRIENARLREEIDRISAIAAKYVGKPMVPFPVLSNPMAAAASRAPLDLPVAPYGVPGDMFGGGGAGELLRGVQSEVDKPMIVELAVAAMEELVRMAQLDEPLWSVAPPLDATAAAMETLSEEEYARMFPRGLGPKQYGLRSEASRDSAVVIMTHANLVEILMDANQYAAVFSNIVSRAITLEVLSTGVAGNYNGALQVMSVEFQVPSPLVPTRESYFVRYCKQNADGTWAVVDVSLDSLRPSPVLKCRRRPSGCLIQEMPNGYSKVTWVEHVEVDDRSVHNIYKLLVNSGLAFGARRWVGTLDRQCERLASVMASNIPTSDIGVITSSEGRKSMLKLAERMVVSFCGGVTASVAHQWTTLSGSGAEDVRVMTRKSVDDPGRPPGIVLNAATSFWLPVPPKRVFDFLRDESSRSEWDILSNGGIVQEMAHIANGRDQGNCVSLLRVNSSNSNQSNMLILQESCTDASGSYVIYAPVDVVAMNVVLNGGDPDYVALLPSGFAILPDGPAHDGGDGDGGVGVGSGGSLLTVAFQILVDSVPTAKLSLGSVATVNSLIACTVERIKAAVSGESNPQ

SEQ ID NO: 17069 - protein, 1226 aa, Oryza sativa
  Clone ID: TF_OSC400964j.C1.p114.fg
MAGNEWINGYLEAILDSGGAAGGGGGGGGGGGGGGGGGGGGGGGGVDPRSPAAGAASPRGPHMNFNPTHYFVEEVVKGVDESDLHRTWIKLELEGILRISARRKEQEQVRRETSEDLAEDLFEGEKADTVGELAQQDTPMKKKFQRNFSELTVSWSDENKEKKLYIVLIRSYTAYFTHWCHSVYATKLQNFTEFLYSLFYFSLHGLVRGDNMELGRDSDTGGQVKYVVELARALAMMPGVYRVDLFTRQVSSPEVDWSYGEPTEMLTSGSTDGEGSGESAGAYIVRIPCGPRDKYLRKEALWPYLQEFVDGALAHILNMSKALGEQVSNGKLVLPYVIHGHYADAGDVAALLSGALNVPMVLTGHSLGRNKLEQIMKQGRMSKEEIDSTYKIMRRIEGEELALDAAELVITSTRQEIDEQWGLYDGFDVKLEKVLRARARRGVSCHGRFMPRMVVIPPGMDFSSVVVPEDTSDGDDGKDFEIASPRSLPPIWAEVMRFLTNPHKPMILALSRPDPKKNITTLVKAFGECRPLRELANLILIMGNRDDIDEMSAGNASVLTTVLKLIDKYDLYGSVAFPKHHKQSDVPEIYRLTGKMKGVFINPALVEPFGLTLIEAAAHGLPIVATKNGGPVDIKNALNNGLLVDPHDQHAIADALLKLVADKNLWQECRKNGLRNIQLYSWPEHCRTYLTRIAGCRIRNPRWLMDTPADAAAEEEEALEDSLMDVQDLSLRLSIDGERGSSMNDAPSSDPQDSVQRIMNKIKRSSPADTDGAKIPAEAAATATSGAMNKYPLLRRRRRLFVIAVDCYGDDGSASKRMLQVIQEVFRAVRSDSQMSRISGFALSTAMPLPETLKLLQLGKIPPTDFDALICGSGSEVYYPSTAQCVDAGGRLRPDQDYLLHINHRWSHDGAKQTIAKLAHDGSGTNVEPDVESCNPHCVSFFIKDPNKVRTIDEMRERVRMRGLRCHLMYCRNATRLQVVPLLASRSQALRYLFVRWGLSVGNMYLIVGEHGDTDHEEMLSGLHKTVIIRGVTEKGSEQLVRSSGSYQREDVVPSESPLIAFTKGDLKADEIMRALKEVTKAASGMDWQRPLCKTAYWFQSRVYTNMEEKEEMTMLSLGVGAASKHSISNRKFRLKEVTDHKFNLGDQDHNSGHVRKKLRLSEEQLTVLENMYEAGSNLDQALKQGLAEKLNIKPRQVEVWFQNRRARTKHKQIEEECKNRGGWRA

SEQ ID NO: 17070 - protein, 1027 aa, Oryza sativa
  Clone ID: TF_OSC401539j.C1.p51.fg
MEVAEAGVDGVAGRRQQEEASGAAPFGRSSSLIGAAGFDGALRVEHLFGFLPSSPIVSPELKDLRSQLHQTADCCEKAFLDTEKKKLILESTKGYICDAIVAVIDHLGTVSSKLEQQLQEKIEITQTEKKLNFLKQRLLTCEQYAITLKLLTVRGDNDAIQYHRRYLSQSTGGTKEENGANSRKDDVKFVEYNSPTIPGAILTFKPYDIQSTIGRERSVATTDSESPTTDAKSSFSFRAEDVPIVLAEHRKKANHGSNILSFIRKVLIGNNVQPNITESPISVKPVSIDHHAGVFGRKNGPAASGGDGVEEGDEEVQAAGEAAVEISSENAGPGCRQSQSGGGSGEDGGHDDDDGEGSNKKRRRKNYHRHTAEQIRIMEALFKESPHPDERQRQQAVQERHENSLLKSELEKLQDEHRAMRELAKKPSRCLNCGVVATSSDAAAAATAADTREQRLRLEKAKLKAEIERLRGTPGKSAADGIASPPCSASAGAMQTNSRSPPLHDHDGGFLRHDDDKPRILELATRALDELVGMCSSGEPVWVRGVETGRDILNYDEYVRLFRRDHGGSGDQMAGWTVEASRECGLVYLDTMHLVHTFMDVDKWKDLFPTMISKAATLEMISNREDDGRDGVLQLMYAELQTLTPMVPTRELYFARYCKKLAAERWAIVDVSFDESETGVHASSAVRCWKNPSGCLIEEQNNGRCKMTWVEHTRCRRCTVAPLYRAVTASGVAFGARRWVAALQLQCERMVFAVATNVPTRDSTGVSTLAGRRSVLKLAHRMTSSLCRTTGGSCDMAWRRAPKGGSGGGGDDDIWLTSRENAGDDPGEPQGLIACAAASTWLPVNPTALLDLLRDESRRPEWDVMLPGKSVQSRVNLAKGKDRTNCVTAYAARPEEEEERGGKWVLQDVCTNPCESTIAYAAIDAAALQPVIAGHDSSGVHLLPCGFISVMPDGLESKPAVITASRRGGEASGAGSLVTVAFQVPASPSAAAATLSPDSVEAVTVLVSSTLRNIRKALGCDSCEEEF

SEQ ID NO: 17071 - protein, 256 aa, Oryza sativa
  Clone ID: TF_OSC410612j.C1.p5.np
NSFVVWDPHVFADLLLPRLFKHNNFSSFVRQLNTYVSTPNPNPNPFPCGDSTKKKRSLPGNPDPEPEAEVIALSPRALVATNRFVCEVCNKGFQRDQNLQLHRRGHNLPWKLRHRAAAVSAVTTAAPAPRKRVYVCPEPTCVHHDPARALGDLTGIKKHFSRKHGEKRWRCERCGKRYAVHSDWKAHVKNCGTREYRCDCGILFSRKDSLLTHRAFCDALAEESARLLAAANNSSSITTTTCNNSNISSNNNNNNI

SEQ ID NO: 17072 - protein, 264 aa, Oryza sativa
  Clone ID: TF_OSC3919j.C1.p1.fg
MCDNKHVLSVFLPKTCPYCLVLIRTETCYDCPSIRSHDLTGANERWRLFMQGFRKVVPDRWEFANGNFRRGEQGLLSGIRRRKATTPQSSKSCGSGVNVAFPPPLPPLPPEPSATTSSGNDRSSSSASSPPRADITSENEQLRKDNQTLTMELARARRHCEELLGFLSRFLDVRQLDLRLLMQEDMRAAAGGVGGEQRVQEHAREEKCVKLFGVLLDDTHGAATRKRARCEEAAASERPIKMIRIGEPWVSVPSSGPARCGGDN

SEQ ID NO: 17073 - protein, 105 aa, Oryza sativa
  Clone ID: TF_OSC415863j.C1.p1.fg
MDYSTVKQEEVEVVVLDGEEEAAAAAAPVPLPGGDGGGGGGGAVPGEDVRDGGGPGDGRGGVVGRRGEEQLRGVGSPLFLRRPPLLHFKHSNLSSFLLQLNTYIR

SEQ ID NO: 17074 - protein, 415 aa, Oryza sativa
  Clone ID: TF_OSC11874j.C1.p4.fg
MAEQGAGEADAGGGEPAAGGGDDGGGGGVGGAEVAADAVPDEDVPAGGGPGGGRRDLVERGQLNTYGFRKIVPDRWEFANDCFRRGEKRLLCDIHRRKVVAAAAAAPPPPSPGMATAAAAVASGAVTVAAAPIPMALPVTRAGSPAHSSEEQVLSSNSGSGEEHRQASGSGSAPGGGGGGSASGGDMGEENERLRRENARLTRELGHMKKLCNNILLLMSKYAATQHVEGSAGISSIANCSGESSEAVPPPPPLPPAILDLMPSCPALATAAAAAGLAIDGEPDPSARLFGVSIGLKRTRDDAAAAADEDGGGEDQAEHGGADVKPEAADPHPAGGGGGSSTEASPESHPWPIYRPTPMYHAVRPTCNGPDRAGSDQDGSSSSVRSIRMPVHSLVSFTSVLGVSAKNGGDIGRKH

SEQ ID NO: 17075 - protein, 93 aa, Oryza sativa
  Clone ID: TF_OSC413071j.C1.p13.gm
MDHNTDPPPTTMVDAAAALLLEPKLEGYDDDGGGEPLQPAPFVSPLDQLMQPPRPLEALLQGPHLPPFLSKTYDLVCEPELDGGHLLGATPAT

SEQ ID NO: 17076 - protein, 539 aa, Oryza sativa
  Clone ID: TF_OSC100925j.C1.p3.gm
MAADGVLAGGGGCRDHVGATTARGDGRRDNSRRRHACVDGWGQDRARTRGDDGQRRYAQCRGGWGDIWRWGGLIRKQPDTTVYPGQICAAAGGGGGMADQTAAAVVVGGGAAATMGEPSPPPPAPAAEAAGVGVGQQQRTVPTPFLTKTYQLVDDPAVDDVISWNDDGSTFVVWRPAEFARDLLPKYFKHNNFSSFVRQLNTYGFRKIVPDRWEFANDCFRRGERRLLCEIHRRKVTPPAPAATTAAVAAAIPMALPVTTTRDGSPVLSGEEQVISSSSSPEPPLVLPQAPSGSGSGGVASGDVGDENERLRRENAQLARELSQMRKLCNNILLLMSKYASTQQLDAANASSAAGNNNNNNCSGESAEAATPLPLPAVLDLMPSCPGAASAAAPVSDNEEGMMSAKLFGVSIGRKRMRHDGGGDDDHAATVKAEPMDGRPHGKDEQSAETQAWPIYRPRPVYQPIRACNGYEYDRAGSDQDGHVQLRTCVNNLLVTGAGTLDAGREYETNSLPRPRRAKNSNDVPGMPNSLGQAPSPVA

SEQ ID NO: 17077 - protein, 458 aa, Oryza sativa
  Clone ID: TF_OSC412573j.C1.p1.gm
MAADGVLAGGGGCRDHVGATTARGDGRRDNSRRRHACVDGWGQDRARTRGDDGQRRYAQCRGQICAAAGGGGGMADQTAAAVVVGGGAAATMGEPSPPPPAPAAEAAGVGVGQQQRTVPTPFLTKTYQLVDDPAVDDVISWNDDGSTFVVWRPAEFARDLLPKYFKHNNFSSFVRQLNTYGFRKIVPDRWEFANDCFRRGERRLLCEIHRRKVTPPAPAATTAAVAAAIPMALPVTTTRDGSPVLSGEEQVISSSSSPEPPLVLPQAPSGSGSGGVASGDVGDENERLRRENAQLARELSQMRKLCNNILLLMSKYASTQQLDAANASSAAGNNNNNNCSGESAEAATPLPLPAVLDLMPSCPGAASAAAPVSDNEEGMMSAKLFGVSIGRKRMRHDGGGDDDHAATVKAEPMDGRPHGKDEQSAETQAWPIYRPRPVYQPIRACNGYEYDRAGSDQD

SEQ ID NO: 17078 - protein, 384 aa, Oryza sativa
  Clone ID: TF_OSC400591j.C1.p27.fg
MASSSSSSSLCRLLIPRPTTRRFSGGGGEGGMAAAAPVKREVKPEAGEGWGGGDLGVVPPPPRPMEGLGEAGPAPFVAKTYEMVADAATDAVVSWGPGGSGASFVVWDPHALAAGVLPRFFKHANFSSFVRQLNTYGFRKVTPDRWEFANEAFLAGQKHLLKNIKRRRVSKPLVDSQLRNKASVVFGQPEAPGEVVSLKRDRAALRAEVIMLKQQYNACKSQLIAMEEMVRNIERRQQQTIGFFAKVLTNPAFVQQVLLNYVNKNGLRGAAKRQRLMENEEQHADSPLNKGMEAASVMEADVSPGSTGCGTVGKVETTPMCNFQNIENMCDDVWEELDALPETGMEQEEKAGIGSFDVEEFVGRPCGWVDDCPYLVEPMQFVEH

SEQ ID NO: 17079 - protein, 372 aa, Oryza sativa
  Clone ID: TF_OSC401020j.C1.p22.fg
MDDPMLNAVKEEESHGDGGGLEVVAGEDGAAAVAAGVAPRPMEGLHDAGPPPFLTKTYDMVDDAGTDAAVSWSATSNSFVVWDPHAFATVLLPRFFKHNNFSSFVRQLNTYGFRKVDPDRWEFANENFLRGQRHLLKNIKRRKPPSHTASNQQSLGPYLEVGHFGYDAEIDRLKRDKQLLMAEVVKLRQEQQNTKANLKAMEDRLQGTEQRQQQMMAFLARVMKNPEFLKQLMSQNEMRKELQDAISKKRRRRIDQGPEVDDVGTSSSIEQESPALFDPQESVEFLIDGIPSDLENSAMDAGGLVEPQDFDVGASEQQQIGPQGELNDNFWEELLNEGLVGEENDNPVVEDDMNVLSEKMGYLNSNGPTAGE

SEQ ID NO: 17080 - protein, 348 aa, Oryza sativa
  Clone ID: TF_OSC401122j.C1.p44.fg
MDGLHTELALGLIGCCGGDGQQQTAPFVAKTYQMVCDPRTDALVRWGRDNNSFVVVDPAAFSQLLLPCFFKHGNFSSFVRQLNTYVSIIQSPAPGFRKVHPDRWEFAHESFLRGQTHLLPRIVRRKKRGEGGGGGGGASCSFGGGAGEHQVAAAAASVGMSGEEEDAAEDVLAKEAALFEEVQRLRHEQTAIGEELARMSQRLQATERRPDQLMSFLAKLADDPNAVTGHLLEQAAERKRRRQHLPSHEPTVCPLPPAPPPQPPQPLLALAGAAAMDGTYWWTTEHHHHHHHQMKPMTVLPSLEPPTASCGVHQVPELGGGGVMGLTTDGEAKVEPPFPFCLLGQAFF

SEQ ID NO: 17081 - protein, 482 aa, Oryza sativa
  Clone ID: TF_OSC401064j.C1.p105.fg
MEGGGGGGSLPPFLSKTYEMVDDPSTDAVVGWTPAGTSFVVANQPEFCRDLLPKYFKHNNFSSFVRQLNTYDFKTVLVNNQGQLLFYQENSSSLLQCYCLLHPVEVVQKCLIMGFRKVDPEQWEFANEDFIKGQRHRLKNIHRRKPIFSHSSHSQGAGPLTDNERKDYEEEIERLKSDNAALSSELQNNTLKKLNMEKRMQALEEKLFVVEDQQRSLISYVREIVKAPGFLSSFVQQQDHHRKKRRLPIPISFHEDANTQENQIMPCDLTNSPAQTFYRESFDKMESSLNSLENFLREASEEFGNDISYDDGVPGPSSTVVLTELHSPGESDPRVSSPPTRMRTSSAGAGDSHSSRDVAESTSCAESPPIPQMHSRVDTRAKVSEIDVNSEPAVTETGPSRDQPAEEPPAVTPGANDGFWQQFLTEQPGSSDAHQEAQSERRDGGNKVDEMKSGDRQHLWWGKRNVEQITEKLGLLTSTEKT

SEQ ID NO: 17082 - protein, 527 aa, Oryza sativa
  Clone ID: TF_OSC400288j.C1.p6.gm
MDHNTDPPPTTMVDAAAALLLEPKLEGYDDDGGGEPLQPAPFVSPLDQLMQPPRPLEALLQGPQLPPFLSKTYDLVCEPELDGVISWGHAGNSFVVWDPSAFARDVLPHHFKHNNFSSFVRQLNTYGFRKVHADRWEFAHEDFLRHSKHLLKKIVRRRSSPTQQSGLQPGSSGESGLDPELNTLRREKSALLQEVTRLKQEHLQTIEQMSTLNQRLESAEDRQKQMVSFLAKLLQNPTFLRQLKMHRQQKEIDSTRVKRKFLKHVPHGNIDSGESSSQHTGESNLDFSPTSLDLPATHSDILDLQNFLLEDGDLNLAMLPENIGLDGIEAPDDIGALVQGFDTQEELELGSGVELLEIPPASGPRGQDPTIGRSKGKNVLSPGLDATSSEADCLGSFSDNMGMLSDSMLQTAGKLMDADDDERIWGVDASSALQSSCSGTSQQAYGSLVSDPYLMEMANKPEKFWELDFQALDDGDLQLDNPEKVLDTGVVAQAQALELGGLTQATELKKACFFLRLITQGTNQTGP

SEQ ID NO: 17083 - protein, 357 aa, Oryza sativa
  Clone ID: TF_OSC101218j.C1.p11.fg
MNYRVVNPVKVESGPSTGVANGQPPRPMDGLADGGPPPFLTKTYDMVDDPTTDAVVSWSATNNSFVVWDPHLFGNVLLPRYFKHNNFSSFVRQLNTYGFRKVDPDKWEFANEGFLRGQKHLLKSIKRRKPPNSSPSQQSLGSFLEVGHFGYEGEIDQLKRDKHLLMAEVVKLRQEQQNTKSDLQAMEQKLQGTEQKQQHMMAFLSRVMHNPEFIRQLFSQSEMRKELEEFVSKKRRRRIDQGPELDSMGTGSSPEQVSQVMFEPHDPVDSLFNGVPSDLESSSVEANGGKAQQDVASSSSEHGKIKPSNGELNEDFWEDLLHEGGLDEDTRNPAIDDMNLLSQKMGYLNSSSTKSPQ

SEQ ID NO: 17084 - protein, 310 aa, Oryza sativa
  Clone ID: TF_OSC13607j.C1.p1.fg
GFRKVVPERWEFANEFFRKGEKQLLTEIHRRKTSSASTASPSPPPFFAPPHFPLFHHPGVAAAQHHHAFVGDDGVVAAHGIGMPFPQPHWREPNLPVATRLLALGGPAPSPSSAEAGGAGRAATAAVLMEENERLRRSNTALLQELAHMRKLYNDIIYFVQNHVRPVAPSPAAAAFLQGLGMQARKKPAAANVLNNSGGSTTSSSSLTIAEEPSPPPQQQHLAGEKSGGEAGNSSAARSSAPTKLFGVHLSAAPCGAGSKRASSPEEHPPTSPATKPRLVLECDDLSLTVAPSSSSQQQLSAASSPTSTS

SEQ ID NO: 17085 - protein, 497 aa, Oryza sativa
  Clone ID: TF_OSC400132j.C1.p6.fg
MEVAAGARGGGAGGGGGGPAPFLLKTYEMVDDPSTDAVVSWSDASDASFVVWNHPEFAARLLPAYFKHSNFSSFIRQLNTYISLLENDSSTMFCLTTKKLVLQGFRKIDPERWEFANEYFIKGQKHLLKNIHRRKPIHSHSHPPGALPDNERAIFEDEIERLSREKSNLQADLWKSKQQQSGTMNQIEDLERRVLGMEQRQTKMIAFLQQASKNPQFVNKLVKMAEASSIFTDAFNKKRRLPGLDYSIENTETTSFYDDHSSTSKQETGNLLNQHFSDKLRLGLCPAMTESNIITLSTQSSNEDNRSPHGKHPECDMMGRECLPLVPQMMELSDTGTSICPSKSSCFAPPISDEGLLTCHLSLTLASCSMDVDKSQGLNANGTTIDNPTEAATATMEKDDTIDRSFDDNQKKSADSRTADATTPRADARVASEAPAAPAAVVNDKFWEQFLTERPGCSETEEASSGLRTDTSREQMENRQAYDHSRNDREDVEQLKL

SEQ ID NO: 17086 - protein, 249 aa, Oryza sativa
  Clone ID: TF_OSC400222j.C1.p63.fg
MGGECKVHQLQAAGDGGPGAVAPFVAKTFHMVSDPSTNAVVRWGGAGNTFLVLDPAAFSDFLLPSYFKHRNFASFVRQLNTYGFRKVDPDRWEFAHESFLRGQAQLLPRIVRKKKKGGAAPGCRELCEEGEEVRGTIEAVQRLREEQRGMEEELQAMDQRLRAAESRPGQMMAFLAKLADEPGVVLRAMLAKKEELAAAGNNGSDPCKRRRIGADTGRGGVATGGDAAEMAQSRGTVPFPFSVLGQVFY

SEQ ID NO: 17087 - protein, 266 aa, Oryza sativa
  unsure (1)..(266): unsure at all Xaa locations
  Clone ID: TF_OSC900200j.C1.p6.np
SLLLXNKCKSILLSLSAQKAVPAPFLTKTYQLVDDPATDHIVSWGDDRVSTFVVWRPPEFARDILPNYFKHNNFSSFVRQLNTYGFRKVGFRKVVPERWEFANEFFRKGEKQLLTEIHRRKTSSHRRRRRLRRRSSRRHHHAFGRRRGCGGAWHRHAVSSRRHHHAFGRRRGCGGAWHRHAVPAAALAGAELAGRDAPARARPRAVAVVGGGRGAGRAATAAVLMEENERLRRSNTALLQELAHMRKLYNDIIYFVQNHVRPVAPS

SEQ ID NO: 17088 - protein, 406 aa, Oryza sativa
  Clone ID: TF_OSC6909j.C1.p1.fg
MGSKKRSPQHPAAAAPPPAVGGGGGGEVSGDGGASTANGPVVPKPSEVAPFLTKVYDMVSDPATDNVISWAEGGGSFVIWDSHAFERDLHRHFKHSNFTSFIRQLNTYGFRKVHPDRWEWANEGFIMGQKHLLKTIKRRKKSSQESPSEIQKAPVKTAPGTENIEIGKYGGLEKEVETLKRDKALLMQQLVDLRHYQQTSNLEVQNLIERLQVMEQNQQQMMALLAIVVQNPSFLNQLVQQQQQQRRSNWWSPDGSKKRRFHALEQGPVTDQETSGRGAHIVEYLPPVPETSGQVNPVEGAICSANSQPVPSPAVATPMDMQTSNVADTLGSSEEPFADNSTLHEWDDNDMQLLFDDNLDPILPPFENDGQMGPPLSVQDYDFPQLEQDCLMEAQYNSNNPQYGND

SEQ ID NO: 17089 - protein, 103 aa, Oryza sativa
  unsure (1)..(103): unsure at all Xaa locations
  Clone ID: TF_OSC410068j.C1.p11.gp
MPGMVKEEWPPSSPEEGEAPRPMEGLHEVGPPPFLTKTFDLVADPATDGVVSWGRAGSSFVVWDPHVFAAVFLPRFFKHNNFSSFVRQLNTYVSPPNFHCHHX

SEQ ID NO: 17090 - protein, 216 aa, Oryza sativa
  Clone ID: TF_OSC401518j.C1.p1.np
SLASSSSRSSLAPPPPAGRGGGGVAPFVAKTYRMVDDPATDGVIAWGRDSNSFVVADPFAFSQTLLPAHFKHSNFSSFVRQLNTYGFRKVDPDRWEFAHVSFLRGQTHLLRRIVRRSSGRGSEEEGGGRRLRRGGEAAAGDVDEESAVVALEVARLRREQREIEGRVAAMWRRVQETERRPKQMLAFLVKVVGDPQLVTIFRVLAYISPSSGFLSI

SEQ ID NO: 17091 - protein, 446 aa, Oryza sativa
  Clone ID: TF_OSC11879j.C1.p9.fg
MAEQGAGEADAGGGEPPPAAVMTAAAEALAGQRSLPTPFLTKTYQLVEDPAVDDVISWNEDGSTFVVWRPAEFARDLLPKYFKHNNFSSFVRQLNTYGFRKIVPDRWEFANDCFRRGEKRLLCDIHRRKVVAAAAAAPPPPSPGMATAAAAVASGAVTVAAAPIPMALPVTRAGSPAHSSEEQVLSSNSGSGEEHRQASGSGSAPGGGGGGSASGGDMGEENERLRRENARLTRELGHMKKLCNNILLLMSKYAATQHVEGSAGISSIANCSGESSEAVPPPPPLPPAILDLMPSCPALATAAAAAGLAIDGEPDPSARLFGVSIGLKRTRDDAAAAADEDGGGEDQAEHGGADVKPEAADPHPAGGGGGSSTEASPESHPWPIYRPTPMYHAVRPTCNGPDRAGSDQDGSSSSVRSIRMPVHSLVSFTSVLGVSAKNGGDIGRKH

SEQ ID NO: 17092 - protein, 459 aa, Oryza sativa
  Clone ID: TF_OSC401582j.C1.p3.fg
MESSNLGGGGGGGGGGGPPPFLIKTYEMVEDAATNHVVSWGPGGASFVVWNPLDFSRDLLPKYFKHNNFSSFIRQLNTYGFRKIDPERWEFANEDFIRGHTHLLKNIHRRKPVHSHSLQNQINGPLAESERRELEEEINRLKYEKSILVADLQRQNQQQYVINWQMQAMEGRLVAMEQRQKNIVASLCEMLQRRGGAVSSSLLESDHFSKKRRVPKMDLFVDDCAAGEEQKVFQFQGIGTDAPAMPPVLPVTNGEAFDRVELSLVSLEKLFQRANDACTAAEEMYSHGHGGTEPSTAICPEEMNTAPMETGIDLQLPASLHPSSPNTGNAHLHLSTELTESPGFVQSPELPMAEIREDIHVTRYPTQADVNSEIASSTDTSQDGTSETEASHGPTNDVFWERFLTETPRSCLDESERQESPKDDVKAELGCNGFHHREKVDQITEQMGHLASAEQTLHT

SEQ ID NO: 17093 - protein, 379 aa, Oryza sativa
  Clone ID: TF_OSC410068j.C1.p13.fg
MEKMMPGMVKEEWPPSSPEEGEAPRPMEGLHEVGPPPFLTKTFDLVADPATDGVVSWGRAGSSFVVWDPHVFAAVFLPRFFKHNNFSSFVRQLNTYFLVRTNYLNKRSHFYSLRFQGFRKIDPDRWEFANDGFLRGQRHLLKMIKRRRPLSYLPGSQQALGTCLEVGQFGLDEEIDRLKRDKNILLAEVVKLRHKQQSTKANMRAMEERLQHAEQKQVQMMGFLARAMQNPDFFHQLIHQQDKMKGLEDTFSKKRTRSIDIVPFLNPGEVSQGDQLESTLLFDPRPFAELNDEPAKSELENLALNIQGLGKGKQDVNRTRNQPRNQASNETELTDDFWEELLNEGARDDAGIPGMERRRPRYVDALAQKLGYLSNSSQK

SEQ ID NO: 17094 - protein, 310 aa, Oryza sativa
  Clone ID: TF_OSC400606j.C1.p13.fg
MAFLVERCGEMVVSMEMGPHGGGGAAAGKPVPAPFLTKTYQLVDDPCTDHIVSWGEDDTTFVVWRPPEFARDLLPNYFKHNNFSSFVRQLNTYGFRKIVADRWEFANEFFRKGAKHLLAEIHRRKSSQPPPPPMPHQPYHHHHHLNPFSLPPPPPAYHHHHLIQEEPATTAHCTVAGDGGEGGDFLAALSEDNRQLRRRNSLLLSELAHMKKLYNDIIYFLQNHVAPVTTTTTTPSSTAMAAAQHHLPAAASCRLMELDSPDHSPPPPPPKTPATDGGDTVKLFGVSLHGRKKRAHRDDDDGVHDQGSEV

SEQ ID NO: 17095 - protein, 289 aa, Oryza sativa
  Clone ID: TF_OSC900153j.C1.p12.fg
MAEQGAGEADAGGGEPPPAAVMTAAAEALAGQRSLPTPFLTKTYQLVEDPAVDDVISWNEDGSTFVVWRPAEFARDLLPKYFKHNNFSSFVRQLNTYGFRKIVPDRWEFANDCFRRGEKRLLCDIHRRKVVAAAAAAPPPPSPGMATAAAAVASGAVTTSDRLVGVSIGLKRARDDPAAAADEDGGGEDQAEHGGADVKPEAADPHPAGGGGGSSTEASPESHPWPIYRPTPMYHAVRPTCNGPDRAGSDQDGSSSSVRSIRMPVHSLVSFTSVLGVSAKNGGDIGRKH

SEQ ID NO: 17096 - protein, 89 aa, Oryza sativa
  Clone ID: TF_OSC3927j.C1.p1.fg
MAAAEAAAAVGKQQQKGGGGRGGGGGGPAPFLTKTNQMVEESATDEVISWGKEGRSFVVWKPVEFARDLLPLHFKHCNFSSFVRQLNTY

SEQ ID NO: 17097 - protein, 321 aa, Oryza sativa
  Clone ID: TF_OSC101002j.C1.p3.fg
MAAAAGGGAAPFVWKTYRMVEDPGTDGVIGWGKGNNSFVVADPFVFSQTLLPAHFKHNNFSSFVRQLNTYVSLVTPSSISSSHHTPPLSALHIMLPWILSGTQLKGFRKVDPDRWEFAHASFLRGQTHLLRNIVRRGSAAAGGGGGGGGGKRRDASADGGGGGGDEDMTMVATEVVRLKQDQRTIDDRVAAMWRRVQETERRPKQMLAFLLRVVGDRDKLHRLVGGGGYRNGSATAAAADNGFADAARAGCGEKRARLLLDGDNTGAFGPDRRRLRRVLHRRRHVPRRCRRCRRRRRRRVSRLLVRFRSGQRLLILSLLTD

SEQ ID NO: 17098 - protein, 380 aa, Oryza sativa
  Clone ID: TF_OSC414105j.C1.p3.fg
MEWEEESEAARQKAAAASASVVPAPFLTKTYQLVDDPATDHVVSWEDDDGGESASSFVVWRPPEFARDILPNYFKHSNFSSFVRQLNTYGFRKVVPERWEFANEFFRKGEKQLLCEIHRRKSAAATWPPFPPPPPPFFAPRHFAAGAFFRHGDGMLHGRLGALVTTTERRHWFESAALPVAPSSRLLSQLGPVIAPARRAAATPEEEALMQENHRLLRGNAALVQELAHMRKLYSDIIYFVQNHVRPVAPSPAAAAALHGLGVLRPPPAGGKAPASEVRGASGRSATSSSSLTVAEDQPTLLALRLPRTTEKIINEVSGGNGGGSTKLFGVHLSSADEQTSSGASRKRSPPQEQPPTSPAPKRTLVVEHSELRLSIVSPP

SEQ ID NO: 17099 - protein, 288 aa, Oryza sativa
  Clone ID: TF_OSC401894j.C1.p38.fg
MVEDPSTDETISWNDSGTAFVVWRPAEFARDLLPKHFKHSNFSSFVRQLNTYGFKKVVADRWEFANDCFRRGEKHLLGGIQRRKGSGTGGAGAAPAGGIPTAIPISSPPTSSGGEPAVSSSPPRGAAGIAAGVSGAVAELEEENARLRRENARLARELARARRVCDGVRRLVSRYDHDHGGGEEEAGEGDVKPMLFGVAIGGKRSREENGEDEEEEEEEGADEDGEDDEVEEDDEERERHAARRVPVREGKVRRTTELSDLDVLALSVRAAAAARPGGASRDRKSSVS

SEQ ID NO: 17100 - protein, 258 aa, Oryza sativa
  Clone ID: TF_OSC2810j.C1.p3.np
EFARDLLPKYFKRNNFSSFVRQLNTYGFGGFGNIVPDRWEFANDFRRGERRLLCEIHRWKVTPPTPATTTTGAVTVAATIPMALPVTTRDGSQVLSGEEQIISSSSSPEPCSCCRRRHPAPAPAPAASRPAGDENERLRRENAQLAREHSQMMNNILLLMSKYTSTQKLNAANSSSTAGNNNCFGESAEAATPLSLPAVLDLMPSCPGGAARIKQRRGNDEREKLFGVSIGRKRTRHEGGAGGEDEHQQANHTDANTH

SEQ ID NO: 17101 - protein, 293 aa, Oryza sativa
  Clone ID: TF_OSC400542j.C1.p23.np
RSPSRRPSCPTSCSGTTSSPSPGTGSGRPSSPASASPSTRSSTVMDLPRPMEGLGEAGPPPFLCKTYEVVDDPGTDTVISWGFAGNSFVVWDANAFAAVLLPRYFKHSNFSSFVRQLNTYGFRKVDPDRWEFANEGFLRGKKELLKTIKRRRPPPSSPPSSSSSSSSSQHQQQPAAACLEVGQFGRDGVVNRLQRDKSVLIAEVVKLRQEQQTTRAQMQAMEERISAAEQKQQQMTVFLARAMKNPGFLQMLVDRRARNRVLEDALSKKRRRPIDAHRRHRRLAAHRSRRGNR

SEQ ID NO: 17102 - protein, 506 aa, Oryza sativa
  Clone ID: TF_OSC418197j.C1.p7.fg
MEAAVAAAAAAAGAVTTAVAPPPGAAVSNGVATAPPPFLMKTYEMVDDPATDAVVSWGPGNNSFVVWNTPEFARDLLPKYFKHSNFSSFVRQLNTYGFRKVDPDRWEFANEGFLRGQKHLLKTINRRKPTHGNNQVQQPQLPAAPVPACVEVGKFGMEEEIEMLKRDKNVLMQELVRLRQQQQTTDHQLQTLGKRLQGMEQRQQQMMSFLAKAMHSPGFLAQFVQQNENSRRRIVASNKKRRLPKQDGSLDSESASLDGQIVKYQPMINEAAKAMLRKILKLDSSHRFESMGNSDNFLLENYMPNGQGLDSSSSTRNSGVTLAEVPANSGLPYVATSSGLSAICSTSTPQIQCPVVLDNGIPKEVPNMSAVPSVPKAVAPGPTDINILEFPDLQDIVAEENVDIPGGGFEMPGPEGVFSLPEEGDDSVPIETDEILYNDDTQKLPAIIDSFWEQFLVASPLSVDNDEVDSGVLDQKETQQGNGWTKAENMANLTEQMGLLSSHHTG

SEQ ID NO: 17103 - protein, 183 aa, Oryza sativa
  Clone ID: TF_OSC900079j.C1.p18.fg
MTVSMDGAPYLRTVDLKTYKNYKDMSLGLEKMFIGFSTGEDLPYWEILDVRHAIDVMHLTKNLCVNLLGFLGVYGKSKDTLEAHNLKHMEQRGDLHPEPKEKGSHYLSPANYTLSKAEKESMFECLESIKIGIFRPVYLHNMFPFERYMGVLKKYVHIRARPEASIAKRFGTEEVIELCVEFI

SEQ ID NO: 17104 - protein, 77 aa, Oryza sativa
  Clone ID: TF_OSC25042j.C1.p4.np
DNFLLGSQLKERVYIQEGVAISGLLDGTGDYEGDRVLVGDVPWGMFVSSVKRLRVLKTSDLSSSVSTSFHLPSITSN

SEQ ID NO: 17105 - protein, 118 aa, Oryza sativa
  Clone ID: TF_OSC25645j.C1.p2.hg
MRQVCSKSAADLPQTLHHTERVCGKSAASLRQTCRRLFIILKEYAASLRQTCRRLFIILKEYAAGLQQVCGRSAASLRQVCRILFIILKEYAASLRQTCRKPYLTLKKNTAWRRPACG

SEQ ID NO: 17106 - protein, 347 aa, Oryza sativa
  Clone ID: TF_OSC403977j.C1.p2.gm
MDAAPYLRKVDLKTYKNYKDMSLGLEKMFIGFSTGEVFGTFIFDIQHQEKATIWPTCQILSPLYLFPPPPLSIPLTPKADEEPHVPTEAEDERRAGGCELSLLAAETEYDARVDGRRPVKLTSWASAPDLCKKMAKVGEQQPALDLREKMASAATGGGGARGGRWRRATGCGGALPSAGSGGRGGERQRRPPLPRIRLAVVTTCRRCPPPPPATLQRYRPLSPPAATVHCYRLVGAPSPSPASSPPQPSSTAAAPSSARPTASQRQRRWARCQEALVRAVELSGAFKGRLLEDFPGCPREMQRGLAAMLINPGECNLETIHGGPCCLELIRAHQLIIQRTDFVWMKL

SEQ ID NO: 17107 - protein, 97 aa, Oryza sativa
  Clone ID: TF_OSC25469j.C1.p1.np
LPHEPMLQTPSLNQLQPVQTDCIPEVSVSTAGTATENEKSGQQAQQSSKDVQSKTQVASTRSCTKVHKQGVALGRSVDLSKFSNYDELKAELDKMFE

SEQ ID NO: 17108 - protein, 70 aa, Oryza sativa
  Clone ID: TF_OSC17697j.C1.p1.fg
YEDNDGDRMLAGDIPWKVFVSTVKRLRVMRRSELPHDMTWVKWIHFLKLRSALNLFSSYVLPQIGADPVK

SEQ ID NO: 17109 - protein, 36 aa, Oryza sativa
  Clone ID: TF_OSC900116j.C1.p14.gp
VSMDAAPYLRKVDLKTYKNYKDMSLGLEKMFIGFST

SEQ ID NO: 17110 - protein, 236 aa, Oryza sativa
  Clone ID: TF_OSC400542j.C1.p13.fg
MAGADVDVGTELRLGLPGGGGGAAEAAAKAAKRGFEETIDLKLKLPTAGMEEAAAGKAEAPAAEKAKRPAEAAAADAEKPPAPKAQAVGWPPVRSFRRNIMTVQSVKSKKEEEADKQQQQPAANASGSNSSAFVKVSMDGAPYLRKVDLKMYNSYKDLSLALQKMFGTFTATGNNMNEVNGSDAVTTYEDKDGDWMLVGDVPWQMFVESCKRLRIMKGSEAIGLAPRAKDKYKNKS

SEQ ID NO: 17111 - protein, 144 aa, Oryza sativa
  Clone ID: TF_OSC420647j.C1.p6.fg
MAMSQPALKGKDDGEAKQAPASGCLYVKVSMDGAPYLRKVDLKMYKNYKELSLALEKMFSCFTVGHGESNGKSGRDGLSDCRLMDLKNGTELVLTYEDKDEDWMLVGDVPWRMFTDSCRRLRIMKGSDAVGLAPRATDKSKNRN

SEQ ID NO: 17112 - protein, 253 aa, Oryza sativa
  Clone ID: TF_OSC421766j.C1.p3.gm
MKDRNASAGPEVKPAGLSPSRFVKVFMHGEPFERKINLAIHNNYDSLSFTLKRLGNNYSMSPFELEGFVNNEEDGAIDNDFDLLYDDMNGVRYLLGEVPWEVFTITVKRIYIVPAEQQNESEYQEEEEDNAAAAATADEDPPAAGAEGWRWQAPAGAEAGGGGAEGRSAAAGSGVVEGRPAAVAEGRPGGGRQRLGPPGMEFFAFFSFFLLNVMWMTVICAILNGAAADDGAAAAVDNGDDHGYTSNDDPSFD

SEQ ID NO: 17113 - protein, 238 aa, Oryza sativa
  Clone ID: TF_OSC400431j.C1.p11.fg
MAWRRGFGREEEDAAAAGESGLELCLGLPAYFSSSSSSKPSEGSTAAPAFALRSNGTNASKPSGAAAAAPVVGWPPVRSFRRNLASSSSSSSKQAPPPPSSSPQNGDKASKDGGAEKGMFVKINMDGVPIGRKVDLAAYGGYAQLSAAVDKLFRGLLAAQSAAADGEADAAAAGEMVGGGEYTLVYEDDEGDRMLVGDVPWQMFIATAKRLRVLKSSDLPPPSLMRAAGSRKRAAADS

SEQ ID NO: 17114 - protein, 197 aa, Oryza sativa
  Clone ID: TF_OSC900383j.C1.p5.fg
MENLKATELRLGLPGTEEEAAPPPSTPRAGSKRALAGEPDQAKIKPAAAAKAQVVGWPPVRSYRKSCLQPTTTTTKSKPPPAAAAAETQQKEDVAGAGGLFVKVSMDGAPYLRKIDLKVYKGYRELREALEAMFLCFSGGAAANAAVNPSDFAVTYEDKDGDLMLVGDVPFEMFISTCKRLRIMKGSEARGLGATRG

SEQ ID NO: 17115 - protein, 195 aa, Oryza sativa
  Clone ID: TF_OSC419674j.C1.p7.fg
MAAESIDAELRLGLPGSGGGDGVAAKKRRSASSTVKSEASGTACCGGAGARDVEDGASPASKVQVVGWPPVGSYRRSTFQSSSSSTAAAAKGKGGGETDQGRKNKGGGLYVKVSMDGAPYLRKVDLRMYGGYRELRDALDALFGCFSADASASAAHFAVAYEDKDGDLMLAGDVPWDMFISSCKKLRIMRGSEAR

SEQ ID NO: 17116 - protein, 266 aa, Oryza sativa
  Clone ID: TF_OSC101867j.C1.p40.fg
MSPPLELDYIGLSPPPPPPSSSSAAAARADDVDLKGTELRLGLPGSESPDRRPAAIAAAAATATTLELLPAKGAKRVFPDEAALTPPTAAAGKGKAAREGEEVGAEEEDKKVAAPPQPAAKAQVVGWPPIRSYRKNTMATNQIKSNKEDVDAKQGQGFLYVKVSMDGAPYLRKVDLKTYKNYKDMSLGLEKMFIGFSTGKEGAENQKDGEYVLTYEDKDGDWMLVGDVPWEMFTDSCRRLRIMKGSDAIGLGCSQLRLVPLFVPKL

SEQ ID NO: 17117 - protein, 307 aa, Oryza sativa
  Clone ID: TF_OSC401037j.C1.p4.fg
MGEASESMKKISRGRLGGSWMGEPSDHHRHGDEQEEEEKTLELSLGLPGGGWRAACRDKGTTTKHSIAAAAAADDDDGDKSSMLSLGYSTLVSHSQGKANKNKGSPEEEEAHPPPATGNNALASNNNGCFQTRSPSTPVVGWPPVRTFRRNLATSSKASLELQNGKKAAKAEEIKRAPFIKINMDGVPIGRKIDLNAFDSYEKLSLAVDKLFRGLLAAQRDPLTAGAKDCQQEDVAISGLLDGTGEYTLVYEDYEGDKVLVGDVPWGMFVSSVKRLRVLKTSDLSSSVSTSFHLSSITSNSVISALF

SEQ ID NO: 17118 - protein, 226 aa, Oryza sativa
  Clone ID: TF_OSC28825j.C1.p4.fg
MEAAVGYAADSLIKATELRLGLPGTADDLPSTPRGKKRAAAAEDNNANAAAADDDEHDAVEAAPPVAKAQVVGWPPVRSYRKSCFQQQSAAASKSKAAVSSCNNKDEPITKNAAPAPAASSAAAANGGSLVKVSMDGAPYLRKIDLRMYKGYRELREALEAMFVCFSGAADGANPSEFAITYQDKDGDLMLVGDVPFDMFTSTCKKLRIMKRSEATGLGSPRQMKI

SEQ ID NO: 17119 - protein, 343 aa, Oryza sativa
  Clone ID: TF_OSC421766j.C1.p4.gm
MTMAIEALSSAFASAPTLVTSASTTSSAALVLIMGLVIILLLRRCVVVEDMTEVRITAATTTTNKAKEAASHLDLSLGISLSPGGGGGDAGTKASSCCYGGGGDGGGCMGSGMLTAGVLGVGHGGSSHDNTTASSGGGGSWTAAFMPSPTGFMHPWSLAARQQKAAAEQERSGVARLPPATTTYMPRAAATVISLPAAVGWPPVHTSRRNLVATINNVLKPDTTAAVKPDRPTQATAMFAADETTAPPPRSAAAATEASRTLNMFAKVHMDGYKVGRKINLRAHRNYDSLRRVLTKMTHNFFCPADYSSTNKGEEDCAKSDEFIFLYEDFEGDRMLVGDVPWE

SEQ ID NO: 17120 - protein, 196 aa, Oryza sativa
  Clone ID: TF_OSC401426j.C1.p14.fg
MPRRTADDDDDGAGAIHGVFRLPTAGDGGEAAESDQHRSSPRAHPLLRRPHRRQQPFYPKARFRSLIILHTYCFNFREILRYLRRSSLTTATVTADRGGGGGGHGRRRSLFVKVYMEGVPIGRKLDLLPLDGYKGLVARLASMFRASITYHHCHRQFAVVGMKTNKVHHVLTYEDQEGDWMMAGDVPWEYGKLAQL

SEQ ID NO: 17121 - protein, 207 aa, Oryza sativa
  Clone ID: TF_OSC400151j.C1.p56.fg
MSVETERSSTESSAASGLDFEDTALTLRLPGSLAAAAAPDPDRKRSSPSSSDAADAADNSSPLAAAADAPPAPKARVVGWPPVRSFRKNALAAKFVKVAVDGAPYLRKVDLEAYSGYDQLLRALQDKFFSHFTIPIDGRKVAGKFADDERKLVDAVNGTEYVPTYEDKDGDWMLVGDVPWKMFVETCQRLRLMKSSEAVNLAPRAAQ

SEQ ID NO: 17122 - protein, 271 aa, Oryza sativa
  Clone ID: TF_OSC401137j.C1.p27.fg
MSPPLEPHDYIGLSAAAASPTPSSSSCSSSPNPGGEARGPRLTLRLGLPGSESPEREVVAAGLTLGPLPPTTTKAASKRAFPDSSPRHGASSGSVAAAAACQDKAAPAAAPPAAKAQVVGWPPVRNYRKNTLAASASKGKGEDKGTAEGGPLYVKVSMDGAPYLRKVDLKMYSSYEDLSMALEKMFSCFITGQSGLRKSSNRDRLTNGSKADALQDQEYVLTYEDKDADWMLVGDLPWDLFTTICRKLKIMRGSDAAGIAPRSIEQSGQSR

SEQ ID NO: 17123 - protein, 61 aa, Oryza sativa
  unsure (1)..(61): unsure at all Xaa locations
  Clone ID: TF_OSC400415j.C1.p18.gp
DGTGEYTLVYEDYEGDRVLVGDVPXWGMFVSLVKRLRVLKTSDLSSSLITSGRKRTAAECX

SEQ ID NO: 17124 - protein, 281 aa, Oryza sativa
  Clone ID: TF_OSC400887j.C1.p27.fg
MRGGVAGPTAGEPPGTEAEAEEVEESSAGDDEELELGLSLGSKKQQQQQHAPCRILTARDLQPAAALSPDSSVSSSSPAAAAAAGGKRAEGPTATTSPGTVASGHPHSSFGVVGWPPIRQFRMNSLFNQAKENTSETDTKKTATNESDVQKDKEEGEKKGRVAGWVKVNMDGEVIGRKVDLNAHRSYKTLALALELMFTKPSIGLCASHNTNSLKLLDNSAEYQLTYEDRDGDWMLVGDVPWESAIPGNSQNHCFNKRQILRACDKEKSYTAGEAWSVLDG

SEQ ID NO: 17125 - protein, 198 aa, Oryza sativa
  Clone ID: TF_OSC11858j.C1.p1.fg
GAKRGFSDEARSLPGSAAAAAGAGKGKKAAAGEEDEDAEEEDKKVAAAPQAPAGKAQVVGWPPIRSYRKNTMATNQLKSSKEDAEAKQGQGFLYVKVSMDGAPYLRKVDLKTYKNYKDLSTALEKMFIGFTTGKDGLSESRKDGEYVLTYEDKDGDWMLVGDVPWEMFANSCRRLRIMKGSDAIGLAPRAVDKSKNRN

SEQ ID NO: 17126 - protein, 219 aa, Oryza sativa
  Clone ID: TF_OSC14459j.C1.p1.fg
MAGLGFDETELRLGLPGAGELAARSSGKRGFAETIDLKLKLQPAAPAAVSGEEGAQEDKEDADAAAAAADEKMSMKRSASQSSVVTAEPDPDKPRAPKAQVVGWPPVRSFRKNVLAEKCKAAALVKVSMDGAPYLRKIDVAMYKSYPELSMAFQNMFTSFTIGKCGSHQQLKESNKLRDDLEYVPTYEDKDGDWMLVGDVPWDTKGSGEMQELKLIKEN

SEQ ID NO: 17127 - protein, 171 aa, Oryza sativa
  Clone ID: TF_OSC421766j.C1.p4.fg
MKDRNASAEPVVKPGLSPSRFVKVFMHGEPFGRKINLALHNNYDSLSFTLKKLGNNYSMSPFELEGLVNKEEDGAIDSDFDLLYDDMDGVRYFLGDVPWEVFTTTVKKIYIVPAEQQNENDYQEEEEDNAAAAATADEDGDGAAADDGVAAAADDVDDVAGYTSNDDPSFD

SEQ ID NO: 17128 - protein, 183 aa, Oryza sativa
  Clone ID: TF_OSC400903j.C1.p25.fg
MELELGLRLALPSPSPSPATATAAGSELDLLNSAPGSCRKRGFEEALGGFKTDDDNDDGNGRGGDGDSDGEMGNKRRKLVGWPPVKCLHRRRDGGCGGGYVKVKMEGLAIGRKLDLSILGSYAELLDTLHLMFPSTNQEDGHDRRRRHPYAVTYEDGEGDWMQVGDVPWEAFAKSVKRLKILV

SEQ ID NO: 17129 - protein, 243 aa, Oryza sativa
  Clone ID: TF_OSC422284j.C1.p12.fg
MAWNGRFGEDGEEERSLELSLALPGYFSSSGLQGNTSTAADGAKGNDGFKASKKMLKFAPKFSAIRSRPAAPVVGWPPVRSFRRNLASSSSSSKPPRGGRDAAAAATGGKVARFVKVNMDGVPIGRKVDLAAHGGYGELSAAVDRLFRGLLAAQRDPTMATAAAAAAAGESCTGEEEAIAGLLDGGSGEYTLVYEDDEGDQMLVGDVPWNMFIAAARRLRVLRSSDLNASTIRAGSRKRAAAE

SEQ ID NO: 17130 - protein, 277 aa, Oryza sativa
  Clone ID: TF_OSC900383j.C1.p4.fg
MAADLAFEATELRLGLPGGGGDGDAAAAAARSSSGKRGFAETIDLKLKLEPAAAAVDDDDDKEEAAADDREKKVDIVGADNDDASPPAAAAAGGMKRSPSQSSVVTAAADPEKPRAPKAQVVGWPPVRSYRKNILAVQADKGKDAADGGGDKSGAGAAAAAFVKVSMDGAPYLRKVDLKMYKSYLELSKALEKMFSSFTIGNCGSHGVNGMNESKIADLLNGSEYVPTYEDKDGDWMLVGDVPWEMFVESCKRLRIMKGSEAIGLAPRAMEKCKNRS

SEQ ID NO: 17131 - protein, 157 aa, Oryza sativa
  Clone ID: TF_OSC5281j.C1.p1.np
ENRAASSAQLVGWPPVRTFRKNLSTPKPADAENKMKPCSDEGHGSRDAAQERRPSSTMFVKVNLEGYAVGRKIDLKAHRSYDSLSQALQSMFHGFLSGQDATRDNELATRDNELQRMEEGSKKRYVLVYEDNEGDRMLVGDVPWELFIASVKRLYIS

SEQ ID NO: 17132 - protein, 521 aa, Oryza sativa
  Clone ID: TF_OSC401064j.C1.p59.gm
MARHGMHAAFARETACAIRSGGAPEPAHSAGGSSQPRSARRPMRAGAGSRATGAGAMNPYDMPGRQVHFEEAAKHSVYGTTGHCKGDMVISSRSSYNRSPAIPLSLAIGGAAEVELHSNPIQGFSEDQEFRRGNVLINSGPLWSGRGRRWNHSLRHNQQQRQWPHGWKPDLNSVFFRVLFRSRLDLSLRFGLTLEDFELVNLMEEGSNKREGLPPQLLDLIPDEKEWKLREALGLGRSRNAGFDGEEDKKLDLKLGLPGFIEDDEAETLRDYRLQQESPSLSLSFFPKHSKTTSSTTTTTGAKRGFIDTVEDKTEGYNDQKQQARAGCGKELAVEEMIAAVSERKKGCCPPPPPPHGAPATPARNRPQTQGRRNLASSSSSKHSPEPQNDNANAKVTLTCKKNPLVKINMDGIPIGRKIDLAAYNSYDGLSSAVKQLFHGFLQAQKDQTNAQIAQQGADDKIFYQLLDGSGEYTLVYEDSEGDRMLVGDVPWKVFVSTAKRLRVLRSSELSHTLIGATARV

SEQ ID NO: 17133 - protein, 203 aa, Oryza sativa
  Clone ID: TF_OSC11845j.C1.p2.fg
MEECKGGGMSPSSSMDSSTHPALSTTSSAATARRDLSTDLRLGLSLSTSSSSSLLQAAAAAAAADDSIPSTPRNSQVHADWPPIKPFLRSALQKASAAGGGGARRRRTLFVKVYMEGVPIGRKLDLLLLDGYDSLLIKLCHMFKTPITYADVMECHQQVPGQKAAHVLTYEDQDGDWMMVGDVPWELFLSSVKKLRIARMDKC

SEQ ID NO: 17134 - protein, 205 aa, Oryza sativa
  Clone ID: TF_OSC900153j.C1.p5.gm
MARPRAGRATGRTAPERAMCDETGRGGRAQRSITAKSASERNKHVATCGNPVPYPPRQNPDLLCPFALHCPQLATISVFFVEVSGGDTVLGHGELRRRRRGAHRADAGASRSQRSQGQARQEERPSAAVVLDAAYFVKVSMDGTPYLRKVDVAAYGDYLELVEALNDMFYCSTIGLMDGYGEWEHAVVYEDGDGDWMLVGDVPWE

SEQ ID NO: 17135 - protein, 266 aa, Oryza sativa
  Clone ID: TF_OSC416231j.C1.p5.gm
MGVVSDGVMIAPAAGDSPVAVAGSIRAATTTHHHTPRLRKLDAPLDSDPAADPSRRRSSSNRHGAPPPPVPMSTSSGADSSPPVSGLDYDDTALTLALPGSSSSSSSTADPERKRAAHADHADAKPPSPKARAVGWPPVRAYRRNALREDSARAKLVKVAVDGAPYLRKVDLAAHAGYAPLLRALHGMFASCLAVRGGGGGDGEGTKLVDLVTGAEYVPTYEDKDGDWMLVGDVPWKMFVESCKRIRLMKSSEAVNLCKNLRSNPL

SEQ ID NO: 17136 - protein, 275 aa, Oryza sativa
  Clone ID: TF_OSC400878j.C1.p5.fg
MASSSSLRSTSCLASAAETDADNLCLRLGPPGSSITTTTTTGGADPAAKRSLGAKRSLESTDSMASGTGTSAAGDEHDDDTAAPAKAQVVGWPPVRAYRRNTFHQAAAAAAATKKGGDEKQKQQQQGGGLYVKVSMDGAPYLRKVDLKMCKGYRELREALDLLFTKCFSATASDGCSDGQFAIAYEDKDGDLMLVGDVPWEMFISSCKKLRIMKGSEASKIYALKTNQVLNLQAIGSNSEEDKALAWLPAHTANQADADARMNQHKLRGRITSKK

SEQ ID NO: 17137 - protein, 516 aa, Oryza sativa
  Clone ID: TF_OSC408625j.C1.p8.fg
MAAGGSSSNPMSREASSSAAAAAAGVAVRDVGDDKPLPSAEVDITYWAAQEEAAALLESMAARARGEDDLPEEQLQANNQLQEDEVIALQAIFGDDMVILENKDNLRFIQIFVHYTLPDSIRVFLNLRRSGAMVGTDDSENHNGGELYHLAAKWLDEPKVSYLCAALDEVWTELPGQEVIYRWVDWLNSSSWSSIALNDEIVLDPDKTLKIGDERAIARRILVESTIPLMQSYSEKRSHKIFLESLLCMESHCKIHVKEGNLMQLACPDTNCRNPLPPSVLKSLLRDDGYAQWESFALQKLLDAMPDLVYCPRCSAACLEVDNDAQCPGCFFTFCTLCKRRRHVGDTCITPEEKIRILKGLTRMSSMRVGPRPQVVSPERQKLYSIPEEQLLKEKREIDELINIQEALRDSKQCPRCKMAISKIEGCNKMTCGNCGRFFCYRCNKAIGGYDHFWNGNCDMFEREQDENPQQQDDENFGGDPDEDAELLEPEWVLLTYPCPNCGRRNEKSYMYRLLL

SEQ ID NO: 17138 - protein, 137 aa, Oryza sativa
  unsure (1)..(137): unsure at all Xaa locations
  Clone ID: TF_OSC401616j.C1.p20.gp
SLRAFVASNAGKYRFCPTPDCPSIYQVAAADAESKPFVCGACFVEICNKCHLEYHPFISCEAYKEYKEDPDATLLEWRKGKENVKVCPSCHFTIEKADGCNHVECKCGSHICWACLENFRSSDDCYSHLRSVHLSYX

SEQ ID NO: 17139 - protein, 583 aa, Oryza sativa
  Clone ID: TF_OSC400944j.C1.p30.fg
MAAASAVASSSSSPALEPHPDLSPVFSSPSAASSSSSSSRDEGARGVSCEGGGGDDVFDLDAPWVAAAEAESRLEEAVTAAAAARVGLCCTEEKGKGKGEKEEDEIRNNRQRQEDEIYIHYDLNDGAEVCAKLSSANEKNPKDGRCCVGIEGHGDEPEDFSYTCNFEYLPPLVLTCLLPLSYPSKEPPYFTVTVKWMDGPNVSQLCKMLDTIWAELPGQEVVYRWVESLRNSSRSYLWFDGKITLGPDTPMQKGDNRAISRSLSLESVIPSMLSYSSKKRYQAFLEDLHMCMICLSQSKGSNFIRLPCQHLFCVKCLGTLCRMHVKEGSVFQLVCPDTKCNASIPPYVLKRLLTEDEFERWDRLTLEKALDSMSDVVYCPRCVIGCLEDEDNNAQCPKCSFFFCSFCKEPCHPRRQCLTPEEKLQRRQASGRMSEREVAQEILNIKALYNDVRLCPKCRMAISKTAGCNKMVCGNCGQFFCFRCGKAIKGYDHFSECKLFAPRDISAWERQMEEQYGNHVRLSLRPVGGTIRCPKCRERNFKDDEKYIFCWACRANYCTMCRREVQDKRGHFGSPECVGLEDF

SEQ ID NO: 17140 - protein, 302 aa, Oryza sativa
  Clone ID: TF_OSC401875j.C1.p15.fg
METSAAAGGAHLIYVSSDDEEDETRVLLAESYSAEEIQIQQAILLSLDPSSDADAAHSSASSSRPSGAASTSDEPSSLPDRKGKRKLSSEEDGPIESTRKKRRKRGRFKCSVCMEKLQVSEQFTVSFCAHAFCNSCIGRYVAAKISENVAVIGCPDPGCEEGFVEMDTCRDIIPPELFDRWSVSLCELALGEKKYYCPFKDCSALLINDNDGAEKKIRETECPHCHRMFCARCRVPWHDGIKCKEFRKLGDDEKGEEDLMFKKLAGKKKWQRCPNYKMQFSEWKIPESPNFGRVRQCKVVMV

SEQ ID NO: 17141 - protein, 512 aa, Oryza sativa
  Clone ID: TF_OSC418099j.C1.p8.fg
MEERLADVEGSFACNSRGEDDFRSCCGDEDEWEDTEESFTAGVAKGELDESSVRLFFKGVSSPEAEGKKLSGIGVVMERSPGVPMLQVQKKLDFYVDELVADHLALMDGLLVALQNGIRKIFAFTNSEKLYFQARIAEAEILEDQLLVALGHRILELVEKLEDFDIILLPSFELERPLQLAKEAIGIMYLSPYEVGTCSICCEEKRGAQMIKVGCAHTFCYSCLTSYTQEKLQTNKVPIRCPQLRCKYHISASECKSFLPVSCYDSLERAFAEAGTSDMERFYCPFPNCSVLLDLSQHFSRASTSSQSDLNCVECPECHRDICINCGVPWHVMMGCDEYQSLPVDERDAGDLSLHRLAQNNRWRRCQRCRRMIELTQGCFHMNCWCGHEFCYSCGAEYTNGIQTCQCVFWDEESIEAASAAHSTQASEIWAWDTFDCMPTAIEGYSEQERAQLALIQRFLSGGFNLGEPPSQSPPRCADSYIIDTMKDLHQLPWLERFVSVISDSYNEDYIQ

SEQ ID NO: 17142 - protein, 631 aa, Oryza sativa
  Clone ID: TF_OSC401875j.C1.p9.fg
MNIDDALAEELQLQEAILFSAFQEMIIQDTDDDDSIGNLILIGQDQGQESKKPFSVADHGESSSPSPLTMTTTTGGGGAGEFYCSICMETVPGALKFSVSPCLHAFCVCCIGQYVAAKIGENTADVRCPDPGCGGGVEPESCRGVVPSEVLDRWGLLLCEAAIVARRLHCPFRDCSEPLLADADGEGGGVAEAECPSCHRLFCARCMVPWHDGVGCEEFQELGEDERGREDVMVRRLAGRERWQRCPQCRMYVEKSEGCMFMKCRAAGEGPPDMSANVDLDAKRLVPLKAWGRCRGCWSSSSSYPRSKMLMSEIGSQDEFVKTNTDYIEKGEYSGGDRPVRSRVGKMAPTGMKFDLVKFDGSGNFGLWQTKVKDLLAQQGVSKALKGEKPAKMEDDDWKEMQLQAAATIRLCLSDQEGADLTAHVNVFNQLVTDFMKMDVEVDDEDKAIVLLCSLPESYEHVVTTLTYGKKTIKTKDITSALLARDQMRKNKEGETSQAEGLLVKEDHVGHKLGDDTSYPAVGVREVNIKLEDGGEHVLQGVRHVPGLKRNLISLETLHEEGLIFRGNRNRKTMEIMKDKTTVMTGEKVESHLYKLRGCTVAGGVQEGAVARIAIVFGGGGSGAYSSGGLR

SEQ ID NO: 17143 - protein, 257 aa, Oryza sativa
  Clone ID: TF_OSC401857j.C1.p21.np
RGTPASTGAMAMAEAAEGQRPRQRQRRQPQPQRQQHPSCGICMEPTSEAHRGGGGGCAHAFCRACLAGHVRAKVESGGGAGAVRCPDPSCGGALDPELCRGALPGDVFERWCAALCEAMFAGARRTYCPYPGCSEMMVADADDEGCAGVTQSECQACRRLFCARCGVPWHAGVSCAEFGRLGEGERGREDLLLVQAARNGGWKRCPRCRFYVEKSHGCLHITCRCGFEFCYGCGRQWQLIHDGCCSLMTQQAGEVPN

SEQ ID NO: 17144 - protein, 887 aa, Oryza sativa
  Clone ID: TF_OSC900349j.C1.p3.fg
MEGGKPHPAATGGGASSSHHAAAAAAADVAVDEAFARDLYVSQLMELGDDDWSSFAPPMDRVGSTSSLAAGAAGSRAQPIVIDDDDDAPAAAAAARTVQLYVPPPLRSGGRRTVATRQQPAPARSATAFLPRPPGGAATADIGTSSTATLPQGLPAAMAPSTELSLRPGGLIAGGAAAPRHGGRRPAARMAARAAPGTGHARGAGNGRWARAENLMAALQANPRPNVAQFGRIWTRIAAADRQLTAAAAAADTPAAVTATTGEGSHAAPAVSAGKCGQHRTPAISAGKGGAAGGMEEEEEVHRNVANENDSVSSKRQALLADRDTPAVFAGMEDGHDNDWYDSVIRDAVIAELQEDPELHGPLPVQYLTKSPVVAQPPPRATAAAIAGEEEEEEGEFSMPNFYKKWGLRPSDLDPDEAGPSTRRPRVLPLADGDLPTFDCGICFDTLPMLDLFRGLPCDHKYCLECMTTYIDGKVREGAVPVACPDPECADGGDGGAGVLHPEGCKKAIDFAAFTDWGLRLAEGAVPHDRRAYCPNRRCGILLETSGEAEPAMAACPACQHLLCATCGGEWSTADDADHRDCSKGPEAAMVKKLADERRWKACPKCRMLVERTAGCRVMSCRCRMVFCYLCGLQIGAVLEGKEKCQCLDNLGVVLIKALCRFSKRRTASYPPIKAIQIKGVVVSHLRSSQRHRRHPVADYQAREEESCRQHLYTKVVNPHLPPIAVSATNTASCRHEGVATATAHTHPRTSTQAVSPLPSVAIAMPCEHSSTTRWSRRSSLEATGSSITSARSTTGTVFNTIGHSCRRFNRVAAITVTIMARSILQIYHLVLATSGSSWEKRPHTTNILVTARFPTDGSDGGEEVGGRKVEWHRGMGHCPSHSSVIE

SEQ ID NO: 17145 - protein, 858 aa, Oryza sativa
  Clone ID: TF_OSC900362j.C1.p1.fg
MEGGKPHPAATGGGASSSHHAAAAAAADVAVDEAFARDLYVSQLMELGDDDWSSFAPPMDRVGSTSSLAAGAAGSRAQPIVIDDDDDAPAAAAAARTVQLYVPPPLRSGGRRTVATRQQPAPARSATAFLPRPPGGAATADIGTSSTATLPQGLPAAMAPSTELSLRPGGLIAGGAAAPRHGGRRPAARMAARAAPGTGHARGAGNGRWARAENLMAALQANPRPNVAQFGRIWTRIAAADRQLTAAAAAADTPAAVTATTGEGSHAAPAVSAGKCGQHRTPAISAGKGGAAGGMEEEEEVHRNVANENDSVSSKRQALLADRDTPAVFAGMEDGHDNDWYDSVIRDAVIAELQEDPELHGPLPVQYLTKSPVVAQPPPRATAAAIAGEEEEEEGEFSMPNFYKKWGLRPSDLDPDEAGPSTRRPRVLPLADGDLPTFDCGICFDTLPMLDLFRGLPCDHKYCLECMTTYIDGKGCKKAIDFAAFTDWGLRLAEGAVPHDRRAYCPNRRCGILLETSGEAEPAMAACPACQHLLCATCGGEWSTADDADHRDCSKGPEAAMVKKLADERRWKACPKCRMLVERTAGCRVMSCRCRMVFCYLCGLQIGAVLEGKEKCQCLDNLGVVLIKALCRFSKRRTASYPPIKAIQIKGVVVSHLRSSQRHRRHPVADYQAREEESCRQHLYTKVVNPHLPPIAVSATNTASCRHEGVATATAHTHPRTSTQAVSPLPSVAIAMPCEHSSTTRWSRRSSLEATGSSITSARSTTGTVFNTIGHSCRRFNRVAAITVTIMARSILQIYHLVLATSGSSWEKRPHTTNILVTARFPTDGSDGGEEVGGRKVEWHRGMGHCPSHSSVIE

SEQ ID NO: 17146 - protein, 328 aa, Oryza sativa
  Clone ID: TF_OSC401875j.C1.p11.fg
MENSAADAAAAAGGADVIYISSDDEDEEIRILSADPYSPEEIQIQEVILLSLDYSRAAAADADTAQSSASSSRPSAAASTFGEPSSLPDRKGKSKLLSEDGPSESTTTRRWRKRGFTCIICMDKVQASEEFLVNVCSHAFCKSCIGGYVAAKVSDNVAAIGCPDPGCEEGSVEIGQCRDIVPPELFGRWSVSLWESSMGETTKCYCPFKDCSAMLINDNGDGGDAEEIAETECPHCHRMFCASCRVPWHDGIDCKEFRKLGNDEKGKEDLMLKKLAGKKKWQRCPQCRMYVEKSAGCTFMRCRCGFFFCYNCAAPMTKLVHYCKKCNR

SEQ ID NO: 17147 - protein, 570 aa, Oryza sativa
  Clone ID: TF_OSC400083j.C1.p24.fg
MDSEDDMLDANDSADDDFYSGGEAGLGGSDDGDADYDFADHDSDDSAELLSHRQQKNNGNSMGVLFGRVGSGDINSWDKDSLQEIGYGITVNELWIYPYPYHTETTAIIRKGSRSHEDEQNYSILSEADIQQRQEDDINRVSTVLSISKSEACVLLRNYNWSVSKVHDEWFADEEHVRKVVGFPEKLIEMPNDRECMLERFDNLTLRYFSLSTPDSVLCGITTYIVHIDRCPDPSCTAAVGQDMINSLADDEDREKYGRYLRRSYIEDNRKTKWCPAPGCEYAVEFVMGSGSYDVNCNCSYGFCWNCTEEAHRPVDCATVSKWILKNSAESENMNWLCLGPWSEHGERTGGFYACNRYEAARQEGAYDESERRREMAKNSLERYTHYYERWAANQSSRQKALGDLLSLQNDKLEKLSDIQSQPESQLKFIIEAWLQIVECRRVLKWTYAYGFYLPEHEHAKRQFFEYLQGEAESGLERLHQCAEKELQVYLEAESPSKDFNDFRTKLAGLTSVTRNYFENLVRALETGLNDVGPSTSHGTCSKSATSKSLGSKNLPETARLVTTSIDSIT

SEQ ID NO: 17148 - protein, 606 aa, Oryza sativa
  Clone ID: TF_OSC401841j.C1.p3.fg
MDSEDDMLDANDSADDDFYSGGEAGLGGSDDGDADYDFADHDSDDSAELLSHRQQKNNGNSMGVLFGRVGSGDINSWDKDSLQEIGYGITVNELWIYPYPYHTETTAIIRKGSRSHEDEQNYSILSEADIQQRQEDDINRVSTVLSISKSEACVLLRNYNWSVSKVHDEWFADEEHVRKVVGFPEKLIEMPNDRECMLERFDNLTLRYFSLSTPDSVLCGITTYIVHIDRCPDPSCTAAVGQDMINSLADDEDREKYGRYLRRSYIEDNRKTKWCPAPGCEYAVEFVMGSGSYDVNCNCSYGFCWNCTEEAHRPVDCATVSKWILKNSAESENMNWILANSKPCPKCKRPIEKNQGCMHITCTPPCKFEFCWLCLGPWSEHGERTGGFYACNRYEAARQEGAYDESERRREMAKNSLERYTHYYERWAANQSSRQKALGDLLSLQNDKLEKLSDIQSQPESQLKFIIEAWLQIVECRRVLKWTYAYGFYLPEHEHAKRQFFEYLQGEAESGLERLHQCAEKELQVYLEAESPSKDFNDFRTKLAGLTSVTRNYFENLVRALETGLNDVGPSTSHGTCSKSATSKSLGSKNLPETARLVTTSIDSIT

SEQ ID NO: 17149 - protein, 1686 aa, Oryza sativa
  Clone ID: TF_OSC401616j.C1.p16.fg
MRRSNDGRPFRPPDWGPPPHRYHHHHQNQYQYQQRYRPAQPGPRQFAVILLRGGSNLSAPPATEVEALVAGLPSPPPDSLSVSSSGRQAARLAFRSPQAAAAAARELWSLRLEGLHLLTPDVSDPALAAHAAPLIASLFAAHAARLVDSDLVSLTAARSSELAASIQAVKRRLAGHNRIRDFEQLQAQKRTLKAEKELVDAKIDEYKAAMRSIRRALLRGTEDDEEAEEEGLEVFGIGGGGEMNFARLHMIMLRECRRLKEGLPIYAYRRNILDHIFANQVMILIGETGSGKSTQLVQYLADSGLAANGSIVCTQPRKIAAISLAHRVVEESNGCYGDNFVLNSTFLDHQDFSSKIIYTTDNCLLHHCMNDMGLDGISYIIVDEAHERSLNTDLLLALIKKKLLDRLDLRLIIMSATADANRLAEYFYGCQTFYVKGRSFPVEIKYVPDISEEASFNTVPNHLRGSCATASYVYDVVKMVSIIHKNEEEGAILAFLTSQLEVEWACENFSDADAVVLPMHGKLSHVEQSLVFKSYPGKRKIIFCTNIAETSLTIKEVKYVVDSGLAKESRFVPSSGLNVLKVNWISQSSANQRAGRAGRTGAGRCYRLYSESDFSMMEVHQEPEIRKVHLGTAVLRILALGIRDAQNFEFVDAPNPEAINMAVKNLEQLGAVKYKCDGFELTDTGRYLVKLGIEPRLGKIMLDCFGFGLRKEGVVLAAVMANSSSIFCRVGTDEEKYKADRLKVPFCHQDGDLFTLLAVYKEWEDEHENRNTWCWQNSINAKTMRRCQETISDLENCLRHELNIIVPSYWCWNPEESTVHDKLLKRIILTSLSGNIAMFSGHERFGYQVISTDQAVKLHPSCSLLIYDSKPEWVVFTEILSVPNQYLVCVTAIDPDALCSIHPMPLIQQLEKLKLQVKVISGLGYNLLRKFCGKSGQNQQKIISLLQEEFRDDRVTVEVDFRNKEVVLFAKEQDIEKVFGIVNDALECEARMLRNECLEKSLFSGKPGDCSLALFGSGAEIKHLELEKRYLTVEVLHQNAHELNDKELICLVDTLISGVANFYKLYGNLQVASDETKWGKFTFLNPEYAEDAVSKLNGMEFHGSPLKVVPVCSSSNRGLPFPAVRAKVSWPLKQSRGLALVTCASGEAEFVVKDCFALGVGGRYINCEVSTRHENCIFVRGIPMHVTEPELYDAFRSTTTRKIVDVHLLRGTPIAAPSASLCAEALNREISSFMPKKIFPAQNFRVEVLTPEENDSVMRATITFDGSLHREAARALEHLQGSVLPCCLPWQTIQCQHVFHSTVSCQVRVYNVISQAVASLLESFRSQKGVSYNLEKNEYGIFRVKLTANATKTIADLRRPLEILMKGKTINHPDLTLSTVQLLMSRDGVADLKSVEQETGTYILYDRQSLNIKVFGLQDQVAAAEEKLIHALLQLRDKKPLDIRLRGRNLPPNLMKEMLKKFGADLEGLKREVPAVELRLNLRQHTLYVRGSKEDKQRVEEMISELVNSTKYNGLLQLPLENACPICLCEVEDPFKLESCGHVFCLTCLVDQCESALKSHDGFPLCCLKNGCKKQLLVVDLRSLLSSEKLEELFRASLRAFVASNAGKYRFCPTPDCPSIYQVAAADAESKPFVCGACFVEICNKCHLEYHPFISCEAYKEYKEDPDATLLEWRKGKENVKPPFVF

SEQ ID NO: 17150 - protein, 624 aa, Oryza sativa
  Clone ID: TF_OSC401665j.C1.p10.fg
MVTDAEEVSPTASSSELEQEDDDDDCYLSDQEDDALEESVLQVLEDERDEDCHWSSTSVCPPTIHRFILVVFVVRVPIASVVDGFLRLQVITKESLLAAQREDLRKVMELLGLREHHARTLLIHYRWDVERIFELLDQKGRDRLFSEAGIPLQPANNPGSPSSTEVTCNVCYDDVPLSDASKMDCGHNYCNECWTGYFIVKINEGQSRRIKCMALKCNTICDEAIVRKLVNAKRPDIAERFERFLLESYIEDNDTVKWCPSTPHCGNAIRVKGDIHCEVECTCGRQFCFNCSSEAHSPCSCVMWELWIKKCRDESETVNWITVNTKPCPKCHKPVEKNGGCNLVACICGQAFCWLCGGATGRDHTWSSISGHSCGRFTEDQSKKTEQARRNLYRYMHYHNRYKAHTDSLKQEAKLKGDIQGKISISENKDSKIKDYSWVINGLNRLFRSRRVLSYSYPFAFYMFGDEIFKDEMTSDERELKQNLFEDQQQQLEFNVERLSGFLERDFQNFSDDEVMDTMKHVINLSNVVDRLCKQMYQCIENDLLYPLRTPHNIAPYKSKGLDRASELNVCWDSSEQGSSIFGKRQLGSSSNNNGRPHKRERNDAHGGAALFDLNVPAEVADKI

SEQ ID NO: 17151 - protein, 525 aa, Oryza sativa
  Clone ID: TF_OSC400502j.C1.p16.fg
MESGYSDVDDDYFGDSDEDYGDDGDYMDDDGDDYGGQVVEETEAPAMEKTYVVLTEDDVRARQEEDIAKVCEVLSLSPGAAAVLLRLYRWRAVLLQEEWFLDERRIRDAAGLLPADGGGGEVPARVNRRRLTCAICFDVFDTGGMRSAGCSHFYCVSCWRGYVRAAVGDGARCLSLRCPDPSCPAAVVRELVDAVADGEDRERFGWFALRSYVEESAGMRWCPGPGCSRAVEFVGGGDGEESSEVFCSCGHGLCWRCGEEAHRPVSCKTVAKWVEKNSSESETATWLLAHTKHCPKCRLPIEKNLGCMHMTCRPPCLHEFCWICLKPWHGHAACSRYQPNGTVVALAGANADDERRRQAKASLDRYLYHYERWDANLKSLRVALRDMESLERSELEAMASAAGVPATEMGFVTEAYEQVGEGRRVLGWAHAYGYYLDPDRDFTKRQLFEYLQEDANASLERLHGCAERERRELFAAGADDKAAVDFDKYRAYREKLAGLTRVTRQYFGNLVKAFETDLAEVSSSS

SEQ ID NO: 17152 - protein, 398 aa, Oryza sativa
  Clone ID: TF_OSC100716j.C1.p1.fg
WTEYFAAAVSDGSKQMRCMEVKCTAICDEAVVRLLLHGKHPGAAARLDRRLLEACVEASDAVRWCPSAPHCGRAIRVDGGGGGEERYAEVSCPCGAVFCFRCGGGAHSPCPCPMWDKWGAMRGGGEVDNLKWIVANTKSCPKCSKPIEKNGGCNHVTCTCGQHLCYACGAATGTLYMHICNRYKEEGGGGGVKVEMTAGGRQRLRFMHYYERFEIHTESYKEEQGKLGPAIDALARRLEADATLPWSGTRDARWPSAAHRRLLRCRQVLPRSYVLAYYMFGGGAATRREREEAAAQNRFEDLQGQLEHHVEVLSRTLAAAARPADAAEVVKAKRDADNLARVVEGLCAGMYRCVQDELLPLLVEPMNIAAYHPDGPAMAKEFPPATSVTGGAPPATRH

SEQ ID NO: 17153 - protein, 573 aa, Oryza sativa
  Clone ID: TF_OSC401963j.C1.p4.fg
MDSDAEMPMSSDEEMLDDEDYYDYSDDMGEDDDGSGGGGGGDSDGEEEEEGDEELVGGDYEGREAEGSDEVVSRREQRYIVLTEKDINERQEEDIGKVSAVLSIRREEACVLLHHYKWNISKLSDEWFADEEKVRDIVGLLLNGIDLPNSRKLTCGICFEGYSSDVMSSADCDHFYCHECWEGYISAAISDGPGCLSLRCPDPSCGAMVLQNMINKLAKDDDKVRYARFILRAYVEDSKKCTEEAHRPVNCETVSRWILKNSAESENMNWILANSKPCPKCKRPIEKNQGCMHMTCTPPCKFEFCWLCLGSWAEHGERTGGFYACNRYESAKKEGVYDETEARRERAKNSLERYMHYYERWASNQTSRQKAQADLQKAEKEQLAKLTDVFGIPETQLKFIIEAWSQIIECRRVLKWTYAYGYYLDDKVKSEFFEYLQGEAESGLERLHQCAEKDLQSFLTVRSDNTEPAPSIAEFGDFRVKLAGLTSVTRNYFENLVQALEAGLEDVHSTAQGTTSSNATNIPSKKAVTKGKTKKQLPRTSSDNSDEGWPCERCTFINPSSVDACSVCDKHRY

SEQ ID NO: 17154 - protein, 623 aa, Oryza sativa
  Clone ID: TF_OSC401022j.C1.p16.fg
MSSDDEECFYDYEEEEEEEEEPGWDDGGGGDTMLVEEEAALPERPVDCWVSKAIPTILTSLKNPIHADVMHKNIHRPLQKSLFRLHSLQLVLQQLVLVTNYIVFLDMLDLPALYVCTQQQDLSMVMNLLYIKQHQARALLIHHRWKMESILDHFDRKGRDRMLRETGVVIQQQAEEKNGGGMAMAASPSPPPRPRSSVTCYVCFEDVSSDAVSTMDCGHCFCNDCWTEHFFACVNGGQKQIRCMAVGCAAVCDEDVAQRLLGGRYPGAARRLRGALLASYVEDNAAARWCPSAPHCGRAVRVDGGGGRWCCEVSCPCGASFCFGCAAPAHSPCPCAMWERWEAKCRGESMNVDWILANTKSCPKCSKPIEKNGGCNHVRCKCGQCLCWLCGAATGLAHNWTSIDGHSCNRYDDAAEKRKVDGARRKVLRYAHYYERYKAHGDSRRAEAEKLGPAIEARARRLREDPDPATAPASGDAAEALAAAHRALLASRDVLSRSYAFAYHMFGGEERTLKAAAPESEVATAQALFEDHQEMAERHVEKLSGLLAADAPPAPATAGDAALRRAKQDAVALTAVVEKHCGEMHKCIQDELLPMLVEPMSIAAYRRDGPIKAKDFPTCGGAS

SEQ ID NO: 17155 - protein, 540 aa, Oryza sativa
  Clone ID: TF_OSC401022j.C1.p14.fg
MASDRRYYYFEEDDGDGEEEVEWLAMEADEDDVGLLEEDDLHLRLPDDRPADCWAITQESLPAAQQQDLSMVMNLLNIKQHLARTLLIHHRWKMHCIYDHLDRKGRDRMLSEACIILPKNSMSAASSTSVTCNVCFEDFSMTDVSTMDCGHCFCNDCWTEHFFASINTGNKQIRCMEVKCKAICDEDIVRRLLSLKYPAASKRFDLLLLESYLEDNDSVKWCPSAPHCGRAIQVGTGERYCEVACPCGVSFCFNCAGQVHSPCPCAIWEKWKAKGHGDSDSVKWILANTKSCPKCSKPIEKNGGCNLVHCKCGQCLCWLCGGPTGREHTWDSISGHSCNRYKEENGDKVDTSRQQMQRYTHYWDRYNIHAGSYKVEQKDLGPAVEEQVKKLESNLTGPKMNWDGSWLAMAYQSLLASRQVLSRSYAFAYYMFGGGEVKTHPSERASLAVAQNLFEDRQEQLERHVEHLSKELATDLLGLPEEEIVLKKVEIANLAKIVQAICGQLYRCIQDELLPLLVQPMNIAAYQPDGPDKAKEFIGA

SEQ ID NO: 17156 - protein, 531 aa, Oryza sativa
  unsure (1)..(531): unsure at all Xaa locations
  Clone ID: TF_OSC400944j.C1.p13.np
ATALLHEMLLRARRDGEEPELSDEQLRSNDQLQEDEMLALEAIYGDNISILSAKDGLRCFQVHVHWEIPDGTSISTELSQGDNHDQNSXFFDTFSVQHLAPISLTCLMPPSYPSHRAPYFTLSSQWLDAVKVSSLCLMLDTIWTQQLGQEVVYAWVQWLQSSALSHLGFDDGILIQQPGSMMGPVDVRAVAEIASVESVAQWLISYNEEQCHESFLSGLHDCMICFTEYGGIDFITLPCQHYFCRRCMETYSRMHVTEGTVLKLLCPNDKCGGIIPPSLLKRLLGDTDFERWERLILQKTLDSMSDLAYCPRCGAACLEDEENNAQCPKCFFSFCARCRDRRHIGEKCMTIEEKLNSLQDRTVVPFLSKDSFASKMNLSNEISSIKEVLRSSVRCPHCGTAISRVSGCNHMLCSNCRQSFCYGCGKAENHGHSRYILLRSQMSPASPADTRRIWQRKNPTVLIEEVKKELEGELSRQHPCPNCRQPNPKMGNNSHMFCWACQVHYCAQCHRMVRKSSEHYGPRGCKQHSVD

SEQ ID NO: 17157 - protein, 208 aa, Oryza sativa
  Clone ID: TF_OSC417464j.C1.p9.fg
MARGKVQLRRIENPVHRQVTFCKRRAGLLKKARELSILCEADIGIIIFSAHGKLYDLATTGTMEELIERYKSASGEQANACGDQRMDPKQEAMVLKQEINLLQKGLRYIYGNRANEHMTVEELNALERYLEIWMYNIRSAKEGMLKAANEILQEKIVEQNGLIDVGMMVADQQNGHFSTVPLLEEITNPLTILSGYSTCRGSEMGYSF

SEQ ID NO: 17158 - protein, 160 aa, Oryza sativa
  Clone ID: TF_OSC401315j.C1.p2.fg
MERILATAAATACSCTRFGLGNRLVVTSEDQSPLTEDRHCHLMGEDLESLNLKELQQLEKQLKNTSKHIRSRKDEEKHMLAVQPIGLDGGRQRTQPIGGERRRHPLTMSLDLALLAPKATGSGVPKLGTARSTAPRARVVQTWSPSRLVVTGVAPPHRSP

SEQ ID NO: 17159 - protein, 160 aa, Oryza sativa
  Clone ID: TF_OSC900305j.C1.p2.fg
MERILATAAATACSCTRFGLGNRLVVTSEDQSPLTEDRHCHLMGEDLESLNLKELQQLEKQLKNTSKHIRSRKDEEKHMLAVQPIGLDGGRQRTQPIGGERRRHPLTMSLDLALLAPEATGSGVPKLGTARSTAPRARVVQTWSPSRLVVTGVAPPHRSP

SEQ ID NO: 17160 - protein, 110 aa, Oryza sativa
  Clone ID: TF_OSC1354j.C1.p1.fg
MELFHRYEITTRNTRLQETNRDDEQMVMEITRLRNEIDQLEASLRRQTGEDLSSVSTVDELSQLQLQLESSLSKVHARKDELMSQQLEDMRRMVHYSLIVVAVVVFADEW

SEQ ID NO: 17161 - protein, 215 aa, Oryza sativa
  Clone ID: TF_OSC409438j.C1.p1.fg
MRKTTKRAIFNPPNTLQDNSYTKLAVLAKGGSKLETTTAQLARKSSKNRTEHPSKADRPNLQRRVNITFSSPVLSAWQLMGQDLSGLGVKELQTLENQLEMSIRCIRTKKDQLMIDEIHELNRKGSLIHQENMELYRKIDDFTGYTLHYMMTANLSPQLYETGAENEANRDSTTPYNFAVIEEANTPARLELNPPSQQNDAEQTTPPKLGLQLHP

SEQ ID NO: 17162 - protein, 160 aa, Oryza sativa
  Clone ID: TF_OSC20932j.C1.p1.fg
MHKCSVKETIERYKKANSDTSNASTVAEINAQHYQQEAAKLKQQITNLQNSNRTLVGDNITTMNHRELKQLEGRLDKGLGKIRARKETELQNDNMYLKSKVAESERGLQTVNMMGSASTSEYVQNMIHYDPRNFLQFNIMHQPQYYPEQEDRKAFMSDER

SEQ ID NO: 17163 - protein, 166 aa, Oryza sativa
  Clone ID: TF_OSC20980j.C1.p1.fg
MSSVKRNNCSSVKETIERYKKANSDTSNASTVAEINAQHYQQEAAKLKQQITNLQNSNRTLVGDNITTMNHRELKQLEGRLDKGLGKIRARKETELQNDNMYLKSKVAESERGLQTVNMMGSASTSEYVQNMIHYDPRNFLQFNIMHQPQYYPEQEDRKAFMSDER

SEQ ID NO: 17164 - protein, 211 aa, Oryza sativa
  Clone ID: TF_OSC900209j.C1.p7.fg
MRGKGCWSKGEEGQEEKIKIKERMEERKRCSVSRESSFCTSDTHAIGIFLAHFRTTQFYEVDGFNLCLEFWQAEAERLKQQLHNLEGSQRQLLAHDLSGLEWNDLKSLENQLETSLHNVRLKKDKIMVEQIQELRKKENIMHRENMELHREFNMIRQDSVNFQRKVYGKQDVNGGQGSSVTQNTNTQDDADEIRLELSQPQVPDEKPEAAA

SEQ ID NO: 17165 - protein, 285 aa, Oryza sativa
  Clone ID: TF_OSC417635j.C1.p14.fg
MGRGRIEIKRIENTTSRQVTFCKRRNGLLKKAYELSVLCDAEVALIVFSSRGRLYEYSNNNNYLKKDYSVLIFLVLCVKATIDRYKKAHACGSTSGAPLIEVNAQQYYQQESAKLRHQIQMLQNTNKHLVGDNVSNLSLKELKQLESRLEKGISKIRARKNELLASEINYMAKREIELQNDNMDLRTKIAEEEQQLQQVTVARSAAMELQAAAAAQQQQQNPFAVAAAQLDMKCFFPLNLFEAAAQVQAVAAQRQQIIPTELNLGYHHHLAIPGAAAADAPPPHF

SEQ ID NO: 17166 - protein, 120 aa, Oryza sativa
  Clone ID: TF_OSC21206j.C1.p1.fg
QMRGEELHRLNVEQLQELEKSLESGLGSVLKTKSKKILDEIDGLERKRMQLIEENLRLKEQVSRMSRMEEMQPGPDSEIVYEEGQSSESVTNASYPRPPPDNDYSSDTSLRLGLSLFSSK

SEQ ID NO: 17167 - protein, 255 aa, Oryza sativa
  Clone ID: TF_OSC401003j.C1.p2.fg
MGRGKIAIKRIDNTMNRQVTFSKRRGGLMKKARELAILCDADVGLIVFSCTGRLYDFSSSSMKSIIERYQEAGEEHCRLLNPMSEAKFWQREVTTLRQQVQNLHHNNSFYLSANYLNENSAYYFIRINQYEGENEIFFKAHVEIHVSNKRQLLGEEISNFTVRDLQLLQNQVEMSLHSIRNKKGSLVQKENSELRKKFNIAHQRNIELHKKLNSGESTSSEQVTRSSKDPGESSTPRDSRVCIDLELSQKEVEDE

SEQ ID NO: 17168 - protein, 225 aa, Oryza sativa
  Clone ID: TF_OSC401545j.C1.p6.fg
MGRGKVELKRIENKISRQVTFAKRRNGLLKKAYELSVLCDAEVALIIFSTRGRLFEFSTSSCMYKTLERYRSCNYNLNSCEASAALETELSNYQEYLKLKTRVEFLQTTQRNLLGEDLVPLSLKELEQLENQIEISLMNIRSSKNQQLLDQVFELKRKEQQLQDANKDLKRKIQETSGENMLHISCQDVGPSGHASEANQEFLHHAICDPSLHIGYQAYMDHLNQ

SEQ ID NO: 17169 - protein, 253 aa, Oryza sativa
  unsure (1)..(253): unsure at all Xaa locations
  Clone ID: TF_OSC410931j.C1.p4.np
MGRGKIVIRRIDNSTSRQVTFSKRRNGIFKKAKELAILCDAEVGLMIFSSTGRLYEYSSTSMKSVIDRYGKSKDEQQAVANPNSELKFWQREAASLRQQLHNLQENHRQLMGEDLSGLNVKELQSLENQLEISLRSVRTKKDHVLIDDHVLIDEIHELNRKGSGSLVHQENMELYKKISLIRQENAELYKKIYETEIYETEGPSEVNRDSPTPYNFAVIEKTNVPVQLGLSTLPQHSDAEQSTAPKLGXHLAL

SEQ ID NO: 17170 - protein, 186 aa, Oryza sativa
  Clone ID: TF_OSC400415j.C1.p2.fg
MGRGKIEIKRIENATNRQVTYSKRRTGIMKKARELTVLCDAQVAIIMFSSTGNIKGIFDRYQQAIGTSLWIEQQRMGEDLDGLEFDELRGLEQNVDAALKEYHVITTQTETYKKKVKHSYEAYETLQQELGLREEPAFGFVDNTGGGWDGGAGAGAAADMFAFRVVPSQPNLHGMAYGGNHDLRLG

SEQ ID NO: 17171 - protein, 285 aa, Oryza sativa
  Clone ID: TF_OSC404997j.C1.p2.fg
MAEKKKKKKKKKPQSLLVLTSWRSIGMGRGRVELKRIENKINRQVTFAKRRNGLLKKAYELSVLCDAEVALIIFSNRGKLYEFCSTQSMTKTLEKYQKCSYAGPETAVQNRESEYYKSKHRLCLVRSKVWNLVKIRDDVTEKLCMYERNLLGEDLDSLGIKELESLEKQLDSSLKHVRTTRTKHLVDQLTELQRKEQMVSEANRCLRRKLEESNHVRGQQVWEQGCNLIGYERQPEVQQPLHGGNGFFHPLDAAGEPTLQIGYPAEHHEAMNSACMNTYMPPWLP

SEQ ID NO: 17172 - protein, 249 aa, Oryza sativa
  Clone ID: TF_OSC416737j.C1.p14.fg
MGRGRVELKRIENKINRQVTFSKRRNGLLKKAYELSVLCDAEVALIIFSSRGKLYEFGSAGINKTLEKYNSCCYNAQGSNSALAGGEHQSWYQEMSRLKTKLECLQRSQRHMLGEDLGPLSIKELQQLEKQLEYSLSQARQRKTQIMMEQVDDLRRKERQLGELNKQLKNKLEAEADSSNCRSAIQDSWVHGTVVSGGRVLNAQPPPDIDCEPTLQIGYYQFVRPEAANPRSNGGGGDQNNNFVMGWPL

SEQ ID NO: 17173 - protein, 254 aa, Oryza sativa
  Clone ID: TF_OSC100382j.C1.p4.fg
MGRGRVELKRIENKINRQVTFSKRRNGLLKKAYELSVLCDAEVALIIFSSRGKLYEFGSAGCFVLAQLGDLFIICLVGGITKTLERYQHCCYNAQDSNNALSETQSWYHEMSKLKAKFEALQRTQRHLLGEDLGPLSVKELQQLEKQLECALSQARQRKTQLMMEQVEELRRKLEVEGSTSNYRAMQQASWAQGAVVENGAAYVQPPPHSAAMDSEPTLQIGYPHQFVPAEANTIQRSTAPAGAENNFMLGWVL

SEQ ID NO: 17174 - protein, 260 aa, Oryza sativa
  Clone ID: TF_OSC401807j.C1.p25.fg
MGRGKIEIKRIENATNRQVTFSKRRGGLLKKANELAVLCDARVGVVIFSSTGKMFEYCSPTCSLRELIEHYQTVTNTHFEEINHDQQIFVEMTRMRNEMEKLDGGIRRFTGDDLSNLTLADINDLEQQLEFSVTKVRARKHQLLNQQLDNLRRKEHILEDQNSFLCRMINENHHQAAVGGGDVKAMVEMAPVLSMLTAAPAYYGEESSSTALQLTPPLHAVDAAAAAGFRLQPTQPNLQDPGCSSSSFHAAAAGHGLQLW

SEQ ID NO: 17175 - protein, 268 aa, Oryza sativa
  Clone ID: TF_OSC403824j.C1.p6.fg
MGRGPVQLRRIENKINRQVTFSKRRNGLLKKAHEISVLCDADVALIVFSTKGKLYEFSSHSSMEGILERYQRYSFDERAVLEPNTEDQENWGDEYGILKSKLDALQKSQRQLLGEQLDTLTIKELQQLEHQLEYSLKHIRSKKNQLLFESISELQKKEKSLKNQNNVLQKITTKAVLEVKPFCLHSSEQLMETEKEKNNAIINTNREEQNGATPSTSSPTPVTAPDPIPTTNNSQSQPRGSGESEAQPSPAQAGNSKLPPWMLRTSHT

SEQ ID NO: 17176 - protein, 320 aa, Oryza sativa
  Clone ID: TF_OSC400495j.C1.p47.fg
MGRGKVQLKRIENKINRQVTFSKRRNGLLKKAHEISVLCDAEVAAIVFSPKGKLYEYATDSSLTILLIIKESVNTYTYGYRIMGRMDKILERYERYSYAEKALISAESESEITLPQLTTCTASRSTHGICFQYCLMSKTLGNWCHEYRKLKAKIETIQKCHKHLMGEDLESLNLKELQQLEQQLESSLKHIISRKSHLMLESISELQKKERSLQEENKALQKELVERQKNVRGQQQVGQWDQTQVQAQAQAQPQAQTSSSSSSMLRDQQALLPPQNICSYPPVMMGERNDAAAAAAVAAQGQVQLRIGGLPPWMLSHLNA

SEQ ID NO: 17177 - protein, 351 aa, Oryza sativa
  Clone ID: TF_OSC400256j.C1.p4.gm
MGWPVRPASARSDRHQFGLTEYGFVGSVSAIPSSTISASRGPSHANQVSSSSSTEPYPYVDRSARTAPALPHRESPPHLHSFHGGLPPPPPLHPPLLLHSNHGVQSSTPPTIPTLKTGRTATPQPSCFFESEVKICFLVCVLGVEEEEELDMGRGKIEIKRIENSTNRQVTFSKRRAGILKKAREIGVLCDAEVGVVIFSSAGKLSDYCTPKTTLSRILEKYQTNSGKILWDEKHKSLSAEIDRVKKENDNMQIELRLPKELIAIEEALNNGQANLRDKMMDHWRMHKRNEKMLEDEHKMLAFRVHQQEVELSGGIRELELGYHHDDRDFAASMPFTFRVQPSHPNLQQEK

SEQ ID NO: 17178 - protein, 173 aa, Oryza sativa
  Clone ID: TF_OSC422442j.C1.p2.fg
MERILEKYDRHELLSEGNNVIEEFPELEGSMSYDHIKLRGRIEALKKSQRNLMGQELDSLTLQDIQQLENQIDTSLNNIRSRKVTYPSTARRHGNFFNLKICRLSLSEEKLLMEKNTILEKLRRFRRAGNRDGATWLDQQQQWLAMVDAPVIIERQELEDVQMKWSLQPLHGC

SEQ ID NO: 17179 - protein, 201 aa, Oryza sativa
  Clone ID: TF_OSC417635j.C1.p12.fg
MVRGKVQMRRIENPVHRQVTFCKRRGGLLKKARELSVLCDADVGVIIFSSQGKLHELATNGNMHNLVERYQSNVAGGQMEPGALQRQVAEQGIFLLREEIDLLQRGLRSTYGGGAGEMTLDKLHALEKGLELWIYQIRTTKMQMMQQEIQFLRNKEGILKEANEMLQEKVKEQQKLYMSLLDLHSQQPTQPMTYGNRFFSI

SEQ ID NO: 17180 - protein, 229 aa, Oryza sativa
  Clone ID: TF_OSC33084j.C1.p12.fg
MGRGRVELKRIENKINRQVTFAKRRNGLLKKAYELSVLCDAEVALIIFSNRGKLYEFCSGQSMTRTLERYQKFSYGGPDTAIQNKENELVQSSRNEYLKLKARVENLQRTQRNLLGEDLGTLGIKELEQLEKQLDSSLRHIRSTRTQHMLDQLTDLQRREQMLCEANKCLRRKEKLEESNQLHGQVWEHGATLLGYERQSPHAVQQVYSRADEQLMRDCLHADMATLNS

SEQ ID NO: 17181 - protein, 265 aa, Oryza sativa
  Clone ID: TF_OSC401826j.C1.p16.fg
MGRGKIEIKRIENKTSRQVTFCKRRNGLLKKAYELAILCDAEIALIVFSSRGRLYEFSNVNSTRSTIERYKKASASTSGSAPVIDVNSHQYFQQEAAKMRHQIQTLQNANRHLIGESIGNMTAKELKSLENRLEKGISRIRSKKHELLFSEIEYMQKREADLQNENMFLRAKVAEAERAEHDDQQAAEDDEMAPAPAVGGGSSSGTELEALPATFDTREYYQPAPPVSMLAAAAAAAAAQYSSDHHQTALHLGYFKVDSGKGGLL

SEQ ID NO: 17182 - protein, 174 aa, Oryza sativa
  unsure (1)..(174): unsure at all Xaa locations
  Clone ID: TF_OSC900218j.C1.p17.np
SVEETIERYKKANSDTSNTSTVAEINAQHYQQEAAKLKQHITYLQNSNRFIISAAXIFFFQLDKVVHLVIGLEKIRARKNEYLCANEYLCAEIEYMQRRETELQNDNMYSKSEVAESERGQTVNMMGSASTSEYVQNMIHYDPRNFLQFNIMQQLAPQYYPEQEDRKASQFIVQ

SEQ ID NO: 17183 - protein, 257 aa, Oryza sativa
  Clone ID: TF_OSC400152j.C1.p9.np
MGRGKVELKRIENKISRQVTFAKRRNGLLKKAYELSLLCDAEVALIIFSGRGRLFEFSSSSCMYKTLERYRSCNYNSQDAAAPENEINYQEYLKLKTRVEFLQTTQRNILGEDLGPLSMKELEQLENQIEVSLKQIRSRKNQALLDQLFDLKSKEQQLQDLNKDLRKKLQETSAENVLHMSWQDGGGHSGSSTVLADQPHHHQGLLHPHPDQGDHSLQIGYHHPHAHHHQAYMDHLSNEAADMVAHHPNEHIPSGWI

SEQ ID NO: 17184 - protein, 244 aa, Oryza sativa
  Clone ID: TF_OSC403905j.C1.p14.fg
MGRGKVVLQRIENKISRQVTFAKRRNGLLKKAYELSILCDAEVALVLFSHAGRLYQFSSSSNMLKTLERYQRYIYASQDAAAPTSDEMQKINHQNNYQEYVNLKAHVEILQQSQRNLLGEDLAPLATNELEQLESQVVRTLKQIRSRKTQVLLDELCDLKRKEQMLQDANRVLKRKLDEIDVEAAPPQPPWNGNCSNGHGGGGGVFSSEPPQPEHFFQALGLHAVDVNQPPAPPPGGYPPEWMA

SEQ ID NO: 17185 - protein, 227 aa, Oryza sativa
  unsure (1)..(227): unsure at all Xaa locations
  Clone ID: TF_OSC419955j.C1.p3.np
MARERREIRRIESAAARQVTFSKRRRGLFKKAEELAVLCDADVALVVFSSTGKLSQFASSNMNEIIDKYTTHSKNLGKTEQPSIDLNLEHSKCSSLNEQLAEASLQLRQMRGEELEGLSVEELQQMEKNLEAGLQRVLCTKDQQFMQEISELQRKGIQLAEENMRLRDQMPQVPTAGLAVPDTENVLTEDGQSSESVMTALNSGSSQDNDDGSDISLKLGXVSAGTL

SEQ ID NO: 17186 - protein, 274 aa, Oryza sativa
  Clone ID: TF_OSC401751j.C1.p5.fg
MGRGKIVIRRIDNSTSRQVTFSKRRNGLLKKAKELSILCDAEVGLVVFSSTGRLYEFSSTNWAWCTAHAEEYIPTPITGELQQTPLKGAEYAHNICAQSDSTESSELEVGKSCKPRMGQRGQIAADANSIWQREAASLRQQLHNLQESHKQLMGEELSGLGVRDLQGLENRLEISLRNIRMRKGSLIHQENIELSRSLNVMSQQKLELYNKVRCKILLETCDYMLTHYPKQLKEQLDFSFRPVNREVPQMQMKVPALHTAFVSYKMLICLLVLN

SEQ ID NO: 17187 - protein, 885 aa, Oryza sativa
  Clone ID: TF_OSC400780j.C1.p8.gm
MEWAPVADHKMRKKVWGTCGQDGVGLRTQKTIERYRTYTKENIGNKTVQQDIEQVKADADGLAKKLEALETYKRKLLGEKLDECSIEELHSLEVKLERSLISIRGRKVAKLREKEMKLRKDNEELREKRSPVERREFDRAHHPAPRGLSNRGRSTGPSTDPVEQSAFDRPAGEEAEEAPAGRKGLATPSSSEVKMKVGQMFHDKGHLQDAVKRWAFVQKREFKARNPGTHMAILDEVNEYGENVLRRAFWSFGCMIEAFKNCIPLLCVDGTFMTGKYRGTILTAIGVDADSHVVPVAFAFVESENTSSWLWFLRHIKMIKNLMDEAKVKDRSRRKKACILCGENHSRTFCNVLKMRGPDQYWRIDPRWVPRLRAAGLLTFARLVEPSRARSERIHIDAALMSALVDRWRPETHTFHLTVGEMVPTLQDVSYLLGLPIAGPAVGPTMVNAGWADDLLASFGGVLPVALEDLTDGHGPTKSWLNQFRQDVFPDDQEEWIVQRHLVAYLLWLFGWVMFTGTHADSVDKHFIHFAEQIAELPIAEIPQYSWGSAVLAATYAGLCDACVRNSKQSSLPGCPLLLMLWAHERFDIGRPQLDSYANYGLREMYRSGVDDIDDRPTMGSLWTHREPQWVSGTTRRVYTQFVADFDQLTPDRVRWTPYTQHDVNDRAPHGLADLCTRDMQLWRTTCHLVLDVHVEPHNVHRVLKQLGMYQDFPPRDGRPLADSLHRYFRKGLGLSYELVIVTTVQPTVQEWEHAADNLALQTPPDDGSYYGAYLRWYRSVTRWRCFPPQRDSTVPHQAAITDTFAPQPRSAYKSMAEFVEHVHVESDTLLQRLEARPPVVRSDDVASVLRNFRARAAALLRRVSCRSAADVVQTSGRRLSRPEI

SEQ ID NO: 17188 - protein, 105 aa, Oryza sativa
  Clone ID: TF_OSC29397j.C1.p1.fg
NQALLDQLFDLKSKEQQLQDLNKDLRKKLQETSAENVLHMSWQDGGGHSGSSTVLADQPHHHQGLLHPHPDQGDHSLQIGYSSFLPVTVNFLPEKIPKMQRSCSF

SEQ ID NO: 17189 - protein, 366 aa, Oryza sativa
  Clone ID: TF_OSC401166j.C1.p21.fg
MVRGRTELKRIENPTSRQVTFSKRRNGLLKKAFELSVLCDAEVALIVFSPRGRLYEFASAPSTRIVYLTPSSLAPTPAGEWREWREDLSRKFLSLQAMICNELSSNVELKPFGWALAQGEVELELCRMGPMYIKNIYNLVIEYLYFNGKKLSSNYSLVYRQHAPILQVLQPKLSILVLPEIPVPLAGCYFFRFIILQKTIDRYKAYTKDHVNNKTIQQDIQQVKDDTLGLAKKLEALDESRRKILGENLEGFSIEELRGLEMKLEKSLHKIRLKKTELLEQQIAKLKEKERTLLKDNENLRGKHRNLEAAALVANHMTTTTAPAAWPRDVPMTSSTAGAADAMDVETDLYIGLPGTERSSNRSETG

SEQ ID NO: 17190 - protein, 483 aa, Oryza sativa
  Clone ID: TF_OSC101782j.C1.p2.fg
MAAAAAGMGGGGGVQHQETTTTVVQVAAEASRKKVEVRSAGRRGRREMRRIEDATSRQVTFSKRRSGLLKKAFELSVLCDAEVALIVFSPRGRLYQFASASSDLQRTIDRYLNHTKNSSAHEEGEESCVQKWRSEATTLGKKIEAIEGYKSKLLGEGLGSCSVQELQELEVQLEKSLCSIRQKKQKMLMDQILELREKEMNLLKENMVLRDQCKALSSPWSTSVGELKNKQADDDVHRHEDYSGGGVRDDDDRRMMEDVETDLAAANQAGKVLKKGKKKQAKDELDRQKQAEKKRRRLEKALANSAAIISELEKKKQKKREEQQRLDEEGAAIAEAVALHVLIGEDSDEPCHLMLNKHRRCNHWDHSAGFDFAVDAQGADIYPPDGLIQCADHVYAPKGRCIDWGIGQPLPSWGEVKDLQLQAPCYQGMFHQSVACPGFIAAQAVSSLQIGGDSSDITSPSQGATVVNRMLGATNRLNLYREI

SEQ ID NO: 17191 - protein, 278 aa, Oryza sativa
  Clone ID: TF_OSC407812j.C1.p10.fg
MGQGKIEMKRIEDATRRQVTFSKRRAGFLKKANELAVLCDAQVGVVVFSDKGKLFDFCSPPVILMELFHRYEITTRNTRLQETNRDDEQMVMEITRLRNEIDQLEASLRRQTGEDLSSVSTVDELSQLQLQLESSLSKVHARKDELMSQQLEDMRRMVHYSLIVVAVVVFADECIRPCMSRTISCAAWGELQLWSSLPVGEQQMSENWHSENWQSPGSGEASAMEALTMLPPAAAATTAAEAFNCFFPEEEKGVAASSTLLQLWPQPHDGDQPDLRLW

SEQ ID NO: 17192 - protein, 235 aa, Oryza sativa
  unsure (1)..(235): unsure at all Xaa locations
  Clone ID: TF_OSC400881j.C1.p2.np
MGRGKIEIKRIDNATSRQVTFSKRRSGLFKKARELSILCDAEVGLLVFSSTSRLYDFASSSMKSIIERYNETKEDPHQTMNASSEAKLWQQEAASLRQQLHNLQEYHRQLLGQQLSGLDVEDLQNLESKLEMSLKNIRLRKDNVMMDQIQELSRKGSLIHQENMELHKKVSLVHQENINLQKKVAVPTAXNKLDYGVSSSWEAYDMKEDNITLHSNIEPPRQGSTKLQWLPSTXH

SEQ ID NO: 17193 - protein, 201 aa, Oryza sativa
  Clone ID: TF_OSC400524j.C1.p33.fg
MSFTGTQDKCTACDKTVHFIDLLTADGVPYHKTCFKCSHCKGILSMCSYSSMDGVLYCKTHFEQLFKETGSFSKKFAPGCRSTDKELARAPSKICSAFSGTQDKCAACQKTVYPLEKLTLEGESYHKSCFKCSHGGCILTTSSYAALNGVLYCKIHFGQLFMEKGSYNHMKKKSESQEVLPEVVPEEQPAPPPPDENREDN

SEQ ID NO: 17194 - protein, 496 aa, Oryza sativa
  Clone ID: TF_OSC27185j.C1.p2.fg
MKWLCAFLKGTKDGEANRRRPRVTAGEETTLWEEPVRPKKEEPPRHNNEEMDHALALALADDAKNTKERNHDKGENDEELARAIQDSLNMNPYQPYNPCAPSQTQARSRGYRVCGGCKHEIGHGHYLSCLGMYWHPQCFRCSSCRHPIREMEVFSGSDSLLYSVSQFTLLGTDPYHKLCYKELHHPKCDVCLQFIPTNRTGLIEYRAHPFWGQKYCPLHEHDRTPRCCSCEKMEPRNTKYMSLGDGRSLCMECLDSAIMDTGECQPLYHSIRDYYEGMNMKLDQQIPMLLVERQALNEAMEGESKGPHHMPETRGLCLSEEQTVTSILRRPRIGANRLLDMKTQPQKLTRRCEVTAILVLFGLPRLLTGSILAHELMHGWLRLKGYRNLKAEIEEGICQVMSYLWLESEILPSTSRYGQASTSYASSSSSSCRPPPSKKGGISHTEKKLGEFFLHQIANDTSSAYGDGFRAAYAAVNKYGLRQSLNHIRLTGGFPV

SEQ ID NO: 17195 - protein, 882 aa, Oryza sativa
  Clone ID: TF_OSC15565j.C1.p3.fg
MGDRPDMGAGVALRFSHNDWTLEEDSKALHFLQPDLVLFTGDYGNENVQLVKSISDLQLPKAAILGNHDCWHTYQFSEKKVDRVQLQLESLGEQHVGYKCLDFPTIKLSVVGGRPFSCGGNRIFRPKLLSKWLLSFLVASPGWFLIAYYFCCVVTCSEIELQWYGVNDMAESAKRIYDAATNAPKEHAVILLAHNGPTGLGSRMEDICGRDWVAGGGDHGDPDLEQAISDLQRETGVSIPLVVFGHMHKSLAYGRGLRKMIAFGANRTIYLNGAVVPRVNHAQSSRQPAISTSEKTGLEGLTGLMVPTSRAFTIVDLFEGAVEKISEVWVTVGDARTELEQELVLYKQPHKSVPSNIAIWSSMGWLTKFFRGSTHKISEGQYHSKPAEETIWNGPSNSAVVTMVYPLESTFGQLDLLLLATDLRQLVIDDVDCCDLDVPSEFDNEDIARAISLSLLEEEQRKAKAIEKDMHLEEDEQLARAIQESLNVESPPRARENGNANGGNMYQPLPFMFSSGFRTCAGCHSEIGHGRFLSCMGAVWHPECFRCHACNQPIYDYEFSMSGNHPYHKTCYKERFHPKCDVCKQFIPTNMNGLIEYRAHPFWLQKYCPSHEVDGTPRCCSCERMEPRESRYVLLDDGRKLCLECLDSAVMDTSECQPLYLEIQEFYEGLNMKVEQQVPLLLVERQALNEAMEGEKTGHHHLPETRGLCLSEEQTVSTILRRPRMAGNKVMEMITEPYRLTRRCEVTAILILYGLPRLLTGSILAHEMMHAWLRLKGYRTLSPDVEEGICQVLAHMWIESEIIAGSGSNGASTSSSSSASTSSKKGGRSQFERKLGDFFKHQIESDTSMAYGDGFRAGNRAVLQYGLKRTLEHIRLTGTFPF

SEQ ID NO: 17196 - protein, 624 aa, Oryza sativa
  Clone ID: TF_OSC900069j.C1.p4.fg
MPLRSGHGPWKCRRCRPNKRKGRLSLAAYLATCHSYHCSANIKHVGNDLLIGVGVHRGVLGWGEIKNRSCPWPVVRLSRARLVTLCLGSWCVVNRDYRELEFLVGVSGSLRGESGLSGRRGDRRRTEFLVCCRLKLWFSEVLETFSIGEKFVRFLSSGYRKFDPQITSSHGLGAYDESDNEDIDRAIALSLSEEQNKGKAVDIDYNLEEDEQLARALQESLNADSPPRQNIPVENVPSEPPRELPPILFASSGSRTCAGCKNPIGHGRFLSCMDSVWHPQCFRCFACNKPISEYEFAMHEDQPYHKSCYKDFFHPKCDVCKNFIPTNRNGLIEYRAHPFWMQKYCPSHEDDGTPRCCSCERMEPMDIKYITLDDGRKLCLECLNSSIMDTPECQQLYMDIQEFFEGLNMKVEQQVPILLVERQALNEALETEKNGHHLPETRGLCLSEEQIVRTILRRPIIGPGNRIIDMITAPYKLERRCEVTAILILYGLPRLQTGSILAHEMMHAYLRLKGFRSLSPQVEEGICQVLSHMWLESEIIFGSSIDISATSVASSSSSSSTPTTSKKGAKTEFEKKLGAFIKHQIETDSSEAYGDGFRAANRAVESYGLRSTLNHMKMTGSFPY

SEQ ID NO: 17197 - protein, 517 aa, Oryza sativa
  Clone ID: TF_OSC100716j.C1.p3.fg
MTFVSVKKYRSSGLKVVARSFPLQTYSVRIQKGTSGSRLGKCRYKDFRLPILENMGWLSKIFKGSVNRVSRGHYNGNTHEGHSAWHTKAYEHDSDHEDIDRAIALSLSEEDQRKGKAVDEVDIDHRLHEDEQLARALQESLNDEPPRQNVPVKDVHSESTPATFMPPYIFPSTGLRVCAGCKTPIGQGRFLSCMDSVWHPQCFRCFACDRPISEYEIPTNKDGHIEYRAHPFWMQKYCPAHETDRTPRCCSCERMEPKDSKYITLDDGRKLCLECLNTSIMDTDECQPLYIDIQEFYEGLNMKVEQQIPLLLVERQALNEAMEAEKTGHHLAETRGLCLSEEQIVRTILRRPVIGPGNKIVDMITGPYKLVRRCEVTAILILYGLPRLLTGSILAHEMMHAYLRLKGYQTLDPKVEEGICQVLAHMWLESEITSGSSSIIASIAASSSSSSSSSAPSSKKGVQTDFEKKLGEFFKHQIETDPSDVYGDGFRDGIKAVERYGLRKTLDHMKLTGVFPC

SEQ ID NO: 17198 - protein, 195 aa, Oryza sativa
  Clone ID: TF_OSC900047j.C1.p2.fg
MATSFQGTTTKCMACDKTVYLVDKLTADNRVYHKACFRCHHCKGTLKLANYNSFEGVLYCRPHFDQLFKRTGSLDKSFEGTPKVVKPEKTVENENAIKVSSAFAGTREKCVGCNKTVYPIERVTVNNTMYHKSCFKCCHGGCTISPSNYIAHEGKLYCKHHHIQLIKEKGNFSQLENDHEKASQSGSVEDEDSEY

SEQ ID NO: 17199 - protein, 224 aa, Oryza sativa
  Clone ID: TF_OSC400879j.C1.p19.fg
MTFSGTQDKCNACDKTVHFIDLLTADSIPYHKSCFRCSHCKGTLSMCSYSSMDGVLYCKTHFEQLFKETGTFKKNFPSGTKANSEQAKIPSKLSSVFCGTQDKCTACKKTVYPLEKMTMEGECYHRTCFKCAHGGCLLTNASYASHNGILYCQNHFWQLFKKSGSYDNLLKPASAAAENTVESEVAVAEPAKEDPETEEAAKEEEEEASPEQVAEAVVEDQEHS

SEQ ID NO: 17200 - protein, 196 aa, Oryza sativa
  Clone ID: TF_OSC27184j.C1.p1.fg
MFSGTQQKCKVCTKTVYPMDQLSTDGVVFHRSCFKCQHCKSTLSLGNYSSIEGVPYCKPHFEQLFKETGSYNKSFQSPAKPASEKLTPELTRSPSKAARMFSGTQEKCATCSKTAYPLEKVTVEGQAYHKSCFKCSHGGCAISPSNYAALEGILYCKHHFSQLFKEKGSYNHLIKCASVKRAEAQPAPPPAAADSS

SEQ ID NO: 17201 - protein, 206 aa, Oryza sativa
  Clone ID: TF_OSC401780j.C1.p2.fg
MSFTGTQDKCKACDKTVHFIDLLTADGVSYHKTCFKCSHCKGTLSMCNYSSMDGVLYCKTHFEQLFKETGSFSKKFSQGGKSSEKSDQGRAPSKLSSAFSGTQDKCAACQKTVYPLEKLTLEGESYHKSCFKCSHGGCILTTSFYAALNGILYCKIHFSQLFKEKGSYNHLIQTAQSKQKESEEAAPVAATEASEKEQEVPPQDAT

SEQ ID NO: 17202 - protein, 1801 aa, Oryza sativa
  Clone ID: TF_OSC423043j.C1.p3.fg
MAAAAWGGTTQKCDSCGRTVYPVEELAADGRVYHRPCFRCTHCKATLQFSNYSSVEGVLYCKPHYDQILKSTGSLEKSFEGTSKSAKAEKSNGNKGQPNRFSSMFVGTQDKCVVCNKTVYPLEKVNLNGSSYHKSCFRCTHGGCTLSPSNNVTHEGKLYCKTHHSQLFMVKGNFSNFEDSTPNAKVDIEKQPEHEDATKNPGGPGQGDGLTEKPLESELTPEKPSQDDIVAEKQSQSSVDVPKQSESSTTVQRSEEGERVTKGESNSHVVSKKPLESSVEKPFQSSAVNLQPSGSSAAVRKPWQRNLPTDKPLLSNTTTEKSTPSSAAIEESLPSNGVDAKQPESSTASTVVKRPWQRRVATENLPQSISPSDKPSSTSADDVKPSENSKLIRKPWQRAVAAEAQIQNSGPTEKSSLTNDTKPSESTTSIKRPWEHKVVNEKPLQNNIDTEKPLQNNTDTEKSSSSAIDVKLAETSTTPTVPQEHSGITEKPSQTSADDVKPSESTAAVVKKQWQRNIGFQKQPQSSVTDAKTPESRGMGKRLWQRNVPTEKQSQSGASVVTPSQVSVASTNPLQSSVVVKKPWQRSVSREKEPEKDISSNKPLQNRVLAEEAEKTNVTADNKSQIIQDKKNNGATTENSSQISESAKKLPLTANKSQADTSTEKLSESDILAVASSQITEPSKKPSENTAENEKPSQTDIATDELPLTQSVEAMSEPSPSDAAHQEISEREILTDKLPESTMAVEKLSQTATLTEKPSKEDAAEKLPQTNEPSEQPHESEETAEKPLQNEANAESTTKQSDLSLEKPPQVDANVGNPTEPESDATSGVNSSDAQIRPTAEQLVGPQGIVSAEKTSDQILEANTDPAADQSSESQDVAPAKVATEQPLENQKAAASEQPLEPQHEAYEENPQEHNSDATAKESSEPERDTASDQLAEQPSESRTAGEKATLRESDVVTEDPAEPQIDAAAERSAEVLSESQTGVETPVLHQSDRTNEVPSEPQTDEASDKSTEQPLEPENDASVEDEKPPEIESDDVHDKPSESTPDTETLPHNTPKSSISISEAADGNVSEEAPPQSSASIETPSESAIAVEEPKHDDEASIKPSEDSSALEEPPQDDSASVEPSENTITLEKASEEDEGSVKPSEGNDALEKTLEEDEASAKLPEDSTTFEKPSEKDDAGTKQTEDPVTLEKEPEEDKGSVEPTQDNAGLEKPLEEDEASAKPSEDSVVLDKPSVEDDDSAKPSEDSMDLEKPEAHKPSEEEDGATKSSPEDAAVEEAPLQVSEEGRRREFSMAPKRKPPARAAAAKLDPDGMFRGVSAFVVPHAVQSRRLEVAAPPSNPSQPPPTLSPVLRVSWLSSSVQVWKQRLAQMGGRVQEKLAAKGGGGAVTHVLAADAKALLRELDAAWLHRFRGSVVSFEWLEECLKSGERLPEHKFAINYEEEFKPKKEGGAAGSGSLFWRILNVCSPDLNRNITEIFGKLINIYRALGDDRRSFSYYKAIPVIEKLPFKIESADQVKDLPAIGKSLKDHINEIVNTGKLSKLEHFENDEKVRTVSLFGEVWGVGPATALKLYDKGHRTLDDLQKDDSLTSAQRIGLKFFDDIKQRIPRHEVSEMEKLLQEVGTDILPGVIIVCGGSYRRGKSSCGDMDIIITHPDGESHVGFLPKFVQRLKGINFLREDLIFSIHSIEGTDCGVDTYFGLCTYPGRELRHRIDLKKVYPRNRHAFGLLAWTGNDVLNRRLRILADSKGYILDDTGLYLATPGSGGKRGGRSDAIINCDTEKDVFDTLGFPWLEPHERNL

SEQ ID NO: 17203 - protein, 1873 aa, Oryza sativa
  Clone ID: TF_OSC423046j.C1.p3.fg
MAAAAWGGTTQKCDSCGRTVYPVEELAADGRVYHRPCFRCTHCKATLQFSNYSSVEGVLYCKPHYDQILKSTGSLEKSFEGTSKSAKAEKSNGNKGQPNRFSSMFVGTQDKCVVCNKTVYPLEKVNLNGSSYHKSCFRCTHGGCTLSPSNNVTHEGKLYCKTHHSQLFMVKGNFSNFEDSTPNAKVDIEKQPEHEDATKNPGGPGQGDGLTEKPLESELTPEKPSQDDIVAEKQSQSSVDVPKQSESSTTVQRSEEGERVTKGESNSHVVSKKPLESSVEKPFQSSAVNLQPSGSSAAVRKPWQRNLPTDKPLLSNTTTEKSTPSSAAIEESLPSNGVDAKQPESSTASTVVKRPWQRRVATENLPQSISPSDKPSSTSADDVKPSENSKLIRKPWQRAVAAEAQIQNSGPTEKSSLTNDTKPSESTTSIKRPWEHKVVNEKPLQNNIDTEKPLQNNTDTEKSSSSAIDVKLAETSTTPTVPQEHSGITEKPSQTSADDVKPSESTAAVVKKQWQRNIGFQKQPQSSVTDAKTPESRGMGKRLWQRNVPTEKQSQSGASVVTPSQVSVASTNPLQSSVVVKKPWQRSVSREKEPEKDISSNKPLQNRVLAEEAEKTNVTADNKSQIIQDKKNNGATTENSSQISESAKKLPLTANKSQADTSTEKLSESDILAVASSQITEPSKKPSENTAENEKPSQTDIATDELPLTQSVEAMSEPSPSDAAHQEISEREILTDKLPESTMAVEKLSQTATLTEKPSKEDAAEKLPQTNEPSEQPHESEETAEKPLQNEANAESTTKQSDLSLEKPPQVDANVGNPTEPESDATSGVNSSDAQIRPTAEQLVGPQGIVSAEKTSDQILEANTDPAADQSSESQDVAPAKVATEQPLENQKAAASEQPLEPQHEAYEENPQEHNSDATAKESSEPERDTASDQLAEQPSESRTAGEKATLRESDVVTEDPAEPQIDAAAERSAEVLSESQTGVETPVLHQSDRTNEVPSEPQTDEASDKSTEQPLEPENDASVEDEKPPEIESDDVHDKPSESTPDTETLPHNTPKSSISISEAADGNVSEEAPPQSSASIETPSESAIAVEEPKHDDEASIKPSEDSSALEEPPQDDSASVEPSENTITLEKASEEDEGSVKPSEGNDALEKTLEEDEASAKLPEDSTTFEKPSEKDDAGTKQTEDPVTLEKEPEEDKGSVEPTQDNAGLEKPLEEDEASAKPSEDSVVLDKPSVEDDDSAKPSEDSMDLEKPEAHKPSEEEDGATKSSPEDAAVEEAPLQVSEEGRRREFSMAPKRKPPARAAAAKLDPDGMFRGVSAFVVPHAVQSRRLEVAAPPSNPSQPPPTLSPVLRVSWLSSSVQVWKQRLAQMGGRVQEKLAAKGGGGAVTHVLAADAKALLRELDAAWLHRFRGSVVSFEWLEECLKSGERLPEHKFAINYEEEFKPKKEGGAAGSGVLQSAKRSKISSDGPENRKETAGGNRESRDAIAHPNEDSDVVKGPSTCTSSQSASGDSKETIASQNAFKAEEASSGESSTYAPPDLNRNITEIFGKLINIYRALGDDRRSFSYYKAIPVIEKLPFKIESADQVKDLPAIGKSLKDHINEIVNTGKLSKLEHFENDEKVRTVSLFGEVWGVGPATALKLYDKGHRTLDDLQKDDSLTSAQRIGLKFFDDIKQRIPRHEVSEMEKLLQEVGTDILPGVIIVCGGSYRRGKSSCGDMDIIITHPDGESHVGFLPKFVQRLKGINFLREDLIFSIHSIEGTDCGVDTYFGLCTYPGRELRHRIDLKKVYPRNRHAFGLLAWTGNDVLNRRLRILADSKGYILDDTGLYLATPGSGGKRGGRSDAIINCDTEKDVFDTLGFPWLEPHERNL

SEQ ID NO: 17204 - protein, 423 aa, Oryza sativa
  Clone ID: TF_OSC34548j.C1.p5.fg
MLRAVRPAPSAAAGPAAPPGDGEARACYGIVVACVSLLLLCALVSAVGVARAFAATGVLVLLLGLAGWLAPTDAFAVALAPELYAGNAGGGGGSARAAPAVRLQVRRCASCGLAAQAIDALPAFAYEPPAADVEDGGEGKPRGGGALCAVCLEDVVAGETVRRLPSCGHLFHVDCIDMWLHAHRTCPLCRRDLSPEKVTAKSSAAAATVSSTDVLPPHFVGIWHEINQFKSSEKSLVGMPEAAAAEEEGGDGCSTRLGCYGFMAVNVLMGLYCSIAYAVSATVAGAVAVAVALLLLALAGRLAQTTGGGSAAAAASGRRRRLLSCPCACGLMAPGAGGIGVLPAFAYEPGGGGGGVLCAVCLEDLRGGEMVRRLPACGHLFHEDCVDVWLRVRRTCPLCRRVLPPRKSVAAAAAASAAVLPPV

SEQ ID NO: 17205 - protein, 206 aa, Oryza sativa
  Clone ID: TF_OSC15905j.C1.p2.fg
MSFTGTQDKCKACDKTVHFIDLLTADGVSYHKTCFKCSHCKGTLSMCNYSSMDGVLYCKTHFEQLFKETGSFSKKFSQGGKSSEKSDQGRAPSKLSSAFSGTQDKCAACQKTVYPLEKLTLEGESYHKSCFKCSHGGCILTTSSYAALNGILYCKIHFSQLFKEKGSYNHLIQTAQSKQKESEEAAPVAATEASEKEQEVPPQDAT

SEQ ID NO: 17206 - protein, 110 aa, Oryza sativa
  Clone ID: TF_OSC17444j.C1.p1.hg
MHLDASYFSLAPDLLDLVQMILRALKELPDPIISSRRAIAKYISDNFSGLPSHTTRSSPFTSAASGHRAFSSCLDTRTFSPPPPPPLEDGDEDDRPRKLPPPRRLKSADP

SEQ ID NO: 17207 - protein, 293 aa, Oryza sativa
  Clone ID: TF_OSC419704j.C1.p6.fg
MATDVAATEPEVAAEEAAAAAPETTATAGDSKPAKEAKAKKAAAPRKARSTATHPPYAEMISEAIATLKERTGSSQYAIGKFLEDKHKDHLPSNFRKQLLVQIKKLVAAGKLTKVKNSYKLPPTRAPAAAKPKAKPAAAAKPKPKPKAAAKPKAAAKPKAKAPAKSKAAAKPKAAAKPAAKPKAAAKPKSPAKPAAKPKAAPKAKAKPAAKPKAKAAPKPKAAAVTKTKATSAPARRPAKAAKTSAKDTPSKKAAPAAKKPAAAAKKAPAKKAAPAKKAAAPARKVPARKAKK

SEQ ID NO: 17208 - protein, 471 aa, Oryza sativa
  Clone ID: TF_OSC400493j.C1.p13.fg
MAAADEASKPPPLPPYPEMILAAIEGLNEKSGSNKSAISKFIEGKYGDLPPAHASLLTAHLARMKESGELIFLKNNYFRADAPDAPPKRGRGRPPKPRDPNAPPPPPKPSSPRPRGRPPKSKDPISDAIPKSRGRPPKKAKTAPAPPPAAGDGSAPVKRGRGRPPKLVWPLMVATGVLVSGGGGSWYLCASWTANRRHGGQIIPEQEPQSKIEFPDLDGLGGGGGGASGSGCRHPARVRVCVGGGDGVCVAPGTSVVVVEVATVSALSSALRRLSSPFAVPELAVALFPSVAPMLAVAPAGVGMCAMIGASSSVGGSGWLVVIYILLQAEAFGSLVIGCLFCSKSYGSMLQVALSLAISGLKARQKSIGSLSKAPLLLVGWSTFWPSLLIPSSRSRTWFVIRVELGPPVQFRLSGLLEFLRFNDESYGDVLLSPVTLTPKIYGSTTNLDLVPFPWRQPKGINGLSSGVHFN

SEQ ID NO: 17209 - protein, 306 aa, Oryza sativa
  Clone ID: TF_OSC400044j.C1.p34.np
MGAPKQKWTSEEEEALRRGVLKHGPGKWRTIQKDPEFSPVLSSRSNIDLKDKWRNLSFSASGLGSRDKLKVPRIKGPSSSTSPSSQTPLLVLPPNKVAEASPSADPEKSSQDVKIPKYSSMVIEALCEIGDPNGSDVDAICHYIEQRHEVQANFRRLLTAKLRRLIAAKKIEKIDRSYRITESYAAKVSQANKSPSPKKDPAKPLKASQNLGSFAGTSPALEAAAAAAMKVADAEAKSHLANEHMTEAERIFKLAEETESLVTLATEIYERCSRGEILTIMQVAQSNFEFQSVSGNGSGTGSTVLA

SEQ ID NO: 17210 - protein, 297 aa, Oryza sativa
  Clone ID: TF_OSC400039j.C1.p45.fg
MGAPKQRWTAEEEAALKAGVAKHGTGKWRTILRDPEFTALLRLRSNVDLKDKWRNLSVTAGGYGSRERARVALKGGKRGPKALAEPMDADEKNPDIDDNAIIDAQPLAVVVEPMQLESTPEKEKSVARLDDLILEAIKKLKEPSGSNRTTISSYIEEQYWPPEDFQRLLSTKLKALVATGKLIKVNQKYRIAPSSNSSGGKSIKVYSTGEMNIENNNVRQLSKPQVDAELDKMKSMSKEEAASFAARAVAEAEAAIAEAEEAARAAEAAEAEADAAKAFLDAVVTTMQNRNHASAVY

SEQ ID NO: 17211 - protein, 947 aa, Oryza sativa
  Clone ID: TF_OSC417639j.C1.p19.gm
MWGRVCGGARLSVAVWVLTVRLGVEASGRGRRKKWTAEEESALKAGIAKHGAGKWRTILKDPDFSNVLRYRSNVDLKDKWRNMNVTVNASGARDRVKAPVVKKPRSAPKHEGHSTSTAIAAVTSDGDDDVAEPVPLATSTSSKRSLSRLDNIIVEAVRSLNEPTGSYKTAIANYIEEQYWPPADFDHVLSSKLNDLTASGKLIKVNRKYRIAPSSSLSEGRSSKVVLLEDIKKEPTKLDREDVAVLTKSQIDAELARMRTMTAEEAAAAAARAVAEAEAIMAEAEAAVREAEAAEADAVAAQAFAEAAMATFKNRSSAKLDGFHEAKLQAGCIHKARASMFPLLSKSAILGRLIEENSDSDECVIILSDIPGGAKSFELVARFCYGLKIELSSENVVYLRCAAEHLEMTEETSGDNLINQTESFFNQVVLRSWKDSLEALRTCDGLLPHAEDLHIVKRCIESLAGKASIDPDLFGWPVSEHSTMQSPGGSVLWNGISTGAKVRNCSSDWWYDDASSLSFPTYKRLISSMESRGIKQEIIAGSLTYYAKKFLPGLNRRQSTGPMPLPAATLSDEEQRRLLEEIDRMLPLQRGLISTNVLLWLLRTAMILKVDRACISNLEKRVGMQLDEATLEDLLLPNFSYTMDTLYNVECVHRILDHFLAMDQTMGGGGASPCLDDVMASPSLAPITAVAKLIDGYLAEIAPDINLKPLKFQSLAAVLPEYARPLDDGLYRAIDVYLKSHPTLPEAEREQLCRLIDCQKLSLEACTHAAQNERLPLRVVVQVLFFEQLQLRTSVAGCLLVSDNLEASSRTLRGGGAVAASGEAGCWATAAVRENQALRVGMDSMRLRLMELERECSDMRQDIRKLGRGRRRLRGGGGIVAGGKDGGGWAARVQRMLTPRMMKLQMCSAQHDAAEQQRMNNEHKKVEKVAKNKKQLSMDDGDDEEEA

SEQ ID NO: 17212 - protein, 188 aa, Oryza sativa
  Clone ID: TF_OSC400798j.C1.p19.fg
MAKPASRAAKPASAPKKQKAKPSAAAGGSSHPPYFEMIKEAITVLKERTGSSAHAIAKYMEEKHGASLPANYKKMLSIQLRGFASKGKLVKVKASYKLSDAAKDSPKAKPAAPAPKAAAPKPAKDAAKPKKDAAAAKPKKAPAAGTKRKAPEKKVVAKPKKSPAAKAKAKPKTVRSPAAKKTRKAPAA

SEQ ID NO: 17213 - protein, 182 aa, Oryza sativa
  Clone ID: TF_OSC900103j.C1.p6.fg
MAAAEADPKPAATPSYPEMILAAIEALDDRNGSNKTAISQHIEGKYEGLLPPAHPSLLTAHLARMKKNGELAFSKNNYFRGDDPSLPPHRGRGQAPQAQGCSPAAPARMGARLPRRGGSLAPPPAGRFATPLGPLPPTAAGKGSSASAPAHMTAPPPRARGDQSTPPFRVPQRAFMFPPAAS

SEQ ID NO: 17214 - protein, 608 aa, Oryza sativa
  Clone ID: TF_OSC26017j.C1.p2.fg
MQHGRRGGWRKGEAAAAGERGGGLVLPDHTLRHGERMAQAADRAGDQRQAVVDAALTRGWAGRAVVVGGGATEDRERRRWLSQGSAGGGVAASSGVAVNITTGPMTETEDDMAVAEEEEVVAASAETEEHVQRILLAIDAFTRQDPQGEERVERWEDEIRELRARDVANEQARSLRRHRSRLPTSHRSSPPMPHRSRPPTPPLRNRARPPPSPLRLLWPPFWCGDGARLKRCPLGRPAPSPPAGLPSRQKIREEPQPQPPFSSQIRVAAAPNPTRAQRSTNAGRRQRPSPPPPQPYEREGASQPASQAWPPPLPLATAPPTSSSPPTPRHALFLNPSCSWPDAQICGGIDRVSWVVFSFSLLQMIVEAIASLAEENGSSQAAIARRIEAARGGGGLLPPSHPALVAAHLSRMSAAGELVAVAGGKYALRPTPPPPPPADPAAAAAVAEEEEEEEEFLADDDSADDLPPPPPPKRGRGRPPKVRPPGYPAVPAAAAPVPVPVGAPVDGSVAAAAPAVPRRRGRPPKPRDPHAPPKIPRPRGRPRKNPLPEGMVPPPPTRPGATAKPRPQFAEWLISSKNCKGLTASLLFAVVPAAKLMMVNAHCLQLDP

SEQ ID NO: 17215 - protein, 511 aa, Oryza sativa
  Clone ID: TF_OSC400747j.C1.p13.gm
MAASGMKLAVAVACALALASACHGLQLGYYKQSCPRVEAIVRDEVKKFVYKDAGIGAGLIRLVFHDCFVEGCDGSVLLDPTPANPKPEKLSPPNMPSLRGFEVIDAAKDAVEKVCPGVVSCADIVAFAARDAAYFLSRFRVKINVPGGRLDGRRSLDSDALNNLPPPNFNVNQLIGAFAAKGLDAEDMVVLSGAHTVGRSHCSSFVSDRVAAPSDINGGFANFLKQRCPANPTSSNDPTVNQDAVTPNAFDNQYYKNVVAHKVLFASDAALLTSPATAKMVSDNANIPGWWEDKFAKAFVKMASVGVKTGYPGEIRRHCRQPATEKKIDVIIVAMALQGMEQEAAGQPPASAAFPSSAEAAAAAASPTSGGKRIVLRIRIPPAWMPEEDACLARLAAENGFRHWRRVAEGMAAARSGRRPRRSPGQCRDRWRDHLARDVYHRPFTADDDAELARLLLKRDGDGERSWKDISRAAYCRTSRGMRRRWGELRDSDAFLRKLWCPPPPPMQPSC

SEQ ID NO: 17216 - protein, 345 aa, Oryza sativa
  Clone ID: TF_OSC403480j.C1.p2.fg
MVSANQPPPDAAAAAAGSAGEDASKKVRKPYTITKSRESWTEQEHDKFLEALQLNHNYYEMLPTYWSPYLHMIANNVFWRTKNTAFVAVEFKYLYKSFDRDWKKIEAFVGSKTVIQIRSHAQKYFLKVQKNGTSEHVPPPRPKRKAAHPYPQKASKNEPGYTIKADSSSMLRELRHECHCFVMDTQFYPTNCSLIHGERFVVRVMPDFAQVYSFLGSVFDPSTSGHLQKLKEMNPIDVETALLLMRNLSINLTSPDFEDQKKLLSSYSTPSDGLELGSTRSSVLADRPLSAPFIMCKGATVYSRLAQLVMAFSFLSSGREGTTAPSDPWHSQKQNAPSVHLMRYV

SEQ ID NO: 17217 - protein, 113 aa, Oryza sativa
  Clone ID: TF_OSC401124j.C1.p47.gm
MEKIMGENEIRTRSPVSRRDMASSSKASSSSSASAASSEWTKQQNKQFERALAVYDTDAPDRWHNVARYMGGAKSAEEVRRHYERLQADVEQIEAGGVPFSLGYGATPQAGRR

SEQ ID NO: 17218 - protein, 421 aa, Oryza sativa
  Clone ID: TF_OSC404834j.C1.p14.fg
MTPADAFLILDFLAGNRLIPHSVFTTLLASLPSVSPHTSPRLRAGLALRALDSALSISESSEMDAPTLLRKARAVLADPDLAPFFPQHLAAPASADDAPAAAVAHLNRLLDVEWASLPPSSLEIAAERIVGSQALHSWANADHAQRSKLRLLAEKYSTSLYQFYSPLAVSAVGESTALEILDTLQRPDASTNHPGTLPQVDNAPETNGASHCAQQNDGAKSGLVKQNAEADRPQQDSTRHQQDSVQGASNSQLKESSVTMESIRGTGPDITGFMEEATPRVAGQFAPDNIKNHQVTGSKRSLMERNPTASTYEGEHLCNIMVVSHRIFEVQWDGSDSEGKRPAAKRRLPIFERTAKPSPTAAHKTRKKWSEKQEKTLLEGVEKYGKGNWKDIKMAYPDVFEDRSTVDLKDKFRNLERHLCA

SEQ ID NO: 17219 - protein, 298 aa, Oryza sativa
  Clone ID: TF_OSC400903j.C1.p89.fg
MEWTAAELAEARSVIARVSDAYNSGVGSSSSACDTKHDRIMRELQARFPSRTMVQVIDLYVNLTVETAAQPQDAGSAGDAAAVVHPTFAGGMPVVNNNDGMVHGGAAMEVGAVAVNGGDGEVVNPDNADDDVLWTDYEHRLFLTGMRVYGRGDWRNISRYFVRSKTPEQISMYADNYFHMMEIAAAMEADGGDDDDGHHEINNNNNNLGGGQLHAVVGAVGHGPGAGHIAPATPSNNNTAAAAVNNNVDTPFWVPLLYNPEIEQRMMEMQAQSQKAWDDQQMKMAEAATPKEEGAADK

SEQ ID NO: 17220 - protein, 218 aa, Oryza sativa
  Clone ID: TF_OSC404185j.C1.p1.fg
MQAKPLGGCLDQTGTFRGNRLSTSQFGDMDDEYNEQDNWDNDRTENHVVENTTKLNYHSYMNRQTRAKWSKSETDKFYEGLQQFGSDFAMIQHLFPDKSRNQVRQKFKAEEKKHPMQVHDAIMHRSRDNLYFKEVIKKLNIEDVQPDINNTHEQEGTSNEEDPGNKNIPGGLINEEEENGLDWSDKELDMHRSEVEEKEHVSTNDDDDDDLGDVFDWY

SEQ ID NO: 17221 - protein, 60 aa, Oryza sativa
  Clone ID: TF_OSC10045j.C1.p14.gm
MQQIAARLPGRSDNEIKNFWNVRLRKGKKLRQTSSSLSMAAAATRHRLSEADRSRLSRRG

SEQ ID NO: 17222 - protein, 128 aa, Oryza sativa
  Clone ID: TF_OSC5376j.C1.p1.fg
MLASYIQEHGAGNWRAVPTNTGVMRCSKSCPLRWTNYLQPGIKRGNFTEQEEKLIVHLQALLGNRRDHMEVISPMKDGTFIDWDIVDNIWNHAFSFYAEEHPMLIVEPSTNTGQQREKYLLTLKIMKA

SEQ ID NO: 17223 - protein, 944 aa, Oryza sativa
  Clone ID: TF_OSC102271j.C1.p7.gm
MAHVPVTQRHTRGVGIQSGVGGWWSPPASPRGLRVVNSPEAEIGRQEAAQKGEHLARTTPPPPPPLRSLPLSPWPPRPRHEVAATATATPLLSSTLPRGAVSSSVPMLPRCLVAVAVLLLVASHAARGEERRRLLLARQDVLALHGLRGSIGVRAEYWPVKRYPCSWTGVVCRAGRVAELRLTGLRRTRAGARSQGFTVDPLRELTALEVFNASGFPLPGRIPAWFGTGLPASLEVLDLRSTSVNSTLPADLGMSGNLTTLDLAGNSISGSIPATLFLIKGLKFLDLSDNNLTGELPNVSISAGDGTGVFNASGNSLYGAIGDVLGPLRKRFRQVDLSRNYFTEVIGTGFGNSSDGAVDINMNCLSGSSQRSQGDCEAFYKRIGVSLPEPPNALPSPSKKGVKWKYVLAGVLAAAAFLVVLFLVALVFCLMKSGGRRPRGRGLEQNEEGIRSGRRSSSVNPVMLSSMAASPAANGAVKGLPTIVDEFTYEQLHNVTGGFGDDNLVKHGHSGAIYLGELESGFNVVVKKVDLKSSNKNLGELGFLAKNSHGRIVPLLGHLATDEEELLVYKYMAKGDLTSALHRKSVDAEEGLRSLDWITRLKIAIGVAEALCFLHDECSPPLVHRSLDKNASDPSLVVDEDHLEEVWAVSIVAKTCLNPKPSRRPLARYILKALENPLRVVREELQSNSSLTSTSSRSSWHFAFHGDSRRSSELRPTLGQSARKQSVKSQGSDEDEDEEEDSFSFKRASREILPDPGLQLTTSAAAAMGHSNVWNSHPKNYGPGSRVCRVCGNPHGLIRKYGLMCCRQCFRSNAKDIGFIKPPRAGLDPEATPPASIASRFESKDQEKLGVQLSSMPQVRPASAEKPTRQWAAWTRQEEQSFFNALRLEGKNFEKITLRVQSKNKDQVRHYYYRLVRRMKKLLGPEFSLDAKNSKDTVAAMLRW

SEQ ID NO: 17224 - protein, 109 aa, Oryza sativa
  Clone ID: TF_OSC412948j.C1.p9.fg
MSSSWTTKQNKLFERALATYDKDTPGRWQNVARAVGGGKTAEEVKRHYDKLLQDLHHIESAGRQGSQYGGSSSSKSKGGSSSGEQRYRNRDWKQQPGLHSGAVKRASQY

SEQ ID NO: 17225 - protein, 38 aa, Oryza sativa
  unsure (1)..(38): unsure at all Xaa locations
  Clone ID: TF_OSC400524j.C1.p37.gp
SCRLRWINYLRPGLKHGMFSREEEETVMNLHATMGNKX

SEQ ID NO: 17226 - protein, 87 aa, Oryza sativa
  Clone ID: TF_OSC400935j.C1.p12.gm
MSSRSSSSSRNSNSVNMDSEWSKKENKLFEEALAYYGEGAPDLFHKVSRAMGGTKTADEVRRHYEILEDDLKLIEARRVPFPKGGSI

SEQ ID NO: 17227 - protein, 360 aa, Oryza sativa
  Clone ID: TF_OSC401559j.C1.p1.fg
MDAKDILGLPKTAFPSVQEKKPRAPKEPQRKPDGVSREVYALTGGVGMAPLMPTIEASHLKRRPAVEKEKIAWQWLPFTSSARTDNLQLYHWVRVVNGAPPTGDYHFAKYNKKADVLKYTDEEYEKYLTDPAWSREETDKLFELCERFDLRFIVIVDRFPTDRSMEDLKSRYYSVTRALLIARARSFDEVAGNPLVKETFNAAHETERKRALSALLSQTKQQERKDAEILAEAKRIMETRAASKHTEEAGALAHFDNVDGVSPLSNTHPLSTATLPAAAVNNSIPASLRMVNLKPKVPTKAVCVEHLELRNEILTLLNLQKQLQNKEAEVSANRENSFTEAPSTPKDSAKQWQLKLTFNT

SEQ ID NO: 17228 - protein, 427 aa, Oryza sativa
  Clone ID: TF_OSC411335j.C1.p19.fg
MDAKDILGLPKTAFPSVQEKKPRAPKEPQRKPDGVSREVYALTGGVGMAPLMPTIEASHLKRRPAVEKEKIAWQWLPFTSSARTDNLQLYHWVRVVNGAPPTGDYHFAKYNKKADVLKYTDEEYEKYLTDPAWSREETDKLFELCERFDLRFIVIVDRFPTDRSMEDLKSRYYSVTRALLIARARSFDEVAGNPLVKETFNAAHETERKRALSALLSQTKQQERKDAEILAEAKRIMETRAASKHTEEAGALAHFDNVDGVSPLSNTHPLSTATLPAAAVNNSIPASLRMVNLKPKVPTKAVCVEHLELRNEILTLLNLQKQLQNKEAEVSANRENSFTEAPSTPKRANRDVDRPFVPDTVGFAGERAGKRDHKRKIVLWINSILAWKLPGVHFHQEFAPVGRSRSWLLSVQCICPEKVFFVLLVGR

SEQ ID NO: 17229 - protein, 1272 aa, Oryza sativa
  Clone ID: TF_OSC900117j.C1.p6.fg
MEAVASYCLDVCGFAQSRMIYLAPPEESFCSRSRVNRPAHPARVYVPRNPQFRALVVCWRSRTHLALRAVRIGLFVNCVCGGNLCATECVLPWKVRNVNKRYAKINEDWQDKDATNVHKSKVRKKKLSDMLGSQWSKDELERFYGSYRKYGKDWRKVASSIRDRTSEMVEALYNMNKAYLSLPEGTATAAGLIAMMTDHYNILDGSNSDHESNGSPKTSRKPRKRGRAKFQSVSKASDTQHPDQLQSQPASSSYGCLSLLKKKRSGGNKPRAVGKRTPRVPVASMYQRDEKIGPTNRQAKPDGNGDDEGAHVAALALAEVFQRGGSPQDSQTPGRSGDRMFLSPVKSTDRKNADSEMGSSKLHGFQVDADFPEGSLGSREAETGDYPKYASYLMNNEGSASGKSQQKVKRTQRRRKKAARKTDDQLEDDREACSGTEEGHSAKKTKDESEVNGLGRKGRWPSKKSNKRNRQLFFGDESSALDALHTLADLSVNILQPSSIVESESSAQIKDENKDNDSDEKPSMPAAVSVLEKKDKSKSTVKKVKRQSELASADMAARKKARIAKVPNRDGIAISETKQLDSKFGVQTEKKKRKPSAAKISKDEKSALKDVEKTEWMEISDLDNVSAEEGKVSSNKAMDTVDTTQGATTQQADLASKGRSRRKIGILKALAPECRPTDGADDLRSDKFSYAVNNVIDLKDSLSHCLSSRLLRRWCTFEWFYSAIDFPWFEKSEFVEYLNHVKLGHVPRLTRVEWGVIRSSLGKPRRLSKQFLQEEREKLAQYRESVRQHYAELRSGVREGLPTDLARPLGVGQRVIACHPRTRELHDGNVLNVDHNRCRVQFDRPELGVEFVMDIDCMPLHPLENFPESLRRQNIVNKYYNSFSEAKFEDRSKELGTGGPTRFTSNVCFDGGDATSNIPSNYPINTLMKQAKGDTVDSIAQAKVAVNEVAVAAQQSMYSQPCTLSQIQEREADIRALAELSRALDKKASLKGLVLMFSVEALLVELRHMNEEVYGRQKDGEAFRDFEHFRKQYAMVLVQLRDSNDHVASALLSLRQRNTYHGHPAQSYPKPMENGALTGTPDLYNLFGYINQESGSQVMEVIETSRSRAKLMVDVAIQAMCSVSEGEDAYAKVGEALDNLNNRSTGSGSSILGIRRIPPDSGQANSSHQDNTTSGHFDPATNNISSPRLPNGCDSEPQFPSELISSCVATILMIQNCTEKQYHPAEVAHILDSALSRLQPCSSQNVTIFREIEMCMGIIKNQMLALIPTPSG

SEQ ID NO: 17230 - protein, 873 aa, Oryza sativa
  Clone ID: TF_OSC400431j.C1.p41.fg
MGPAKGSRTITKITIKGYDDRQHDEDPNSSSKVKLKKRKMSDLGPQWSKDELMRFYEAYRRHGKNWKKVSASVGGKSADTVEALYSVHRTFLSLPEREGTAMGFVALVTGHHNVSDESKSHKGSDQTVRASGKVRKREATGQKEKEAPHAHRSYHERRTSGLSSFKKRYYGELVKNIPRHPSGKRTPRVPVIFPADMNVAHAGIPETENAINCTKKASGATNNELECSSHGSPGISESAKFVQGQTFLEAKGTGSLKKRRIEQSMEQGQTIKDEHKTAMVAKEGNDLTEYQRLTNLFSPDEMLVLDVLESLVTVPSKISEPKINIPSGTLGRDDSALSHRREEGPSVKRSKQGKQVGECSASKTRNKRRKKLIAEEVPTEGVTSNHLDLPEERQVDATECALNSDLERGTVDLPESTANISTKIPDLPSQLKPEINMSRRSKRKSKSPCGSKYVVCNGADNLQARRLQHCLSSESLRRWCTYEWFYSAVDYPWFMDNEFVNYLNFANLSHLSRLTRSEWSTIRSSLGKPRRFSDHFLAAEKDKLENYRKKVRQYYALLSEDSWDSLPPDLARPFSIGQQDRYNVQFDRPDLGVDEVKDTDCMPVNWLDNLPDDLKKRSFLSNNSHNRVEVEQIPKFTSKENWDHISGEAEPSKTMHITSDEQVEVLLSKSIFKKHYDHSLSIHGQVEIAVDIERLSNKSTSGNCGPLQPLQSVDDNVRSRGLSEHRNGHNDELDSYITSFVQMSLAQAKQMVDEAMKEISENGKSSLEETGISNEATDCTGPEPESAANSELPRNLIFNCIATLLAIKHFSEGRHPPPNIAGVLERACLMLRPSCAENLPIYNEIENFIAVIKNQILALVPSASSNARLPMYM

SEQ ID NO: 17231 - protein, 478 aa, Oryza sativa
  Clone ID: TF_OSC421143j.C1.p4.fg
MASRAVEGEGEGEEEGEGKGNLEDESLIQMINIYGHNNWETVARAIPGRNAQQCRVREHASNHFKRLSELKLLKSRTSRTSAAIKEHWRGPMKRKLNSYLASGLLKKSPGLPENLSVSQSSDSNILQQCDVSSDENKLLSDLRPSLKSKEGVSSKCDGSSSDNQLLSDLRASLKSKGASSKCDGSSGDNQLLSDLRASLKSKGASSKCDGSSGDNQLLSDLRASLKSKGASSKCDGSSDENKLLSDLRACLKSKQGASSKCDGSSGENQLLSDLQASLMSKQRTSSKYKQGASSKYKQGASSKSKQGTSSKSKQGFIDLCENTDTSEGESSELICTERPDPDSGEASQRIRDRLNWRKRARKKLVFLSSPVELKVSAVAESERHLQESKEMSPEVNIVSPPAVLQGFSPEVPSVCEKIVEPPLADFNQAKNVCSLETSSDPCTLEQHLANVSDLLDMSYIDGLMIIPPSGCPYDGDFI

SEQ ID NO: 17232 - protein, 87 aa, Oryza sativa
  Clone ID: TF_OSC401872j.C1.p1.fg
MAASWSESENARFEQALATYDSDNPNRWELIATAVGGGKTADDVRRHYDHLQHDVTTIDDDHSHAAGEALPNGNNNNNTNKGNRNQA

SEQ ID NO: 17233 - protein, 341 aa, Oryza sativa
  Clone ID: TF_OSC21837j.C1.p42.fg
MGEGDAGQESYHAMSKSRPPDQYWMDGQDLCRKPAWKSATRAKSPPIDFEAHETEEEDRIIIAAHAIHGNKRACIAKLLDGRTDNAIKNHLEFYSEASILQRWSMQTWLLQGILNPGVQSASVPPEFKIFRIPLTRNGGGGGGDEAEGNGGGGGGWGAAATAVGSSGCGLVRTPDGTTKLLIWSTEMLYGTTTTTLLIVAFTSALRVKEELAGDELHLSVVIVPAIPALGSGCARSSVIHVISTDARERRRFGRMAISSARLPVEWIPSSERSPSLVSSTALSSSAFAFAAALHVLPPPLRPSLAVIAIGRTTIYEDAGRRRTLHLHHAAAPSPHLTPSLL

SEQ ID NO: 17234 - protein, 389 aa, Oryza sativa
  Clone ID: TF_OSC102044j.C1.p1.gm
MVEGRERERLSSFCRRNTGAALSDQLAGSGRSGDGGAWQRSSGWLLAERTAVASAPTGVDSLLLPPPWATGVSRLPVRTRLGWREDLVVDALAVVRRWMRLRSSSVLESGGAATEGERGGRRRSGDGGSGRGRERRSARWQRRERRKGGGRLDGELGGGDVRTRRVLDHSPDLKRGNFTDDDDELTIRLHALLGNKWNTRIKLKLLSQGIDPQKHQPVSARTSVAAASELTTTASTVSFPPLAPAPVRGSSRRKEGRLGGVFLVVVAGGRRVAACSPIAALPPRSPSASLPAVALALHCSARRRSAAALALRCATRILARTPPLHPPPRSPIAAPSPRSPSASLPAAALALHCSARLARARGRSAAALVLRCTTCIRARFSAYRRPPSL

SEQ ID NO: 17235 - protein, 702 aa, Oryza sativa
  Clone ID: TF_OSC101063j.C1.p16.fg
MDAAAAGGGGAAKRKRSFSEDDAYLILHRYQPATILTMLQEMGKQVGAGKGIDWRALVRRTSTGITSAREYQMLWRHLAYGHEFVESVEPASLPLDDGSDLECEIEIVPAPGNEALAEATSFAKTIITGSSREQTSGQRVNSEAAALNTPNEKIVRVPSDKQLVPGHRLTNGTGPVSSSKQPSHTGSSPDPLDPNGHPKKKKKPKPWSREEDMELGAGVQKHGEGNWMEILHKYKFDSSRTHLQLQQRWALICKRQGSTKPATPKIPNVMSEELKAAQKAFSLAIGTTRSSTLRPGGVPHHNPMVTTTNPEVKSVTAPSPLPVPVHVVPVPVPVQPVQVQLPPPQLHQAPAQSAPPPPKVSNASNKSRNNSKKQVAQSIPVNGPLSIQEAALAAGGRIAEPSVATNFLKAAQSTKAVHIRSRGTGSSKSSTGSKTPTVAGEPGTQLGSDQHLELQSTGGPSQVLTAHATEQVHNVSEVAGVNPLGQSAGVHLSETKKALNTTPVSGSSDKMEIDDNSNYFAVTMEDLFPEDVKQEDVQDPKIEEAIDPKDADMLEFDRFVAQGCLNKDNVDKSKAAKIAPEAQSVIGSQKKQLKTLPTVGKSNPVFAGPPATAKKTKAPVPQGGMSSGIVGVLNRSLGGKAPAPATTGTQSTVQKQQSMSSKGNLLVPKNVAPGTVTPANNRANTAVNGASKVNPPASQKPA

SEQ ID NO: 17236 - protein, 270 aa, Oryza sativa
  Clone ID: TF_OSC900320j.C1.p9.np
MHRSPFCTWPAAERGRWQREREREAIDATAAAGEEESLSLPKAMGLLRCRKSCCLHWMNYLSPDLKCSNFTDDNDELTIKLHALLGNKYLLRLALLVFLVLIDWFCRWNTKLHALLGNKYLLRLALLVFLVLIDWFCRWNTHIKRKLMSQGIDPQTHQPVSAGTSVAAASELTTTASTVGFPSRRHRRPRRRYASLISRALAPGGGRGRRRTRRRRRRPRGPARRRRSTGRRRPRAAAARRGGAGRAAARGSSWATPPRDGTRGSWRRTA

SEQ ID NO: 17237 - protein, 101 aa, Oryza sativa
  Clone ID: TF_OSC409191j.C1.p3.fg
MSSSWTTKQNKVFERALAIYDRDTPDRWQNVARAVGGGKSVDDVKRHYEKLIKDVDRIDSTGGHQGSHYNSSNASSSSSSSSSNSRGSANEDQRRRYHNFQ

SEQ ID NO: 17238 - protein, 111 aa, Oryza sativa
  Clone ID: TF_OSC413644j.C1.p7.fg
MASAAGSKQQQAMMSLPSSRGGGGGGWTQRQNKQFECALAVYDKETPDRWHNIARYMGGAKSADEVRRHFDHLVEDVSRIESGRVPFPRYSSSSSSRGADDGNRSRYLKYQ

SEQ ID NO: 17239 - protein, 519 aa, Oryza sativa
  Clone ID: TF_OSC33166j.C1.p2.fg
MADGSDGPDVSPAAAAAAGGGGGGEIWGTLEELLLACAVSRHGTGSWDSVAMEVQTRSPLAARPGLTPTSCRLRFRHLHRRFSVGGAAEEDDDDEEAEEGGPDASAADGWMDELRRLRVAELRREVERCDLSIGTLQTKVKRLREEREQSIHGGGGGEGKPETANGDERLSSEEPGRSCRESNSTDLKPAARAGDHSVKAEEEDEDAAAAKQQASGESVAASKESSDLRSSVRLRRRRSYKPGADEDADGEEASALRPPSQSPSSSSSSQPLAALLDTFAARFGPLLERLHESQESDAYRGAIRRHVDIEMAAAAAKKEESAEKGEAAEEGEGSDDGEKKVSVSASASKDKAWGLRTKKGRGPGKNSASVGGRKMAKLSEATEAATDGSKKPDKKIAADAATPAKKRNAVDFLKRLNQGSSPSKKKKKGSPMGTRKRAAAATSPEQPQKTRKGPGRKDAGRGGSKKGGKSATPKRSVGRPPSKRGAAAATTPPPSKRAKVNRSEKTAATATAAKRGGRR

SEQ ID NO: 17240 - protein, 647 aa, Oryza sativa
  Clone ID: TF_OSC33171j.C1.p5.fg
MADGSDGPDVSPAAAAAAGGGGGGEIWGTLEELLLACAVSRHGTGSWDSVAMEVQTRSPLAARPGLTPTSCRLRFRHLHRRFSVGGAAEEDDDDEEAEEGGPDASAADGWMDELRRLRVAELRREVERCDLSIGTLQTKVKRLREEREQSIHGGGGGEGKPETANGDERLSSEEPGRSCRESNSTDLKPAARAGDHSVKAEEEDEDAAAAKQQASGESVAASKESSDLRSSASLRRRRRYKPGADEDADGEEASALRPPSQSPSSSSSSQPLAALLDTFAARFGPLLERLHESQESDAYRGAIRRHVDIEMVRRRLDASPAGGGGGGAAAAEFYRDLLLLCANALVFFPRAGPERGAAAEARALVSASLRLREPKQEPGTAAAAAVAAAAGSPPAEDTRRAEGVVSVGGGGGGAGIVGSLIEKGGKPLIVCRKRSSIAKAAAAAKKEESAEKGEAAEEGEGSDDGEKKVSVSASASKDKAWGLRTKKGRGPGKNSASVGGRKMAKLSEATEAATDGSKKPDKKIAADAATPAKKRNAVDFLKRLNQGSSPSKKKKKGSPMGTRKRAAAATSPEQPQKTRKGPGRKDAGRGGSKKGGKSATPKRSVGRPPSKRGAAAATTPPPSKRAKVNRSEKTAATATAAKRGGRR

SEQ ID NO: 17241 - protein, 294 aa, Oryza sativa
  Clone ID: TF_OSC900351j.C1.p10.fg
MAPPNRPVVVPLLSLSLSRTPPPRRRLRLRTPTPCHRASTTRRALHTPPHQRTRLPPLSVAPSASPLLNPSIHVAAAPSLGRSLRFPPPHRSRSLSNRRRHSSHLFAAPRHASTAGAPIATLRYSAVLGIEAAVLVGTARDSTSSPIPPSSTGAPSLARCNYINANKCKLQRKQFPVRLSFALTINKAQSQTIPNAGVYLPEPVFSHVVNITFGGILARPIYTITDYDKGNLDAGMSQTDFIIMESAEIPGFGGTSWTDQETLLLLEALVILQAKWGDIAEHVDTKTKAQCMLH

SEQ ID NO: 17242 - protein, 254 aa, Oryza sativa
  Clone ID: TF_OSC3807j.C1.p1.fg
MDVAKLRAHRSWLRVRRWHQQVTTLPRPAIASIQGRGMAATTSPCLPRMTKHKQAPAAEEGDEKYPKLINSCRLPFTHMVIDVSYHLILICRLFLLGLEKYGKGDWRSISRNFVISRTPTQVASHAQKYFIRLNSMNRERRRSSIHDITSVNNGDTSAAQGPITGQPNGPSANPGKSSKQSLQPANAPPGVDAYGTTIGQPVGGPLVSAVGTPVTLPVPAAPHIAYGMHAPVPEAVVPGAPVNMPPMPYPMGIL

SEQ ID NO: 17243 - protein, 90 aa, Oryza sativa
  Clone ID: TF_OSC413644j.C1.p6.fg
MAQQARAQWPQKQNKLFEQALAVYDKETPDRWHNIARAVGGGKSAEDVKRYYEMLEEDIKHIESGKVPFPAYRCPAAAGYQAERLKHLKI

SEQ ID NO: 17244 - protein, 800 aa, Oryza sativa
  unsure (1)..(800): unsure at all Xaa locations
  Clone ID: TF_OSC900286j.C1.p9.gp
LDLRQQQQPANNYLGAVSGKKWNPEANAASLDMLGVATEVAAQGLEYVNEVKKNSAKSILRTVCGVDNSTKGSEKDCVGDVSLHERESVAADVLAGICGTLSPEGMGSCITSSADPGQKXRDHLKXEHLLTPEADKNFDDDGTLSDQECEVDIVDWNDDEKSSFIEAMNRYGKDFARISSYVKSKSFEQCKVFFSKARKSLGLDLIHQGAADAGFPTGDANGGRSGTDGACIAEMDSAICSAQSCPKVEIDACPVSDGEIQGHNPLSDIASRQPEADKSNMPDVVDINVEEGESKAEKDCSILVDHKQLREDINQTSCARIDINCPESTDKLQDIEDVTPVNMHGDDLMATSVEQVAAAHVESRSSLHSEGIGIDVSRIEGCSHESTIGKGGKSTPSVCLPAENGVSKENIIHFSNMDGASSISPAFTSNYQQSKLADPIQSKPKPLTPKDLMPVQFSSSLPDPTSICFEGIAAITTPNFEDHGNRASIASGAKDVNMFPTFKDQSSNRHDALFSNVDGYMQQRRNNHFGTEVCGLSESTGISQSDQFTVSKFQNGRPSSLGLSNGNLGVLSTGRREEAREGLFRPCSVKTSAGNEEQQKRPGDVKLFGQILSHQSSLQSSGSSVHGSKSKPPSPKVDKPASSRLLSNPRERLVYSSRPPIIANLGLEERAMRSFDHMDGRTIQPEPMVMVAKCQRPSAGVPVYSTKNGALSVFAEFQQPSMPPHTSDHKLLENFADLHKRNGIELLSGFQQPGRLGGAGVLVSGVSDPVAALKAQYGSGSKMLSSSNDVDTWKDIGSRX

SEQ ID NO: 17245 - protein, 817 aa, Oryza sativa
  Clone ID: TF_OSC400017j.C1.p12.fg
GGASGRRCSERGGHSGAVAVDLANESGAEMAASHSGPGSPWSSFEDQALVVLVHDMGQNWELVSDALNSIVQLKCIYRRPNECKDRHKLLTEKGSGDGADSADDSGSSQHYQSTLPGIPKGSARHLFQRLQGPFEEETLKAHFEKIIFLGQKLHPNRRKGESQELKQINPLHSSHLHALSQACAPGVILMPLDLCDAMTPNPDALSIGYSGSHASGLMLPNHPSSIGPTLPTGNMNTRLPGSPGMVLGNTLPSPSTPNTPRDSQRYGMPRPTSLQGDEQQRIQYNQMLNSRSLQQPGVPVPGAPAGVDRGVRMMPGAHGMGVMTGLNRGTPVTRPPFPRLGSSGMLNMVSPGNMLPNNGQGMQNTVNVHPGTIPGHGNTMLRPRDPMQMLRPGQNMEEHRQMMQGVSDAIQSSQPHQMPQQSHVLGNTHHPHIQGTTQSSPQQQAYAMRLAKDRHMQQCMMTQQQHPLSGASAVSTVQNGSQMQQQSQGPASSAIPSSQSQHKQQHPAQNSLDSSVPPNQPVNTSHKQKKQQGQQQSRQNQQQRNQGSQQAKLMKSLGRGNMMHQSSPVDATQASGISTTSKNQVSDKSMVQQGPGYFAGNKGLVPSVVQPGNQPKIYGSQMPHSPIQTSDVGSQSSMQGSPNQTMLTSQQAPLHSSSPLAQQQQQRYMNPSHNNIQRLVMQQNRHMNTDGRIESPVDQVQHNQAIPSTSIAKSTDSGSPGGVSSINQRRQESSHDPTTVPSTSQLASSPQDTFVGNEMLLSVSSQGMLQRQMSGGVPIHGHGIGGQRQQLQSRQQQQQKPAVQGSVYAHPSNSGPG

SEQ ID NO: 17246 - protein, 930 aa, Oryza sativa
  Clone ID: TF_OSC900031j.C1.p3.fg
MNPTQPVVIHDRHCVGLLPASHIAAGNTMRICARVSESFGARKYILDAKRWCIIGKNMESLEPEDGDGHQSDATDDDLPPRICTGKAYQAEIPNLATEDERRQYMSNTTDSCMALGYDCPIPIMWTLPSEFNKKEEEIQKQHSSETKAIENSRDGDSQTTSICPTSNNTSGQCSTSQDPHPELPDQIVSDSHQAHDDKLAPCSTQEGLNFTDKAMADQGEIEQFIPVPNSSTSIWSDQEAELLLLGLYIFGKNLHVLSRFVGSKTVGDVLSYYYGKFYKGEAYKRWSACRKAKIRRCILGERIFIGWRRQELISRLKSKIPKEAHDLLDEMFKSFNDSQTSLMDFVFHLKSVVGIEAFVEAVAIGKGKDDLTGFVLDPSKPNQVLSVQPGMPAGKDCSSLASEDIIKFLTGDFRRSKTRSNDLFWEAVWPRLLARGWHSEKPNDVSTTKNCLVFIVPGIQRFSRSELTKGTHYFDSVSDVLKKVVADPVLLEIEVDGMGNGVNAEKNGFDTAMKLNQDVPFDGYHELPKFTIIDTSLVQGEEPSQVRELRNLPADANISFGPLRHTHNMVSDSSSDEHDTDDRSSDYKEGYAGVTADENGTEMVSSKNADNESQVDSFRNMAATSCSVFPVNGHSSNGNGDTIGATSFFPQKTKIEKRKYLSPVTKRRRLTSCSNDQTSRRSFSFSKGPGLEKEKVKLPSTSSKPTAIDVGGSFQSKSLASCSGKEKPCQQIKDASNSHANDRSNEKMNVARPKEKPSGHKVDTLASVHSKTAVEDTKPAKGVAQSSDLVANQVKLETPQDDKTVTIAHAPSSDNHGSILKNKETTSSSNTEIAHDAPEATRGGPANPQPDLQASSQAMNPRRQGTRVRPPTARALEAVAFGLLGSGKRKADPTGSSRPRQRARKSTKEAASVSTSSDTEKSSMHSGARQ

SEQ ID NO: 17247 - protein, 113 aa, Oryza sativa
  Clone ID: TF_OSC4439j.C1.p1.hg
ARRRCASEEVLSMECLSSPSPSPSPAYYAAVAVAASNSSPTVSSSSSLVSVEEAGEKMANGYLSDGLMARARRKKGVPWTEEEHRKFLVGLEKLGKGAWRGISRHLSRQEHRR

SEQ ID NO: 17248 - protein, 224 aa, Oryza sativa
  Clone ID: TF_OSC23942j.C1.p6.gm
MAPGGGVLFAGTSVCSEEGQDEDEETIVESRAFEQRVNFWEQPNQRWGRLGRGTAEPGHGGPAQVLASSGRHVMMRCVGRDGDDGLRRSENVAAEIVEEEKPSPLNALNRLRLSSSFAPPLLSSSRADGGRGEAARPSRRHAPALSMGSSWTLDQNKVFELALATYGKDTPDRWENVARAVGGGKTADDAKRHYKKLENDIGRIDSTGASSSNSNGRSSSEGQR

SEQ ID NO: 17249 - protein, 287 aa, Oryza sativa
  Clone ID: TF_OSC405208j.C1.p4.fg
MDSSNQKFIDLLSQDSPNHAEKTSHNSPPQQFPNNFPQSQFTQSFNPHFLHNFYPFCSPSNYPPYGHSPPSFQGTPPSFQGIPHQGNWAQPNLATLQGFHLQENMVHSPNQGFGTANHQAIFALQYPLVRATVNSSSHGSESSTPCPARQQEAPVNLESSSESSEDEVRRATRTNWTEEENLRLISAWLSNSVDPIDGNDKKGEYYWKDVADEFNNNRPTNGHKRTVKQLKTHWGNVKKDIGKFCGVYAQVRRTCTSGHSDDMIMEKAHLWYKNQSNQKKPFTLEYM

SEQ ID NO: 17250 - protein, 783 aa, Oryza sativa
  Clone ID: TF_OSC402357j.C1.p1.fg
MEINSSGEEAVVKVRKPYTITKQRERWTEAEHNRFLEALKLYGRAWQRIEGLIARSMNGEEHKQGRHNPLEKEAINNGTSPGQAHDIDIPPPRPKRKPNSPYPRKSCLSSETSTREVQNDKATISNMTNNSTAQMAGDAALEKLTYIQKLQRKEISEKGSCSEVLNLFREVPSASFSSVNKSSSNHGASRGLEPTKTEVKDVVILERDSISNGAGKDAKDINDQEMERLNGIHISSKPDHSHENCLDTSSQQFKPKSNSVETTYVDWSAAKASHYQMDRNGVTGFQATGTEGSHPDQTSDQMGGASGTMNQCIHPTLPVDPKFDGNAAAQPFPHNYAAFAPMMQCHCNQDAYRSFANMSSTFSSMLVSTLLSNPAIHAAARLAASYWPTVDGNTPDPNQENLSESAQGSHAGSPPNMASIVTATVAAASAWWATQGLLPLFPPPIAFPFVPAPSAPFSTADVQRAQEKDIDCPMDNAQKELQETRKQDNFEAMKVIVSSETDESGKGEVSLHTELKISPADKADTKPAAGAETSDVFGNKKKQDRSSCGSNTPSSSDIEADNAPENQEKANDKAKQASCSNSSAGDNNHRRFRSSASTSDSWKEVSEEVVVYQHSAYSHLSYSLNIHHCFSNSHFCCQGRLAFDALFSRERLPQSFSPPQVEGSKEISKEEEDEVTTVTVDLNKNAAIIDQELDTADEPRASFPNELSNLKLKSRRTGFKPYKRCSVEAKENRVPASDEGETGCQSGKNVFNVPTCKHGQAGAVYNFFSATQQGKMRDYERLM

SEQ ID NO: 17251 - protein, 167 aa, Oryza sativa
  Clone ID: TF_OSC400025j.C1.p5.gm
MGRSSACCDKAAVKPKRGAWTAEDDERLRSYIQQHGTGGNWMASAAAARAAASAGSTTSAPASATAPSPTTTTASSSPSTPPSAPGRSSSSPPTSCTLLAPVAAACTSESEKKDAATTTSSPPNRSTDDALMMMMNWHNHQNQLQYLQGKLQTGVQQQQLVFGMPYW

SEQ ID NO: 17252 - protein, 295 aa, Oryza sativa
  unsure (1)..(295): unsure at all Xaa locations
  Clone ID: TF_OSC101758j.C1.p2.np
STTVVLGTSAISAVSSQQNVATCSCAAAAADGRACTAAAVGEEARKVRKPYTITKSRESWTEPEHDKFLEALQLFDRDWKKIEAYVGSKTVIQIRSHAQKYFLKVQKNGTGEHLPPPRPKRKAAHPYPQKASKNAEIQMPGCSTLLGQFYCSTFKCKSHARYVYLLCSXTSVQNXWKNPTNAIDELNLAGTGAVATNNCSSSIESPSTTWPTSEAVEQENMLRPLRAMPDFAQVYSFLGSIFDPDTSGHLQTLKAMDPIDVETVLLLMRNLSMNLTSPNFAAHVSCSVFKMLIKX

SEQ ID NO: 17253 - protein, 333 aa, Oryza sativa
  Clone ID: TF_OSC407812j.C1.p29.fg
MSATPNPIDASVVSAAAAVAGGGGGGDGGGGGGGKEKEKQVVAAPLQPPMAVPAPAAAVGEEARKVRKPYTITKSRESWTEPEHDKFLEALQLFDRDWKKIEAYVGSKTVIQIRSHAQKYFLKVQKNGTGEHLPPPRPKRKAAHPYPQKASKNVSPAAISQPPPLGEQGCVMSMDTSPVIRNTNASAVVPSWDNSIAQPLSASRTQGTGAVATNNCSSSIESPSTTWPTSEAVEQENMLRPLRAMPDFAQVYSFLGSIFDPDTSGHLQTLKAMDPIDVETVLLLMRNLSMNLTSPNFAAHLSLLSSCNSGGDPIKSEGMENLGSPQSCHLPFM

SEQ ID NO: 17254 - protein, 191 aa, Oryza sativa
  Clone ID: TF_OSC21363j.C1.p1.fg
MARSGGGNGGGEGGGGGGNGGGGGGLKKGPWTQAEDKLLVDHVRRHGEGNWNAVRRETGLQRCGKSCRLRWANHLRPDLRKGPFSPDEERLILRLHGLLGNKWARISSYLHGRTDNEIKNYWNTRLKRRVRAGLTPYPPEIEREIAHLRAQNLNLSAEGGGGGQIIYLVWCAFGGAVGGCGGVGVLGFFGG

SEQ ID NO: 17255 - protein, 372 aa, Oryza sativa
  Clone ID: TF_OSC401140j.C1.p32.fg
MGRVPCCEKDNVKRGQWTPEEDNKLLSYITQYGTRNWRLIPKNAGLQRCGKSCRLRWTNYLRPDLKHGEFTDAEEQTIIKLHSVVGNRWSVIAAQLPGRTDNDVKNHWNTKLKKKLSGMGIDPVTHKSFSHLMAEIATTLAPPQVAHLAEAALGCFKDEMLHLLTKKRPSDFPSPAVHDGAGAGASASALAAPCFPAAPPHHPQADDTIERIKLGLSRAIMSDPSTASAAAAAAAPSAPAEDKPWPPGDMSEGLAGMYATYNPAAHAHAQAQAEFRYDGASAAQGYVLGGDGDQGTSMWSHQSLYSGSSGTEEARRELPEKGNDSVGSSGGDDDAADDGKDSGKGAASDMSGLFASDCVLWDLPDELTNHMV

SEQ ID NO: 17256 - protein, 908 aa, Oryza sativa
  Clone ID: TF_OSC422196j.C1.p25.fg
MEPNPPPPPAAATATYRRRGKPKPKPKRKAAKPPSPSPPPKRQARDDPPHTGPLTRHSPLNPAPEDAPPQLHAGERDPPPRAWIEPAKLPPVSEEVQAVLSRGAGVHVVPSFAGWFSWKEIHQIEKQALPSFFDGISLRRTPEIYLGIRNFIMKKFHSNPQMHLELKDLSELSDGEMDAQLKVLEFLSHWGLINFHPFPPAVQGVSELVESITNADTEEKISVVDKLFQFETLQSYLIPAPNQAEVTAPIHTPSLLSEPTLTEDSITQAESSVEYHCNSCSVDCSRKRYHCRTQADFDLCCDCYDKGNLDAGMSQTDFIIMESAEIPGFGGTSWTDQETLLLLEALEIFQAKWGDIAEHVATKSKAQCMLHFLKMPIMDPFLHDGDVNEISQETAEQVSAEQGTSRVTEKMEVEDKTKEIKTNDRKTAAKPKLNLTETEVNLDDNVVANNDTKSSGDINVDVCSNTGVSNRSSDTEPTKKETSGENTSNIVNDVLKYAFEAVGHIPKIEGLGSFTEAGNPVMALVAFLSGLVDHDDVTTLCCSSLKAISDMSPALQLATMHCFILQDPPNDLKDPPNRVAIANLTDWEIGTCSFANTDCGQQKDKDATSNPSVTDNDDNLKEESALSVEEPNTTSTSSKNTRKLSNAKESKDESPQVEPKPSSANDCDNPISQVAKRASDNIRGHSSTVLPVSLNNTNEPCSISSQEASAGNTKDTSHTEHIEGDKPIYEDPPLEGKVELNKIEHEVTDLSAVQQHESIQTSLKKGYIQDHNSIKKTVADDVSVQRLQRAAASAISAAAVKSKLLAKHEEYQIQRLAALVIDKQLHKMQAKMSVFTEADNLVLRAREHTERTRKKLLMERSAIIASRMAALPPRPNHQPGMPGSRLPVGTIFFTVVLVRLGKNKYGAN

SEQ ID NO: 17257 - protein, 275 aa, Oryza sativa
  Clone ID: TF_OSC401367j.C1.p92.fg
MEKEVPKNLLRISVASSTQDTERYHTIFYHVSRDTRKVSYDFNHVSRDTHEVSCDTCRVSDDFYHVSRDTRKVSDDFYHVSRDTCEVSDDTYQVAATPSSAMRIILRIRLSPAWTPEEDACLERLARGYGFRHWRRVAEEMQPRERRRSPKQCRDRWRDHLARDVYHRPFTADDDAELAHLRLRGGGGDRWKDISRAAHCRTSRAMRRRWRELRKSDAFLRALYWHPDQPVPPLLDDALSCSDVLDSSVASYRGGCDAVAGGGTIVAPGFACFAA

SEQ ID NO: 17258 - protein, 369 aa, Oryza sativa
  Clone ID: TF_OSC900052j.C1.p4.fg
MPCTSAAWMLHVGGAAAEQASSSSSSKGGGRVVTAGTTTMDTGGYNNGGGGGGGGGNGGGGGDHQESSSSGGGGGQSSRLAARGHWRPAEDAKLRELVALYGPQNWNLIADKLDGRSGKSCRLRWFNQLDPRISKRPFSDEEEERLMAAHRFYGNKWAMIARLFPGRTDNAVKNHWHVIMARKYREQSTAYRRRKLNQAVQRKLDATTASDVVVAHHHPYAAAHDPYAFTFRHYCFPFPAASPAAADEPPFTCLFPGTAATAGRGGGGGMTWPDAMAAGEVIDDGAGGGRYVVAEPPPPFLVPAAPHGWLGGHEMMVMVNDGGDVAAGVASSYDGMIGRDQGGGGSHFEAAAAAAAAPAFIDFLGVGAT

SEQ ID NO: 17259 - protein, 326 aa, Oryza sativa
  Clone ID: TF_OSC406972j.C1.p10.fg
MGRQPCCDKLGVKRGPWTAEEDKKLMSFILTNGHCCWRAVPKLAGLLRCGKSCRLRWTNYLRPDLKRGLLTDAEEQLVIDLHAKLGNRALAPTSLISVAKRTLHVDSEIESILLGPVASLENGRKLFKKWSKIAAKLPGRTDNEIKNHWNTHIKKKLIKMGIDPVTHEPLDRKQESPATTSQSTVTAESSKSGEATRQQSRQLDDAVVRDMSVSAGGDSPPESSTNTASTAGGSSSSSSSHHQDPLVKWLLEEDLLPTGDEPWLNFTASNDVDEFSSIAATGATPALPWDVGMTTDWLLDYQDFGMGDSSLVVDASMVNSSNGSNF

SEQ ID NO: 17260 - protein, 362 aa, Oryza sativa
  Clone ID: TF_OSC400903j.C1.p93.fg
MLLSHCFAVAFALSALLAGLALAMDDATFGMEWTAAELGEARSVIARVSNAYDSGAGSSNSAGDTKHDRIMRELQARFPSRTMVQVIDLYLNLTAETAAQAGAAQPQDAGGAGDAAVVHPTFGLANDNFGMPVANNNDDGVDAGMVFGGAPMEEGAVAVNGGDGEVVNPDNADDDVLWTDYEHRLFLTGMRVYGRGDWRNIARYFVGSKTPEQVSMYADNYFHMMEIAAAMEADGDDDDDHHENNNNNLGGGQLHAVVGAVEHHENYNNNNLGGGQLNAGLGAVGHGPGAGHIAPATSSNNNVAAAAANNNVDAPFWVPLLYNLEIEQRMMEMQAQSQKAWDDQQMKMAEAATDPKEGAADK

SEQ ID NO: 17261 - protein, 338 aa, Oryza sativa
  Clone ID: TF_OSC400397j.C1.p62.fg
MAHEMMGGFFGHPPPPPATAAVGEEEDEVVEETEEGGHGGGVQGKLCARGHWRPAEDAKLKDLVAQYGPQNWNLIAEKLDGRSGKSCRLRWFNQLDPRINRRAFTEEEEERLMAAHRAYGNKWALIARLFPGRTDNAVKNHWHVLMARRHREQSGAFRRRKPSSSSASPAPAPAPPPPPQPVVALHHHHHRYSQQYSGYSGAAESDESASTCTTDLSLSSGSAAAAAAAAAAANIPCCFYQSTPRASSSSTAACRAPRVAAAADTVAFFPGAGYDFAAAPHAMAPAAASTFAPSARSAFSAPAGRGEPPGAVDQRGGAQATTDSHTIPFFDFLGVGAT

SEQ ID NO: 17262 - protein, 302 aa, Oryza sativa
  Clone ID: TF_OSC400045j.C1.p27.fg
MGRHACSAAGVQQKLRKGLWSPEEDEKLYNHIYRYGVGCWSSVPKLAGRLQRCGKSCRLRWINYLRPDLKRGSFSQQEEDAIVGLHEILGNRWSQIASHLPGRTDNEIKNFWNSCLKKKLRQRGIDPSTHQPISTAAAAAAAALDTSTQDQKPPATADGFALKQQQQVFDPFPVIDSFGSGFDATGMPLYGHLGGKDAAGFVDYSSVLDVSENLGYGESSSNSSNWNCGVGAPEVNNALESEPLHWATESKVEPFVGYGEGDAMEHKFGLPCHGQQEQGMTHFDFDVSRSMVVGDFNFEYFR

SEQ ID NO: 17263 - protein, 353 aa, Oryza sativa
  Clone ID: TF_OSC401533j.C1.p20.fg
MGRAPCCEKVGLRRGRWTKEEDEKLARYIRENGEGAWRSMPKNAGLLRCGKSCRLRWINYLRADLKRGNISPQEEDIILNLHATLGNRRMEMHTEMLSATGFNLAQRKFPMLLTDDTDGGLSCLWSLIAGHLPGRTDNEIKNYWNSHLSRKGYEFLRGGGGGAVVDVDLSKLPGGGKRRGGRTGRSSSGKEKTRTKEKDKAPAPEAAHNDDGGGGGGGGIDNVSAASHSHREEQAQASASGLTSDGLEEGPLGLSEEMVSGPVGPVSPKPEVGQDGSSAESGCCGPSGSSGPTEAVGQDMGDKSMDWDLVGLDDGFANDDMWGSLSWDYGELVGPDGVHQGEVLSDLFFLGNL

SEQ ID NO: 17264 - protein, 400 aa, Oryza sativa
  Clone ID: TF_OSC401612j.C1.p9.fg
MGHHCCSKQKVKRGLWSPEEDEKLVRYISEHGHSCWSSVPKHAGLQRCGKSCRLRWINYLRPDLKRGTFSEQEERTIIDVHRILGNRWAQIAKHLPGRTDNEVKNFWNSCIKKKLIAQGLDPKTHNLLPASKTLLHGGGGGGAANPSGNGLAQFQSNNGAAAAGTTPFTISSPAKAAAYDVAPPALYDVVLPANPAGGMLMAHDHHHHHQVAAAAAPVGYPYADHGGNGGGVLMSFRDQNAGVHGAASMDFMNGSSSSSSMEQLGGGGGMSSNGNGSFSASMAAFMDEEAAMWATAVAPPGMGGLAGMDQVAQQQQQQQVLVQDAAVGVAPTTLMMHGGGAATAGAMVVDKSVEMVDVSSAVYGGATATAFDLDLMVESCGMFCGGGGAGNAMEQLQWDC

SEQ ID NO: 17265 - protein, 243 aa, Oryza sativa
  Clone ID: TF_OSC412577j.C1.p19.fg
MGRSPCCEKEHTNKGAWTKEEDERLVAYIRAHGEGCWRSLPKAAGLLRCGKSCRLRWINYLRPDLKRGNFTADEDDLIIKLHSLLGNKWSLIAARLPGRTDNEIKNYWNTHIRRKLLGRGIDPVTHRPVNAAAATISFHPQPPPTTKEEQLILSKPPKCPDLNLDLCISPPSCQEEDDDYEAKPAMIVRAPELQRRRGGLCFGCSLGLQKECKCSGGGAGAGAGNNFLGLRAGMLDFRSLPMK

SEQ ID NO: 17266 - protein, 552 aa, Oryza sativa
  Clone ID: TF_OSC101345j.C1.p12.fg
MEEEEEAARLAGSQGESPAMLHPNGDGDGDGGDDEGDASGGEEEQGGVARAGVRRRGGGGRVRVRGRIPLKKGPWTPDEDKRLREYVEAHGEGNWNRVQRNAGLNRCGKSCRLRWANHLKPDLKKGPFSKEEEEMIIKLHLWLGNKWAKMANSTHLTCCTLVNGLVKRSRQMLCHYSLFAENNKKRYCHQEKLTSRPQDKLPGRTDNEIKNFWNTRCKRIQRTGEPLYPKEFNHFKLTDLEVMNCESPDESRAKKRTNEVLQGNGQSYKEVFFDNLDYSRPENYIRPNCVTPNSLPVDATSPFGSAIATQDQSVPFGSAIVSGHPILDGNFSTSGTIQRPMNVELPSLQYPNYDFNNNNAWSYHDPLGHPIDQVDFGSLRSEYLSPNNNGLLDALVHGGHGQGELANSQGSFDACFPRVQCNQVIQSNAFSLSSSFPIIGDDLLENSCHAFVGINNNASSLFLDSQPPPLVDPTFWRHDVSLEPNLPVYCQFNEELPPSNEQFAKDADDAFGHGGLSDETNLAAAGQGDEHDLEDPWASMPGACDIPDFPSE

SEQ ID NO: 17267 - protein, 345 aa, Oryza sativa
  Clone ID: TF_OSC401316j.C1.p15.fg
MGRSPCCEKEGLKKGPWTPEEDQKLLAYIEQHGHGCWRSLPSKAGLQRCGKSCRLRWTNYLRPDIKRGKFSLQEEQTIIQLHALLGNRWSAIATHLPKRTDNEIKNYWNTHLKKRLAKMGIDPVTHKPRSDVAGAGGGGGGAAGGAAGAQHAKAAAHLSHTAQWESARLEAEARLAREAKLRALAASATPGAPHLPAPPASAAAAAAAHGLDSPTSTLSFSESAVLATVLEAHGAAAAAAARAAMQPMQAYDEACKDQHWGDVDAADVGFPGAGAGFTGLLLEGSLNQIPRPAGRDAEADGEFQETEEEKNYWNSILNLVNSSSAPMSTAVVVPASHAYSPAPDF

SEQ ID NO: 17268 - protein, 321 aa, Oryza sativa
  Clone ID: TF_OSC400903j.C1.p83.fg
MGSIVIEGWTASEIEEARSLITSPNNGGEGGDGEGNKQKHCGHIVMELHEWFPWKTIGQVIGLYMKLNAGKPMVMHSLNKSDANNSIGEVDHVSALANGNPVRLEEHRPMLNNVGLVFDYPLEEMEMENQTDQEPKMVVEEEVQPKEGLVIKEKEAGVSKIHTNSQHVTPSIKRRVIWTEEEHRLFMVGLRVFGRGDWKNISKHLVTTRTAAQVSSHAQKFFLKMEARGEAVPPPAKRRRRRITGDQQAAAAEHAAALRRRMPVPPPPFNPFLLPSLVAPVMHRLLPPGSQAAGAAASGSGGQGASLPQMPWINGANGMGR

SEQ ID NO: 17269 - protein, 287 aa, Oryza sativa
  Clone ID: TF_OSC900188j.C1.p10.fg
MARKCSSCGNNGHNSRTCSGQRVLDHSISSSNSGSTTAAAATACGGLRLFGVQLQVGGGSSPLKKCLSMECLASPAYYGASASPSVSSSSSSLVSIEENTERVSNGYLSDGLMGRVQERKKGVPWTEEEHQMFLAGLDKLGKGDWRGISRHFVTTRTPTQVASHAQKYFLRQNSMTQKKRRSSLFDVVEGIKRAAAMPISGSASELQIPGMSIGVGVVKEEVVLPPCLNLMSNSSSASQHSPSLTLLANPQVQLQMPDLELKMSTSRLSDQSGPSPSTPFFGTIRVT

SEQ ID NO: 17270 - protein, 447 aa, Oryza sativa
  Clone ID: TF_OSC100940j.C1.p9.fg
MSASASAVCLLPPRGGSLARPDTALPPASQPATVAVNQNIPRLASPRLAVTSITLLPRRGRRCAVDLLLLHLHRLLLFLSLFSEETPNLFLPRKPAAFLKRIKSPSLIRRCNPSPQNLAAPRAVLGFELMAVEEASSSSGGGRGGGGGGGGEEGLSGCGGGWTREREKAFENALATVGDDEEEGDGLWEKLAEAVEGKTADEVRRHYELLVEDVDGIEAGRVPLLVYAGDGGVEEGSAGGGKKGGGGGGGGGGGGHGEKGSAKSSEQERRKGIAWTEDEHRLFLLGLEKYGKGDWRSISRNFVISRTPTQVASHAQKYFIRLNSMNRERRRSSIHDITSVNNGDTSAAQGPITGQPNGPSANPGKSSKQSLQPANAPPGVDAYGTTIGQPVGGPLVSAVGTPVTLPVPAAPHIAYGMHAPVPGAVVPGAPVNMPPMPYPMPPPTSHG

SEQ ID NO: 17271 - protein, 318 aa, Oryza sativa
  Clone ID: TF_OSC401134j.C1.p17.fg
MGRAPCCDKASVKRGPWSPEEDELLRSYVRSHGTGGNWIALPQKAGLNRCGKSCRLRWLNYLRPDIKHGGYTDQEDRIICSLYNSIGSRWSIIASKLPGRTDNDVKNYWNTKLKKKAMAMHHHHQPPPPQQQHYHHHHHHRVAGGGARVTLVSPPPAPQSQCASMQPSPASASSSGGDACSFGAAAMYSPSPSTQQAPQAATLAVAGYTSVATAAAAAAVAAQRSPLDELICQVPPPPTTTAADCWASGVTLDDVFLPELVGAGEFPNGDLFGGFGPLLQDRSSMELSACYFPNAAAAEMWPAATDIVKPAGLCHSLT

SEQ ID NO: 17272 - protein, 943 aa, Oryza sativa
  Clone ID: TF_OSC400764j.C1.p2.fg
MTSDNGKAPEKGGEASGPSSAPQEGEISNEPQRRRPLSGRTTGPTRRSTKGNWTPEEEDDIIVQMVNKLGPKKWSTIAQALPGRIGKQCRERWHNHLNPGINKEAWTQEEEITLIHAHRMYGNKWAELTKFLPGRTDNAIKNHWNSSVKKKVDSYMSSGLLTQVSCLPLNEYSAHCNSSPALTQQNSEDSGSYAVREVENSSVCSQSSLAKVSCSQVHNANVALGCDLQVNANVDNNEAHDSQSSVGHEACYTSVGAVATAIPEVHYHVSSSNFDPDQHLQEEFAQGLNLHMSMDEVPSNSSFADNPTICSIENHERSLEPYDVAMEMPLSMLPSDSGAEQKLHFMSEADFNSPNCLKSELWQDISLQSLLSGPDAVETDSFSRSNHQSDVYSSQADNEFLAPPYLLQTSNSSSVMEATYGQSPQMSVPPSLICSNVMTDVPSDNRSEPKEMTVSQAEMVTQSSSSSGDAEMSANPGSSNGSDIPSMMERIPECADQHVTNAEEPEASIEKEPSVTPSATADEKQDEGALFYEPPRFPSMDVPFVSCDLVTSGDLQEYSPLGIRQLMRSTMNVCTPMRLWGSPTHDESPDILLKSAAKSFICTPSILKKRHRDLVSPIPDKRIEKKSGTEKDCGVSDTSSIGIQTCFINATKDDAVITKSVLRIERSASSKPLEKKLEFSDENKENLDNTIEQAKDGQSAGNYKHIDEQARGERRTATNITTTYDDLPGNLQPAGILIEHNGDDLVSPDYGKNTMKQKQNTNMESLSVCKEGVSAKKPAELIVEKSSACINVDYEYVNILADTPGIKRGLESPSAWKSPWFVDMQFQGSYFVSPANGSYDALGLVKQINVQTAAALAEAREVLASGGQSENINSDKENLENPDAKKEPGATTKLQAKIKTEGKILDFNECATPIRSSDKKAGSSLGRSLSSPIPSSHLLKSFR

SEQ ID NO: 17273 - protein, 276 aa, Oryza sativa
  Clone ID: TF_OSC401721j.C1.p17.fg
MVVAGKKQGRHSFSASSSSSSSSSCSVVQLGHHQRPQGEDPLIGIKAAAAGGGGIMRKGPWTEQEDVQLVWFVRLLGERRWDFLAKVSGLQRSGKSCRLRWVNYLHPGLKRGRMSPEEERMVVQLHAKLGNRWSRIAKSIPGRTDNEIKNYWRTHLRKLKLKQQKQQQSDDHHNDNDDDDDRNSSSSSSSSNSNSNLQQQPQPEDESSASGSLQAQHHEDQHQLFLHPLWNDDIIVDVDCWSSSTNVVAPPPMPASPLWDIDDAFFCSDYSLPLWG

SEQ ID NO: 17274 - protein, 317 aa, Oryza sativa
  Clone ID: TF_OSC401780j.C1.p5.fg
MGCKSCEKPRPNYRKGLWSPEEDQKLRDYILRHGHGCWSALPANAGLQRNGKSCRLRWINYLRPGLKHGVFSPEEEETVMSLHAALGNKWSRIARHLPGRTDNEVKNYWNSYLKKRVESGGGKTSQGPPTTPASAASSPADSDDSHSLQQKPHEPANSDSSEPAHESSSASADSSCLTVTTDHPPVSRPHAAVTPKVMFADWLDMEYICGQVAAAPGLDAAGFAVVGGAAGDQQQQQQQVMSQDGSVHQADGPSCGVDDSSLQQQQQEGFGGNGGCWDFQEQFDSIDQMQASGGGGGFCDLLSMSDFDLWAELERTA

SEQ ID NO: 17275 - protein, 318 aa, Oryza sativa
  Clone ID: TF_OSC422332j.C1.p21.fg
MTRRCSHCSHNGHNSRTCPNRGVKIFGVRLTDGSIRKSASMGNLSLLSSAAGSTSGGASPADGPDAAPTAADGYASDDFVQGSSSATRDRKKGVPWTEEEHRRFLLGLQKLGKGDWRGISRNFVVSRTPTQVASHAQKYFIRQSNMTRRKRRSSLFDMVPDESMDLPPLPGGQEPETQVLNQPALPPPREEEEVDSMESDTSAVAESSSASAIMPDNLQSTYPVIVPAYFSPFLQFSVPFWQNQKDEDGPVQETHEIVKPVPVHSKSPINVDELVGMSKLSIGESNQETVSTSLSLNLVGGQNRQSAFHANPPTRAQA

SEQ ID NO: 17276 - protein, 173 aa, Oryza sativa
  Clone ID: TF_OSC400259j.C1.p82.fg
MDLYGAAAGGGPVARRPWSKVEDKVFESALVLCPEDVPDRWALVAAQLPGRTPQEALEHYQVLVADIDLIMRGAVDAPGSWDDNDGNDRRGGGGKPRGEERRRGVPWSEDEHRLFLEGLDRYGRGDWRNISRFSVRTRTPTQVASHAQKYFIRQANAGARDSKRKSIHDITTP

SEQ ID NO: 17277 - protein, 358 aa, Oryza sativa
  Clone ID: TF_OSC7723j.C1.p1.fg
MGRAPCCEKVGLKRGRWTTEEDEKLAGYIAKHGEGSWRSLPKNAGLLRCGKSCRLRWINYLRAGVKRGNISNQEEDVIIKLHATLGNRKSYVVKRMDYVCLGARDYCFQQNTHVRWSLIASHLPGRTDNEIKNYWNSHLSRQIHTYRRTYTAPSEAAVTIDVTKLQAAGKRRGGRTAGQSRKGDKKRAEDDPPKETAAADTPLPESSPRRAQSDEARSGSVVVDPEEPSSQPNNGSSGGGGGTPDGPCSEETATGPTSLDPMEMGLWEVESEFAEMEALLCGGVAPDGPGIPGLEPLDVAAQADDLLDMDWDGFAADLWGDPAQRGGLVQDAGEPNGSMGCSSDELESFASWLLSDSC

SEQ ID NO: 17278 - protein, 273 aa, Oryza sativa
  Clone ID: TF_OSC400524j.C1.p32.fg
MGCKACQKPKVHYRKGLWSPEEDQKLRDFILRYGHGCWSAVPVKAGLQRNGKSCRLRWINYLRPGLKHGMFSREEEETVMNLHATMGNKWSQIARHLPGRTDNEVKNYWNSYLKKRVEGAEAAARKSAEPADVVTGSPNRSETGQERVAADRPASSESSGPVESSSADDSSSLTEPAAGLAAVRPHAPVIPKVMFADWFDMDYGTSLAGTAPGLSYQGSSSVQVDVPCGGAVDSLHGLGDGGFCWDFDDAADHMQGGGGLCDLLSMSEFLGIN

SEQ ID NO: 17279 - protein, 630 aa, Oryza sativa
  Clone ID: TF_OSC401196j.C1.p59.fg
MSSAPQQLLDSSSPGPGPGPEVEDDGGRRVRKPYTITKSRESWTDPEHDKFLEALQLFDRDWKKIEAYVGSKTVIQLVAFVTEYFRVLQFLNLPGGDLIINLGVLAAPQVVLPQQASHLMEQGCLIPMDISPVARNFNANDVFSSWDSALAQSFSPRHTHGAANNCSSSVESQSGTCPTSEAIEQEIMLPTLRAMPDFAQVYNFLGSIFDPETSGHLQRLREMDPIDVETWWIPVTTCGLDNLDIVLLLMKNLSINLTNPNFEAHRKHMACKKLSKIKSSRNSVVCTLSFCLEASTSVYISSKKKKKKKKKRLGAMVQGASGGGWSSKVEEGVIVGGLLVVQCILAGYVVFVDHVLSLGANPLSLIVLGAVASSLFFLPFAVVLERKKWPSKISRTLMAQFVFIALGGTTVFQELMLLGIKKTTPAIASAMPNLSPGLIFIIAACFRLEKFDKGCKYTRAKILGTLVCLVGAMAMSFLQSPVSSSPQLTTTSYYDWILGCFYLFLAVVVLSIYTVLQAATLVSFPAPLTMCSVTSMMGAVFTAILQFIVDGKIDMGSPRIDETIISTIVLMTVCSALLSALLFSQLLCLGSLAGMVLMFCGLYIVLWAKSKEGHSIIHLEGGDVEKALLS

SEQ ID NO: 17280 - protein, 192 aa, Oryza sativa
  Clone ID: TF_OSC401693j.C1.p18.fg
MATPPLPPPPRARCVVRLKLPPAWTPEEDARLQRLAKENGFRRWSRVARSMPRRSARSCRDRWRHHLARDVYHRPFTARDDDELLRLHYRLGDRWKEIGRAVYGRTSRIMKHRWRELRRSGFPLAATARKVQALDMVESEVEESDQSLPPPELQRSLADALASSFGYCSLANEHAMDPLAGSLSLGFACMAV

SEQ ID NO: 17281 - protein, 267 aa, Oryza sativa
  Clone ID: TF_OSC27606j.C1.p1.fg
MASSSTTNTSDGAGKPASSSSSACPRGHWRPGEDEKLRQLVEKYGPQNWNSIAEKLEGRSGKSCRLRWFNQLDPRINKRPFTEEEEERLLAAHRHHGNKWALIARHFPGRTDNAVKNHWHVVRARRSRERSRLLARAAAAAAHPPPFSSYASQLDFSGGGASSGARNSSLCFGFGMINRSSSSSSSPAAAPFLIKSFNGTSYGTLLPATTSMAAAAQPVSTITFSSTPMRETLELMDAGGHENHGDVDGGGDKRKGVPYFDFLGVGV

SEQ ID NO: 17282 - protein, 322 aa, Oryza sativa
  Clone ID: TF_OSC402119j.C1.p10.np
MGRKPCCSKEGLNRGAWTAMEDDILVSYIAKHGEGKWGALPKRAGLLKRCGKSCRLRWLNYLRPGIKRGNISGDEEELILRLHTLLGNRWSLIAGRLPGRTDNEIKNYWNSTLSKRVAMQRTAAATSMPAAATTSSNADAAGAAARRRRSPEPRTVVVSPIRTKALRCNNNSSSGIVVVQQAGACSHGGRPPESGAPGDAAADKVATPQAVQQQQQQELAGAEDDDDLPVPAVCIDLDLDDIELGGLDGFLISPWRGGGHDDGNAAAGAVPNLPMPIGYELGGAGGGGEAGAVDLEALLGQLEAEEDDDGDHHHHHHHHHHQ

SEQ ID NO: 17283 - protein, 371 aa, Oryza sativa
  Clone ID: TF_OSC400944j.C1.p31.fg
MGKGRAPCCAKVGLNKGSWTPEEDMRLVAYIQKYGHANWRALPKQAGLLRCGKSCRLRWINYLRPDLKRGNFTAEEEETIIKLHGLLGNKWSKIASCLPGRTDNEIKNVWNTHLKKRVSPEQKKGGGKSKKKTTCTDVLVPSPSPSSSTTTTTNCSSGDSAGEQSNTSKEEEEETDKIEIPMLELDPCCFDFDMLVDPVVPDTYCPAVSASASASAPTSPCSSTSPSCARAGVDPLLDLPEIVDLGPELWSIMDGGAGDGCTEAPPPAWSNAAAAAAANATVATTTSLEEEEGKEWWLEDLEKELGLWGPTDDYHCHPGPQGQPGRAGPPPSAVVEDPVSCYFQAGPTAAATWQGHEPSAVITSNPMDYYV

SEQ ID NO: 17284 - protein, 315 aa, Oryza sativa
  Clone ID: TF_OSC900238j.C1.p10.fg
MMKESYMEVLPPAPAHYFVGQAAAAGGWFLPDRRGGGGAWSQEENKVFEQALAALDRNDPERWERVALLLPGKTVADVMTHYDDLENDVCFIEAGLVPFPHYGAAGGGGGSGFTLDWDGGDDPAGLGFKRSCYMVGGKRARGPDQERKKGVPWTEEEHKLFLMGLKKYGRGDWRNISRNFVTSRTPTQVASHAQKYFIRLNSGGKDKRRSSIHDITTVNLPDDDHGNPSPSPPPSVLTAHSSSSAAAVSEQFGVLVDGKPPPPPLGRGAGHHHFMPHPYAQVKIEAGNSHVAGGGRLDDSVLVQMQCGQLMQPLG

SEQ ID NO: 17285 - protein, 316 aa, Oryza sativa
  Clone ID: TF_OSC419638j.C1.p9.fg
MGRAPCCDKATVKKGPWSPEEDAMLKNYIEEHGTGGNWIALPHKIGLKRCGKSCRLRWLNYLRPNIKHGDFTPEEDSIICSLYISIGSRWSIIAAQLPGRTDNDVKNYWNTKLKKRLLGRRKDRGGGHHHRSQSTADDLPAGGDGGMNDGGGGGGERSLSASAMERIQLCMQLQELQNPLSIHHNPLLSHQWPSKATIDDQNHNNVTVAEHGMSSSVSDHHRLDGQQLESGAGAAAMQQASPSSGGENSNVVVAIEAELQELLYAGGGAIVDGGAPPQGDVDWWSYDQGKQSPVTCWDFTPETSSIFQDYATVYDI

SEQ ID NO: 17286 - protein, 522 aa, Oryza sativa
  Clone ID: TF_OSC101223j.C1.p1.fg
MEEMIKPAPAPASSEEEKEVVATAATGERRHEEATAGREEQEEEEEEEEAPVVLKKGPWTTAEDAVLVQHVRQHGEGNWNAVQRMTGLLRCGKSCRLRWTNHLRPNLKKGSFSPDEELLIAQLHAQLGNKWARMASHLPGRTDNEIKNYWNTRTKRRQRAGLPVYPPDVQLHLAFAKRCRYDDFSSPLSSPQQSAGSNVLSMDAADAAGAASSGYTSARPPPLDLAGQLAMGSRPVQLLAATPFSAPSSPWGKPFARNAQFFQFPHSSPVSPTTPTGPVQVHPVTPELSLGYGLHAGDRARLPPVSPSPGARAELPSSQLRPSMAPTTAAAAATGGLVGGALQDHPNAASLEAMLQELHDAIKIEPPAPPENRGTEEEGGGGGGNLRGFLHEQIFDKLMPIKSEDFCIVGLHSVLISLQFPGDGKPEVELKDDIETLFDLIIPATFPAAAPEPAAAATAASAAPNHSSSVSQHSSDDQDHSNGADVLDLPILTGGGGGSSEQDDWSLDGAACQWDNISGGIC

SEQ ID NO: 17287 - protein, 301 aa, Oryza sativa
  Clone ID: TF_OSC102011j.C1.p25.fg
MGMEAECDRIKGPWSPEEDEALRRLVERHGARNWTAIGRGIPGRSGKSCRLRWCNQLSPQVERRPFTAEEDAAILRAHARLGNRWAAIARLLPGRTDNAVKNHWNSSLKRKLATATDGGEIDRPCKRVSPGPGSPTGSERSELSHGGCGSGSGGGQVFRPVPRPGGFDAISAADVVRPPRRRDDNDDDGDDDPLTSLSLSLSLPGFHHDSARSHFQELPSPSRSPSPPPSPPAASPSAYPFNADLVSAMQEMIRTEVRNYMAGVGLRAGCGPGAVAESFMPQLVDGVMRAAAERVGVVTRQ

SEQ ID NO: 17288 - protein, 276 aa, Oryza sativa
  Clone ID: TF_OSC421872j.C1.p2.fg
MPTDDATATGNGDGAAPRPAAAEPAAPLSSVWTRRDEKLLEMLLWRWQLDPHWDRLAAELGGKTATQVFDRYVCLADELRLVMAAPAVDTPPAWDVQDEREAAVAPLPGLEADAAAGAGESAEVTAIGIAAAASPNAAATSAPTIGGGVVLKSRELKNPRKTRMAGGGPRKKAEMWTREEHSQFLHGISTYGKGNWKALASEFVKTKSSTQIASHYQKFCIREEKRRLSKCKRASIHDIVSPTTTTSAPESAGAGPSAPPCALIESGALIAGDDDA

SEQ ID NO: 17289 - protein, 171 aa, Oryza sativa
  unsure (1)..(171): unsure at all Xaa locations
  Clone ID: TF_OSC411350j.C1.p2.np
CCVVLRIKLPAAWTPEEDAALERLAVENGSRHWRRVAAQMRKRSPVQCRDRWRDHLARDVFHRPYTAADDDELTRLVLRPGGGGDRWKDISRAVHGRSSRSVKRRWMEIGTSDELLRKWHPRSSMPTVVDAVVXCGQIKLLDGAVASXGQFTDAMSSSGSCGTPGHRCCLR

SEQ ID NO: 17290 - protein, 342 aa, Oryza sativa
  Clone ID: TF_OSC401516j.C1.p2.fg
MQPPPMRERQRWRPEEDAILLAYVRQYGPREWSLVSQRMNRPLHRDAKSCLERWKNYLRPGIKKGSLTDDEQRLVIRLQAKHGNKWKKIAAEVPGRTAKRLGKWWEVFKEKQQRELRDRDRRRLPPPLDGDERGCAGGRYDWLLEDFADKLVNDHHRRMMAAPILPPWMSSSPSSSSSPSVTLSLASAAVAPAPAAPPPTWGGGGGGEVVVAELMECCREMEEGQRAWAAHRKEAAWRMKRVEMQLETERACRRREATEEFEAKMRALREEQAAAVERVEAEYREKMAGLRRDAEAKEQKMAEQWAAKHARLAKFLDQVAACRRWPPVEINGGGGGGPGGGR

SEQ ID NO: 17291 - protein, 196 aa, Oryza sativa
  Clone ID: TF_OSC400608j.C1.p20.fg
MGRSPCCDESGLKKGPWTPEEDEKLLHYIQKNGHGSWRTLPRLAGLNRCGKSCRLRWTNYLRPDIKRGKFSQEEEQTILHLHSILGNKWSAIATHLPGRTDNEIKNFWNTHLKKRLIQMGFDPMTHRPRTDFFAALPQLIALATLRDQLAATACGGGGGGDTAAAAAAQIMQGAGGGGGADVAIQAAKMQYLQCLL

SEQ ID NO: 17292 - protein, 127 aa, Oryza sativa
  Clone ID: TF_OSC8036j.C1.p1.fg
VPWTEEEHRKFLVGLEKLGKGDWRGISRHFVTTRTPTQVASHAQKYFLRQSSLTQKKRRSSLFDVIEDAEKAPSVNERLKLRHETASVPAEMGFPALSLGISSMAQPEAMLLPPPSLTLTPAVHHQQ

SEQ ID NO: 17293 - protein, 463 aa, Oryza sativa
  Clone ID: TF_OSC400860j.C1.p23.fg
MARFQETKARNDQGPVADHVGHQNLMENLTDPLDSSGMDMMDEARIPKARKPYTITKQREKWTEDEHKLFLEALQLHGRAWRRIQEHIGTKTAVQIRSHAQKFFSKVIKESSGDNCNSLGAASSIQIPPPRPKRKPVHPYPRNLGSTASKNVPALKQLEKPQLQVQSLYDQDNGSPTSVLTVPQIRADTLGSESGGSPTSTIDIEERCPTPSIATAELAMELPPTNDEEVKGNGDHEEVTCDRSGVPVLRLFGKRVMVNDLHQMSAPDAGNLQTVADMEVDASAETPTSGTGKFSSHGAAEANTWNPWLTNTQQFLYYLPNGQIFSVHSALPCFTYHNEGVTCTQFSNPQVVASDQQHQHQTSEAVDYKGIQREGSWTESNTSSSSVPETATHNSETTESYRNGNRNEDEMVPSPDSRKCVSPGSNCRRGFVPYKRCVADSEALLKSQAPQEEADGEMTRLCL

SEQ ID NO: 17294 - protein, 266 aa, Oryza sativa
  Clone ID: TF_OSC25059j.C1.p3.np
MGRPPCCVKAEVKKGPWTPEEDLLVAYVQEHGPGNWRAVPTNTGLMRCSKSLMRCSKSCRLRWTNYLRPGIKRGNFTDQEEKLIVHLQALLGNRWAAIASYLPERTDNDIKNYWNTHLKKKLKKMSATGGGGDYGEGGGAGEVKTRAAAPKGQWERRLQTDIHTARQALRDALSLDPSPPAKPLDSSSGATAPPSSQAATSYASSAENIARLLEGWMRPGGGGGKTTTTPSSGSSLKTELSFSSLLLKTTTPPKKKENQFFFSHKN

SEQ ID NO: 17295 - protein, 413 aa, Oryza sativa
  Clone ID: TF_OSC401161j.C1.p35.fg
MSSETAASPPPPPPNPPAADSTHSSPASMTDETHGAGAHPDESQPHRSSSSSSSPPVAVDGETRVPLPVRSLPQPSHPSPPPSGEDEDDVVITGQIAVGDAAGAAMEERVKGPWSSDEDTLLSNLVEKLGPRNWTLIARGIPGRSGKSCRLRWCNQLDPQVKRKPFTEEEDRIIMAAHAIHGNKWAAIAKLLVGRTDNAIKNHWNSTLRRRHCTGGRCTQGGVMKRAIPERPRSVSEEPWPLGNLSSLNVREAMEAPAQTVSESYVGAWQIGDQSCKTEVVDPPYLARPVAKVGAFKPYNVGPAQSSQKEMLSFATKFDSNLHPFKPENGVCKFVDPTSFAAEVPNKCGHGCCSSHGQLRKNSLLGPEFNEFEDHPPISDSSFASLVSEISSIAWMKSGLQSSDTLARSVPPA

SEQ ID NO: 17296 - protein, 262 aa, Oryza sativa
  Clone ID: TF_OSC412573j.C1.p11.fg
MGRQPCCDKKKVKRGPWTAEEDKKLISFILTHGRCCWRAVPKLAGLLRCGKSCRLRWTNYLRPDLKRGLLTADEEQLVVDLHAKLGNRWSKIAAKLPGRTDNEIKNHWNTHIKKKLIKMGIDPATHQPLPNTKVVSQTRTSTLSTATTESAKSNGMAYPFDPEGGCSRDMSVPTDSMEQSSRNTSSHGLDPLVNWLLEAELPADEPWLNFTSSNEDDFSGIVKQSAWDGSTTDWLLDYQDFSMDDSSLIDGARVQNSDGLNF

SEQ ID NO: 17297 - protein, 341 aa, Oryza sativa
  Clone ID: TF_OSC407994j.C1.p11.fg
MVRPPCCDKDGVKKGPWTPEEDLVLVSYVQEHGPGNWRAVPTRTGLMRCSKSCRLRWTNYLRPGIKRGNFTDQEEKLIVHLQALLGNRWAAIASYLPERTDNDIKNYWNTHLKRKLQGGGAGGDGDGGAAGDAVSPKPAAQRPASSSKGQWERRLQTDIDMARRALREALTSLDDVKPPHQPDAANAAAGGGGATTGAAASAGADSPAASSTSGASQCSPSSAGYVLTTENISRMLDGWARKKGGGGGRRAAGSGPATPGATESASGSSEASEVSYGGTALSAAAAPASAFEYETKPTVTAAAAADAGDETQLSAIESWLFADADGIESGSLLDAAMDYTF

SEQ ID NO: 17298 - protein, 342 aa, Oryza sativa
  Clone ID: TF_OSC410931j.C1.p2.fg
MGRSPCCEKEAGLKKGPWTPEEDQKLLAYIEQHGHGCWRSLPTKAGLRRCGKSCRLRWTNYLRPDIKRGKFTLQEEQTIIQLHALLGNRWSAIATHLPKRTDNEIKNYWNTHLKKRLARMGIDPVTHKPRVDADADVAAGGGAAGGGARSRAAAHLSHTAQWESARLEAEARLAREAKLRALASPPPATAALSGVDSPTSTLSFSESALFGAGSAAPDIHGAARAAAVQAVQSSYGEACQEHHFGGATAETSFAGAGTLAGVLLDCSVTGADQRFAERTEACSGELQGEDDDDKGYWNSILNMVNSSMSSSSSSLTSEVVTDTEMFLPATAAAAASATPVEF

SEQ ID NO: 17299 - protein, 921 aa, Oryza sativa
  Clone ID: TF_OSC1541j.C1.p2.fg
QKPKKWEEIRTAVSTPFLTRFARASLAGNTPSSPTAAAVAVAASSATGAGDDASSQGHLLRRYVPPLLASHFPLAGTSSRADAGGQNPTSPVDARAKWRKRKRNANTSAADHSDDSDSAVAAAANDDNDDDDAALHAGTAAVNGGGGTLGGGDDDPVVDLREAEVHPTAIERVSAFPPAFRRVVNRLHPSVLAVMAAERAAAAAGAGAGGGGAAVPALENISHGQLQVLSSVLPDHPSLSNDPDKPSSYVCTPPLLMECRGVAKQFDGKLLMVPKHSDWFLPMTVHRLERQVLPQFFSGKSPGHTPEKYIMLRNRVITTYLERPARRLAFSECQGLVTSTPELYDLSRIVRFLDAWGIINYLAAGSVQRGLRMAATLIREEPTGELHLMSAPLKSIDGLILFDRPKCSVRAEDIASGASLSSSPGMENGDAGFDEKTLLERLSESFCSFCAQPLPSLHYESQKEADIALCSDCFHDARFVTGHSSLDFQRVDGKKDGLDNDGDSWTDQETFLLLEGIDKYKENWNAVAEHVGTKSKIQCLHHFLRLPVEDGLLENIKVPEASFSSKFWLMQNASGSVFKLPQLFALGSLPQSGEAGDLPFINTANPVMSLISIMSLALLFRDDLQIAFLASSLGPRVAASCASEALIVLTGGDSRISSIGNDVMGHAARPNCGDYLIPKINSSLAVSSENVRHAARCGLSAAATKCKLFADQEEREIQRLSATIINHQLKRLELKLKQFADIETYLLRDSEQSERMRQGLQAQRIRMMSGLRLASPRGNTMASNPLSQANIRPPGIPGSMPQAGTPAFYSNNMQVHPQMAFLQQQMQQQQQKQQQQQQMQLQQQQQQMQLQQQQQRQAFLQQQQQQMQQQQQQLQQQQQRQLQMLSFGGRLPLSAMNAPSTSAAPNVMFDNPDMPGPSNQG

SEQ ID NO: 17300 - protein, 641 aa, Oryza sativa
  Clone ID: TF_OSC21652j.C1.p1.fg
MALHLTRPFLRPSPPPPRPTRRSSRAHCLAPSASARGPSFRRPYTSVLVVPTGVGAAVGGFAGDALPVARALGAVADCVISHPNVLNAAMLYWPMPNTLYVEGYALDRFAEGSWALQPVHQNKVGLVLDSGIEEELRLRHLQVADAARASLGLPVVEYIVTDTPLEIKTWFDPKCGKSTGSVGNSDSLLRAVEALVNRSDVNAVAVVARFPDDDPEDSDCYREGKGVDLLAGVEAIISHLIVKKFKIPAAHAPAVLPPVLSLSVSPRSAAEEIGHTFLPCVLAGLSNAPQYVMRRNGNMDNGCIVASDVDSVILPKDACGGDGTIAFARTATKNKPLIITVQENETVLDDTPDKFNIEALNVQNYWEAIGVIAAHKAANARAYASTVLVQLAPDLLLIYCSFLSGAPLEISISRMLTYQLVWVKNSGKIVFGYLKFQKFEAGIWNPHRIALCSIRILVFSASLQVSSQPPPRLISEHLPAGDPPSPLSRSRKRRSFSEEEDELLLKLHALLGNRWSLIAGRLPGRTDKEVMNHWNSKLMDSTIEHPPSLHDDEHRRRRRRLRSEAHDERGAKHPGHNSSSSSKDVNGDECTVADDASSCNHQDDNRAVAELNLELTLSTPCIYLLLGQDREDGSKSNQGLI

SEQ ID NO: 17301 - protein, 547 aa, Oryza sativa
  Clone ID: TF_OSC400850j.C1.p64.fg
MPNTLYVEGYALDRFAEGSWALQPVHQNKVGLVLDSGIEEELRLRHLQVADAARASLGLPVVEYIVTDTPLEIKTWFDPKCGKSTGSVGNSDSLLRAVEALVNRSDVNAVAVVARFPDDDPEDSDCYREGKGVDLLAGVEAIISHLIVKKFKIPAAHAPAVLPPVLSLSVSPRSAAEEIGHTFLPCVLAGLSNAPQYVMRRNGNMDNGCIVASDVDSVILPKDACGGDGTIAFARTATKNKPLIITVQENETVLDDTPDKFNIEALNVQNYWEAIGVIAAHKAANARAYASTVLVQLAPDLLLIYCSFLSGAPLEISISRMLTYQLVWVKNSGKIVFGYLKFQKFEAGIWNPHRIALCSIRILVFSASLQVSSQPPPRLISEHLPAGDPPSPLSRSRKRRSFSEEEDELLLKLHALLGNRWSLIAGRLPGRTDKEVMNHWNSKLMDSTIEHPPSLHDDEHRRRRRRLRSEAHDERGAKHPGHNSSSSSKDVNGDECTVADDASSCNHQDDNRAVAELNLELTLSTPCIYLLLGQDREDGSKSNQGLI

SEQ ID NO: 17302 - protein, 385 aa, Oryza sativa
  Clone ID: TF_OSC25059j.C1.p1.fg
MAGGGGSLAVGGGLNGWRGVSGSVGAAGLEEGSGPAWWRGHLTANGSRMKKGGGSRRHAIPTGEAVGGGGAVVGIDGEAAVLREGGGEEGAVDAGGGPMLVAYVQEHGPGNWRAVPTNTGLMRCSKSCRLRWTNYLRPGIKRGNFTDQEEKLIVHLQALLGNRWAAIASYLPERTDNDIKNYWNTHLKKKLKKMSATGGGGDYGEGGGAGEVKTRAAAPKGQWERRLQTDIHTARQALRDALSLDPSPPAKPLDSSSGATAPPSSQAATSYASSAENIARLLEGWMRPGGGGGKTTTTPSSGSRSSAASVLYGEASHSGGATAPTPDGSTVTSKTKDEETAGAPSSSPPPAFSMLESWLLDDGMGHGEVGLMDVVVPLGDPSEFF

SEQ ID NO: 17303 - protein, 200 aa, Oryza sativa
  Clone ID: TF_OSC401857j.C1.p12.fg
MAADGGDGSGGGRKTPWTQEEDEALRRAVREHRRQNWAEIALALPRRGPKSCRLRWCQHLSPELDSRVFTAEEDAIILAQQRVHGNKWATIARCLPGRYDNAVKNRWNSALRKLLQVQHASGAGSPPAAAAAAAGDDRDDAPVCLQLFPARAGGVKEAGLFAGEKDVEEEDVATSLTLGLPVLCEAELELRLGPAWPATA

SEQ ID NO: 17304 - protein, 237 aa, Oryza sativa
  Clone ID: TF_OSC900016j.C1.p36.fg
MVTVREEMRKGPWTEQEDLQLVCTVRLFGDRRWDFVAKVSGLNRTGKSCRLRWVNYLHPGLKHGRMSPKEEHLIIELHARWGNRWSRIARRLPGRTDNEIKNYWRTHMRKKAQERRGDMSPSSSSSSLVYQSCLLDTVPIISMDGGDIHDDRSCMARVLKSTQSVMDGYTMDQIWKEIEAPGAPSLLGIDEGKDKACSNLPCPLLTSTMSDYSCPEVFWKIDNEETRMLATQSGYGK

SEQ ID NO: 17305 - protein, 394 aa, Oryza sativa
  Clone ID: TF_OSC21498j.C1.p1.fg
MHESDSDPDSDRTHWYMSNSDDESFVDKDKDCRRSTVALLLKKGPWTSWEDSILEKYIKKHGERNWKLVQKNTGLLRCGKSCRLRWMNHLRPNLKKGAFSKEEENKIINLHRKMGNKWSRMAADLPGRTDNEIKNYWNTRIKKCKNNRSPLYPANVCNDALNEDQHESADPNVREKLTNNHLEDTTSMYSAPQFSDASISNILDRRLASKDYDSIEDQRNQIEVVAKYEIPLPVLKTTNNDIFPSASIFANHGISNGNLSALSTTDALQMELPLIQFDPNNQFVYSRAYAMHLTNFALLNDQSEELLNDTDVLNYVVMKEELSGGSLSPTINMPCEAHNSMAASNELVVPQYEGDAPPLQDDFTSYFYLNDTNLSIFEDTNELFLENKLDTKGN

SEQ ID NO: 17306 - protein, 1089 aa, Oryza sativa
  Clone ID: TF_OSC900288j.C1.p6.fg
MDRASNFIPGPYQELVDAKPIRSLAPMFPAPLGINVNQSSTPPLVCVTPVGQFPVGFGSGILPTFGSTTAFTTTANGVSYTSYTNNGAIDATPISAYKTRPGIVSLDGDEPYSGSASGRKSKRSSGSAADGSNGVKFKRPKPVYKNFVAGKELAFLPPSSSDPREVVEAVHMTFEALRRRHLQLDEIQETSKRADLKAGAIMMASNIRANVGKRVGLVPGVEIGDIFYFRMELCIIGLHAPSMGGIDYMSAKFGSDEDSVAICIVAAGGYENVDDDTDTLVYSGSGGNSRNSEERHDQKLERGNLALERSLHRKNEIRVVRGFRDPFCLTGKIYIYDGLYKIQESWKERTKSGINCFKYKLLREPGQPDGAALWKMTQGWIDNPASRGRVILPDLSSAAEALPVCLVNEVDHEKGPGHFTYASQVKYLRPLSSMKPLQGCGCQSVCLPGDPNCACGQHNGGDLPYSSSGLLACRKPIIYECGDACHCTTNCRNRVTQKGVRFHFEVFRTANRGWGLRCWDPIRAGAFICEYTGEVIDELKVNLDDSEDDYIFQTVCPGEKTLKFNFGPELIGEESTYVSADEFEPLPIKISAKKMGNVSRFMNHSCSPNVFWQPVQHDHGDDSHPHIMFFALKHIPPMTELTFDYGVAGSESSELPACTPRFELWYYSLRMTMGFNMNCEETVTFLSKCTCRSLMMHESDSDPDSDRTHWYMSNSDDESFVDKDKDCRRSTVALLLKKGPWTSWEDSILEKYIKKHGERNWKLVQKNTGLLRCGKSCRLRWMNHLRPNLKKGAFSKEEENKIINLHRKMGNKWSRMAADLPGRTDNEIKNYWNTRIKKCKNNRSPLYPANVCNDALNEDQHESADPNVREKLTNNHLEDTTSMYSAPQFSDASISNILDRRLASKDYDSIEDQRNQIEVVAKYEIPLPVLKTTNNDIFPSASIFANHGISNGNLSALSTTDALQMELPLIQFDPNNQFVYSRAYAMHLTNFALLNDQSEELLNDTDVLNYVVMKEELSGGSLSPTINMPCEAHNSMAASNELVVPQYEGDAPPLQDDFTSYFYLNDTNLSIFEDTNELFLENKLDTKGN

SEQ ID NO: 17307 - protein, 329 aa, Oryza sativa
  Clone ID: TF_OSC900032j.C1.p1.fg
MDMAHERDASSEEEVMGGDLRRGPWTVEEDLLLVNYIAAHGEGRWNSLARSAGLKRTGKSCRLRWLNYLRPDLRRGNITPQEQLLILELHSRWGNRWSKIAQHLPGRTDNEIKNYWRTRVQKHAKQLKCDVNSQQFKDVMRYLWMPRLVERIQAAAAGQQQQQEGGTDTPPLSWQHGGSDGLYESPELPAPDASCWPAEYCAAAGGAQSGGTPAPELSSTTAGSSSLSTDSGAGAQPSWPTQADGAEWFTTACDASSATGGVAMRDTELELAQPPCQGGQTWTTSESSLPGLTFPDLAVADFEIGGFDVDSFWTSMEDDQLWCPTQAAV

SEQ ID NO: 17308 - protein, 359 aa, Oryza sativa
  Clone ID: TF_OSC400549j.C1.p10.fg
MGHHSCCNQQKVKRGLWSPEEDEKLIRYITTHGYGCWSEVPEKAGLQRCGKSCRLRWINYLRPDIRRGRFTAEEEKLIISLHAIVGNRWAHIASHLPGRTDNEIKNYWNSWIKKKIRKPAAAAAAATTTSPNNPPPCSTATSDHHHLPPPAFGGADHHLQLDAIINQNLISSLPPKLATGDDSPPAVPGLPHHCPLFMFDTTTTGAGGAISPPPPSSLIPTHLHHHHHPFIASFTAAMAADTPSYLPPLVDGMAAMGAAMDCSLEDGQTAAAMAATNGYYQHHQKHQQLEIELEEEEQRQLGHHHHQHHHEHEHENHQWDEEEAQHLLMWDQEVLTSSNLEAMQSGAHSLLFMGPNDHD

SEQ ID NO: 17309 - protein, 342 aa, Oryza sativa
  Clone ID: TF_OSC401661j.C1.p13.fg
MAKRAGGARKKLRRGLWSPEEDEKLMNHIAKYGHGCWSSVPKLAGLERCGKSCRLRWINYLRPDLKRGAFSQEEEDLIIHLHSMLGNKWSQIAAQLPGRTDNEVKNFWNSYIKKKLRQRGIDPATHKPLAEVVAAAACARTPAVFSDAELILSSIGAQPPPESYDGSRYSTECGAASVGGDGSLSSLSGYSQATAEFAVDGASASALLHCGGGGPTSSGGGAPPAPTAAVIPSVSSSSTLNSMVGLSPAATTTTTTTDEQYGNTNHLPWLELGPSTTTPSSSAAAATFDHYGAALDELKWSDYVFDGYNHQLPPYNHGGIYGGGDSKDTAVHFDAHALGNWC

SEQ ID NO: 17310 - protein, 358 aa, Oryza sativa
  Clone ID: TF_OSC401363j.C1.p3.fg
MQRECIVSGPIDGSISATGDGARRGVGGMRGHRSRVRGDGGLRMHRSGSDPDSDKAHWYMSNSDDESFVDKDKDCRRGTVAPLLKKGPWTSWENSILEKYIKKHGERNWKLVQKNTGLLSFCITRRTDNEIKNYWNTRIKKCKNNRWLLYPANVCNDALNEDQYGSVDPSVREKLTNNQLEDTTSMYSAPQFSYASISNILDRRLASKDYDSIEDQRNRIEVAAEYEISLPVLKTTNNDIFPSASIFANHGISNGNLSALSTTDALQMELPLIQFDPNNQFIYSRDYATHLTNLALLNDQAEELLNHIDVLNYVVMKKELSGGSLSPTINMPCKATAYSSELPLCKGYREQDLDFYTQ

SEQ ID NO: 17311 - protein, 323 aa, Oryza sativa
  Clone ID: TF_OSC401373j.C1.p1.fg
MSYNLKQRMHRSGSDPDSDKAHWYMSNSDDESFVDKDKDCRRGTVAPLLKKGPWTSWENSILEKYIKKHGERNWKLVQKNTGLLSFCITRRTDNEIKNYWNTRIKKCKNNRWLLYPANVCNDALNEDQYGSVDPSVREKLTNNQLEDTTSMYSAPQFSYASISNILDRRLASKDYDSIEDQRNRIEVAAEYEISLPVLKTTNNDIFPSASIFANHGISNGNLSALSTTDALQMELPLIQFDPNNQFIYSRDYATHLTNLALLNDQAEELLNHIDVLNYVVMKKELSGGSLSPTINMPCKATAYSSELPLCKGYREQDLDFYTQ

SEQ ID NO: 17312 - protein, 207 aa, Oryza sativa
  Clone ID: TF_OSC101345j.C1.p9.np
LAGSQGESPAMLHPNGDGDGDGGDDEGDASGGEEEQGGGIPLKKGPWTPDIPLKKGPWTPDEDKRLREYVEAHGEGNWNRVQRNAGLNRCGKSCRLRWANHLKPDLKKGPFSKEEEEMIIKLHLWLGNKWAKMANSLPGRTDNEIKNFWNTRCKRIQRTGEPLYPKELVDRSGSDCESPDESRAKKRTNEVLQGNGQSYKEVFFDNF

SEQ ID NO: 17313 - protein, 358 aa, Oryza sativa
  Clone ID: TF_OSC400850j.C1.p69.fg
MSQRRVAGPMGVMSKQQQEAMAEEMMELRRGPWTLEEDNLLMNYIACHGEGRWNLLARCSGLKRTGKSCRLRWLNYLKPDIKRGNLTPEEQLLILELHSRWGNRWSRIAQHLPGRTDNEIKNYWRTRVQKQARQLKVDANSTVFRDAVRCYWMPRLLEKMAGAATDPTPPPPPPLHHHAAMATASSSPFDFDTHLQQAEAATACVVPNNVYHHHIDPSPSTSTSAGSTAAAAAFQPLPCFSELRWDQQMQSSGELDDGAAGVFVDSASALGSLSLDGLDLGPAEYYSDSTLLDYLNSSCTGSAMMTMMTASGNAGSYNYCGGAMDGGDTWRSDELMDELFHHIDQDRSTSDRSSKNQK

SEQ ID NO: 17314 - protein, 300 aa, Oryza sativa
  Clone ID: TF_OSC900070j.C1.p1.fg
MAASQRSRSTAAQLDVDDQAAADQLMTMMRRPAAVLQDEAAAEEEASAAAADLQLELRRGPWTVDEDLTLVNYIADHGEGRWNSLARAAGLKRTGKSCRLRWLNYLRPDVKRGNFTADEQLLILDLHSRWGNRWSKIAQHLPGRTDNEIKNYWRTRVQKHAKQLNCDANSARFKDAMRYLWMPRLADASQLGDHHGYNSTTAMGDAHGMPVMTSSSSDSFATSESYDGGLYANVQDNEMVNGGDYWMQGANKGFCSNYESEQLHPHEHSQFQDPDLVGWVQGFSEGISENFWSLEDIWKM

SEQ ID NO: 17315 - protein, 162 aa, Oryza sativa
  Clone ID: TF_OSC401693j.C1.p25.gm
MDQEVIMATPPLTPPPRARSCRDRWRHHLARDVYHRPFTAREDDELLRLHYRLGDRWKEIGRAVYGRTSRVMKHRWRELRRGGFPAAATRKEQAPAMDADDMVESEMEESDQSLPPLTKKAELQLVYRSFIGEISLNLRLGKFDITAKPLAYPTPYRFDGAV

SEQ ID NO: 17316 - protein, 285 aa, Oryza sativa
  Clone ID: TF_OSC102044j.C1.p20.fg
MGMEAECDRIKGPWSPEEDEALRRLVERHGARNWTAIGRGIPGRWSAARSRRRRTPRYSGRTPASATAGAAIARLLPGRTDNAVKNHWNSSLKRKLATATDGGEIDRPCKRVSPGPGSPTGSERSELSHGGCGSGSGGGQVFRPVPRPGGFDAISAADVVRPPRRRDDNDDDGDDDPLTSLSLSLSLPGFHHDSARSHFQELPSPSRSPSPPPSPPAASPSAYPFNADLVSAMQEMIRTEVRNYMAGVGLRAGCGPGAVAESFMPQLVDGVMRAAAERVGVVTRQ

SEQ ID NO: 17317 - protein, 256 aa, Oryza sativa
  Clone ID: TF_OSC20253j.C1.p1.fg
MENKDTTEKARLLSGALSKEGSSGTSNEGKKIQANGVDGSKAKSTSSGEKVTQGNTLSNYEKKEEKPWGREEIELLRKAIQKYPKGTSRRWEVVSEFIGTGRSVEEILKATKTVLLQKPDSTKAFDSFLEKRKPAPSIASPLSVRTETVGLPTEKAAGNASSKAPAQHASSKTSDEKAAAPAPAPVSNGTPSGTADPEAWSEAQVLALVQALKAFPKDASQRWERVAAAVPGKTMVQCKKKVAEMQKNFRSKKSAE

SEQ ID NO: 17318 - protein, 449 aa, Oryza sativa
  Clone ID: TF_OSC900266j.C1.p3.fg
MSASASAACLLPPRGGSLARPDTALPPASQPATVAVKQNIPRLASPRLAVTSITLLPRRGRRCAVDLLLLHLHRLLLFLSLFSEETPNLFLPRKPAAFLKRIKSPSLIRRRNPSPQNLAAPRAVLGFELMAVEEASSSSGGGRGGGGGGGGEEGLSGCGGGWTREQEKAFENALATVGDDEEEGDGLWEKLAEAVEGKTADEVRRHYELLVEDVDGIEAGRVPLLVYAGDGGVEEGSAGGGKKGSAGGGGGGGGGGGHGEKGSAKSAEQERRKGIAWTEDEHRLFLLGLEKYGKGDWRSISRNFVISRTPTQVASHAQKYFIRLNSMNRERRRSSIHDITSVNNGDTSAAQGPITGQPNGPSANPGKSSKQSPQPANAPPGVDAYGTTIGQPVGGPLVSAVGTPVTLPVPAAPHIAYGMHAPVPGAVVPGAPVNMPPMPYPMPPPTSHG

SEQ ID NO: 17319 - protein, 383 aa, Oryza sativa
  Clone ID: TF_OSC403211j.C1.p2.fg
MTRDGALPASGGGGAAEGPRRCSQCGHHGHNARTCTARGPVKLFGVRIGDKPPTAAAGGGGGMRKSASMGSLAQLAEGGGGGGGREEGYGSDGNDDKRRKRGEAWSEEEHKKFLLGLSKLGKGDWRGISRNYVGSRTPTQVASHAQKYFIRQTNVHRRKRRSSLFDMVIDDSDDQPLSRTSSQEVEVEENLEDGHPVTAPVIPPAPVPMLSSSLVPPPVPAMAPVAPGPVLTSASATLPVSAVAPQTDEKEQVASGSNTTETGAAIPEVMPPYGYPMMLPPYYPPAFVPMPYYGYVPVFYAPPGAVQAQHEVVKPVAVHSKPPVHIDELYSMSELSLKGEAGVKNGTPNSLLPPRPIGRPDRQSAFHGKGPSDGSSNGLIPAK

SEQ ID NO: 17320 - protein, 439 aa, Oryza sativa
  unsure (1)..(439): unsure at all Xaa locations
  Clone ID: TF_OSC401545j.C1.p8.np
HSQIQXEFGFVRTYMHVYTSSQEQQSNVDHAQWTMGSNFQILVGPLLHHVERCHATKAHHHKWTKSPHKLISVMCMMATAAQCPHLHAHRNEFHVSSFSACPGRIHDNSVNKKAYFNRQQNGHQELHLVDHHSTMSLTAMNTILHLLVDLFFPLQPTMMAMSTTLKEEKRMLSSSIGLRRIRKASPHLPLFTPKSEVSASGKSLKKANVVKASGKSLKKANVVKGQWTLEEDRKLVKLVEQFGLRKWSHIAQILPGRVGKQCRERWHNHLRPNIKKDTWSEEEDIVLIQTHKEVGNKWAEIAKHLPGRTENSIKNHWNATKRRQFARRRSRASSKNPKSGTLLQNYIKSLGIGPIKSSVRQAPPESTAVSSSSPASTQKLAEVNGKIRPDSNPSNQMVTQGILTMDENSYIQTNSCEELLVSTYDDLCLDMCDHLFETK

SEQ ID NO: 17321 - protein, 321 aa, Oryza sativa
  Clone ID: TF_OSC19368j.C1.p1.fg
MGRPPCCDKVGVKKGPWTPEEDLMLVSYIQEHGAGNWRAVPTNTGLMRCSKSCRLRWTNYLRPGIKRGNFTEQEEKLIVHLQALLGNRWAAIASYLPERTDNDIKNYWNTHLKKKLKKMQAAEGGEDSGAASEGGGGRGDGDGGGKSVKAAAPKGQWERRLQTDIHTARQALRDALSLDHPDPSPATAAAAATPAGSSAAYASSADNIARLLQGWMRPGGGGGGNGKGPEASGSTSTTATTQQQPQCSGEGAASASASASQSGAAAAATAQTPECSTETSKMATGGGAGGPAPAFSMLESWLLDDGGMGLMDVVPLGDPSF

SEQ ID NO: 17322 - protein, 321 aa, Oryza sativa
  Clone ID: TF_OSC900251j.C1.p1.fg
MGRPPCCDKVGVKKGPWTPEEDLMLVSYIQEHGAGNWRAVPTNTGLMRCSKSCRLRWTNYLRPGIKRGNFTEQEEKLIVHLQALLGNRWAAIASYLPERTDNDIKNYWNTHLKKKLKKMQAAGGGEDSGAASEGGGGRGDGDGGGKSVKAAAPKGQWERRLQTDIHTARQALRDALSLDHPDPSPATAAAAATPAGSSAAYASSADNIARLLQGWMRPGGGGGGNGKGPEASGSTSTTATTQQQPQCSGEGAASASASASQSGAAAAATAQTPECSTETSKMATGGGAGGPAPAFSMLESWLLDDGGMGLMDVVPLGDPSF

SEQ ID NO: 17323 - protein, 260 aa, Oryza sativa
  Clone ID: TF_OSC900240j.C1.p12.fg
MGRSPCCEKAHTNKGAWTKEEDQRLIAYIRAHGEGCWRSLPKAAGLLRCGKSCRLRWMNYLRPDLKRGNFTDDEDELIIRLHSLLGNKWSLIAGQLPGRTDNEIKNYWNTHIKRKLLARGIDPQTHRPLLSGGDGIAASNKAAPPPPHPISVPAKAAAAAIFAVAKPPPPPRPVDSSDDGCRSSSGTTSTGEPRCPDLNLELSVGPTPSSPPAETPTSARPVCLCYHLGFRGGEACSCQADSKGPHEFRYFRPLEQGQYI

SEQ ID NO: 17324 - protein, 78 aa, Oryza sativa
  Clone ID: TF_OSC401122j.C1.p79.fg
MDSSSGSQGKNSKTSDGCETKEVNNTAQNFVHFTEEEEDLVFRMHRLVGNRWELIAGRIPGRTAKEVEMFWAVKHQNT

SEQ ID NO: 17325 - protein, 310 aa, Oryza sativa
  Clone ID: TF_OSC900203j.C1.p13.gm
MGRRACCAKEGMKRGAWTSKEDDVLASYIKSHGEGKWREVPQRAGLRRCGKSCRLRWLNYLRPNIKRGNIDDDEELIVRLHTLLGNRLPGRTDNEIKNYWNSTLSRKIGTAATAAAGSRGGSTPDTARATDAASSSSVVPPGQQQQPASRADTDTATAAAAAAATTTTVWAPKAVRCTRGFFFHDRETAPLAAAAPAPAGELGDGDDVDCDYYCSGSSSAATTTSSSSLPAVVEPCFSAGDDWMDDVRALASFLDTDDAWNLSRGVAAAAVAPPDPRVGWPPLDLPQPSRATSSSTPLSCPTTFSSPLSP

SEQ ID NO: 17326 - protein, 227 aa, Oryza sativa
  Clone ID: TF_OSC100886j.C1.p2.fg
MPDQRRGTTALLPTARHGPAASDRHHSASAARRDAAATRPATSVAAANTLVSSSLIEIESTHTPPTTGRPPRTGEQDGEAAVLRQGWVKKGPWTPEEDLMLASYIQEHGSGNWRAVPTNTGVMRCSKSCRLRWTNYLRPGIKRGNFTEQEEKLIVHLQALLGNRRDHMEVISPMKDGTFIDWDIVDNIWNHAFSFYPEEHPMLIVEPSTNTGQQREKYLLTLKIMKA

SEQ ID NO: 17327 - protein, 377 aa, Oryza sativa
  Clone ID: TF_OSC900148j.C1.p12.fg
MGRAPCCDKATVKKGPWAPEEDAALKAYVDAHGTGGNWIALPHKIGLNRCGKSCRLRWLNYLRPNIRHGGFTEDEDRLICSLYIAIGSRWATIAAQLPGRTDNDIKNYWNSKLKRRLLGGGRRPRGAPPRLVLAGPGPAVTAAATSRNAMAASAIERMQLSVRLRRLEAAAPPPPQPFTFYGSNNLAAPPWQQPISPAAGGSSEMPRRLHHHHPSGAAATSSYSGLISSWPSSRSHIIHDAWLDASSTPPLSTTSMGDAATTTTTAGGESSSSTPTVSTATTPFIGGSIDMDDEIDMLLQQIRCFDENGDDGDDDADQRLIVGDEAAAGAENYLRALIDEAAANGGDVGVGSWSSCSTPGVDSVFHEYAQLDYGQYN

SEQ ID NO: 17328 - protein, 2359 aa, Oryza sativa
  Clone ID: TF_OSC24631j.C1.p2.fg
MGRSPCCEKAHTNKGAWTKEEDQRLIAYIKANGEGCWRSLPKAAGLLRCGKSCRLRWINYLRPDLKRGNFTEEEDEFIIKLHELLGNKWSLIAGRLPGRTDNEIKNYWNTHIKRKLLARGVDPQTHRPLNAAADHHQQQQLQAPRRFAAAPAGHHHHHPDHFAVLSNSPEACSHSSDDEPSSATPPPPPRHLGIDLNLSISLAPYQPQDQTSEPMKQEEDDEASATANGAGNAAMTTTATTAAVCLCLNRLGLHGGEVEMDRQWMYADRRSKEFIDGVHYFLRVAEANRQRGFICCPCNKCKNQKEYSASRTIHFHLFESGFMPSYNCWTSHGEQGVEMEEDEVEDDNIPDFAQYVGFEGNQTGEEEIAADGNDVADDLGQMLQDAREDCESEKEAHKLDKMLEDHRNSLYPGCEQGHKKLDTTLELLQWKAKNGVSDKAFGDLLKLVKNILPGGNKLPETTYEAKKIVCPLGLEVHKIHACPNDCILYRGEEYENLEACPVCKALRYKIRRDDPGEVNGQLTKKRIPAKVMWYFPIIPRLRRLFRNKGNARMLRWHAEERQQDGMLRHPADGSQWRNIDRKFKEFGKDARNIRFGPKQPGNDIDVYLRPLVEDLKQLWKKEGVPVWDEDKQEEFNLRALLFVTINNWPALSNLSGQSNKGYKACTHCMDETESTYLKHCRKVVYMGHRRFLAANHPVRKKGKHFEHKADHRTKPKHRSGKTVFAMVKDLKVVFGKGPGSQHIESEDGHAAMWKKNSIFWELPYWEFLDVRHAIDVMHLTKNLCVNLLGFLGVYGKSKDTLEARNDLKHMEQRGDLHPEPKEKGSHYLSPASYTLSKAEKESMFECLESIKVPSGYSTNIKRIISTKEKKFTNLKSHDCHVLMTQLLPVVIRGILPDNVRATITKLCAFMNAISQKVIDPDRLEALQNEVVQCLVSFELIFPPSFFNIMTHLLCHLVKEIRILGPMYLHNMFPFERYMGVLKKYVRNRARPEASIAKGYGTEEVIEFCVEFIEDLRPIGVPESRHEGRLRGKGTLGRKAIMTVDNNLFRKAHFTVLQHSSLVAPYIEEHLALVRARNIGKSDAWITRHHIDTFPAWLRQHLMGNESINQQLAFLARGPSGSIATFQGYEINGYTFYTRAQDMKSTNQNSAVRVDAMGHDGTTATYYGAIEDIWELDYGPLKVPLFRCQWVRLTGGGVMIDDSGMTTVDLNKVGYSDEPFVLANDVTQVFFVKDMSSKGKKGRGPDEPKRQVVLPGKRKIVGVEDKTDEDYDQLDGQPPFTVTIDPSILLSNEDTPYSRSDHKEGTIMADRDEEQILYDTIAEGSSQYWNEEEGNEDPNQYLNEEGNVERDAEGNQQGHVERDVEGNQEEEASGSQPSVGQKRARGQRGAAKKLEGRHIITEVEEDGRPSAPAEAAKNYVRHSGWVVRDNVPVSTVYWRRTRARGDHESFVQDSEKEMLWTTMLETFTLPAGTEDKVKRWTLKKMAEQFQSFKGDLYQKYILKGQTPNFDTFPKLRDHWDEFVAYKTGEQGKAMMERNKENAAKKKYHHHLGSGGYSVAMPKWEQMEASLIERGIEPATANWPERSKFWYYAHGGTLNPADGSLVFGYQIQEAVRRLTDAVEASSQGTFRPDRDRDELTLALQTPEHPGRTRGKGVIPWKIGFKEDIHTYRSRIRSKRDTEAKIADLEFRVSSYELNMQEEVARKVDERMAAHRSHDPQPTIPPAMVSPSGNRSSCASTGQVGSQSMDAMQTQDESTCPVDDITQRTPCELHIPFKNLSIKVASGMAIPTDPSGTYHCRPIPAGYSKVEVELVEGAYEDLELDYPGGDGETHLRDTCHAIILWRRRYIILPGRQAASRAPSPPAPPSPPQDPAPSPPHAPPAPSPPQAPASTPQDPAPTPPRAPTPTPPQAPVPAPSKSRAPPAPPLAHTRATKKAKVDAAKNKDPGYDCTQEELDAYVASEVKRQFKPRSPEKKIPIDPSVRNFFRGMSASVKEAIKLSDYEQTLKKASSGKSKPVPQLGEQPNQEIEPLVTGKEMTIEQFITDTGLTTDQLLGVAPIEKAEVKYMYELGKPLVKPELLQSLPTQMYKFHQLYMEMSATGREMIGARIRDTDFLQGDDILWINFRGIYELYQLDALDVSIMSCWILMEIQRARRRRVFDTGFIDPRKVNVAMLDQYPQETEDNLVHLLKAQHYKTFILLPYNTEFHWVLLLIDLEACTVNVYDSMDKKESTFDKVFELIDRAWYRFRHLVRGKWRERLRRKFKFPCAKQKQGTNLCGYYVCEYCHCLADQIITTRELDFIRMRDNLTTHKEFIAAVQEQLMGFINEEILDPKGEFYYDGNTIHRSLASELAASTTTSKS

SEQ ID NO: 17329 - protein, 261 aa, Oryza sativa
  Clone ID: TF_OSC26269j.C1.p1.fg
MGRSPCCEKAHTNKGAWTKEEDQRLIAYIKANGEGCWRSLPKAAGLLRCGKSCRLRWINYLRPDLKRGNFTEEEDEFIIKLHELLGNKWSLIAGRLPGRTDNEIKNYWNTHIKRKLLARGVDPQTHRPLNAAADHHQQQQLQAPRRFAAAPAGHHHHHPDHFAVLSNSPEACSHSSDDEPSSATPPPPPRHLGIDLNLSISLAPYQPQDQTSEPMKQEEDDEASATANGAGNAAMTTTATTAAVCLCLNRLGLHGGEPRPE

SEQ ID NO: 17330 - protein, 2406 aa, Oryza sativa
  Clone ID: TF_OSC900391j.C1.p27.fg
MGRSPCCEKAHTNKGAWTKEEDQRLIAYIKANGEGCWRSLPKAAGLLRCGKSCRLRWINYLRPDLKRGNFTEEEDEFIIKLHELLGNKWSLIAGRLPGRTDNEIKNYWNTHIKRKLLARGVDPQTHRPLNAAADHHQQQQLQAPRRFAAAPAGHHHHHPDHFAVLSNSPEACSHSSDDEPSSATPPPPPRHLGIDLNLSISLAPYQPQDQTSEPMKQEEDDEASATANGAGNAAMTTTATTAAVCLCLNRLGLHGGEVEMDRQWMYADRRSKEFIDGVHYFLRVAEANRQRGFICCPCNKCKNQKEYSASRTIHFHLFESGFMPSYNCWTSHGEQGVEMEEDEVEDDNIPDFAQYVGFEGNQTGEEEIAADGNDVADDLGQMLQDAREDCESEKEAHKLDKMLEDHRNSLYPGCEQGHKKLDTTLELLQWKAKNGVSDKAFGDLLKLVKNILPGGNKLPETTYEAKKIVCPLGLEVHKIHACPNDCILYRGEEYENLEACPVCKALRYKIRRDDPGEVNGQLTKKRIPAKVMWYFPIIPRLRRLFRNKGNARMLRWHAEERQQDGMLRHPADGSQWRNIDRKFKEFGKDARNIRFGLSTDGMNPFGEMSSGHSTWPVTMCIYNLPPWLCMKRKYIMMPIIIQGPKQPGNDIDVYLRPLVEDLKQLWKKEGVPVWDEDKQEEFNLRALLFVTINNWPALSNLSGQSNKGYKACTHCMDETESTYLKHCRKVVYMGHRRFLAANHPVRKKGKHFEHKADHRTKPKHRSGKTVFAMVKDLKVVFGKGPGSQHIESEDGHAAMWKKNSIFWELPYWEFLDVRHAIDVMHLTKNLCVNLLGFLGVYGKSKDTLEARNDLKHMEQRGDLHPEPKEKGSHYLSPASYTLSKAEKESMFECLESIKVPSGYSTNIKRIISTKEKKFTNLKSHDCHVLMTQLLPVVIRGILPDNVRATITKLCAFMNAISQKVIDPDRLEALQNEVVQCLVSFELIFPPSFFNIMTHLLCHLVKEIRILGPMYLHNMFPFERYMGVLKKYVRNRARPEASIAKGYGTEEVIEFCVEFIEDLRPIGVPESRHEGRLRGKGTLGRKAIMTVDNNLFRKAHFTVLQHSSLVAPYIEEHLALVRARNIGKSDAWITRHHIDTFPAWLRQHLMGNESINQQLAFLARGPSGSIATFQGYEINGYTFYTRAQDMKSTNQNSAVRVDAMGHDGTTATYYGAIEDIWELDYGPLKVPLFRCQWVRLTGGGVMIDDSGMTTVDLNKVGYSDEPFVLANDVTQVFFVKDMSSKGKKGRGPDEPKRQVVLPGKRKIVGVEDKTDEDYDQLDGQPPFTVTIDPSILLSNEDTPYSRSDHKEGTIMADRDEEQILYDTIAEGSSQYWNEEEGNEDPNQYLNEEGNVERDAEGNQQGHVERDVEGNQEEEASGSQPSVGQKRARGQRGAAKKLEGRHIITEVEEDGRPSAPAEAAKNYVRHSGWVVRDNVPVSTVYWRRTRARGDHESFVQDSEKEMLWTTMLETFTLPAGTEDKVKRWTLKKMAEQFQSFKGDLYQKYILKGQTPNFDTFPKLRDHWDEFVAYKTGEQGKAMMERNKENAAKKKYHHHLGSGGYSVAMPKWEQMEASLIERGIEPATANWPERSKFWYYAHGGTLNPADGSLVFGYQIQEAVRRLTDAVEASSQGTFRPDRDRDELTLALQTPEHPGRTRGKGVIPWKIGFKEDIHTYRSRIRSKRDTEAKIADLEFRVSSYELNMQEEVARKVDERMAAHRSHDPQPTIPPAMVSPSGNRSSCASTGQVGSQSMDAMQTQDESTCPVDDITQRTPCELHIPFKNLSIKVASGMAIPTDPSGTYHCRPIPAGYSKVEVELVEGAYEDLELDYPGGDGETHLRDTCHAIILWRRRYIILPGRQAASRAPSPPAPPSPPQDPAPSPPHAPPAPSPPQAPASTPQDPAPTPPRAPTPTPPQAPVPAPSKSRAPPAPPLAHTRATKKAKVDAAKNKDPGYDCTQEELDAYVASEVKRQFKPRSPEKKIPIDPSVRNFFRGMSASVKEAIKLSDYEQTLKKASSGKSKPVPQLGEQPNQEIEPLVTGKEMTIEQFITDTGLTTDQLLGVAPIEKAEVKYMYELGKPLVKPELLQSLPTQMYKFHQLYMEMSATGREMIGARIRDTDFLQGDDILWINFRGIYELYQLDALDVSIMSCWILMEIQRARRRRVFDTGFIDPRKVNVAMLDQYPQETEDNLVHLLKAQHYKTFILLPYNTEFHWVLLLIDLEACTVNVYDSMDKKESTFDKVFELIDRAWYRFRHLVRGKWRERLRRKFKFPCAKQKQGTNLCGYYVCEYCHCLADQIITTRELDFIRMRDNLTTHKEFIAAVQEQLMGFINEEILDPKGEFYYDGNTIHRSLASELAASTTTSKS

SEQ ID NO: 17331 - protein, 228 aa, Oryza sativa
  Clone ID: TF_OSC414037j.C1.p7.fg
MATRMCGRAGEPAVRKGPWTLEEDLILVSYISQNGEGSWDNLARSAGLNRNGKSCRLRWLNYLRPGVRRGSITPEEDMVIRELHSRWGNRWSKIAKHLPGRTDNEIKNYWRTKIHRKPRGRSQLLQEPCEDAMGMGMSTTTSEAASTSASSGQSQASPGVWDEYMQASSFPHPELVSFAADHHLEMAGVGEVAAAAAAQFVPTEFGFNDGFWNFVDNFWETMPVSDVV

SEQ ID NO: 17332 - protein, 301 aa, Oryza sativa
  Clone ID: TF_OSC400231j.C1.p4.fg
MARKCSYCGNYGHNSRTCSSSASAGHRDTTMLCDGGDGGGGSGLRLFGVQVHVAAGGGGGGGGGGLPMKKSYSMDCLQLAAAGAAPGSLVSPSSSSSSSMLLSIDEGGLERASNGYLSDGPHGRIVQERKKGVPWSEEEHRLFLVGLEKLGKGDWRGISRSYVTTRTPTQVASHAQKFFLRQSSIGKKKRRSSLFDMVPICENGARVSEQLSGEGAAAAAAASTSLSLMNTHETSSDRVAAIDLNSTEEDDTVGASGRPFFPVVLMEQQQQASHGHGHHHHCTPLDLELGMSVSSTPSIGT

SEQ ID NO: 17333 - protein, 1666 aa, Oryza sativa
  Clone ID: TF_OSC900286j.C1.p9.fg
MSSSAARPYQGASASAHAAADASPTWGALGAAACTSDCLPDSTPRISSAACSTGGGEGKAWTSTSLSDLRRPTSAAAAATDSAGDGSPGIGGGRRRCRVGFFAAHGYYRQGGGSYDRSYPDESLGYTPSRSDRYWLDDDGGGGGYKGFSRYGGGGGGGSRRDGRDMRGSYRRSPFRGYGSDFSRNHQEHPPPPLRRSPLRSVAVPMSYDPPGDRADRGDRDHHHRVTPWRPLRRRESRSDAADAAGAGPVPVGQAAAAAASEKDVSARSSAVAAPQVSEEEAPRKKPRLGWGQGLAKYEKQKVQGPAESAEAVAEGSPTATEQKGITHTPAPAPCVSPVAAPSPTPCASPVAAPSPAPCVSPVAAPSPAPPCKSPVPEDKSCELTANTVTESNKNIPGPDVQACNNEVPTKLDQLEGDPIDSLAKVLSELVQHEDSCSGDSKRLSNVSKLLLLKESISKELEKTELEIDSLEGELKSVNVEARNRTLKDPPTAVTYAQNPSPSPVKEQGELTPSPKISMEQDADVKGSELMEIETAQAHNAKAVSSEESVACPGVALGQVPAAADVIPSDPCGKTGSGIDVDIEQREENPCQETFNAMKADGSSDLATRPCSYREVKYNLMDQIIAANRSEAKKNSQLLFKPVPADRSNLDLLASSYLSSQMKNDVIIKKKHAILKNRQRFKEQILTFKFRVLRHLWKEDVRLLSVRKQRSKSHKRTDQSNRSSQSGSQRQRSSNRSRLAVPAGNLSTFPITEMSGVARKLFSEFQLKRCRNYLKMPALIVDEKEKAGAKFVSKNGLVEDPVSVEKERALINPWIQEEKEIFMEKLATFGKDFSKISSFLQHKTTADCIEFYYKHHKSDSFREVKKLLDLRQQQQPANNYLGAVSGKKWNPEANAASLDMLGVATEVAAQGLEYVNEVKKNSAKSILRTVCGVDNSTKGSEKDCVGDVSLHERESVAADVLAGICGTLSPEGMGSCITSSADPGQKIGIISRMEHLLTPEADKNFDDDGTLSDQECEVDIVDWNDDEKSSFIEAMNRYGKDFARISSYVKSKSFEQCKVFFSKARKSLGLDLIHQGAADAGFPTGDANGGRSGTDGACIAEMDSAICSAQSCPKVEIDACPVSDGEIQGHNPLSDIASRQPEADKSNMPDVVDINVEEGESKAEKDCSILVDHKQLREDINQTSCARIDINCPESTDKLQDIEDVTPVNMHGDDLMATSVEQVAAAHVESRSSLHSEGIGIDVSRIEGCSHESTIGKGGKSTPSVCLPAENGVSKENIIHFSNMDGASSISPAFTSNYQQSKLADPIQSKPKPLTPKDLMPVQFSSSLPDPTSICFEGIAAITTPNFEDHGNRASIASGAKDVNMFPTFKDQSSNRHDALFSNVDGYMQQRRNNHFGTEVCGLSESTGISQSDQFTVSKFQNGRPSSLGLSNGNLGVLSTGRREEAREGLFRPCSVKTSAGNEEQQKRPGDVKLFGQILSHQSSLQSSGSSVHGSKSKPPSPKVDKPASSRLLSNPRERLVYSSRPPIIANLGLEERAMRSFDHMDGRTIQPEPMVMVAKCQRPSAGVPVYSTKNGALSVFAEFQQPSMPPHTSDHKLLENFADLHKRNGIELLSGFQQPGRLGGAGVLVSGVSDPVAALKAQYGSGSKMLSSSNDVDTWKDIGSR

SEQ ID NO: 17334 - protein, 357 aa, Oryza sativa
  Clone ID: TF_OSC421430j.C1.p7.fg
MGRSPCCEKIGLKKGPWTPEEDQKLLAYIEEHGHGSWRALPSKAGLQRCGKSCRLRWTNYLRPDIKRGKFSLQEEQTIIQLHALLGNRWSAIATHLPKRTDNEIKNYWNTHLKKRLAKMGIDPVTHKAINGTLNNTAGDKSAKVTASLSHMAQWESARLEAEARLARESKMRIAASTPSKLHAQSTNPPASTPSPCFDVLNAWQSAKIDLESPTSTLTFAGSNASMLPFSTTTALELSESNSNVWQQRSDELEGEESEWKFVSKQQLQGMHGKETEEHFIGCEESWFPGTANIGAGFTGMLLDGSNMHDTSECWDESSNGQDEQRSQVSEDAENKNYWNGIFSMVNSEQPPLQPPLL

SEQ ID NO: 17335 - protein, 310 aa, Oryza sativa
  Clone ID: TF_OSC400431j.C1.p29.fg
MARKCSSCGNNGHNSRTCTGQRSLQESGGGYGGGGAGGVRLFGVQLHVGGAPLKKCFSMECLSSPSPSPSPAYYAAVAAAASNSSPTVSSSSSLVSVEEAGEKMANGYLSDGLMARAQERKKGVPWTEEEHRKFLVGLEKLGKGDWRGISRHFVTTRTPTQVASHAQKYFLRQSSLTQKKRRSSLFDVIEDAEKAPSVNERLKLRHETASVPAEMGFPALSLGISSMAQPEAMLLPPPSLTLTPSCSSPAVSSSSSEQPRTIHPSLMVAKPQVQLQLQPPDLELKISTVRQNDQPSSSPRTPFLGTIRVT

SEQ ID NO: 17336 - protein, 350 aa, Oryza sativa
  Clone ID: TF_OSC401426j.C1.p6.gm
MGTETDVWDDTLALAATNHDPEEERRPWLAAAAAAAAAKCRCSRRRRLPEREWTAEEDERLRRLAKENLFRQWWKVAREMPGRSGDSCRARWRHHLARDVYHRPFTARDDEELVRLHRHTGGSWRKISRSVYGRTSAIMRDRWIQLRRSGLVPDAAKTAENAGCPPPAADDSEYMGSEAELKSPPPPPQQQHPLADVLASSLDSCTLASDATDPRDGILALDFAFIGDDLLLHPPLAVVEQRRRRRPLQAAVAVPSPTVSSGGGGALLRLPTGGSGGDVGFPRRSSRPPAPPRPPLLIEAAPFPGSGYDLLLVGRRSRRRLEQVLRWRTRQRRAGGGGGHARAPLFVMNF

SEQ ID NO: 17337 - protein, 281 aa, Oryza sativa
  Clone ID: TF_OSC400282j.C1.p12.fg
MDHYASRGNWFMARKWSPEENKQFERALAGLDLRCPDWDRVARAIPGRSALEVMNHFRDLELDVQQIENGMVPFPVYGAAAAGGAFTLQWDGAHGVGDFRNAYRFGGGGGGKRHFGRTPEQERKKGVPWTEEEHKLFLLGLKKYGKGDWRNISRNFVQTRTPTQVASHAQKYFIRLNSGGKDKRRSSIHDITTVNLTDDRPPSPSQSSLISNQSNTSTLTAAVAPFSSTADVKPQNAANASFNSPSRTLGMAGYGMGLQDQGLQCGGPLHDQLAASRSILF

SEQ ID NO: 17338 - protein, 278 aa, Oryza sativa
  Clone ID: TF_OSC411316j.C1.p6.fg
MMPVSYTPSVSQWLQRCGKSCRLRWINYLRPDLKRGSFSQQEEDLIVALHEILGNRWSQIASHLPGRTDNEIKNFWNSCLKKKLRQRGLDPATHKPIAAAAAAATSSESAVTQVDEDHKPHGAAAAAAAADGLAANAKQSVFDPFPVTDFGAGFDLGAANMAAALYGSHPDDGAGFVADYSSVLDVSENLGYGESSSNSSNWTCAEVSNVLDSEVLNWAASAGADAAAKAEPFADMEQQHSGYGGEYQVEDDATLEHKFSLPCHEQSLAQFDFNLEYF

SEQ ID NO: 17339 - protein, 321 aa, Oryza sativa
  Clone ID: TF_OSC900018j.C1.p15.fg
MGRAPCCDKASVKKGPWSPEEDAKLKSYIEQNGTGGNWIALPQKIGLKRCGKSCRLRWLNYLRPNIKHGGFSEEEDRIILSLYISIGSRWSIIAAQLPGRTDNDIKNYWNTRLKKKLFGKQSRKDQRQQQHLARQAAAAASDLQIKQEASRGANEADGLAAGANYTWHHHHAMAVPVHPMSAPMVVEGGRVGDDVDESIRKLLFKLGGNPFAASPAPPCIPPPPMYEEAPSFVPPLAHGVPLNEGGMQCSSVLPALELDENFHFNHVKLDGLECLFGMGDHQNMRWNEVSPLVCPNNAVASSSQGMQQYCLVEEPADLGMQ

SEQ ID NO: 17340 - protein, 435 aa, Oryza sativa
  Clone ID: TF_OSC400332j.C1.p18.gm
MGRPPCCEKEGVKKGPWTPEEDMVLASYVQEHGPGNWRAVPPRTGLLRCSKSCRLRWTNYLRPGIRRGGFSHHEERLILHLQALLGNRWAAIASYLPHRTDNDVKNFWNTHLKKKLALTSSSSSPPTPTTPLVARGQWERKLQTDIDLARRALRDALSVDDAASPAMISSGPPAPAAAAAYALSERNISVMLSGWAAPPPARKGLSACNPAAATTTPGGAAAESASTAGTSLELTADCCSGGGDSSASNCLPSSMLLACDDGDATATAAGVAPLSAIESWLLLDDSGEPQLALDEQLLDKQVKEIDWADTFQPLVPKPHGTIYANIEQGLAATRRYPSITQDQNSTESRIDKILRKKKKKKHKAVGRCVDSRRAARRCADSRRAARHEAPRSAAAPQRRPPPRGRRPGLCPSACRREAAGRRPPDGMMEGEGEEL

SEQ ID NO: 17341 - protein, 399 aa, Oryza sativa
  Clone ID: TF_OSC402160j.C1.p5.gm
MGRPPCCEKEGVKKGPWTPEEDMVLASYVQEHGPGNWRAVPPRTGLLRCSKSCRLRWTNYLRPGIRRGGFSHHEERLILHLQALLGNRWAAIASYLPHRTDNDVKNFWNTHLKKKLALTSSSSSPPTPTTPLVARGQWERKLQTDIDLARRALRDALSVDDAASPAMISSGPPAPAAAAAYALSERNISVMLSGWAAPPPARKGLSACNPAAATTTPGGAAAESASTAGTSLELTADCCSGGGDSSASNCLPSSMLLACDDGDATATAAGVAPLSAIESWLLLDDSGEPQLALDEQLLDKQVKEIDWADTFQPLVPKPHGTIYANIEQGLAATRSRRAARRCADSRRAARHEAPRSAAAPQRRPPPRGRRPGLCPSACRREAAGRRPPDGMMEGEGEEL

SEQ ID NO: 17342 - protein, 968 aa, Oryza sativa
  Clone ID: TF_OSC26691j.C1.p3.fg
MDFYSDDSDPDIDEDLQRDLDALRQSCILSGNDPDAAVAQVSACLAAPPAAAAGAEVNGLSDDDDEEEDEDLALVRSIRENLLLNKASPSSPLPRPICAWPPSDSEDDEDDLETLRAIQRRFSHYHSGTSSGSEMNTKTEASKEGSGNIFGNELDEEFDAEKHNKEATTRTGFPKAALLLVDALKKNRACQKFIRRKMITIEAKIEENKDLRDRVKCLLDYQLSCRKAFGKILCQKEDPRVRLISSRKPCAQSTKNKDKKTPALFLGPADNPHVSKYKMVLKQLPMSLQKQPWSDVEKEKLAKGIKQQYQEALILNSINKGSSTGDFSAVDMAYALTNTAGNFEVTPESLRSVLPLINWDKIAAMYLPGRSGAECESRWLNFDDPLISHNAWTAREEKRLILTVQQQGMNNWINIAVTLGTHRTPFQCLVRYQRSLNHCILNKDWAEEEDLQLQAAVNTFGTNWQLVSASMDGRTGNQCSNRWRKTLNPERSRVGRWSLDEDKRLMVAVKLFGSGSWNKIAQFIPGRTQSQCNERWRNVLDPDIDLGEWRPEEDSILLASVDEFGPCWSKIAGAKIPHRTDNMCLRRWRKLCQDKLPSVKAAQQIKKSILQCNFVDRETERPAIGPSDLMPLVRSKVDGSDENTVSAKVRKPRKRSRIPCEDNVLPGDTSNSSPSMNLPLSESIDAEAAVNTTTANSKKKPSRSRSKKQTDENLAVCDVNNSSNCSSGARKRKRSITDKNQVVQKKMKGSISGDNEAVVETVGTISADNEVATKRKTGSTSVGEEGTTKKTTRGSLSGKGEVNKRMRGSISGVQKGATKQRMRGSVSTDNHGAVMKSKRAPSRKSAEENSKADSMANAAFGSDLPTVASEDRDANNGNVKNGRLKSMPRPKQINMTEGSADKFSTSTRLADCMSFGRINGSSRVARHLCVSVKPLSNMIQSNGPSDVSAKDPTSAETDPTSVENSNTA

SEQ ID NO: 17343 - protein, 713 aa, Oryza sativa
  Clone ID: TF_OSC418457j.C1.p24.fg
NKDKKTPALFLGPADNPHVSKYKMVLKQLPMSLQKQPWSDVEKEKLAKGIKQQYQEALILNSINKGSSTGDFSAVDMAYALTNTAGNFEVTPESLRSVLPLINWDKIAAMYLPGRSGAECESRWLNFDDPLISHNAWTAREEKRLILTVQQQGMNNWINIAVTLGTHRTPFQCLVRYQRSLNHCILNKDWAEEEDLQLQAAVNTFGTNWQLVSASMDGRTGNQCSNRWRKTLNPERSRVGRWSLDEDKRLMVAVKLFGSGSWNKIAQFIPGRTQSQCNERWRNVLDPDIDLGEWRPEEDSILLASVDEFGPCWSKIAGAKIPHRTDNMCLRRWRKLCQDKLPSVKAAQQIKKSILQCNFVDRETERPAIGPSDLMPLVRSKVDGSDENTVSAKVRKPRKRSRIPCEDNVLPGDTSNSSPSMNLPLSESIDAEAAVNTTTANSKKKPSRSRSKKQTDENLAVCDVNNSSNCSSGARKRKRSITDKNQVVQKKMKGSISGDNEAVVETVGTISADNEVATKRKTGSTSVGEEGTTKKTTRGSLSGKGEVNKRMRGSISGVQKGATKQRMRGSVSTDNHGAVMKSKRAPSRKSAEENSKADSMANAAFGSDLPTVASEDRDANNGNVKNGRLKSMPRPKQINMTEGSADKFSTSTRLADCMSFGRINGSSRVARHLCVSVKPLSNMIQSNGPSDVSAKDPTSAETDPTSVENSNTA

SEQ ID NO: 17344 - protein, 107 aa, Oryza sativa
  Clone ID: TF_OSC401122j.C1.p84.fg
MESSGGSQLGKNSKTSDGRETKATSSLLLLITAIHFVALCPKGENEDARKEVNSTAQNFVHFTEEEEDIVFRMHRLVGNRWELIAGRIPGRTAEEVEKFWAIKHQAT

SEQ ID NO: 17345 - protein, 221 aa, Oryza sativa
  Clone ID: TF_OSC411863j.C1.p1.fg
MGRSPCCEKAHTNKGAWTKEEDTAPSFAHIQHSTARAAGGRSPRAAGLLRCGKSCRLRWINYLRPDLKRGNFTDEEDELIIKLHELLGNKWSLIAGRLPGRTDNEIKNYWNTHIKRKLLARGLDPLTHRPLNAAAAVAGHHHLAAGGSSCSPDATSGHSSCSDGDEYRGGIDLNLSISPPSSSSQPSSPPPPPHEAEARRAGATASYTYHHHYSETREKIC

SEQ ID NO: 17346 - protein, 428 aa, Oryza sativa
  Clone ID: TF_OSC401892j.C1.p28.fg
MGRHSCCYKQKLRKGLWSPEEDEKLMNHITKHGHGCWSTVPKLAGLQRCGKSCRLRWINYLRPDLKRGAFSQEEEDLIVELHAVLGNRWSQIATRLPGRTDNEIKNLWNSCIKKKLRQKGIDPNTHKPLAEVDRSKATPTISNDRTSESSDVDPSSGVALHNLSHLLSETAQSSELLPVKVTKPRTQAPGLARLKVPPKELFLDQLTSGHENLPSCRSSGPIPNFPFQQLLCYNNDFNSMDVGNRNSLWYNQNESSSSTISTVMPPVSPSTLSTSTGLNPSPDNANSRGTGIHNSQFYWDTNNPSSSSSTGSSGNNGLGFELQSTSSLLETNIFPWSDLAPEKDSQAQLEEELKWPDLLHGTFSEMPAPMQNLSQSLYEDVVKAESQFNMEGLCAAWSQNLLPQQHLPVVSDMYDKDLQRMSLSFENI

SEQ ID NO: 17347 - protein, 809 aa, Oryza sativa
  Clone ID: TF_OSC32697j.C1.p3.fg
MPRKASSTSDSRLKWRKWKRNPTASPSPSNRSSAAAAAADHSDDSDSAAVNEDDDSAVPEDADDETLAGAEDPVLDLREAEVLPSAEPVSAFPVATRRVVNRPHPSVLAVIAAERSACAGEGSAAVAAAPVLENISYGQQQVLSGVLPDHASLATDTDKPSTYVCTPPNLMEGHGVTKQFQGRLHVVPKHSGPPALCNQKPECLSYNAALTCLRFVDWFSPGIVHRLERQVVPQFFSGKSPGNTPEKYMLLRNKVIAKYLENPSKRLAFAECQGLVANTAELYDLSRIVRFLDTWGIINYLASGSVHRGLRMATSLLREEPTGELQLLTAPLKSIDGLILFDRPKCNLQAEDISSLASNSEVVDFDAGLAELDGKIRERLSESSCSYCLQPLTSLHYQSLKEADIALCSDCFHDARYITGHSSLDFQRIDGDNDRSENDGDSWTDQETLLLLEGIEKYNDNWNNIAEHVGTKSKAQCIYHFIRLPVEDGLLENIEVPDASVPFRAETNGYPHLDCNGSTSGNLPQKIPPDNQLPFINSSNPVMSLVGFLASAMGPRVAASCASAALSVLTVDDDSRVNSEGICSDSRGQGPHPNFRDHNGGVSSSISPEKVKHAAMCGLSAAATKAKLFADQEEREIQRLTATVINHQLKRLELKLKQFAEVETLLLKECEQVERIRQRIASDRVRIVSTRLASPGNSLPGGSTSTMSSNPMSMSPRPMGVPGSMPQSSMPAPFANNMQGHGHPQMAFLQQQQRQQMLSFGPRLPLSAIQTQPSPQTSNIMFNPGMPNSVTPNHHQLLRSSSGNNSSVG

SEQ ID NO: 17348 - protein, 394 aa, Oryza sativa
  Clone ID: TF_OSC400903j.C1.p84.fg
MEWTAAEMDEARSIIARLTNAYDSGTLVAGAGNGDTRHDRIVRELQAWLPWRTMDQLIGLYIELMAEEPAAAQPQYFDAGAVVDPTFDFFNDHNNFLGMPPPPVQQADDHNMNNVVADAGMNYYYGGGGAGGAMVFGGAPMGETVEQAAPPVPVVPVVMNRDDDEVNNQGGGRHRAAPTNTTRRFWTTEEHRQFLRGLRVYGRGEWKSISMNFVRSKTPVQVSSHAQKYFRRVESAAADKQRYSINDVGLNDDTAAMDGTNSYSNNNFGGWQSLAFAGGHLEPVSGGGAARQVIAPASSSAAAMNSAAQFWAPMLFNPQIQQQFMQMQAQTQQAWNDQHMMMAAAPMEGATDTNFEPAGAVNYYYYQQQQEEEEGGAYGVPADQWMMNQNNNMC

SEQ ID NO: 17349 - protein, 563 aa, Oryza sativa
  Clone ID: TF_OSC100909j.C1.p10.fg
MAAAAARDDDLGNDDLDDDRSNPRRQSGGRTAGPIRQGLHGDIGLQMTAAMAGDDANDGGHGWRRWLSTAAVAAVLLSLGDGGDDDKATEGIRGSSAGMYTDKRSVSEDTHLYPSTKPTIKPARPQPQMHPLTAAAKHAITIPPPPPPAAAASYTSSPSSGTSDPSVLDLSSAEIDDDGDGDDDRAEQQEIKNSKELVMGRAPCCDKASVKKGPWSPEEDAKLKAYIEENGTGGNWIALPQKIGLKRCGKSCRLRWLNYLRPNIKHGDFTEEEEHIICSLYISIGSRWSIIAAQLPGRTDNDIKNYWNTKLKKKLLGKRAPSRRARANQDHCGLAGSAAAAMCGGVGTAAAAAPPHQALSSSALERIQLHMRLQGLYNSAFGCTTTSSNGGGVGVAPPQWPKLEALLPSRPLPAVQPTDAVVATVQHPHHLVVGGHTLATAAAAAATTSEAFQAAEHLDPAAATGSNYMPGVAGVEMTSSSSMAGGGGFVAGYGLHDELYDFLFKCESIGGAQGGIIPSSLPELQCPDGSAIIGADEKFSTWTSSSCDYGSGGAGDYVLGYDQ

SEQ ID NO: 17350 - protein, 259 aa, Oryza sativa
  Clone ID: TF_OSC4185j.C1.p1.fg
TPWTEEEHRMFLMGLQKLGKGDWRGISRNFVVSRTPTQVASHAQKYFIRQTNSSRRKRRSSLFDMVPEMPMDESPVVVEQLMLHSTQDEATSSNQLPISHLVKQKEPEFGTHLSDLQLRNHEESDFTEPSLASLHLEMNHAAPFKTKFVLTMPTFYPALIPVPLTLWPPNVANVGESGTNHEILKPTPVNGKEVINKADEVVGMSKLTIGDGSSNSIEPSALSLQLTGPTNTRQSAFHVNPPMAGPDLNKRNNSPIHAV

SEQ ID NO: 17351 - protein, 264 aa, Oryza sativa
  Clone ID: TF_OSC400431j.C1.p25.fg
MGRTPCCDREAVKRGPWSPEEDDALRDYINRHGTAGNWISLPNKAGLRRCGKSCRLRWLNYLRPDIRHGAFTDEEDAIITSLYSKLGSKWSTIAAQLERRTDNDVKNHWNTKLKRRLAAAAACTPLLPLPAPPPLAATHTSPSSSLLLLPPLAVPTVKTEAYTCDDFLQQLLPTATAATALRDPFADGAATDGGSTSASAASSGSNWSADTGVVVVGGGGGGGLFPEFCMSSDDLAGAATAEDDHFIGGGYYYPLDPSLSSSLV

SEQ ID NO: 17352 - protein, 428 aa, Oryza sativa
  Clone ID: TF_OSC400143j.C1.p23.fg
MGRSPCCDENGLKKGPWTTEEDEKLMEYIQKNGHGSWRALPKLAGLNRCGKSCRLRWTNYLRPDIKRGKFTSAEKDTILQLHAVLGNKWSAIAKHLPGRTDNEIKNYWNTHLKKDLIQKGIDPTTHRPRTDFFAALPQLIALANLRQLVGQLPWDDPAAAAAGLQQAEAAQAAKFGQYLHLQALLQPPPPSAATSPRSGCIGGAAAAMPGGDMEQMGAGLLSPPAMSSAALSPMSTSSLSPLPSPMSSTALSPLPPSSFFGNGGQGSFLAGQLPNIQMHGSSLFDQSAAIINDANHNQDYAASTGEREIINGATKTTTTTLLPEGSLPPLADYPTISNLGDVYSTPSCDGNITEFPLLPDALFDELMRDYISNCFLEDWKNTDSKNLDVSDILQIQVAVKILPLASLSGIGPEPHLSVRESAAQCQKA

SEQ ID NO: 17353 - protein, 258 aa, Oryza sativa
  Clone ID: TF_OSC407956j.C1.p2.fg
MGRAPCCEKMGLKRGPWTAEEDRILVAHIERHGHSNWRALPRQAGLLRCGKSCRLRWINYLRPDIKRGNFTREEEDAIIHLHDLLGNRWSAIAARLPGRTDNEIKNVWHTHLKKRLEPKPSSGREAAAPKRKATKKAAAVAVAIDVPTTVPVSPEQSLSTTTTSAATTEEYSYSMASSADHNTTDSFTSEEEFQIDDSFWSETLAMTVDSTDSGMEMSGGDPLGAGGASPSSSNDDDMDDFWLKLFIQAGGMQNLPQI

SEQ ID NO: 17354 - protein, 725 aa, Oryza sativa
  Clone ID: TF_OSC414758j.C1.p1.fg
EDDIIVQMVNKLGPKKWSTIAQALPGRIGKQCRERWHNHLNPGINKEAWTQEEEITLIHAHRMYGNKWAELTKFLPGRTDNAIKNHWNSSVKKKVDSYMSSGLLTQVSCLPLNEYSAHCNSSPALTQQNSEDSGSYAVREVENSSVCSQSSLAKVSCSQVHNANVALGCDLQVNANVDNNEAHDSQSSVGHEACYTSVGAVATAIPEVHYHVSSSNFDPDQHLQEEFAQGLNLHMSMDEVPSNSSFADNPTICSIENHERSLEPYDVAMEMPLSMLPSDSGAEQKLHFMSEADFNSPNCLKSELWQDISLQSLLSGPDAVETDSFSRSNHQSDVYSSQADNEFLAPPYLLQTSNSSSVMEATYGQSPQMSVPPSLICSNVMTDVPSDNRSEPKEMTVSQAEMVTQSSSSSGDAEMSANPGSSNGSDIPSMMERIPECADQHVTNAEEPEASIEKEPSVTPSATADEKQDEGALFYEPPRFPSMDVPFVSCDLVTSGDLQEYSPLGIRQLMRSTMNVCTPMRLWGSPTHDESPDILLKSAAKSFICTPSILKKRHRDLVSPIPDKRIEKKSGTEKDCGVSDTSSIGIQTCFINATKDDAVITKSVLRIERSASSKPLEKKLEFSDENKENLDNTIEQAKDGQSAGNYKHIDEQARGERRTATNITTTYDDLPGNLQPAGILIEPNGDDLVSPDYVCKEGVSAKKLAELIVEKSSACINVDYEYVNM

SEQ ID NO: 17355 - protein, 279 aa, Oryza sativa
  Clone ID: TF_OSC400020j.C1.p1.fg
MGRQPCCDKVGLKKGPWTAEEDQKLVSFLLGNGQCCWRAVPKLAGLLRCGKSCRLRWTNYLRPDLKRGLLSETEEKTVIDLHEQLGNRWSKIASHLPGRTDNEIKNHWNTHIKKKLRKMGIDPVTHKPLYPAPPLADGGSPEQKVPEEEEEVEEKSSAAVESSTSTCAGHDVFCTDEVPMLHLDDIVLPPPCDVVGDTAGSPAESSSTSTSSSGGGGIDEEWLLPIMEWPESMYLMGLDDVDMVTTAAPAMATSWEFEDPFNAYQRIALFDHHHELTWA

SEQ ID NO: 17356 - protein, 366 aa, Oryza sativa
  Clone ID: TF_OSC400426j.C1.p60.fg
MTRRCSHCSNNGHNARTCPARGGGGGGGGVRLFGVRLTSPPEVAMKKSASMSCIASSLGSGGGSGGSSPAGTGRGGGGGGEGAAGYASDDPTHASCSTNGRGERKKGTPWTEEEHRMFLMGLQKLGKGDWRGISRNFVVSRTPTQVASHAQKYFIRQTNSSRRKRRSSLFDMVPEMPMDESPVVVEQLMLHSTQDEATSSNQLPISHLVKQKEPEFARHLSDLQLRKHEESEFTEPSLAALDLEMNHAAPFKTKFVLTMPTFYPALIPVPLTLWPPNVANVGESGTNHEILKPTPVNGKEVINKADEVVGMSKLTIGDGSSNSIEPSALSLQLTGPTNTRQSAFHVNPPMAGPDLNKRNNSPIHAV

SEQ ID NO: 17357 - protein, 378 aa, Oryza sativa
  Clone ID: TF_OSC411834j.C1.p4.fg
MDFSCFNPQPAISHGIPFDSFLLQDELHHHADLDHPFEAEGITVHGSELEGGSVLPFATLHDLDHEFFRRGSRKDFIDNASSIFLLNPKTEVSHLVRDVQVGAFGAYEMNGRLISRNKASRKGIKKADAVKGHWTVEEDRKLVKLVEQFGLKKWSLIGGMLPGRVGKQCRERWFNHLRPNIKKDTWSEEEDMVLIQIHKEVGNRWAEIAKCLPGRTENSIKNHWNATKRRQFARRRNRSTSKSGSTVLQNYIKSLAISPQESQMNNERSESNPSDMMITQGTPCCFDGNNCSQSHTSEENIVPSCGDFAAEMWSGLFDTKEDEEDEAQYLLYDMDTHVDMNCIFSNMDYGSNIEPGLASVVKAECSAESWAVNLKETD

SEQ ID NO: 17358 - protein, 306 aa, Oryza sativa
  Clone ID: TF_OSC400323j.C1.p24.fg
MTSQAATTTTTAAAAAAWTREDDKAFENALAACAAPPPADGGAPDDDWFAALAASVPGARSAEEVRRHYEALVEDVAAIDAGRVPLPRYAGEESAAPPDGAGAAAAASKDGGHRRDERKGGGGGYDGGKSCSKAEQERRKGIPWTEEEHRLFLLGLDKFGKGDWRSISRNFVISRTPTQVASHAQKYFIRLNSMNRDRRRSSIHDITSVTAGDQVAAQQGAPITGHQATGNPAAAALGPPGMKHHHHHHPGGAPPPMPMYSAAPMGHPVAGHMVPAAVGTPVVFPPGHAPYVVPVGYPAPPAKMHQ

SEQ ID NO: 17359 - protein, 398 aa, Oryza sativa
  Clone ID: TF_OSC102162j.C1.p14.fg
MAKQSCCHKKKLRRGLWSPEEDEKLMNHIAKYGHGCWSSVPKLAGLERCGKSCRLRWINYLRPDLKRGTFSQEEEDLIIQLHSMLGNKYVLYSSSTHICQSLSRSVPSLTMAAATATALARWSQIAAQLPGRTDNEVKNFWNSYIKKKLRDRGIDPATHKPLAADSSATPTNTTAAAASRSTATCRAVFSDAELQIPTAAAVQQQQQAPLVGAMQLVDGIKMPLDDYWPAAAAAAAPSSSTTTFSAYHHALSMQQQAAAGCGAAAAFDMDALSHCGVVVAPSASSSSTLTSMAGLSPAAADAAEQSANVAAAAAATTTNLPWLDLGHANPIATMDHYAGVLDELRWSDYFDGAYQAATTATQGGALQGQCLYDGGGGGGKDVDDAVQFVDVHSLSNWC

SEQ ID NO: 17360 - protein, 303 aa, Oryza sativa
  Clone ID: TF_OSC423363j.C1.p16.fg
MLIHGEGSSSSAAAAGGKIKGSWSPEEDEQLRGAVARHGPRNWTAISEEVPGRSGKSCRLRWCNQLSPGVHRRPFTPDEDALIVAAHAKYGNKWATIARLLDGRTDNSVKNHWNSSLRRNRRAAAAAAAAAASVSYQSMDLTEEADNDDEGTSDDSVAIPAQSSPAAVVAGVPVLPPPPPPAKRLCVAPPTGVEHRAPPPDPPTSLSLSPPGAAAAAISASTVVGGSSAARAEEEAVAREKARMEQDPWLMAMMRQMITEEVQRQVSVVYSLVASSAAMAAQTGNAGGVGRKGPDGRPSNGQD

SEQ ID NO: 17361 - protein, 297 aa, Oryza sativa
  Clone ID: TF_OSC411283j.C1.p2.fg
MGCRSCDKPKMNYRKGLWSPEEDQRLRDYIVKHGLGCWSAVPAKAGLQRNGKSCRLRWINYLRPGLKRGMFSQEEEDIVINLQAKLGNKWSQIAMHLPGRTDNEVKNYWNSYLKKRVMQAQGSIPNNLAAAAAEVTSMSTTEPPSLHHHHHHPHHHQIKNSSGSTTTSHDQDANLSSGGSHGGISAPAPVAEPFDQQPKSFVFTGDWMPMSAAAAGQESYSISAQHWPASTASSGNVTPSHGGAFGDQMSGSYGALQQQHQSSAAAAPMAGGGGYFDLLNMGDIYGGFAATSDDLLF

SEQ ID NO: 17362 - protein, 276 aa, Oryza sativa
  Clone ID: TF_OSC400500j.C1.p30.fg
MGRAPCCEKEGLRRGAWSPEEDDRLVAYIRRHGHPNWRALPKQAGLLRCGKSCRLRWINYLRPDIKRGNFTADEEDLIVRLHNSLGNRWSAIAAQMPGRTDNEIKNVWHTHLKKRLDDERKLAAAGGGGGRRPHTRKQPKAAKSAAAVKREATPSVSVDTSSGVTCSTVTESSPSSADGDHRRQQQQTQHAAVKEESFSSGGELPAAAAAPTAAADMDESFWSSTEVTGMMAGLGDMDEELAIAGTSSAAAARSDDMEFWLKMLLESGDMRDLAVL

SEQ ID NO: 17363 - protein, 169 aa, Oryza sativa
  Clone ID: TF_OSC418633j.C1.p10.fg
MDMELSSSSSSTTVASSPASSPPLGRCVLRFRLPPAWTPEEDAVLERLAMEHGSRHWRRVAAQMPRRRSPAQCRDRWGDHLARDVFHRPFTAADDAELARLCLRLDDDAGFAAGRRWKDVSRAVYGRSSCAVKRRWRELRRSDAFLGALWRPRTTTTAPPANAAITTTC

SEQ ID NO: 17364 - protein, 275 aa, Oryza sativa
  Clone ID: TF_OSC401948j.C1.p3.fg
MKRKRPAALRGGEEAAAAALKRGPWTPEEDEVLARFVAREGCDRWRTLPRRAGLLRCGKSCRLRWMNYLRPDIKRCPIADDEEDLILRLHRLLGNRWSLIAGRLPGRTDNEIKNYWNSHLSKKLIAQGIDPRTHKPLTAAADHSNAAAAVAATSYKKAVPAKPPRTASSPAAGIECSDDRARPADGGGDFAAMVSAADAEGFEGGFGDQFCAEDAVHGGFDMGSASAMVGDDDFSSFLDSLINDEQLGDLFVVEGNDHEHGNGEIGHGDVMESKQ

SEQ ID NO: 17365 - protein, 205 aa, Oryza sativa
  Clone ID: TF_OSC401434j.C1.p23.np
SFISLKTYINRSIPSSSPCSQCKETKQDRLVKGGWTREEDEVLRQMVRHHGDRKWAEIAKSLPGRVGKQCRERWTNHLHPDIKKDIWTEEEDRMLIEAHQTYGNSWSAIAKQLPGRSENTIKNHWNATKRSLNSKRRLRKKASKLCQGSLPSLKVTSVAASTCFPRQEPLEPNQAKPKLKAATKEEKREKAAPGQPSHLEECICN

SEQ ID NO: 17366 - protein, 367 aa, Oryza sativa
  Clone ID: TF_OSC401196j.C1.p2.fg
MGRSPCCEQDADVKKGPWTPEEDKLLVEYIGKNGHGSWRRLPKLAGLNRCGKSCRLRWTNYLRPDIKRGGFSDDEERLIIHLHATLGNKWSSIATKLKGRTDNEIKNYWNTHLRKKLLSQGIDPVTHRPRTDLLAGLPNLLAAANLGGAAHQLPLDLNAIKLQADAAKFQILQGLLRVLASTTAPPPTAAVLPGTDLMTSILGATLAANSAGILGQQQQLAGVDLSRLGQYNGNYDNLPPLTNDSCTQQTQPAMSSMSPDSLLNRISSGISGDMLGSPELCHGGDGLSSPELGQGGPSASNMTTSPMAPPPPMVAADDHQCNTNTPSGGGDGMSCEQTPASSTFDGLNLDDIDMEGCWAMTDILLAE

SEQ ID NO: 17367 - protein, 992 aa, Oryza sativa
  Clone ID: TF_OSC414606j.C1.p3.fg
MESLLDLRRLLKKEKSAMNQKGDDLSMGKRLKALLTIVMRTTGPTRRSTKGNWTPEEDAILSRAVQTYNGKNWKKIAECFPDRTDVQCLHRWQKVLNPELVKGPWSKEEDEIIVQMVNKLGPKKWSTIAQALPGRIGKQCRERWYNHLNPGINKEAWTQEEEITLIHAHRMYGNKWAELTKFLPGRTDNSIKNHWNSSVKKKVNSYMSSGLLTQVSCLPLNEYSANCNSSPAMTQQNSEDSGCFAVREVENSSGCSQSSLAKVSCSQVHDTTVPLGCDLQVNANFDKNEAHDSQSSMGPQACYTSAEAVASALPAVHCHVSSSNLDPDQHLQEDFAQGLNLDMTIDEMPTVPSFADNQTVCSIENHERSLEPYDVAMEVPLSMLSSDSGAEQKLHFMSEADFNSPNCLKSELWQDISLQGLLSGPDAVEADSISRSNHQSDVYSSEADTHFLAPPYMPQTSNSSSVMGLADDQSPQMSVPPSLICSNAMTDDAPFDNRPGRKEMPLSQAEVVTQSSSSSGDAEMFANPGCSNDRHVPSSTMESIPECGDQQVTNAEEPEASLEKEPSLTQSVTAPDEQDKGALFYEPPRFPSLDVPFVSCDLVTSGDLQEFSPLGIRQLMHSTMNVCTPMRLWGSPTHDESTGVLLKSAAKSFICTPSILKKRHRDLLSPIPDKRIEKKYGTEKDRGVSDTSSTGIQTSCINATKDDALITTVLRIERSASSKSLEKKLVFSDENKENLGYTTEQTKDGQSAGNDEHMDEQTTGERSSATNVATNDDLSGNLQPAGILIEHSGDDPISPDYGKNTMNQKLNTNVKSLSVCKEGVCAKSKPTELIVEKSSPCINVDYEYVNILADTPGIKRGLESPSAWKSPWFVDMHFQGSYFTSPADSYDALGLMKQINVQTAAALVEAREVLASGGQCDNISSDKENTGNPDAKKEPGTTKLQTKIMAEGRVLDFECTTPERSSDKNAGSNLGRYLSSPIPSSHLLKSFR

SEQ ID NO: 17368 - protein, 116 aa, Oryza sativa
  Clone ID: TF_OSC413697j.C1.p1.np
RAGKSCRLRWFNQLDPRISKRPFSDEEEERLMAAHRFYGNKWAMIARLFPGRTDNAVKNHWHVIMARKYREQSTAYRRRKPRPSSASSTPPPPPTPPKDQVLALDFRRAQCVLFFS

SEQ ID NO: 17369 - protein, 329 aa, Oryza sativa
  Clone ID: TF_OSC401503j.C1.p8.fg
MATDRMPDSHFMASSNGGACYQNTHGTPITMGVPNLGCLVASIGIAPSSSLMPERGLATANYNLVANFPEDAAVVPQQQQLQAASSNSNSGLIKGGWTREEDEVLRQMVRHHGDRKWAEIAKSLPGRIGKQCRERWTNHLHPDIKKGIWTEEEDRKLIKAHQTYGNRWSAIARSLPGRSENTVKNRWNATKRSLNSKRRLRKKNNEQAVPRQPSLLEEYIRSCQHPLPNETAPPASFDIGGYGTGGTIGASPTPPTVHALGGSTPLGLVMFLDLLNQATPHPPQPDLNLLNITPVVPHLNTSEYCLQLDARGNCSMASCRCNPTGSAPR

SEQ ID NO: 17370 - protein, 293 aa, Oryza sativa
  Clone ID: TF_OSC401478j.C1.p97.fg
MDAPCGWTTSAAAAVAEEEDVRRGPWTVEEDAVLAGYVAANGEGRWNELARAAGLRRTGKSCRLRWLNYLRPDVRRGDFTPQEQLLILELHFRWGNRWSRIAQHMPGRTDNEIKNYWRTRVQKHAKQLGCDVNSRQFKDVMRHLWMPRLVERIHAAAASSERAAPPPCAAAPASHSGMCHSPDPSTTTSSMAGSSVTHGEQFPSSTNHHLMTMASVTTAAADWSSEQCGSGSATSTSVGISYDMFEGSWSELLARAYDDDGADSSLLPDFQMADTGDNCWWSNLEDIWSQQPY

SEQ ID NO: 17371 - protein, 310 aa, Oryza sativa
  Clone ID: TF_OSC400554j.C1.p1.fg
MEMMRMAMSPAMSSATAAAASEDEGDLRRGPWTVEEDMLLVDYIANHGEGRWNSLARCAGLRRTGKSCRLRWLNYLRPDVRRGNITADEQLLILDLHSRWGNRWSKIAQYLPGRTDNEIKNYWRTRVQKHAKQLRCDVNSKEFRDVVRHVWMPRLIERIQADAAAAGEVAAPAPVSAAATRSMSSPAGAMYLHHQQIPLAAGAMVVAPAVSSEAYHHHGCGGGGDTSCSEPSQAAVTMSPDDASSTLRSSSAAAENDTIHGDVLSGSWSELLATTTTTIAATAGLPDFDELGDFEDNLWSLEDIWLHQQC

SEQ ID NO: 17372 - protein, 266 aa, Oryza sativa
  Clone ID: TF_OSC401138j.C1.p13.fg
MEFIDDDWDYQPRARVIHSRSNANSNGATTASSSQPTRSLPHTAACAAAAVALLAAAYYLLPDYQSSSSNPTPPPPKPSDPIAPPPPRHAAAAAAAAATAVSDGGEAVEDAGEWTDQEMDILRRQMVKHPAGEPQRWEKIAAAFGGRRTPESVIRAAKSGGGAAAAGASFDQFLRKRKPLDPRSEATDAGSGNAGGGGGESGDGSWSAGDDRALLNALKEFPKDTAMRWEKVAVAVPGKTKAACMKRVTELKRDFRSSKAASEAAP

SEQ ID NO: 17373 - protein, 278 aa, Oryza sativa
  Clone ID: TF_OSC416144j.C1.p8.fg
MAEAEAEEEMMMRMMCGSGGNEMMKTKMKKKNREGEEEEEVSGGGRMRKGPWTEQEDVQLVWFVRLFGERRWDFLAKVSGLKRTGKSCRLRWVNYLHPGLKRGRITADEERLILHLHSQWGSRWSRIARSLPGRTDNEIKNFWRTHMRKIAHHAKKKTNSPSPAPTTSSGSLSSSLTTATTTMATAAALQESSSCGGDDEAVDQLVAAATTPASQLLTMDYTMDQLWNDIAAAEADTSCYDAAAMASPPSPVWEFCTDYSLWRIDDEEYYKKMLDASQ

SEQ ID NO: 17374 - protein, 309 aa, Oryza sativa
  Clone ID: TF_OSC900101j.C1.p12.fg
MGRQPCCDKVGLKKGPWTAEEDQKLITFLLTNGQCCWRAVPKLAGLLRCGKSCRLRWTNYLRPDLKRGLLSDAEEKIVVDLHAQLGNRWSKIASHLPGRTDNEIKNHWNTHIKKKLKKMGIDPLTHRPLQPPPSPSPEKKHAERKNTAAAAAVAEQHQHDELWEEESPGFCTDEVPMIHPDEIMVPLRDHPPPVCTAAGASTPTTSSSSSSSSVASSTTSCDEVDAAALLPVLEWPDDAMCLMELDELIAAAAPPSLLWDDDYRLPLPPPPLSPPAMYEELDAFQCYDQQRSAFEQEAAASAWNKLELF

SEQ ID NO: 17375 - protein, 561 aa, Oryza sativa
  Clone ID: TF_OSC30916j.C1.p2.fg
MRVGKAKRRLDLSTRRGTDEGGRTNCWKTATSAPSLARATAVRVLATDPDPSGVACVRCDVNGERVRAWSCGAKTCGMGAGRKLKTHRRNQRWADKAYKKSHFGNEWKKPFAGSSHAKGIVLEKIGIEAKQPNSAICKCARVQLVKNGKKIAAFVPNDGCLNFIKENEVAYVDGIYGIKVLVDALSSSRLRGRDGSGGDHGDATAAAAASREVAPPPRPRDVYHRPFTARDDDELLRLHYRLGDRWKEIGRAVYGRTSRVMKHRWRELRRGGFLAAAARKELAALDMADDMVETSEVEEPADQSLPSLELQRSTLADTLASSFGSCSLATDHVMDPLAGSLALGKYQFFTIIKIEDVFTGTLVRHPWLPRLVKENGFRHWSRVARIMPRRSARLCRDRWCHHLARDVYHRPFTARDDDELLRLHYRLGDCWKKIGHAVYGRTSRVMNHRWRELRRSGFLAAAARTEQKLDMADDMVESEVEESDQSLPTTRKSIIATGRKGSLQAGQPSACKPTTVKIADLRRRGGRPPAKIIFAGGRWLVRSACEKKNRPPTKKNFRLRR

SEQ ID NO: 17376 - protein, 287 aa, Oryza sativa
  Clone ID: TF_OSC400258j.C1.p35.fg
MGRSPCCEKAHTNKGAWTKEEDQRLIAYIKAHGEGCWRSLPKAAGLLRCGKSCRLRWMNYLRPDLKRGNFTDDDDELIIKLHALLGNKWSLIAGQLPGRTDNEIKNYWNTHIKRKLLSRGIDPQTHRPVSAGSSAAAASGLTTTASTAAFPSLAPAPPPQQHRLHNPVHAAAPSNASFARSAASPPSEDGHSSSGGSSDAPRCPDLNLDLDLDLSMSLPSSPPKTPAAASSTTASRHHHHQQQKTICLCYHLGVRNGDVCSCKAAAPSPAGPRAFRFLRPLEEGQYI

SEQ ID NO: 17377 - protein, 857 aa, Oryza sativa
  Clone ID: TF_OSC401213j.C1.p25.fg
MSPPVAGAASSGDGPPGRPPRELYTIPASSGWFQWDEIHETERRALPEFFGGAGGSGFGTASRNPRIYREYRDYIISRYREDTSRRLTFTEVRKALVGDVTLLRKLFAFLDSSGLINFSASPSRPEAQQQQRQTEAEAVVEAPVGLQVTPRPPPSYFAEEKGGGGNENGFRLPPLTSYSDVFGEWAPGMAPICGLCGMECRDGNAQILKDGFKVCSKCYANNDNKGEANIHPGDKKERIDNHSSSAWTDAETLLLLEGVLKHGDDWDLIAQHVRTKNKSECIARLIQLPFGEHMLGTVNGKLDNRLHKIQTTDGKVNKSTVKESSSQPTETVDDMQIDGNEDGADKSVEEHPTKHRRLFSSIDITVSLMEQLAHLTTSTSPDVVAAAADAAIKALGNENPQARRAFQLSEKEYQTRAFSSNHARQRDYCSDDVGGGDRDVEMHGHPDQEEREMELLMASIIETQLKKIQYKIKHFEELELIMDQEYATLQQMKSSLVDEWQKQSQQFGVWRIGAILNRLGFDRTAGMESHRRAPPFFPNAERRRRQPKTPPSSPPGLSVSPNLARHLSSPRPPPPDAQFTGALMAKKGKAAAAEAAAPDAGVSSPQGGGGEKEGSFLLGSPTWEDAGGGRWRCKETGHELPEREKEAYGRSRACRLALIDQAVARKKPPLNAFKPHPEHKSKLICNITGDIINKSEEHIWKHINGKRFLNKLEKLEEKMASGEMAEGEAEQSNEGENKTKSRKKKDKKKAAVVNPSLPREPKPEIDDSDNSDDPDFWVPPVGSRWDDDDGKDRWTSSPVKDKDDAAEDEDGDDDGDDMADKDDKETREIASRTKRLSVEAVGPSSFASRKKKTKKEQ

SEQ ID NO: 17378 - protein, 328 aa, Oryza sativa
  Clone ID: TF_OSC7723j.C1.p2.np
MGRAPCCEKVGLKRGRWTTEEDEKLAGYIAKHGEGSWRSLPKNAGLLRCGKSCRLRWINYLRAGVKRGNISNQEEDVIIKLHATLGNRWSLIASHLPGRTDNEIKNYWNSHLSRQIHTYRRTYTAPSEAAVTIDVTKLQAAGKRRGGRTAGHPPKETAAADTPLPPKETAAADTPLPESSPRRAQSDEARSGSVVVDPEEPSSQPNNGSSGGGGGTPDGPCSEETATGPTSLDPMEMGLWEVESDAEMEALLCGGVAPDGPGIPGLEPLDVAAQADDLLDMDWDGFAADLWGDPAQAALSKTRASQTARWAAARELESFASWLLSDSC

SEQ ID NO: 17379 - protein, 403 aa, Oryza sativa
  Clone ID: TF_OSC401780j.C1.p7.fg
MGRAPCCDKKGLKKGPWTPEEDKLLVDYIQANGHGSWRLLPKLAGLNRCGKSCRLRWTNYLRPDIKRGPFTAEEQKSIVQLHGIVGNKWSMIAAQLPGRTDNEIKNYWNTHLKKQLRRMGLDDPPPGPAAGCPAARHMAQWETARLEAEARLSLLSSSGAAATTTITAATTTTSASSSSTTAGPVAAAATSPADVFLRLWNSSIGDSFRKLAVVAAGSSSPSRADVTKDAVKQEEEAAPAGDDSSAASNEVEAATMAVDEYQMFLDFAGEELGLFHGRLLLLSYEHVVTIPTYGGVIEDGYVGVAVHVLEDREAGKEKGVNAPDSRWGQPDEKTNLLPRSDKRPNQSSERFATTPAAQEQPVACGGFIARKEQKWAGQARRPYANDSLLGDTIKCRAIVVLWI

SEQ ID NO: 17380 - protein, 409 aa, Oryza sativa
  Clone ID: TF_OSC401601j.C1.p8.fg
MAGGGGSLAVGGGLNGWRGVSGSVGAAGLEEGSGPAWWRGHLTANGSRMKKGGGSRRHAIPTGEAGSGAVSRVAVAVAVYVDSSIEQEQLEEVVPWWGLMGRPPCCVKAEVKKGPWTPEEDLMLVAYVQEHGPGNWRAVPTNTGLMRCSKSCRLRWTNYLRPGIKRGNFTDQEEKLIVHLQALLGNRWAAIASYLPERTDNDIKNYWNTHLKKKLKKMSATGGGGDDGEGGGAGEVKTRAAAPKGQWERRLQTDIHTARQALRDALSLDPSPPAKPLDSSSGATAPPSSQAATSYASSAENIARLLEGWMRPGGGGGKTTTTPSSGSRSSAASVLSGEASHSGGATAPTPDGSTVTSKTKDEETAGAPPPPPPPAFSMLESWLLDDGMGHGEVGLMDVVVPLGDPSEFF

SEQ ID NO: 17381 - protein, 599 aa, Oryza sativa
  Clone ID: TF_OSC401616j.C1.p67.fg
MATGPDLTPPAAAASAEAPSASAAKKDRHIVSWSTEEDDVLRTQIALHGTDKYEFFPLPISIDFFFLDLITIFYTVFPFPFGSWTIIAAQFKDKTARQCRRRWYNYLNSECKKGGWSREEDLLLCEISELANMRSVTSSVRQQARHIAMPMELSMYAQKVLGNKWTEIAKVVSGRTDNAVKNRFSTLCKRRAKDDELFKENGSLCSSTSSKRALVQTGCLTSGASGSAPPIKQMRPCNSDFKENMTPNMRLVGQDKSTQDSRQPLAIVYQNNQDNMNTMDTQNLVAKTAAKQLFAGEQNCVKHEGNFLNKDDPKIATLLQRADLLCSLATKINTENTSQSMDEAWQQLQHHLDKKDDNDMSESSMSGMASLLEDLDDLIVDPYENEEEEDQDLREQTEQIDVENKQNSSQTSMEVTSQMVPDNKMEDCPNDKSTEDNNMEPCPGEDIPTSENLTEAAIEDSLLQCVEYSSPVHTVIQAKTDAEIAASENLSEVLEHNRLQCIQLASPAQTTTPVEANAETPASEKLREVVKCNNPSCIEFTSPAHTVPTFLPYADDMPTPKFTASERNFLLSVLELTSPGSRPDTSQQPSCKRALLNSL

SEQ ID NO: 17382 - protein, 576 aa, Oryza sativa
  Clone ID: TF_OSC401093j.C1.p58.gm
MKKGKWSKEEDDLIKNHMEKYGIGRSWQALSDALGLQRCGRSCRSRWLNYLRPGLKHGDFSPAEERIICKMYSKKGSSWSAIAAQLPGRTDLAVKNYWNSTLKKRFPAAAAARSTAAARRRHRPAASATTSSDDDDDVDVDDATPPGLALVVYSEGSTAAAAAAGELAPYSISSPAATADAAEEEEPIAAVPISTCILALPPPPPPPPPPPSDATGGEVSIPCFPFSPLPFIEPDLPELTWTTDLDDITATFDAAACRYPKRPHPITPDSPRLPKLPAIAGFDDVQSFLSCICLRYNTSPFLLARATAAPPAAAADRCLAGRRCLYSTPPPPPLSPLHWRCSRRDPELGADVSALLLRGRLGARQLFDELPHRVRWRRGYLRAAFAASVSNLNARDGHRGASSIISHDHVEQLKSFLASVLITQPPEKNIVGEDIEALEKRINGDGFHSKSLLDDIAQGRETEVQAARTAAAADEDAIGVHGGRSYLAGAGSGHAVEAGHSGRGDVARDVGESERRSSCTSRRRCLAGAIRRTRGVRPRRHRHRLHPPSEGSRPRSEGRRRSALGSSGYAACHGAA

SEQ ID NO: 17383 - protein, 307 aa, Oryza sativa
  Clone ID: TF_OSC400044j.C1.p38.fg
MGHHSCCNKQKVRRGLWSPEEDEKLVKYISTHGHGCWSSVPRLAGLQRCGKSCRLRWINYLRPDLKRGSFSQQEESLIIELHRVLGNRWAQIAKHLPGRTDNEVKNFWNSTIKKKLISQAVGSLHPSSADLYYNILDGAGQSIAAASLNAVENAAHGVTQSPPSSVYNSAAWASFSSHQPIFLPGHGVHGCGGGDLQYAAAVDGEFIRLCRAAEAYQLENGAAGIVGGQCKPSDHLLAPEGVVARSCLPAFVEQKGGGGGAFLADPAMGPVMDFMDAILGSSTTSAASASSVDSFSANTAMQPHWIP

SEQ ID NO: 17384 - protein, 1894 aa, Oryza sativa
  Clone ID: TF_OSC401228j.C1.p4.fg
MDGAHGQRQPMSPAISASAVLPQQRQMQLHHHHHHPARSSIADLFTLYLGMNSKQRVEDPTRETSNKLQKRVTAMNRDLPPRDEQFISDFEQLHMQFPDQEQLQAVTESVLISFVLQCSSHAPQSEFLLFATRCLCARGHLRWDSLLPSLLNVVSSVEVPMGQGVSVTTGGPATSSSSAIAVPNAPSFHPSNPTSPLSAMNTIGSPTQSGIDQPIGANVSPIKGAEFSSPGQLGLTARGDQSRRGAEISYLHHLSCRIILAGLESDLKPATHAVIFQHMVNWLVNWDQRPHGVDQADALQLQTLRLERPLHEWMHLCLDVIWILVNEDKCRVPFYELVRSNLQFLENIPDDEALVSIIMEIHRRRDMDLANSIPKGGLDWERALRCLRHALRTTPSPDWWRRVLLVAPCYRQHPQQSSTPGAVFSPDMIGEAVADRTIELLRLTNSETQCWQDWLLFADIFFFLMKSGCIDFLDFVDKLASRVTNSDQQILRSNHVTWLLAQIIRIEIVMNTLSSDPRREHLNSDQLQKGKQIDEWWRQMTKASGERMIDFTSLDERAMGMFWVLSFTMAQPACEAVMNWFTSVGVADLIQGPNLQPNERMTMMRETYPLSMSLLSGLSINLCLKLAFQLEETIFLGQNVPSIAIVETYVRLLLITPHSLFRPHFTTLTQRSPSILSKSGVSLLLLEILNYRLLPLYRYHGKSKALMYDVTKIISMIKVKRGEHRLFRLAENLCMNLILSLRDFFLVKKELKGPTEFTETLNRITIISLAITMKTRGIAEVEHIIHLQPLLEQIMATSQHTWSEKTLRYFPPLIRDFLMGRMDKRGQAIQAWQQAETTVINQCNQLLSPSAEPTYVMTYLSHSFPQHRQYLCAGAWMLMNGHLEINSANLARVLREFSPEEVTANIYTMVDVLLHHIQLELQRGHQIQDLLSKAITNLAFFIWTHELLPLDILLLALIDRDDDPYALRLVINLLERPELQQRIKAFCTSRSPEHWLKNQPPKRVELQKALGNHLSGKERYPPFFDDIAARLLLVIPLIIYRLIENDATDIADRVLAVYSTFLAFHPLRFTFVRDILAYFYGHLPSKLIVRILNVLGVSTKTPFSESFAQYLASSNSSICPPPEYFANLLFGLVNNVIPPLSCKSKSNPSDAAGSTARTTYNKPYTSSAGGISNSDGQRAFYQNQDPGSYTQLVLETAAIEILSLCVPASQIVSSLVQIIAHVQAMLIQSNSGHGMSGGLGQNSGVPTSSGGGVEPVGANRPNTTASGINASNFVSRSGYSCQQLSVLMIQACGLLLAQLPPEFHTLLYAEAARIIKDCWWLADSSRPVKELDSAVGYALLDPTWASQDNTSTAIGNIVALLHSFFSNLPHEWLESTHTVIKHLRPVNSVAMLRIAFRILGPLLPRLAFARPLFMKTLALLFNVLGDVFGKNSQASPPVEASEIADIIDFLHHAVMYEGQGGPVQSTSKPKLEILTLCGKECAAISGVMLLDKQLVDGQSQASPSMLLPPHSCTADYCRQYYIEGERAVTQLLKDVDPLQTAVVLTLRRQRPRRELSPDYTCTRNSILEAWRARRLAADVSDGLTPSRLRLASAFPLLAASINPRAAPEPLQIKTRVSSSGSVHPSREIQIASQIRDQRVMGRQPCCEKVGLKKGPWTADEDQKLVTFLLSNGHCCWRLVPKLAGLLRCGKSCRLRWTNYLRPDLKRGLLSEEEEKLVIDLHEQLGNRWSKIAARLPGRTDNEIKNHWNTHIKKKLKKMGLDPVTHRPVMSLAQPDPLKQQQQQHEPSVSGGTGADDKEEEEEETPTSAQPQGVACAASSASAVSSSCSSSASASAATPGADVDWPGLFEVDAILDIDWAGLLSACGDDGGCSAIGVDMLFDQCSDVGFDQDVWM

SEQ ID NO: 17385 - protein, 212 aa, Oryza sativa
  Clone ID: TF_OSC404183j.C1.p3.fg
MGDLVGDGAAPAAAEPAPAAAACRWTRQKDKLLETLVARCAMNRQCVGGWDAIAAAFGDDRTAAQVEQRYGEIAAEVRRVMEEPWDAEDPAIAAAAAAVPAAPVKHAAAGPGSDGGGEEGKVVVEKKSGIWSEEEHRQCLRGIEEIGHGRWTQISIEYVPSRTPIQIASHTQKYFLRMAKPKEDRKRKSIHDTPYHLHLPNAADAHAHQQQQ

SEQ ID NO: 17386 - protein, 319 aa, Oryza sativa
  unsure (1)..(319): unsure at all Xaa locations
  Clone ID: TF_OSC100215j.C1.p3.np
MMKESYMEVLPPAPAHYFVGQAAAAGGWFLPDRRGGGGAWSQEENKVFEQALAALDRNDPERWERVALLLPGKTVADVMTHYDDLENDVCFIEAGLVPFPHYGAAGGGGGSGFTLDWDGAAGLGFKRSCYMVGGKRARGPDQERKKGVPWTEEEHKLFLMLFLMGLKKYGRGDWRNISRNFVTSRTPTQVASHAQKYFIRLNSGGKDKRRSSIHDITTVNLPDDDPPSPPPSVLTAHSSSSAAAVSSSSACSSTASLRRRRSAVAPGTTTSLMGRCGCHTGNSSRELRVGGQNQASHAINLSVSSSCXLFSPLCFTITA

SEQ ID NO: 17387 - protein, 148 aa, Oryza sativa
  Clone ID: TF_OSC414560j.C1.p1.fg
MGRLRPPCCDESSVKKGPWTREEDEKLVAYVDQHGGHGSWRSLPKRAGLNRCCKSCRLRWINYLRPDIKRGNFTPEEEQAIITLHSVLGNKWSTIATRLPGRTDNEIKNYWNTRLKKRLIGAGIDPATHRARPRPPAPGDLATALPQL

SEQ ID NO: 17388 - protein, 298 aa, Oryza sativa
  Clone ID: TF_OSC400524j.C1.p28.fg
MGRTPCCDSKVLKKGPWTPDEDKLLVDYVQANGSGNWRLLPKLAGLNRCGKSCRLRWTNYLRPDIKRGPFTPEEHKSILQLHAIVGNKWSMIAAQLPGRTDNEIKNYWNTNVKKQLRQGQAAAVGEQAALASLGGGAASCPAARHMAQWETARLEAEARLSLLSGTTSVATASVAASSSSSSTAAAGGAEAPPDIYLRLWNSEVGDSFRKSARSAAREDQEPANASDEAAPVSATFARPGDDSSAASNVTAAAAADEYQVFLDLAAEDFELFHGRHGGFPLFPAVDMLGETSLYTAFD

SEQ ID NO: 17389 - protein, 270 aa, Oryza sativa
  Clone ID: TF_OSC414118j.C1.p7.gm
MGRPPCCDENGLKKGPWTPEEDEKLMSYIQKHGHASWRVLPELAGLNRCGKSCRLRWTNYLKPDIKRGNFSREEEQTILQLHSILGNKWSAIAKHLPGRTDNEIKNFWNTHLRKKLIKMGIDPMTHCPRTDFFQSLPQLIALANLRQIIERQPWDGHIEGLQTVAVQAAKLEYMQSLLHSAVCHCDQPHHHHHHQQLKHLHHRTGADQPPMPSTGAFFNNIALVSGWITLKLEDGVIPTGNSPVLDHLAGEALEGALGIRDFGSTTASSA

SEQ ID NO: 17390 - protein, 368 aa, Oryza sativa
  Clone ID: TF_OSC414185j.C1.p2.fg
MGRAPCCEKSGLKKGPWTPEEDEKLIAYIKEHGQGNWRTLPKNAGLSRCGKSCRLRWTNYLRPDIKRGRFSFEEEEAIIQLHSILGNKWSAIAARLPGRTDNEIKNYWNTHIRKRLLRMGIDPVTHAPRLDLLDLTSLLKPAAAAAYYPTQADLDTLRALEPLAGYPDLLRLASAILPAATTTGAAAAAAAEQAQLLLPWLLQAQMAQQQQQVTPPPPPPPQAAATEQFLQATSTACHQMPGLVHASPTQQLAQQPQDHMAAATCHRRGAVQHPSYDNQLDYVPALMQMASDASNLQQWSSTVSSSNNHNVNSGVSTPSSSPAAAGQINSSSTTTTTTYGLNASGDVDDAGLLINMHLSELLDVSDYM

SEQ ID NO: 17391 - protein, 75 aa, Oryza sativa
  Clone ID: TF_OSC421637j.C1.p1.fg
MASEWSKEENKLFEQAIAYYGEGAPDLWHKVSRAMGGTKTADEVRLHFEILVDDIKLIEARRVPFPKYNTQGAWN

SEQ ID NO: 17392 - protein, 222 aa, Oryza sativa
  Clone ID: TF_OSC3910j.C1.p1.np
LAGSQGESPAMLHPNGDGDGDGGDDEGDASGGEEEQGGGIPLKKGPWTPDIPLKKGPWTPDEDKRLREYVEAHGEGNWNRVQRNAGLNRCGKSCRLRWANHLKPDLKKGPFSKEEEEMIIKLHLWLGTKWAKMANSLPGRTDNEIKNFWNTRCKRIQRTGEPLYPKELVDRSGSDCESPDESRAKKRTNEVLQGNGQSYKEVFFDNFAADGRARSPSLTGGA

SEQ ID NO: 17393 - protein, 187 aa, Oryza sativa
  unsure (1)..(187): unsure at all Xaa locations
  Clone ID: TF_OSC400259j.C1.p20.np
VGARNEGARXKPWRKALPTKVREAEWAPHSPSWTSARSSTLFKGAWTRQEDEVLKQMVILHGDRKWATIAKSLPGRIGKQCRERWTNHLRPDIKKDVWTEEDDRMLIEAHKTYGNRWSVIARCLPGRSENAVKNHWNATKRSLKSKRRMKKKSTRPIMCDAQLGHMLRGGIGHRCAPAEMTKRRAGN

SEQ ID NO: 17394 - protein, 704 aa, Oryza sativa
  Clone ID: TF_OSC418226j.C1.p7.fg
MARAPGGVRRRSGRRGAGGGGAGGGGEALRKGPWMAEEDEVLLEHVRTHGPMDWSSIRSKGLLPRTGKSCRLRWVNKLRPNLKSGCKFTAEEERVVIELQAQFGNKWARIATYLQGRTDNDVKNFWSTRQKRLARLLRGPLPAARPNKHNSGKGKAPSSSSLDSQTATFHQSSASLDQASLEGNSLGWQCREAAPFMGYDQACSGFFAFEGPLPLQLLPPADGEASSSNAAQSAPPPLLFDQPPYPLINFPGWPERYVDVGHGFVDAGAMDGLAYQELLPMVQSVPMIMPFFGMESNNTKYYEVLGVPKTASKDELKKAYRKAAIKNHPDKGGDPEKFKELSQAYEVLTDPEKRDIYDQYGEDALKDGMGGGSDFHNPFDIFEQFFGGGAFGGSSSRVRRQRRGEDVAHTLKVSLEDVYNGSMKKLSLSRNILCPKCKGKGTKSEAPATCYGCHGVGMRNIMRQIGLGMIQHMQTVCPECRGSGEIISDRDKCTNCRASKVIQEKKVLEVHIEKGMQHGQKIVFQGEADEAPDTVTGDIVFILQVKVHPRFKRKYDDLFIERTISLTEALCGFQFILTHLDSRQLLIKANPGEIIKPGQHKAINDEGMPHHGRPFMKGRLFVEFNVEFPESGVLSRDQCRALEMILPPKPGHQLSDMDLDQCEETTMHDVNIEEEMRRKQYQRKQEAYDEDEEEDAPRVQCAQQ

SEQ ID NO: 17395 - protein, 249 aa, Oryza sativa
  Clone ID: TF_OSC413566j.C1.p15.fg
MQYTVEGSGGGGVQTVEAAVRKGPWTMEEDLSLVNYIAANGEGAWNTLARAAGLNRTGKSCRLRWLNYLRPDVRRGNITPEEHTLIVELQARWGNRWSKIARYLPGRTDNEVKNFWRTKIQKKHRKSTDGIYATTTSESIMPAATVHQNTVAEDQGSSSVSGRTTTATVAVTQEYATEAPPPSGMSSGSYLDQLQPGYASSIHGGQDGGAAAAAAGDVVVSDEFLAASSDNFWALEDLWPTVQSLHGNC

SEQ ID NO: 17396 - protein, 357 aa, Oryza sativa
  Clone ID: TF_OSC401058j.C1.p76.fg
MGRESAAACSPKPKLRRGLWSPEEDEKLFNHISRYGVGCWSSVPKLAGLERCGKSCRLRWINYLRPDLKRGSFSQQEEELIISLHKILGNRWSQIAAQLPGRTDNEIKNFWNSCLKKKLRQRGIDPATHKPLNDGGAGAGEEHHDDGDKQQLMDDVDDCFAIGGGGSSDSLAPPHSPAVSFDPLSVTNVPTTMMQSSSSPYGAAGGEHSSFRSDTLCDYGGSGGGVDVVSDAGTYSAYTGDSSSNSNSTAWTCGSVVVGGAGELPPPPLLPHMDMFGRVDAEPPPYPPFDVQARFSPWHHHHHHHHEPTLPTPPQRLDGGGGAAASFPIRSLSRDMPESCFDLGRGALDDEFGVDFL

SEQ ID NO: 17397 - protein, 340 aa, Oryza sativa
  Clone ID: TF_OSC408625j.C1.p2.fg
MGRGRAPCCAKVGLNRGSWTPQEDMRLIAYIQKHGHANWRALPKQAGLLRCGKSCRLRWINYLRPDLKRGNFTADEEDTIIKLHGLLGNKWSKIASCLPGRTDNEIKNVWNTHLKKRVSQREKPGDTKKKGKAADASDDADAHSPSSSASSSTTTAANNNNSGDTAGEQCGTSKEPENVDVSFFEQDIDISDMLVDAPTEAPLVAAPMPPSPCSSSSLTTTTCVGAVSDELLDLPEIDIEPDIWSIIDGYGGDEPGDGDATVPCTASPGEEGAEWWVENLEKELGLWGPMDESLAHPDPPGQVCYPGPLTETEGDPVSTYFQSGPTASPLQEIASPAVLS

SEQ ID NO: 17398 - protein, 409 aa, Oryza sativa
  Clone ID: TF_OSC401044j.C1.p2.fg
MRKPDCGGGGGAAKGGGVLGVAGGNNAAVVGGKVRKGLWSPEEDEKLVAYMLRSGQGSWSDVARNAGLQRCGKSCRLRWINYLRPDLKRGAFSPQEEDLIVNLHAILGNRWSQIAARLPGRTDNEIKNFWNSTIKKRLKISSSSASPATTTDCASPPEHKLGAVVDLAGGGGATDDVVVGTANAAMKSMWVDSSSSSSSSSSSMQSRPSIMAAAAAGRSYGGLLPLPDQVCGVDTSPPPPFFHDHSISIKQAYYGSTGAHHHHHAIATMDGSSLIGDHHHHSSSILFGGASVPPLLDHQTILDDDDDHPNKTGSNTTAATLSSNITDNSNSNKNNSDNNNNISSSCCISLMNSSSNMIYWEGHHQQQQQQHQMLQQQQQHMSRNVMGEWDLEELMKDVSSLPFLDFQVE

SEQ ID NO: 17399 - protein, 109 aa, Oryza sativa
  Clone ID: TF_OSC21831j.C1.p2.np
KTRKKGSWRAEEDALLTRLVAQHGPHRWSIISGAIPGRSGKSCRLRWCNQLSPAVQHRPFTPQEDALLAAAHARHGNKWATIARLLPGRTDNSVKNHWNSNLRRSCSNF

SEQ ID NO: 17400 - protein, 242 aa, Oryza sativa
  Clone ID: TF_OSC7037j.C1.p6.fg
MALEGAAGGGGVGGGGGPPGQEAGKKVGWSKEEDKLLRELVRKQGGKDWGVIATAFPGRTDKSCRLRWRQHLDPSVDVALPFSAGEDRKIVELHRVHGNRWATIAAFLPGRSDNAIKNRWNTHLRKRHAQDVQQRPSGGLALGLGGGGGAGQAAGGKLTPVCLQLFPPTQAPPIGENLPGPARSAVPELLKLFPLAPGDLKDNASAAAAMDVGNEAVRALPELRLSPAAVVFDAMPLQAIRM

SEQ ID NO: 17401 - protein, 246 aa, Oryza sativa
  Clone ID: TF_OSC421348j.C1.p3.fg
MAAMAAAAAGTKKKARKPYTITRPRERWSAEEHERFLDALILFGRDWKRIEAFVATKTAIQIRSHAQKHFLKARKFGLAGGLPPPLHPRRATLLRANAAAADMMPPPWLPSAGGGSIGCSAPPSGVQQSMAGRSPACYSTDEASFRPLIHSNDNDCSFIETPSCIGSGGESWIGDDAFFMQDETIRLPISPDDLGFAQVYKFVGDMFGSGERRPVEAHLRRLQGMDPAISETILLVLKNLEANLSA

SEQ ID NO: 17402 - protein, 311 aa, Oryza sativa
  Clone ID: TF_OSC1073j.C1.p10.gm
MGRPPCCDKEGIKKGPWTPEEDIILVSYIQEHGPGNWRSVPINTGLMRCSKSCRLRWTNYLRPGIKRGNFTAHEEGIIVHLQSLLGNRWAAIASYLPQRTDNDIKNYWNTHLKKKLAAAANSTSSSNRHPIFADATFPSAAGGSYTVSSNSDVTQMAAIARRSPFADCPSSSYASSMDNISKLLDGFMKTNSPSPPPPPLQHYDSGYYDDVKPAVDVGGNPLLSSFDCMSGADLDCCFDVHQQHQQQQPASFMEYGGYGGGYGDESKQQLMNQAAPPLSSIEKWLFDEAAAEQVADLMDLSDGCCSVPMMF

SEQ ID NO: 17403 - protein, 298 aa, Oryza sativa
  Clone ID: TF_OSC400505j.C1.p28.fg
MAREVSSEEEAGGGDELRRGPWTVEEDLLLVNYIAAHGEGRWNALARCAGLKRTGKSCRLRWLNYLRPDVRRGNMTAEEQLLILELHGRWGNRWSKIAQHLPGRTDNEIKNYWRTRVQKHAKHLNCDVNSQQFKDLMRYLWMPRLLERIHRSSQSQSHDADDADLSVSAATSCITSDLVVDAHHPPLAMADSNDSAAMWQQHQAPQMSVAGAPPPTTTMAQHVVLPTAAASCHQMQDQFVCARAAETTTCCWSESESLPGLAGLYYDDAAAALPEFDVETMAMWGPEDDPWYTQMLGL

SEQ ID NO: 17404 - protein, 308 aa, Oryza sativa
  Clone ID: TF_OSC400651j.C1.p15.fg
MGRPPCCDKEGIKKGPWTPEEDIILVSYIQEHGPGNWRSVPINTGLMRCSKSCRLRWTNYLRPGIKRGNFTAHEEGIIVHLQSLLGNRWAAIASYLPQRTDNDIKNYWNTHLKKKLAAAANSTSAASNRHPIFADATFPSAAGSHTVSSNSDVNQMAAIARRSPFADCPSSSYASSMDNISKLLDGFMKTNSPSPPPPPLQHYDGGYYDDVKPAVDVVGNPLLSSFDCMSGADLDCCFDVHQQQPASSFMEYGGYGGGYGDESKQQLMNQAAAPLSSIEKWLFDEAAAEQVADLMDLSDGCCSVPMMF

SEQ ID NO: 17405 - protein, 266 aa, Oryza sativa
  Clone ID: TF_OSC414191j.C1.p1.fg
MGRSPCCEKAHTNKGAWTKEEDQRLIAHINQHGEGCWRSLPKAAGLLRCGKSCRLRWINYLRPDLKRGNFTDEEDELIIKLHELLGNKWSLIAGRLPGRTDNEIKNYWNTHIKRKLLARGLDPLTHRPLNAAAAVAGHHHLAAGGSSCSPDATSGHSSCSDGDEYRGGIDLNLSISPPSSSSQPSSPPPPPHEAEARRAGATASYTYHHHYSETREKICLCLNHLGLHGGDECSCGGSSASSSSSPPPATASSRAFTFANASSSTV

SEQ ID NO: 17406 - protein, 481 aa, Oryza sativa
  Clone ID: TF_OSC100839j.C1.p7.fg
MATDENGADDRAGGESTVDHLRSHMNYGDMDLSGEEHVPKARKPYTITKQREKWTDEEHRLFLEALQLHGRAWRRIQEHIGTKTAVQIRSHAQKFFSKVVRESSGSNTGSGGASAAAAAAAIQIPPPRPKRKPAHPYPRKVDGAAKKHVPALRQLEKPPLWMQSLSEQEEGSPTSVLTAAQIGTEALGGGFSNNSSGSGSLAPSAAGTDEHVDGGGSPASSVDREDGCLSPSIPTAELAMQAPNTKMSIATTDAKEASSEASVFRLFGKSVVVKDSDQLHLLNGSNIATSGSVERATRNILVPSFAAAPEGSSSNPWPSSMQQFLYFLPRSDGFAAQPVMPWLSYNGSLPCALFYPAAAAAANQQCHRDSEGVEFRVSQREGSLTGSNTASSVVLGSSAAVPAAAAAAQNSDVAESRGQGNSREAAASPRLTKCESSASVTLLQRGFMPYKRCAAESELLRSEAAGGEEAVADGELTRLCL

SEQ ID NO: 17407 - protein, 219 aa, Oryza sativa
  Clone ID: TF_OSC400726j.C1.p24.fg
MGLLRCRKSCCLHWMNYLSPDLKCSNFTDDDDELTINLHALLGNKWNTHIKRKLMSQGIDPQTHQPVTNTFGNVVFAGLAYLTSYLKAKKHNSCIFSKNILLEALLASLFCLTASKMPKGVGALTIALKEGAVFAACAGQILQAFPFWWKWNSMCHRKAEIVRSILAIIVVIYQPIQSSNRALADLPSLLQKSPSPSVAFVNFFLAKKVVKHTSQHDIN

SEQ ID NO: 17408 - protein, 593 aa, Oryza sativa
  Clone ID: TF_OSC401760j.C1.p2.fg
MPAVKVEEEEEERNPVASSPSVSEGSAHAAALASPTAADSIFGRRRKSGPVRRAKGGWTPEEDEKLRKAVDIYNGKNWKKIAESFSDRTEVQCLHRWQKVLDPELIKGPWTQEEDDVIINMVKKHGPKKWSVIARSLNGRIGKQCRERWHNHLDPQIRKEAWTVEEERVLARAHCMYGNKWAEIAKLLPGRTDNSIKNHWNSSLRKKIDDYNTRDILPVHPPVVGDGLKQLPKRPPADNHFDLNKEPIICSRDRLGVVHSDPTSHQRASNLKDFKGCADYLSLGQPVTSCEASAADDSAFDLATQGMRMDSVHDKGTGNNFVCGKVQGINFLGDKGLKINQISDKMGCSRQAKREGEAAINGGGSSLQSEAHSVGSLCYQIPKMEDIAPAQSPVFTANYVPEHSRNVMHSPNGYTTPPTHGKGSDQLSVESILRSAAEKFHGTPSILRRRKRDKPTPAEDNDLKIGRLSSDDFHTPIGKCTTDSPQSFKTAALLSLGPMDEQGSLDVSPPYRLRSKRLAVLKTVQNHLDFSSDEMSICDTTMKSACGNSDCANASSGVSSIQGKKLDEHMIGLETLTMNFAHTTKLDATQPNL

SEQ ID NO: 17409 - protein, 267 aa, Oryza sativa
  Clone ID: TF_OSC900293j.C1.p1.fg
MGRQPCCDKVGLKKGPWTAEEDQKLVAFLLTHGHCCWRVVPKLAGLLRCGKSCRLRWTNYLRPDLKRGLLSDDEERLVIDLHAQLGNRWSKIAARLPGRTDNEIKNHWNTHIKKKLRKMGIDPVTHQPLEPPRPPPREQDATPPPPPPPPQEIEESEEEEQEPSPLIEPHEITAPPPAAAAEAATSNCSVSPASVLSPSCSSSASAASAVDVAEWPEPMYMFGMDGIMDVGWNGLISGAGVDVDVDVDPFDHYYHDASFDDQDVWII

SEQ ID NO: 17410 - protein, 289 aa, Oryza sativa
  Clone ID: TF_OSC401237j.C1.p40.fg
MEGQQFAWGREEGGWRKGPWTAQEDKLLVEYVRQHGEGRWNSVAKITGLKRSGKSCRLRWVNYLRPDLKRGKITPQEESVILELHALWGNRWSTIARSLPGRTDNEIKNYWRTHFKKGKPSKNIERARARFLKQRREMQQQSQLMQTGQQQQLGQDDDATSAVVDDNLAEVAPPAATSLTHDGELQIMQEMAPDMDDLLYYHPGDMSPYSYDDLLGSGGGECGAVAASAGAAASTSEGSSEELDGGAATWGSLWNLDDVVHDMMIDCAAGAGCCWGSFPPLQDKGLAFY

SEQ ID NO: 17411 - protein, 68 aa, Oryza sativa
  Clone ID: TF_OSC33250j.C1.p1.gm
CRLRWFNQLDPRINRSPFTEEEEELLLASHRAHGNRWAVIARLFPGRTDNAVKNHWHVIMARRCRERM

SEQ ID NO: 17412 - protein, 396 aa, Oryza sativa
  Clone ID: TF_OSC400225j.C1.p51.gm
MGRSPCCDKASVKRGPWSEEEDAILRSFVERFGNAGNWIALPHKAGLKRCGKSCRLRWLNYLRPAIRHGGFTDEEDNLILSLYGEMGSKWSVIASKLPGRTDNDVKNYWNTKLKKRYLAAAATEATTPPPPAAGDDDNNPTTQASSQPAPPTPPAPLVNLDAAGLDGAVGDNDELLLHKSEQLYAELMGLIEQQQYSTITAAAVDAATTTTSWSSPSTGTTSPTASSSTDGSSSSSNLPWPAVDVHDSTMMPPLSESSGSSSGLFFGSHAFGSGSFQDLLGSAASFDDVMLSQEMLDNFKNGATPGGDGDLSPTDACLTVMELVNMISVLMALTAAIRLDVPAKLWARGANAPFPTGHPNPFVLERLLRLLTSCSVFCEHKGSPRHFALTTGDDES

SEQ ID NO: 17413 - protein, 169 aa, Oryza sativa
  Clone ID: TF_OSC3478j.C1.p1.fg
EKDSSDLAINKGPSLDLVKSPLMMNDASATVTAMQPNEGMEEFPVKVRKPYTITKQREKWTEEEHDKFLEALKLYGRSWRQIQEHIGTKTAVQIRSHAQKFFSKVVREPGSNNAIEIPPPRPKRKPLHPYPRKCANSGSDANPATAQLKLACLQVDSRGSPGTELEFAL

SEQ ID NO: 17414 - protein, 438 aa, Oryza sativa
  Clone ID: TF_OSC900059j.C1.p19.fg
MASMPQLEEKDSSDLAINKGPSLDLVKSPLMMNDASATVTAMQPNEGMEEFPVKVRKPYTITKQREKWTEEEHDKFLEALKLYGRSWRQIQEHIGTKTAVQIRSHAQKFFSKVVREPGSNNAIEIPPPRPKRKPLHPYPRKCANSGSDANPATAQLKLAPGSSSSGSDQENGSPISVLSAMQSDAFGSSVSNPSTRCTSPASSDDGNNIPTFTSGEDNNVPCEPTVIDPSQSHKEIDQDRKDVNNMSEEDSSEEEVQETSLKLFGRTVVIPDPRKRSSSDPKHESEEQISQPSNEEMLQASSSVGEIPAAYCAPNGWFMSYNSFPFQFGESAADARIPPLHVWWPYYGFAPISHPRGLSTVMQQTEGSDESDGVKSHSSESSSDSGENVQMTAPQSSRIVESLGAIYVRDSGSSFELKPSANSAFVRVKPSNSGDEEI

SEQ ID NO: 17415 - protein, 1004 aa, Oryza sativa
  Clone ID: TF_OSC405568j.C1.p6.fg
MRIMIKGGVWKNTEDEILKAAVMKYGKNQWARISSLLVRKSAKQCKARWYEWLDPSIKKLCSPHAILLQAYTAFEGLMTEWTREEDEKLLHLAKLMPTQWRTIAPIVGRTPSQCLERYEKLLDAACAKDENYEPNDDPRKLRPGEIDPNPESKPARPDPVDMDEDEKEMLSEARARLANTRGKKAKRKAREKQLEEARRLASLQKRRELKAAGIDTRQRKRKRKGIDYNAEIPFEKRPPPGFYDTVGEDRPLEHVQFPTTIEELEGKRRVDIEAQLRKQDIARNKILQRQDAPAAIMQANRLNDPEAVTKRSKLMLPPPQISDHELEEIAKMGNAGDPSLVEELGEGSTATRALLSSYSQTPRLGMTPLRTPQRTPAGKGDAIMMEAENLARLRESQTPLLGGDNPELHPSDFSGVTPRKKEMQTPNPMATPLASPGPGATPRIGMTPSRDGSSFGLTPKSTPFRDELRINEEVDMQDTAKLELRRQAELRKSLRSGFASIPQPKNEYQIVMPPITEEEKEEAEEKIEDMSDRLARERAEEQARQEALLRKRSKVLQRSLPRPPAASIEILRQTLIKGGESRSRSTFVPPTSLEQADELINEELLRLLEHDNAKYPLDEKTQKDKKKGSKRQANGTPSVPEIEDFDEDELKEANSMLEEEVQYLRVAMGHESESLEDFVKAHDACQEDLMFFPNNNSYGLASVAGNSDKIAALQYEFEIVKKRMDDEAKKASRLEQKIKLLTPRIPGRLGMMHHKHCNMYRAGKLWSQVQDTFKQMDTSATELECFQELQKQEQMAASYRIRNLTEEVNKQKALERTLQSRYGDLLTSYKRIQEQLEEHKRQLMIQEEMEAQKRAQEEEEMEAQKRTQAEEEKEAAKAEEEARKMDRAADEEAAGSKQVNEDQMDVDNSNADGDEFVGPIPPGPGTQGDDNVVAVEENSSSQSGDTATTEDGSCGMIDASKSGGQDHIDSKDELPTVGASLDDGSAAASSDQDVSTEVNATVPE

SEQ ID NO: 17416 - protein, 289 aa, Oryza sativa
  Clone ID: TF_OSC900289j.C1.p24.fg
MGRAPCCDKASVKRGPWSPEEDEQLRSYVQSHGIGGNWIALPQKAGLNRCGKSCRLRWLNYLRPDIKHGGYTEQEDHIICSLYNSIGSRWSIIASKLPGRTDNDVKNYWNTKLKKKAMGAVQPRAAASAPSQCTSSAMAPALSPASSSVTSSSGDACFAAAATTTTTMYPPPTTPPQQQFIRFDAPPAAAAAASPTDLAPVPPPATVTADGDGGWASDALSLDDVFLGELTAGEPLFPYAELFSGFAGAAPDSKATLELSACYFPNMAEMWAASDHAYAKPQGLCNTLT

SEQ ID NO: 17417 - protein, 247 aa, Oryza sativa
  Clone ID: TF_OSC400014j.C1.p33.fg
MDEIRSLMLQQGWRKGPWTALEDRLLTEYVQQHGEGSWNSVAKLTGLRRSGKSCRLRWVNYLRPDLKRGKITPDEETVILQLHAMLGNRWSAIARCLPGRTDNEIKNYWRTHFKKARPSRRARAQLLHQYQLQQQQQHRQYLHSLNLLQQQQQQLQQQQQQQQQQMMLLQEQEQQSPQEEAADDSMVMMMMNDLQSKERCCTAVSVVPDDCVLPADDDAIWDSLWRLVDGDGSCGEGSSGGEYWATS

SEQ ID NO: 17418 - protein, 82 aa, Oryza sativa
  unsure (1)..(82): unsure at all Xaa locations
  Clone ID: TF_OSC26666j.C1.p1.hg
LSSAELRRGPWTVDEDLTLINYISDHGEGRWNALARAAGLKRTGKSCRLRWLNYLRPDVKRGNFTAEEQLLILDLHSRWGXP

SEQ ID NO: 17419 - protein, 260 aa, Oryza sativa
  Clone ID: TF_OSC401685j.C1.p176.fg
MGRAVEQQQGGCCSEKKKKLRKGLWSPEEDERLATHIARFGVSCWSSVPDLAGLQRCGKSCRLRWMNYLRPDLKRGRFSHHEEELILALHDKLGNSWSQIAARLPGRSDNEIKNFWNARLRKKLRQTESSSSATTAAGAAATGHRRGEADRSRPPPPASFNTFSHDDRTTPAPAAHIAAAAAVEAPAAMTTTGGAVGGGVLVDNSGGHRDAVAEAARGHVGSGDDDGFLAVLLGEYYLDAGGHGDGFSFLGGGGGGHVFS

SEQ ID NO: 17420 - protein, 239 aa, Oryza sativa
  Clone ID: TF_OSC400792j.C1.p8.fg
MAAAEVQSAAGWGRQLQQDGGGWRKGPWTSQEDALLVEHVRQHGEGRWNSVSKLTGLKRSGKSCRLRWVNYLRPDLKRGKITPQEESIIVQLHALWGNRWSTIARSLPGRTDNEIKNYWRTHFKKGKPSKNIERARARFLKQRREMQQSQQLQQPTLMPTPTPQSKDIIVAETGDARTDDDAGGAAAAVAPSSSSASLSMAGREAEDLIMHQDAMDDLMMCPAMSTTSSSTAPPSPAIS

SEQ ID NO: 17421 - protein, 511 aa, Oryza sativa
  Clone ID: TF_OSC101298j.C1.p8.fg
MATPSMPAPAAEAAAAATTATANSMPLAPPQPPSSGAPFSQPPSTAGTVKTEAPPPPSTSASSAASAAAPAPAAAAAAAAAEESPCTITIPSYSAWFSYDSIHETERRLMPEFFEGEAAAASGSRGPEAYKYYRDTLVRRFRARPGRRLTLTEARRGLVGDVGSVRRVFDFLEEWGLINYGASPSGAKQGRDKKEEAALSQSSLPIGATMPSKLCTGCRTVCGLAYFSCEKADISLCARCYVRANYRPGLTSADFKRIEITEDAKSDWTDKETLHLLEAVLHYGEDWKKVSHHVGSRSEKDCIARFTRLPFGEQFMGPKEDKIQFGNDCDLNEESGSHISKRLRLTPLADASNPIMAQVAFLSAIVGSDVAVAAGQAAISAQSQVDISASETDSSINISKEEESSCTNGLSANDLLKEASANAQVQLEKERKAIEQSLSDIVGVQMKEIQDKIRRFEQKELLMEKERKQLHCLKELLFSDQLAVVQHQRRPPAVTTESKDDEKPKPVISIS

SEQ ID NO: 17422 - protein, 296 aa, Oryza sativa
  Clone ID: TF_OSC401685j.C1.p194.gm
MAAFSSNSGDLLFFSGIGDTLDSNRGPYGFLGSATRDYSLFVNIYFTFTNMSNTGDNGNTGYKKKEAPVNTNGGNTTSNSSGGPFLGLRWMNYLRPDLKKEPISDREAETILSLQKLLGNRWSVIAAKMPGRTDNEIKNYWNSRIRKRQSAAAGAKGEPAPATVMEKEPTANAATVAAAPEAASPPPPPIPARLPMFSCQLLDGGGSGGATATTQSPPNAGSSDISEVSACGGNGGGEDSSRDYCFSGGDVDGDGDMVHLLALDDLDLLVDVPGLLDVDAWDCELYRADYSTSRAR

SEQ ID NO: 17423 - protein, 313 aa, Oryza sativa
  Clone ID: TF_OSC29542j.C1.p5.gm
MRERERETVDVIAAAGEEERWRPARRRARWWRCSNAPGARPRAPPPPADKRRALPIDPLSLPKAVGLLRCRKSCCLHWMNYLSPDLKRGNFTDDDDELTIKLHALLGNKWNTHIKRKLLSQGIDPQTHQPVSAGTSVAAASELTTTAITVGFPSLAVAPARGSSRRKEGRLGGVFLVVVASGGGVSGGGRVSDGGELELRVEERREVVVAGRWRRGGQRLGGEAYGRGQRACFGWLGWGGCASVLAHHRSAAPPVAALAHRLFAAALALCFSARGRSRPSPRSRSHPPLRYRARPLLRHPHLRAAPPAAGLPH

SEQ ID NO: 17424 - protein, 306 aa, Oryza sativa
  Clone ID: TF_OSC404645j.C1.p7.gm
MVGAVTEGERGGRQRERERETVDVIAAAGEEERWRPARRRARWWRCSNAPGARPRAPPPPADKRRALPIDPLSLPKAVGLLRCRKSCCLHWMNYLSPDLKRGNFTDDDDELTIKLHALLGNKWNTHIKRKLLSQGIDPQTHQPVSAGTSVAAASELTTTAITVGFPSLASSLVAEGSLAEAESATEVSSSSVSRSAAKSSLPVDGDGEDSDLAVRLTAEGKGRALVGWGGVDAPPCSPTTALLLHPSPRSPIASSLPHSPSASLPAAALARRRARAHTRRSATALALCCATRICALLRLPPASLTE

SEQ ID NO: 17425 - protein, 1367 aa, Oryza sativa
  Clone ID: TF_OSC401001j.C1.p59.gm
MYRVKSESDCDMIHQEQMDSPVADDGSSGGSPHRGGGPPLKKGPWTSAEDAILVDYVKKHGEGNWNAVQKNTGLFRCGKSCRLRWANHLRPNLKKGAFTAEEERLIIQLHSKMGNKWARMAAHLPGRTDNEIKNYWNTRIKRCQRAGLPIYPTSVCNQSSNEDQQCSSDFDCGENLSNDLLNANGLYLPDFTCDNFIANSEALPYAPHLSAVSISNLLGQSFASKSCSFMDQVNQTGMLKQSDGVLPGLSDTINGVISSVDQFSNDSEKLKQAVGFDYLHEANSTSKIIAPFGGALNGSHAFLNGNFSASRPTSGPLKMELPSLQDTESDPNSWLKYTVAPALQPTELVDPYLQSPAATPSVKSECASPRNSGLLEELIHEAQTLRSGKNQQTSVISSSSSVGTPCNTTVLSPEFDMCQEYWEEQHPGPFLNDCAPFSGNSFTESTPPVSAASPDIFQLSKVSPAQSTSMGSGEQVMGPKYEPGDTSPHPENFRPDALFSGNTADPSVFNNAIAMLLGNDLSIDCRPVLGDGIMFNSSSWSNMPHACEILQTCVTSGSDDARIGQVSGHTEIGVVILQQAESSSPDASMTDIAPILDEIDPLLGASSTHPDTIPKDDSDTDSHVSSQDHQTDDDSNDETDNNDAKENGEEKNKEQGKEAAFIWTADDEKNLMDLGYSEMERNRRLELLMARRRSRKNIRRSGNSGSAPSVLHTRKNPFDLPLDQSNDGDVSADNNEDHKDLDEKDLPNEHGSPALQRQDSDLADVGSECSDGINSVDVELDNSDIDDREIALQHFVFERSQEREAYLSSTKGKGPEDDYLLSSVGNSKTLHPVADLFSWEDGNGESSLGVNSSHNMSVEFSDWVSSPKPIAEHDSGPENLQEFLNTEVASSSKTIVLGARNPAENNGNVDSISYSNNEMPSDNLGHGSMEFPSEFCNESLPVISRDLHPIPEERVVENFNVQEKHEAEETAAGYPLDSDDDADKIYPEPMEDNVIDESFLSELDAVGDFRVEATRSDQQMPDVDSHIDNNTSNGVAESSLISPQISSNIFSNMKYASMLEHEENSPLVDDLNGTGPEFGWSLGASYDDPEQTVYNPRRRILGASRFEETNTEMKPLFDETEASFVNAPIEANLVVGPSKVDVANESELTKTDTNMIVLDANSLEDIETAFKQASNGVVESTVDNETPQEHTTAAMNSSFEENEDKHGCGDTVKFTMHDELPEGTHIEGNTVGDGKEPEPMGITSSMDVIDAKSIDDIYAALKKQSSAAANSSFEQNEGKNGCGDTVTFTTHDELPEGTHIEDRDNTVEDGKEPEPIGTTSSMDTIEVKTIDDIDAVFKKLSDGGTKSAAQAVDCENTCEASDESEQH

SEQ ID NO: 17426 - protein, 519 aa, Oryza sativa
  Clone ID: TF_OSC401161j.C1.p11.np
MMAEALREVLPLPYFPGQPCWYLQERRGAEAWSAEENKVFERALAQVDLDSPNRWEMVAAMLPRKTVIDVMNHYRDLENDVGSIEAGLVPFPHYSSSLSPASSGFTLQDWDGSDGGFRRGCYLKRGRAPDQERKKGVPWTEEEHKSFLMGLKKYGRGDWRNISRYFVTSRTPTQVASHAQKYFIRLNSGGKDKRRSSIHDITTVNLPEEDTSNPSPSPPSVLTTASDQLGSLVDTKPVPPPPSLGAQRHFMSPLPGALGVSHHPYGNVKLEPNASFLAGGDAMRTLVTAVLSAMRTLVTAVLSGGEPHKEEHRAPPPIISTGTTRLRPSRSPVSVCDWLASWLQSCFMRLRIAKYWTEGPLTGYCFDQEHQGFPRKRKRKALLDRCDYTIHCMNLSLDCLFGKPHRPASAGGQCISTPTPSAIPIPDRMHGEIGDHRPEIKWHRCYCRFVLCSSDFCSCEVEESASTGGGALLSSICSAIGHGRESESIIDAIALLGRHVRPRLRANIQILQMDDIIEE

SEQ ID NO: 17427 - protein, 340 aa, Oryza sativa
  Clone ID: TF_OSC400944j.C1.p23.fg
MGRSPCCCHDAGVKKGPWTEEEDRALVEHIKKQGGHVGSWRGLPRAAGLNRCGKSCRLRWTNYLRPDIRRGNFSDDEERLIIRLHAALGNKWSTIATHLDGRTDNEIKNYWNTHIKKKLLRMGIDPVTHQRLPPDLLADGGGLGAASPLLSPPGPAAAAALQPLLSAVASLGSLDTALRQFQLLQHLLNSITSSSSDVAATAGLMATNLAATNTMVNSSSNVASFQEQMNALAHANYQPGYLRDVVPSFPGQDMAPQLNSTSSTPSTAPVLRSSAEPADQCCNDAALVPETYPREVAASVDHWKVQDFPSLEPLELPNLSTLESDLDPFWKEILESSFRS

SEQ ID NO: 17428 - protein, 263 aa, Oryza sativa
  Clone ID: TF_OSC19785j.C1.p1.fg
MATAAESQGLSPGFKFNPSVEQLLCFFLLPYLQHRRLLVDGVVFLDDPASAPPWALLHRHGRGGEDEAYFIGPVPAGDGHGGRRQQQVSRTVTGGGGGKWIKQRTERPRGEEEPVVVFGGETFRWEEFSLNFHADERCRSGSTGWVMHEFAVVPPAGSRVAATHTACRIAFTGHGQKRKRVPDGYVFVDVHVQTAAAGAAVVPPLPMLSSYGEPPHEHFSDDHPPPHSYTYYTQGYQQFLPAAEQNDQEQEYCAPDHRFPRIL

SEQ ID NO: 17429 - protein, 92 aa, Oryza sativa
  Clone ID: TF_OSC400170j.C1.p5.gm
MEAEEELICFYLRNKLDGLHDDIECVIPVLDIYSVDPLQLSEIHHEMLGSSGEEGEPWFYFCPRQEREVRGGRPSWTTPSGSWKAVGTPGVV

SEQ ID NO: 17430 - protein, 282 aa, Oryza sativa
  Clone ID: TF_OSC101065j.C1.p12.fg
MASSAHMAAVLNLPWGYRFRPSDRQIIANYLGPMAIHGADSLPQRGDVVEGVDVFATRPAAIPFEPRRHVFGRDEVRAYFFGDQPTDSRGREVPGGAWLPCGGGDKAYSGGADGGEAVAYRRKYEFRAANEEADRAGEEAATPARPRWRMKEYRLNKSAAEFRRAYAQPNPKANMDCVVREIYTKAVPPPTPPSGRSGDEEMQEGSDYSVMDEDELVDYLLQGFEDGNFDEDQDQPAAAEDGDYSDEDEDQPAAAEDGDYSDEDQDQPAAAEDGDYSDEDEP

SEQ ID NO: 17431 - protein, 531 aa, Oryza sativa
  Clone ID: TF_OSC400934j.C1.p28.fg
MAGEMPDADGKPRSASSGFQPSAPPQPQAQQYQYGTFGAPSSAPGEVPQPAVGFPQPAPPPGLRHYPQPPPPSYAVYPPLPPQTYPAAAPYYALGYQAVQGYIPVVEGRPVRMRRLPFCGLGMGWFLFIIGFFLAAIPWYIGAFVLICVRVHDYREKPGYVACTIAASLAAIAILLGVTRGEEIWSSSRRSSAHGSSPGDKPPPSSSSCGFIIHEADVYSADPADLTRGFAPAVARSSGDEAWYFFSAVRGLKGGRKARTVDDGAGCWHSEAGAKPVLAASSGRRLGHRQSFSFITKDDDGQRVRSGWLMVELSLDVDEEEQLVLSKVYFSPRAPGARKPTTAAAMSRHKRKLSTTDIASPPRRQRRHRVVPSSPPEEPNTSPSPAAAPPDQQEGGDDDPDRGSISWWLRRVFGLTATFTEEESIELNPWLKDILRPFPPPLPPTPPPPCPSPRRKLIDMPEIREFIMRGSYLGGGPAPPRYECDHPAMVMTGGDDQQQLDEQRRDDVGDDRAHYDRVDGQLQFERHYLQL

SEQ ID NO: 17432 - protein, 948 aa, Oryza sativa
  Clone ID: TF_OSC900006j.C1.p17.fg
MSATLSSFLLLLFSFLSSLPLQSERKAKQVEGSGRAATGKHDSGVEVDVIASTYYMRARERDAGAEADALREELWSVKAELELAKTKAVAAAAAAGALAEKAQEVYKRGREDVRNTIASYRSALLKMELFSRVLPPLGIAMGDSWSDTEIIMFLAERKTWDPLPQNILVGVDLTMIDPRDSPGTLWFLNWPDNQLCYDDENNVFRKAKNGYWKCVDACRIQTGTSILGVKLCLEFHEGQTPCGTRSGLMMYEYLIEQNDELNLPQAYKSLCRMFLQKDRKIVEDEHISLNLGVHHNFLGSYSQYLAEIQRQNMVMNSQAVSSDKKSIFIRELDERKSKKCSTKITRSSTRLYRQKIPHIWCLRHSVSRKWFRESMFRVIDKLAKLLESVLLDLATVRQKINKGKKRIWKMEGKLEKAQIQHLTDFNNKYGPSIRQSVETAEHNNCALRCLNNYLELMIEEPRFSSIAYVRLDSQVKKLDKENTSAMDLSSSLHQMLQKLNLRVQDEEVWVSQLGSNLQASFRKIMDTSSEIGKLEDEVLQLKVDIAEFAPGEVTSCAVYEMIKTLQIVELFMNNSTRHLKLIDGINSEMREFGSIFNGKVRCLVRFARYQQTIMEKSTQINLFQIINFLGDIRAKVDKMTQMYGLSEVVPIVSNQFIEGSFNADAYAFESLKEHSTDLCFSWRTRKFHNRLILPPVRQQTSGTCSYYATLSSVESLYKREYASYPTILKDKIGQPDEFLVNLSRAQLEDIVEDFYTRHKVKGSKRLNVCLDKMKNEGVISEESYMNPQAQSTERYKIKQYEELNLEIAMRERDKEEVSIVDKKCIGKKKKRRFRKKMRMKEHIFLTKIKKVIESHIMDGKVLIASFRVTTGYFRLLPHQIYKIPEEDPQYELNKKGNPCSHCVVVVGFGIRDGECYLIYLNSYGTSWGHDGFGRIYLDSVRKLFLAQV

SEQ ID NO: 17433 - protein, 364 aa, Oryza sativa
  Clone ID: TF_OSC900089j.C1.p24.fg
MAEIGKGLVFSPSDDQLTDGYLRSYLVRTSLDDLPSAATSYFHVADVYSAPPDQLVAGLAPAPGTGDGDGRVWYVFTPVRVLGSRGARKARTVGGGCGECWHAEGGPKDVKGSAAGGKLQKFSYKIKTALGAVVKPGWLMVEFSFPGSDHLALCKVYRSPRTSRYGAPSPPSSAASSPSRAAPPPVSSTSGRKRKAEEESDHPEAPASSAPRRTLPASEQHVDVDAAAASEPDQGGYLSTDQLDSVAAFVQEHEAFVQEHEGDEEFCKSLGFDERSDPQCWTNFFLSALEEFGPAPETDAAAVAVAAVEPGPCPEYEEHDDTATTAASSHAYDSATAELVNLSDKEFYDIIFSGDQQGGAAVAG

SEQ ID NO: 17434 - protein, 528 aa, Oryza sativa
  Clone ID: TF_OSC400849j.C1.p10.fg
MHHYLNRWIAGKTIPEMEAGFVAGADVYGDGPDALRRRHRPGYWCNCVYKWFFLCHRKRQSSRRTTGNKRAERVVAAGGRWKVEQGKKVLGGGGGGGERDSLGFYSSNSTKKTSWIMEEYTSSAADGAAAARGEEDRMEPVLCKIYLSPRAPAGEKRALFGEDGVAVGPDGRKRNARVTVLATLFDDVAALLGQPVAAPPLPAPGEQLGHGHGHFDDVAARFGQVAVAALPASGDLGHGDFDDDAAALLGQVAMAPAPAPGHHQQGYVVAEAPLPESGYLGHYHHDGHLAQAAAAPEQDHYLGYHSHDAHVVDAEATPEQGYHDDAHVAVAPAPEQGDLGHDQGHLAAALTPEECGEIVGAYEFHPEMVQMLSIGFAAPDEQLLPQLLDPTGGGYDMASSAIAAVGDVNAYAAAAPTPRIRPNAAEAMAATATAETMPPPLDAVAAELSAPPRGLPPELAFSALPSVQQEPSCDDGDNFGELVAEAMPPLIGENAGVDAGSDEPLPDLAGIMTELDFGHDFFSNQHRE

SEQ ID NO: 17435 - protein, 902 aa, Oryza sativa
  Clone ID: TF_OSC401141j.C1.p34.fg
MARLVTVAAAKVKGSASRFRYVCSTPRTLDQPWIIAGGKVIATKIRNATQLLSCKLGELVPEAWRECPNCKCHIDNSDVTLQWPEFPDGVKFDPSDLEVLEHLERKINLGNPGPQGLIDHFIPTLEKIYHNGVLKGWKKILVLYKGSKKNKIVQANWVMHQYNLGVEEGGEDGELVVSKVFYQLSSKQTGTPEMDSVTEEASDALTIRSDPITPITNPPLPRCLMNSPCDTEQNGTISHDQEGECSTSTLRPMVEAGNRAGCSAGASTAGDFNEDLLQRCEFPEDPVPTLDDTLPFLYTDETDLFSWEDFQFGSQESFGWVDGDHTLVQFLYLCMWDRLLVDDLLREKSIPLPNSVENSRKTLLRSPQFHMAPPTSAAAAVAAAARASPTSAAALALFKSVLSADKALSPLAVLPHLDGAPSSLPNLLLTASAAVRPHATSLRLYSRMKSLSLPISTASLHPLLSALPSAPAFALFADMFRLRLPLCTTTFNIMLRHLCSAGKPARALELLRQMPRPNAVTYNTVIAGFCSRGRVQAALDIMREMRERGGIAPNQYTYGTVISGWCKVGRVDEAVKVFDEMLTKGEVKPEAVMYNALIGGYCDQGKLDTALLYRDRMVERGVAMTVATYNLLVHALFMDGRGTEAYELVEEMGGKGLAPDVFTYNILINGHCKEGNVKKALEIFENMSRRGVRATVVTYTALIYALSKKGQVQETDKLFDEAVRRGIRPDLVLYNALINSHSTSGNIDRAFEIMGEMEKKRIAPDDVTYNTLMRGLCLLGRVDEARKLIDEMTERGIQPDLVTYNTLISGYSMKGDVKDALRIRNEMMNKGFNPTLLTYNALIQGLCKNGQGDDAENMVKEMVENGITPDDSTYISLIEGLTTEDERAIDDERLAAADAAKV

SEQ ID NO: 17436 - protein, 107 aa, Oryza sativa
  Clone ID: TF_OSC401019j.C1.p11.gm
MENGGNDGDGSAVLVVSWKHELVSRLQLSPSFHFVPTDKELVDFHLRGKIKRRKPPLYLINEKYKGYGEGMWYFFMVRGPSKTKKKDLPQLHMKLDYLCCPKHSPAF

SEQ ID NO: 17437 - protein, 464 aa, Oryza sativa
  Clone ID: TF_OSC400621j.C1.p9.fg
MANPSPMGCAVGVADGGAHHGGLWNIKEPFKLQNGWLLWAGVGLFGAIISIALVGVAMTYLNGEPPERETDSLVLLLPLIGSSSASTAFLVGITGVLAPILEETVFRGFLMVSLTKWFPTPVCILVSAALFAFAHLTPGQFPQLFILGVALGFSYAQTHNLLTPITIHAFWNSGVILLLTFLQRPIYSSEGTKCISLKKSLVFYKGRAAKGFKTDWMMHEFRLPSLTEPSLSKIPIDKKPAKDIWAICKIFKKPNSMAQRALSHPWGPQSTATTSSQFASESSSCSEEVAIPITQLNSQQCLQGRQQKPNNRQDGSSSKVINFKCSPSLTHQSDKDNHNCPVTLPFKTQTLQHMSGATSLLLSITPGIINSIYEASPNIRFGQTEPCNGYEVDWVIGTNGGIENSDEDPYTRTGTEYSTGSECGIRQKIKFPFDLLGDPSDNWTSNINMPCEFPLTPNSYSHVQ

SEQ ID NO: 17438 - protein, 143 aa, Oryza sativa
  Clone ID: TF_OSC5422j.C1.p2.gm
MATAAESQGLSPGFKFNPSVEQLLCFFLLPYLQHRRLLVDGVVFLDDPASAPPWALLHRHGRGGEDEAYFIGPVPAGDGHGGRRQQQVSRTVTGGGGGKWIKQRTERPRGEEEPVVVFGGETFRWEEFSLNFHADERCRSGST

SEQ ID NO: 17439 - protein, 311 aa, Oryza sativa
  Clone ID: TF_OSC401612j.C1.p17.gm
MGIGCGRRGCGRACVGSQGEDGDELSSDAIVGDVVMYRVERVDGEKKVPTPAPVGPNPNPNPSPPAGPIRLALALASRRPIPQRARARAETTAAAATATGMAPLADPAAEGFRIPFLPSDSDLLDCLLRPKIASGRVDPRFAPLVHDVADAFALPPAQLAAAHAPAPGAGGAEAWYLFSVRPRARARARAGSKRAASRAVGGGGGKRWCSMGAKKAVEGGGYCQRFRYKERTAAGVVAPRWMMVEYGVAQEHDGEGVAQEHGGEGVAELVLCKIFRSPEPSRRSESGSPSSSSSASASPSCSGGRKRKAAE

SEQ ID NO: 17440 - protein, 427 aa, Oryza sativa
  Clone ID: TF_OSC403595j.C1.p7.fg
MATLPQMAATKERQEAANPTTTTRTLVESVTNWIRVYSDGSVDRLGPPEAAAFMVLVPPYDDPRDGVTVHDVATDHGVDVRLYLTTTAPARRRPVLVHFHGGGFCLSHAAWSLCHRFYARLTVDLDVAGIVSVVLPLAPEHRLPAAIDAGHAALLWLRDVASGGSDTIAHPAVERLCGAADFSRVFLIGDSAGGVLVHNVAARAGEAGAEALDPIRLAGGVQLHPGFILPEKSPSELENPPTPFMTQETVDKFVVLALPPTKDTEKFICRADVYGSEPSDLAGKFAPVPRCEKGGRLFFTSCKRHKGSSTRKERTAGDGTWVRQNSKGVKNKAGVKVGETQNFRFKKDGSYTDWLMEEHHCCRQQAVAGDEEPVICRMYVSPRAPPDSAARQESAAFVQQQPAPQVSEPPCDKKKRDDVAEEAPAAA

SEQ ID NO: 17441 - protein, 265 aa, Oryza sativa
  Clone ID: TF_OSC401567j.C1.p17.fg
MAICAAAADHSRASPSSAATQPTTICWRPSKVKEEVEEDGMVVDPPDDASEASDNLRATGFQDTPTVGELVLRHLRPRLRGFHCADGDVPVIGVRDDPAAAAPLDLVARHGGAADRRRGEAFYFVRRRRCRRPNVRRTVAEGGGGGGGAGGLWKKSWTGSGKSVTDLGVVVPWSKTCYCFYRRDEGGRLSTFGGGWVLAEYEITEPGTYRRADEEEDDDDYWVLCHVRKTASKKRKRNRCDEAVAARAVAGTESKSYLLCGLTAN

SEQ ID NO: 17442 - protein, 344 aa, Oryza sativa
  Clone ID: TF_OSC400792j.C1.p9.fg
MARAVASGSSGGGGGQPFDPTAEDIVNRYLPLRRALRCDALPRQVHDADVYGAHPALLASVYPAANERFEWFFFVCRRQCPGGRRRAGPGDYRLSQEAKHRGNAFCHSFRYYEYEDAGGGFRETEWRMVEYGDRGRDAGAGGSEGFELVVCKVYPARGGALHERLGADRAVLATRHRADEDAKPQVLVQLYLASLRLGNPLACRVHRADDVFDAHPAVITAALPAANDRCEWFFAAVRPRGHAQGHGDGAPPRPRKAGPGAYVPVRECRVVDGRRGDMGCRLVFWYREDDEEARRASRRTEWWMDEYRFGPDFPYGELPAPMARGEDEELVVYKVYPRLVGNRR

SEQ ID NO: 17443 - protein, 374 aa, Oryza sativa
  Clone ID: TF_OSC400978j.C1.p35.fg
MAAAGADGLPPGLRFDPSDDELVGRYLLRRLQGQPLPLDGVVLDADPLSAQPWRLLADHGRGGDEAFFLAEAHAKNAKGKRQKRTVEGGGFWQGQRMCVDGKKLLVPGGDDGGGGGEVLEIAWRKYVLSFFAEGERGSSGWVMHEYSVTAPADLASSPLRLYRIRFSGYGKKRKREPEDDGRAHGAPRRAEAETALFDLEVGPPPPPLLVPPPAAAAADHGTDQSSSGVTDMVFRDLPDLIADAGAALPDQNQQDWSEVADQSSFCVMGDDSSLLLPDLPGMIDDNEHQQFVRECDMPHLFVPQAEEAIAGGGAASAPSADNQNCEFNDGEDMALSDFEFPESIDEVLSYIDFSTSDTSCRDFTMDELFDLPVD

SEQ ID NO: 17444 - protein, 517 aa, Oryza sativa
  Clone ID: TF_OSC401327j.C1.p19.fg
MESLRDMVLPPGFGFHPKDTELISHYLKKKIHGQKIEYEIIPEVDIYKHEPWDLPAKCDVPTQDNKWHFFAARDRKYPNGSRSNRATVAGYWKSTGKDRAIKMGKQTIGTKKTLVFHEGRPPTGRRTEWIMHEYYIDERECQACPDMKDAYVLCRITKRNDWIPGNGNELDNSDPHPEPYDAPPSVISTEQLNPAAEPVVGVEAAPVTVAEPDGVTTSAITANIPSPSDDINLDDWLNELFDPFFDPEQSLASADLSPDEQNVESSVSFFTVTVFAVLSLCILAHRAIFLLNLQNVGALAPKVEQDYSSPNENVVDDTEYLLPEDVYNILHPGTDDFNMLQNPLDQYPIQYATDVWSGIQKEELWSPQANAEPSQSNEAADNGIIRRYRSMKTPETSVPQFKGKTQAKMRVGINKMATSSSESINQTIKFENSGRLVEHQKNQAHDVASTKRSDAGKPSTELSSNRGFLRGIRNAFAGCSDARWNMILVAGFAIGVAVVALHIGQRLGLSQRDQQHT

SEQ ID NO: 17445 - protein, 276 aa, Oryza sativa
  Clone ID: TF_OSC401434j.C1.p2.fg
MAAAKRRVRDAEADLNLPPGFRFHPTDEELVAHYLCPRAAGRAAPVPIIAELDLYRHDPWDLPHRALFGRREWYFFTPRDRKYPNGSRPNRAAASGYWKATGADKPVLHNGRTAGIKKALVFYHGKPPRGVKTEWIMHEYRLAKKGGAAAAAGAGALRLDDWVLCRLYNKKNEWEKMQSRKEEEEAMAAAQSWGETRTPESEVVDSDAFPEMDYSLPAASFDDALLPKEEARDDDWLMGMSLDDLQGLGSLLQADDLSMLAPPPAAKTEPLGAPFF

SEQ ID NO: 17446 - protein, 224 aa, Oryza sativa
  Clone ID: TF_OSC400708j.C1.p1.fg
MERCSVLGLGGGGGGGGRLDGELPPGFRFHPTDEELITYYLLRKVVDGSFNGRAIAEIDLNKCEPWELPEKAKMGEKEWYFYSLRDRKYPTGLRTNRATGAGYWKATGKDREIRSARTGALVGMKKTLVFYRGRAPKGQKTQWVMHEYRLDGTYAYHFLSSSTRDEWVIARIFTKPGVFPVVRKGRLGISGGGGDTSCFSDSTSASVGGGGGTSASSALRAPLD

SEQ ID NO: 17447 - protein, 373 aa, Oryza sativa
  Clone ID: TF_OSC401682j.C1.p1.fg
MERCSVLGLGGGGGGGGRLDGELPPGFRFHPTDEELITYYLLRKVVDGSFNGRAIAEIDLNKCEPWELPEKAKMGEKEWYFYSLRDRKYPTGLRTNRATGAGYWKATGKDREIRSARTGALVGMKKTLVFYRGRAPKGQKTQWVMHEYRLDGTYAYHLLSSSTRDEWVIARIFTKPGVFPVVRKGRLGISGGGGDTSCFSDSTSASVGGGGGTSASSALRAPLAEASLFAAAAAPAVDGADSSNYGGGGGAGSATATANLVTGLELVPCFSTTAHMDASFGTGQYNPAPLAVEPPPPPPAFFPSLRSLQENLQLPLFLSGGMQAGVSSQPLSGGGAFHWQSGMDVKVEGAVGRAPPQMAVGPGQLDGAFAWGF

SEQ ID NO: 17448 - protein, 358 aa, Oryza sativa
  Clone ID: TF_OSC100569j.C1.p6.fg
MWSWLITGRGVAKKIRNAPHCSSRPISELGAEAQMECPNCKHVIDNSDLQKGRLLLMRKEVAIQWPGLPAGVKFDPSDLELLEHLEQKIGLGGSKPHTFIDEFIPTIDNDEGICYSHPENLPGKSKAIVEKGVTKGWKKIMVLYKSSQRGAKPDKANWVMHQYHLGAEEDEKDGELVVSKISYQLHGKQIDKSETGNADEESDAFAARVGPKTPKSNTPQPCRLKNSPCETENYDPILEDQDEEESNIPIVSLKDDAGNPAWCAGETQAAREAVQACPNLDESLRCHEVLDSFYHETLLPSDRPILSQGGNEILDRNLNAVYGLPDLYNVDLGTPPDFQLADLQFGSQESIGNWLDSI

SEQ ID NO: 17449 - protein, 532 aa, Oryza sativa
  Clone ID: TF_OSC401435j.C1.p7.fg
MAELPPEGRGGGGNNNGKWKGKEKVVPEYGKNRHGMSVGWYFVPKDLELFAILKCKLVRGQLPGALNNVFEHIRILEFHPALLHEMYIKNEEDGYIYFFSKRQFTTKAGNKRRPTRVTKGGTWKASGGSKTVRSKKVGGIDVGQKLTMVFYERRFEGDRNPIKTNWGMHEFTKIIDGTKNQLEDLAVYRLYKIKRKEDEEPSNTAAAASSTDEPSTSSALPPPTPPRPLPDMAGPSSATPLLPLQLPGLAGSSSAMSLPALQLPGMAGSSSAMPLPPLSLPGLAGGMMSMADQANMASTSQASTPSSELLQDWYDEFEITYGAVAPPSPSTISWVAPQSSPTGWWPSPNGGPVQHDGYLGMAADPTSYMLENLLPTAAIPPEPMMPPTSSPAPPPAVDHHHRLSPPHDAAGSNYNHPELADYNGGVQAQHEHQYHPQEPQASLVDAEDGYSAMAGGDDAQLGGAELDTERIAEMVNHIMDGEFEFKFEDNTVLKYNEVFPDNDEVVAAPMMIDGGRDGDGADGGDGDDPFDN

SEQ ID NO: 17450 - protein, 448 aa, Oryza sativa
  Clone ID: TF_OSC900188j.C1.p4.fg
MTPRASNLTGVEIYSPVEMKWKERSGTAKTAKMAKRRGGWENDATRMAAGEQERQASQVLGSIQARMSSDGASGSIGMKHDDGDHRPSTGASSRRCPSCGHDPDCNKPFDMVGMPAGVRFDPTDQELIEHLEAKVKDGGSTSHPLIDEFIHTIQGEDGICYTHPENLPGVTRDGLSKHFFHRSAKAYPTGTRKRRKVLADQQPDDHPQASKGRNVAAAETRWHKTGKTREITVRGQPKGCKKILVLYTSFGKKRKAEKTSWVMHQYHLGELDDEKEGELILSKVFYQTQTRSAAAAEAPVSSGAAMEVQGQQQQVLKLQADDGHFSSAPTKKRLHQDVVAQVKVDRGHHCMPAQRQVNFNLKVTPVPTTSSFPVVVDKQLYSPVALFRSEHLHVVQHYDTSILQIKPFDLFTFYREELQFISPKKQIGLTSAGLLTTKINMDNFLDSQ

SEQ ID NO: 17451 - protein, 556 aa, Oryza sativa
  Clone ID: TF_OSC900220j.C1.p29.gm
MAKRRGGWENDATRMAAGEQERQASQVLGEGARRHPGLDPDLRLRGSEDVVQEDCRRRRRHRRDARSSGLPRLAATAKPTSSPPPRASAGCACGSSSAAAVARRSSSSASTERRLTPPPCSSLASTERRLTPPPCSPRRPPPPPCSSSSASTKRRLTPPPPSSPPVSRRRRPARCPREKKREREKRKGEKRGKKEEADLDRLTWSIQARMSSDGASGSIGMKHDDGDHRPSTGASSRRCPSCGHDPDCNKPFDMVGMPAGVRFDPTDQELIEHLEAKVKDGGSTSHPLIDEFIHTIQGEDGICYTHPENLPGVTRDGLSKHFFHRSAKAYPTGTRKRRKVLADQQPDDHPQASKGRNVAAAETRWHKTGKTREITVRGQPKGCKKILVLYTSFGKKRKAEKTSWVMHQYHLGELDDEKEGELILSKVFYQTQTRSAAAAEAPVSSGAAMEVQGQQQQVLKLQADDGHFSSAPTKKRLHQDVVAQVKVDRGHHCMPAQRQVNFNLKVTPVPTTSSFPVVVDKQLEELQFISPKKQIGLTSAGLLTTKINMDNFLDSQ

SEQ ID NO: 17452 - protein, 293 aa, Oryza sativa
  Clone ID: TF_OSC401940j.C1.p3.fg
MDRHEEEAGESPCVPPGFRFHPTEEELVGYYLARKVASQKIDLDIIQELDLYRIEPWDLQERCKYGGHGGDEQTEWYFFSYKDRKYPSGTRTNRATAAGFWKATGRDKPVLSSPSTRVIGMRKTLEEGWVVCRAFQKPMPNQQQHRLSYGCIPGSYGAGAYAAVPDNYSLLLHHDNPSFAGRPLMSAAASALFANNNNNSVVDHSNILSSESKLHFSDMMPPLESPTIVDGEGYVSQASSCVDVDQQAGIVDWNLLTSLLPPPAHQLFHHLPSASSSKNSNNISSSGFIDDRD

SEQ ID NO: 17453 - protein, 351 aa, Oryza sativa
  Clone ID: TF_OSC400651j.C1.p3.fg
MVEPVKSELGSLFLPPGFRFHPTDAEVILNYLLEKFINPSFTSLPIHEVDLNKCEPWDLPTARMGNNEWYFSRKDMKYPTGMRTNRATKEGYWKATGKDREIFKPAIYEGSSKNNKQLVGMKKTLVFYMGRAPKGTRTNWVMHEFRPHANLHNHYPNLRLNPNEWVVCKVFHKKQGDEAINNQQQQPAVDQADDDDIFQLDDIFADPSIYDFSNSSANILSAPPNNNAVHSSVSAGTTMTSTTTASSFQHQPNCYSAPLQQHVSSWNNTPGAGGAHGIGSSYYNLQQQQQQAAMVKDLEDIIAVPDYGTLLPSSNKGSSIRSATAGVSQQNPLGVPQYKIENYGDHYISRE

SEQ ID NO: 17454 - protein, 50 aa, Oryza sativa
  Clone ID: TF_OSC100708j.C1.p4.hg
MHPNGAPLAVPPGFRFHPTDEELLYYYLRKKVAYEAIDLDVIREIDLNKL

SEQ ID NO: 17455 - protein, 331 aa, Oryza sativa
  Clone ID: TF_OSC400302j.C1.p15.fg
MGREGEELERRKRKGLWGREGEELEERRRRKMKRWDEEISDDSMMMGGEVRAIESRLPPGFRFHPSDEELVGYYLRNKQQQQQQQTAATSMLVEVDLHACEPWDLPEVAKVGSDEWYFFSWRERKYATGWRRNRASKQGYWKATGKDKPILHPTVAGARKTLVFYSGRAPNGRKTAWVMHEFRLLHHHHHPNPNIQNMQQQEGDDWVLCRVFRKGNNSNGQPLATSSPPAHHLVESLISSPAPTIMSDHDRLFTIQLPHHQHCDEQYFFLDDDEQHQQQLLDLSVLQAPTSFESEQAPGHGGMEINIAEMESFDTTCAALQDASDYCMQLY

SEQ ID NO: 17456 - protein, 292 aa, Oryza sativa
  Clone ID: TF_OSC400311j.C1.p13.fg
MEQQRSRSTAAGGEVEVEQLPGFRFHPTEEELLEFYLKQVVQGKKLKFDIIPTVHLYRHDPRELPGLARIGEREWYFFVPRDRKQATGGGGGGRPSRTTERGFWKATGSDRAIRCAADPKRLIGLKKTLVYYEGRAPRGTKTDWVMNEYRLPDAAAIPDTMQLQMQHDDMVLCKVYRKAVSLKELEQRVAMEELARSTTSSGTHNTGSPLQQDSSSISISSSSDAMKKEVVGVDEASAAAHELVRPATLSLPQLEVARPQSGLEWMQEPFLTQLRSPWMETWSPYYASVLNF

SEQ ID NO: 17457 - protein, 493 aa, Oryza sativa
  Clone ID: TF_OSC400785j.C1.p19.gm
MSISVNGQSVVPPGFRFHPTEEELLTYYLKKKVASERIDLDVIRDVDLNKLEPWDIQERCRIGSGPQNDWYFFSHKDKKYPTGTRTNRATAAGFWKATGRDKAIYSSSNRIGMRKTLVFYKGRAPHGQKSDWIMHEYRLDDPSSASASVSVNLPSYYSSSSSSSSPMHGVAGDQGAQEEGWVICRVFKKKNLVHHGGGAAAASHHAAAKLAAAAMEGSPSNCSTVTVSDHVKAQMLHSSASDDALDHILQYMGRSGCKQETKPAAMSASSAAAAAALEQHLSTPQYGKFMKLPPLEHVAGGVGLLAAAGGGGEYCSAADASGIADWDTLDRLAASYELNGALSDVASGKNMAGFFDVVDQPAGAAAFSSGDGDLWSLARLHIREVAIKIGVHGDGGERRVQGKGCDDPRGRFVACGNAEKRLRVRRRKRTSHKTGYNAASIRRDDRGVRMLYTSWRCSHDGRNTFTGTSSSGTSDDGGGSFTSGSNNRGGSRA

SEQ ID NO: 17458 - protein, 316 aa, Oryza sativa
  Clone ID: TF_OSC408811j.C1.p12.fg
MADDDEIALEPGYVFHPSDDGLITLFLRPSIAKIPFEDRLINHADVYSANPAELVGEHRPAPGTHGSSSVWYFFCSPRFTSKRKTSGRRQRAVGGGGGGESVWKSEGGKKAVIGADGRRVGYLQKFSYGVYESSSSGSARTFTRLGWCMTEYGLDDDAIDGADKQVLCKVYRSPRAVCAEARTAAAAKSADSPCSGSKRKADDGADHPEAPPSARPRQEEAGSEQPAILPELDLDALLSAPMDDSLGVEFDTATTEQYMRYLMNDEPLPWAPTMEVAGGGDEFIETTNGPCMGEEEIIQRLASGETLDDILGSNPN

SEQ ID NO: 17459 - protein, 256 aa, Oryza sativa
  Clone ID: TF_OSC400259j.C1.p78.fg
MADGGGRRAPGFRFYPTEEELICFYLRNKLDGLRDDIERVIPVFDVYSVDPLQLSEIHHEMLGGGGEEGEPWFYFCPRQEREARGGRPSRTTPSGYWKAAGTPGVVYSADRRPIGMKKTMVFYRGRAPSGTKTAWKMNEYRAFHYPDASSASASSAGAAAPPNHLPPQLRSEFSLCRLYTRSGGIRQFDRRPLAGGGDENPGPSMAAAAASPEENDGSGSSMQQLELMDQGGAVDPDWDQWDDLATLTALLYWPRD

SEQ ID NO: 17460 - protein, 204 aa, Oryza sativa
  Clone ID: TF_OSC418721j.C1.p3.fg
MGKEMNLIREDEYGGGGVGFEPTEDELMLHFLRPQLRGFAPRVAGAVVEADPCGAAPWELLARHGRREEGFFFSARARRKPSVRRTVAGCGGGGGGGGAWMHSSTKNGQSVTDLGVVVRWCRINYCFYVRGEMGQQRSTGWMMAEYEITDPRCYRRADDGEEDDFWVLCHVRKSSRPQAAKISPAKPARRRKPAAAAAADVRAA

SEQ ID NO: 17461 - protein, 285 aa, Oryza sativa
  Clone ID: TF_OSC407962j.C1.p2.fg
MEEEWCCVAPGFRFHPTEEELVGYYLARKVVGQQDDGIIQEVDLNSIEPWDLLQAQQHDQEYYCYFFSYKDRKYPSARGTGTRTNRATAAGFWKATGRDKPVLSSSRSSSSPAVIGMRKTLVFYRGRAPNGCKTDWIIHEYRLVAHHQQPDGSCWVVCRAFHKPTTTTLQHQLHLHRPPPLLHHPGYYAEQNLYPPLAAAAGGGGLLCSLALDMELEDEEDESKMMILSNDNIPLVVSPTAVHTQGTGGDIINDATTAPAAAAAADHRRHLAPPPPLHLLANSVD

SEQ ID NO: 17462 - protein, 290 aa, Oryza sativa
  Clone ID: TF_OSC900274j.C1.p4.fg
MEEWCCVAPGFRFHPTEEELVGYYLARKVVGQQDDGIIQEVDLNSIEPWDLLQAQQHDQEYYCYFFSYKDRKYPSARGTGTRTNRATAAGFWKATGRDKPVLSSSRSSSSPAVIGMRKTLVFYRGRAPNGCKTDWIIHEYRLVAHHQQPDGSCWVVCRAFHKPTTTTTLQHQLHLHRPPPLLHHPGYYDDQYLCPPPAAAGGGGLLCSPALDMELEDEEDESKMMILSNDNIPLVVSPTAVHTQGTGGDIINDATTAPAAAAAAADHRRHPELLAAGPIDTLLHHHHFTC

SEQ ID NO: 17463 - protein, 329 aa, Oryza sativa
  Clone ID: TF_OSC900019j.C1.p16.fg
MECGGALQLPPGFRFHPTDDELVMYYLCRKCGGLPLAAPVIAEVDLYKFNPWDLPERAMGGEKEWYFFSPRDRKYPNGQRPNRAAGTGYWKATGADKPVGSPRAVAIKKALVFYAGKPPKGVKTNWIMHEYRLADVDRSAAARKLSKSSHNALRLDDWVLCRIYNKKGVIERYDTVDAGEDVKPAAAAAAAKGGRIGGGGGAAAMKVELSDYGFYDQEPESEMLCFDRSGSADRDSMPRLHTDSSGSEHVLSPSPSPDDFPGGGDHDYAESQPSGGCGGWPGVDWAAVGDDGFVIDSSLFELPSPAAFSRAAGDGAAFGDMFTYLQKPF

SEQ ID NO: 17464 - protein, 323 aa, Oryza sativa
  Clone ID: TF_OSC401022j.C1.p2.fg
MEEGLPPGFRFHPTDEELVTYYLARKVSDFGFATRAIADVDLNKCEPWDLPSKASMGEKEWYFFSMRDRKYPTGIRTNRATDSGYWKTTGKDKEIFHGGALAGMKKTLVFYRGRAPKGAKTSWVMHEYRLQSKFPYKPAKDEWVVCRVFKKLQCHLAKPRPPHDDVDGDGASPPEMVDASSLGELGELDVSSILLGGFAPPSGELCHGGGGGDGFGAHRLHVGAYMSWLQAAAAANQGMFQWPAATQAGLVGGTVFAAAHKAAGTMPFGGGCSQQQARDVGVSLANVGGGDALFGGAPLAKVDMECGEQAPQLDMDDSTWRAF

SEQ ID NO: 17465 - protein, 567 aa, Oryza sativa
  Clone ID: TF_OSC22429j.C1.p1.fg
MAAADGLLPGLKFDPSDHDLVGRYLLRRLQGQPLPLDGVILEADPLSAPPWKLLADHGRGDEAFFFAEAHAKNGKGKRQKRTVEGGGFWQGQPTCVDGERLCVPDDGVGSGGGGGGLQIAWRKYVLSFFANGERGKFGWVMHEYPVTAPDGLASSQLRLYRVRFSGYGKKRKRKPQCPGAHGDDDGELQCAPPPRPMAKTALLEERGPLPHPVLGPASVVDQCTDQGSSGVIDDSSLVFRDLPDLIDLPVAEEADASHGAETALLNEHLPLPPPQLFVPPTAVPLDLADDSNGADQNSYGMMGDDQLLLPDLPGTINDDMPDLFVSQAEEASAVPAISYHSSGFMGNEVAALSDFELPESYSSSDAMDGEALALSNYEFPESFEEDLSCIDFATANASSLGFPMDGYPMDELFDDMPDQGSSGAMDDSSVVFRDLPGLINLPAAEEADAIGDAETALLRDLADDSNGTDRNSYGVMGDDQDRLLLPEIPRRIDMPDLFVSQAEEAGLGGGAALDSSSGAMDGEALALSDFEFPESVEEVLSCMDFSTVDMSFLDVPIDELLDDLPAD

SEQ ID NO: 17466 - protein, 334 aa, Oryza sativa
  Clone ID: TF_OSC421430j.C1.p8.fg
MEEEQRLPAGFRFFPTDEELVTYYLARKAMDATFTSAAIRDVDLYTSDPWHLPCDSSAASTGGGGGGECYFFCRRSSKYPSGARVRRATAGGYWKSTGKDKGVYAAGGGGGLVGTKKTLVFYEGRAPRGEKTSWVMHEYSRAPSTNFIRGAQARTHNLLDIIYSEWVICRVFKKQPPIEHWLEMEEVETTTTTTTVQEHTPNRRRLPPAEAAAAPPPPSGQPWQHTSRRSGDGRAAIDGGNREEEEDEHGLAREESSSPVVISSPSRCTSSPSSRLLNHEHLGASSSDDLPELMEFGDIYGGIAAGGPTDQQASSSNSNSICNFLDEPYYCWNF

SEQ ID NO: 17467 - protein, 244 aa, Oryza sativa
  Clone ID: TF_OSC406649j.C1.p1.fg
MSISVNGQSCVPPGFRFHPTEEELLNYYLRKKVASEQIDLDVIRDVDLNKLEPWDIQERCKIGSGPQNDWYFFSHKDKKYPTGTRTNRATAAGFWKATGRDKAIYNAVHRIGMRKTLVFYKGRAPHGQKSDWIMHEYRLDDPATDTAAATPTVTSAAAAAAAMAAAADGGQEDGWVVCRVFKKKHHHKEAGGGGGKHGGDGSAGAKAAHAYSSSDDALDQILQYMGRSCKQEHELPSPQASGGA

SEQ ID NO: 17468 - protein, 309 aa, Oryza sativa
  Clone ID: TF_OSC900198j.C1.p5.gm
MSISVNGQSCVPPGFRFHPTEEELLNYYLRKKVASEQIDLDVIRDVDLNKLEPWDIQERCKIGSGPQNDWYFFSHKDKKYPTGTRTNRATAAGFWKATGRDKAIYNAVHRIGMRKTLVFYKGRAPHGQKSDWIMHEYRLDDPATDTAAATPTVTSAAAAAAAMAAAADGGQEDGWVVCRVFKKKHHHKEAGGGGGKHGGDGSAGAKAAHAYSSSDDALDQILQYMGRSCKQEHELPSPQASGGGGAGAGSRPASRYLPPMYPSLRASGFGNRSLFRRPRGGSAAIGYSSVLPDNNIVYILYVVSGSSAD

SEQ ID NO: 17469 - protein, 494 aa, Oryza sativa
  Clone ID: TF_OSC900189j.C1.p17.fg
MAGLGKGESSGGGGGGGGEMGFRFKPREAEAVEYYLLPRLQGRPPVPNPAIVVENVYEFEPERLINEKCNGGVAGEGEEGWYFLSPRDRKYRNGKRPSRSTEDKAGRWKASTGKTEGKDPITECYGWVKFCVTSLVYFKGPVKTEKKTKWLMREFTIPHFENKLDKTAAAGGSSNQRQLDQYVLCRIYTSPKKGADDGEQAEVVRGGGGGGEDIDEWAEACAVFDLGPETAEGSDNADAAAAEGDMRSAKQAGKRPVAAAAVAEQPSKRPWLPPSPSTPCDGGPSQAMGNRQVPMQGLSLMHNFPPPPTTFCGHAPFQQGFPVHNNRAQMRWPTMQHNCMPSPAHSFQPRPVQRRPVLVGQAPPQRRPVHHVGGHAPMHMHQAQWTPVHIAQAPMQQLPFDDWVFDPFDDPPPPMQQLPVMMNNYQPQAPMQLPPMMNNDQPAMVHGGELQAPMQLLPATTHGGEVQAPMPLNVYEEEQRPSQEDGGQCTNAEG

SEQ ID NO: 17470 - protein, 683 aa, Oryza sativa
  Clone ID: TF_OSC900291j.C1.p15.fg
MKQGKVEMTPAVAAAAVLPVGFRFRPTDEELVRHYLKGKIAGRSHPDLLLIPDVDLSTCEPWDLPAMSVIKSDDPEWFFFAPRDRKYPGGHRSNRSTAAGYWKATGKDRLIRSRPAGPLIGIKKTLVFHRGRAPRGLRTAWIMHEYRTTEPHFQSGKNGSFVLYRLFNKHEQDDTHTPASNLDQQLSTSSQGNPQNGTPAVQPALASIMKDHQTLPSSGFSQLTEIQDASTSVHDKEQTVAHDDAFLDVLSQLPDLEPEQRYNGFPNITSPIRPYSDHPFVGNLGEQDLSAHFGSTLSEQDLQSLLFSPNYTKMDKHPTGNVESNPTASSNNPNNNTLLMDSWRKNDSYQMLLIQRADNTDATCCSSSINAPQTETSDANLEARAQSSSMVYSGVAEGSPLCNQDQLHSAFNPHMESQKSGAFCWAGLWTPYPQHWFDTIVEPGRSGMTFSDALKEQGQEQAPSMKHLTAQDLVDPQQGTAARRIRLVCSVERASVSQPVSSHLQSEYEAGSCCNTRNSSNNKKESVRSEDEAGSCCNTGSSSNNHSEENDDAASQIMVLLQFIDGEPMHIQCKEDTPIQVDHSVEVMDKLQGFSFHEEMLVHANQPRGTNLKQRLLRVESRNSNENNVPSLETREQQHAPHIQKWTSSVVRLGWGWQWPALFVMAGSLLLLVGVWKSLNHTT

SEQ ID NO: 17471 - protein, 322 aa, Oryza sativa
  Clone ID: TF_OSC407684j.C1.p4.fg
MSGGGEGAAAAERQELQLPPGFRFHPTDEELVMHYLCRRCAGLPIAVPIIAEVDLYKFDPWHLPRMALYGEKEWYFFSPRDRKYPNGSRPNRAAGSGYWKATGADKPVGTPRPVAIKKALVFYAGKAPKGDKTNWIMHEYRLADVDRSARKKNTLRLDDWVLCRIYNKKGGVEKPSGGGGGERSNMMSHGETASAGSPPEQKPAVLPPPPPPYAAAAPFSELAAFYDVRPSDSVPRAHGADSSCSEHVLTTSASSGGVVERPEVQSQPKIAEWERTFAGAAAPAGAVSTAGPILGQLDPAAAVAGGGDPLLQDILMYWGKPF

SEQ ID NO: 17472 - protein, 228 aa, Oryza sativa
  Clone ID: TF_OSC401583j.C1.p24.fg
MAAEAASGGGGGYRMLPQAGLPIGFRFRPTDEELLLHYLRRKVMSRPLPADVIPVADLARLHPWDLPGEGDGERYFFHLPATSCWRRGGGGSRAGGGGGAWRASGKEKLVVAPRCGKRPVGAKRTLVFFRRGGARTDWAMHEYRLLPADDHPPEANDVWVVCRVFKKTTTLAHRRSPPSIRGAPRRRAAAADDDDMPSSPSSCVTDGGDAGEEGEESSSCSVVASNCP

SEQ ID NO: 17473 - protein, 272 aa, Oryza sativa
  Clone ID: TF_OSC2451j.C1.p1.np
GLSIPMVNGATIHLLPGFRFRPTDDELVIKYLYPRAFHVPLPCAIITDVDIHHHNPWDIVAEREKGKHFFTRKEVKYPGSRRSNRVAGNGFWRAAGSEVPIYYKPEGAANELVGMRRTLVFHYGKSRSAERTEWAMHEFQLAGAGLLPHPMMSSWVICCIYKKRQQNTKNKSEDITDKNNGSPSAAHTHAPLVETMVEPDNSWMICRIYKKRQRAPQVIIPPSIGNAREAVLAAAIGNAGDRQVTSLTSQGIDFEEGSDESANVITKDKGSD

SEQ ID NO: 17474 - protein, 157 aa, Oryza sativa
  Clone ID: TF_OSC2465j.C1.p1.np
GLSIPMVNGATIHLLPGFRFRPTDDELVIKYLYPRAFHVPLPCAIITDVDIHHHNPWDIVAEREKGKHFFTRKEVKYPGSRRSNRVAGNGFWRAAGSEVPIYYKPEGAANELVGMRRTLVFHYGKSRSAERTEWAMHEFQLAGAGLLPHPIAQNWHA

SEQ ID NO: 17475 - protein, 506 aa, Oryza sativa
  Clone ID: TF_OSC401036j.C1.p17.gm
MERRCGTSAPAIEDMSPHSRSTAGKYIAGYIVKKKMHPNGAPLAVPPGFRFHPTDEELLYYYLRKKVAYEAIDLDVIREIDLNKLEPWDLKDRCRIGTGAQEEWYFFSHKDKKYPTGTRTNRATVAGFWKATGRDKAIFLGSGGGTRIGLRKTLVFYTGRAPHGKKTDWIMHEYRLDDDNVDVPEEGWVVCRVFKKKSIHQRGFDQPDMAAAADEDELRYQLLHGAGMSSSPVDQKHVLLQEQLVAHGAHGGGFVVPAFEASMHLPQLASADAAPCGGGGGGHVAFASMNPLDAAGCGSQNMMTMKMAATSGGEMLLMSGGGVDGGRFGAAADWSILDKLLASHQNLDQLFHGKVAGAHQQQQQMAMDAASSLQRLPFHHYLGLEAADLLKSSPLPVSHRPVPDRVPQAHDSSPPHRPAPPWGQAVVASSLRGQAAAAAGTNRLLAQSPHRRHRSNPRRLCRAPLPPRAVTRHIAAAGPSQPTPPPRRPIASSPASPSSPKIWYDL

SEQ ID NO: 17476 - protein, 301 aa, Oryza sativa
  Clone ID: TF_OSC401231j.C1.p5.fg
MSESEVSVINQLEEEETRLELPPGFRFHPTDEEVVTHYLTRKAQDRSFSCVVIADVNLNNCEPWDLPSKAKMGEKEWFFFCHKDRKYPTGMRTNRATASGYWKATGKDKEIFRGRGLLVGMKKTLVFYMGRAPRGEKTPWVMHEYRLDGKLPPNLPRSAKEEWAVCRVFNKDLAAKIAQMPPPPFPRNDSFDLDLDDFLHLDADLPPLIDDPFASTSTLKTEPPPPANLMHNHYGYFSLPASATNYNHSSGAMADQAIRRFCKAEASTACFSGADADVDPVVDELLSFPDSITDYSYIWKA

SEQ ID NO: 17477 - protein, 678 aa, Oryza sativa
  Clone ID: TF_OSC32411j.C1.p2.fg
MAAAAGDGLPPGLRFEPKDDELVARFLLARIQGKPLPLHGVILDADPLCAPPWRLLADHGRGDDAFFFAEARAKNGKGSRQKRTVEGGGYWQGQRMCVDGERLVVPDGGGGGGVEIAWRKYVLSYFADGEKGSSGWVMHEYAITSPADLASSAMRLYRIRFSGHGKKRKREPDSQSAHDEHGRARCAPQIAMPETALLEDSAPPPQPVHPPAAVVDCVCDVTDQGSSLVFPDQPGSIYEDELQSFVPEFAARNLFVSLPEGSRDVVAEAALIEDLALSPQPVPPPAEVVNQADDSDGADQGCSSVFAALPDLIVLPPEEACGSGGAAPAPSWASSLDNQNDDAPAFFEFPESMDDMVGCFDFASMDNQSCTSAVSEIAVLEEPFLPPPTMVNHDNNSVSDGADQSCFGVGDNSTLVFSDLTGSIDEDELQSFVPEFVSLPQGSCEADAEADSGGGVAPAQFAEFGGPESMDDPLNFPAEASGGGDRAAPASSWVSSQDNQNDEAPMFFELPESLDDMVGCFDFAAMDGQSCTSAVSETALIEELVLPPAAMVNHHDDSVSDIADHGCSGAVPPPNSEVVDLPNDSVGADQSCSGMVDDSLSGYYEAELKDASGGAGSMMSSPDKQKEHSSSGVMDVEATGFGVPDSMDGLSCIDFAETMDDLSCIDFTIDDELFDLWS

SEQ ID NO: 17478 - protein, 706 aa, Oryza sativa
  Clone ID: TF_OSC32411j.C1.p5.fg
MAAAAGDGLPPGLRFEPKDDELVARFLLARIQGKPLPLHGVILDADPLCAPPWRLLADHGRGDDAFFFAEARAKNGKGSRQKRTVEGGGYWQGQRMCVDGERLVVPDGGGGGGVEIAWRKYVLSYFADGEKGSSGWVMHEYAITAPADLASSTTRLYRIRFSGHGKKRKREPESQSDNHQIAVAETAMLEDSAPPPQPVHPPAAMVNCVSDDTDQGFSGAVPPPAPVVHHTNDSDVTDRYSSLVFSDQPGSIYEDELQSFVPEFPARNLFVSLPEGSHEAEPAQSVSSLADVGGPENMDDQSCSGVVFANLPELIVLPSAPSLDNQNDEAPVFFEFPESMDDIVGCFDFAAMDNQSCTSAIPEEPFLPPAAMVNHDDGYASNNADQGCSGAFPLPAAVVDLPNETDGADQSCSGVGDNSTLLFSDVTGSIDEDELQSFVPEFAASNLFVSLPQGSCEADAEADSGGGVAPAQFAEFGGSESMDDSSMMYPLNFPAEAGGGGGRAAPASSWVSSQHNQNDEAPMFFELPESLDDMVGCFDFAAMDGQSCTSAVSETALIEELVLPPAAMVNHHDDSVSDIADHGCSGSVPPPSAVVDLPNDSDQSCSGYYEAELKVPLEYAARNPVDSPAKGGNEAEVDASNGAGSMMSSPDKQKEHSSSGVMDVEAIGFGVPDSMDSLSCIDFAETMDDLSCIDFTIDDELFDLWS

SEQ ID NO: 17479 - protein, 496 aa, Oryza sativa
  Clone ID: TF_OSC407633j.C1.p20.fg
MTAESNGGNSSAAATTASNGGRRRHELVPKLRLPPGYHFVPSDEELVDFYLRGKIEQRRPPMDFINEVDIMSFDPVKLIEKYKGYGENRWYFFTVRKPSKTKKKDEPNRKVVVDGVEEGSWSATGSVAYICGKDHETVIGTKRVLTYKSARSAEEDKWSMHEYVMLDKSQILDTTRDTMSMDQYVLCAIQLKQTYEAEKKAQEEEERGVKRKRTATRKRRKGDIDQTTSQEQEDQQQETPPPGDPHDQSVVDAPYYSTQMALGGEEEVAPVPWCADCMAQPDRIEYPAVWYNQQEQQPSQLVDRSMMTQGYIGDLSYIQNQFDQQQAHDHGSINAFDEALDQCHDTNFAWDNAGIYPGNNLLDGNLDDDTQDQFGNQSTLGALTGELEYGTGYQFHDALQATPGSDDASAQSMGIQPAAGHSMGDDDETCCNDDLSSLLADISRILLDGNGVINNEGNPEGSNQGLHICKDGHQWPLEESTMPTVECVLQHPGESA

SEQ ID NO: 17480 - protein, 285 aa, Oryza sativa
  Clone ID: TF_OSC8882j.C1.p8.fg
MVMSGGGGGARIVSDPAATPGFRFYPTEEELIGFYLRHRLAGTRADDVARVIPVVDVYGYHPSQLAAMAGVATAGDREQWFFFCPRAERELHGGRPARTTPSGYWKATGSPSFVFSSSAAAAARVIGVKRTMVFYQGRAPSGTKTRWKMNEYKAVAAAAADDDHNAAGVAVQLPPMAPPPSSSACVRLRNELSVCRVHHQPQLQQQQRQLPSSAAAAATNGNLIALAGGYECSHDSSGGSSEDAAIDWSSLITAATDSATAAVDFSFNDDIDFSPAAVGPWAPQL

SEQ ID NO: 17481 - protein, 307 aa, Oryza sativa
  Clone ID: TF_OSC900066j.C1.p15.fg
MVMSGGGGGARIVSDPAATPGFRFYPTEEELIGFYLRHRLAGTRADDVARVIPVVDVYGYHPSQLAAMAGVATAGDREQWFFFCPRAERELHGGRPARTTPSGYWKATGSPSFVFSSSAAAAARVIGVKRTMVFYQGRAPSGTKTRWKMNEYKAVAAAAADDDHNAAGVAVQLPPMAPPPSSSACVRLRNELSVCRVYVSTGTLRSFDRRPLDAPPVISHHQPQLQQQQRQLPSSAAAAATNGNLIALAGGYECSHDSSGGSSEDAAIDWSSLITAATDSATAAVDFSFNDDIDFSPAAVGPWAPQL

SEQ ID NO: 17482 - protein, 218 aa, Oryza sativa
  Clone ID: TF_OSC409911j.C1.p6.np
CALISSMAMQLSLPVLPTGFRFHPTDEELVINYLQRRATGLSCPIPIIADVEIYNFNPWELPSMALFGEHEWYFFTLRDHRYPNSVRPSRSAASGFWKATGTDKPVQVANMHPVAMKKALVFYVGRPPMETKTTWIMHEYRLTNTGGSTASHPSLSSSTAHPSVKLDEWVLCKIFNKSRAGQHRTTIKRRLTVTVLAAAAAAGGTARALQSNIKKNKK

SEQ ID NO: 17483 - protein, 196 aa, Oryza sativa
  Clone ID: TF_OSC29108j.C1.p1.fg
MAPRKVHGLSIDLDIIPEVDLYKCEPWELEEKSFLPSKDSEWYFFGPRDRKYPNGCRTNRATRAGYWKSTGKDRRINYQNRSIGMKKTLVYYKGRAPQGIRTSWVMHEYRIEESECENAMGIQLQDSYALCRIFKKNVVLGEFDKKGECSSSQAKGNEEVTDFGDAGQSSGANENDKDNSWMQFIAEDLWCTNKLK

SEQ ID NO: 17484 - protein, 316 aa, Oryza sativa
  Clone ID: TF_OSC401108j.C1.p12.fg
MAAAVGGSGRRDAEAELNLPPGFRFHPTDEELVVHYLCRKVARQPLPVPIIAEVDLYKLDPWDLPEKALFGRKEWYFFTPRDRKYPNGSRPNRAAGRGYWKATGADKPVAPKGSARTVGIKKALVFYSGKAPRGVKTDWIMHEYRLADADRAPGGKKGSQKLDEWVLCRLYNKKNNWEKVKLEQQDVASVAAAAPRNHHHQNGEVMDAAAADTMSDSFQTHDSDIDNASAGLRHGGCGGGGFGDVAPPRNGFVTVKEDNDWFTGLNFDELQPPYMMNLQHMQMQMVNPAAPGHDGGYLQSISSPQMKMWQTILPPF

SEQ ID NO: 17485 - protein, 383 aa, Oryza sativa
  Clone ID: TF_OSC400547j.C1.p10.fg
MRSSDIEKQDEVMLPGFRFHPTDEELVRFYLRRKIQQKSLPIELIRQLDIYKYDPWDLPKLASTGEKEWYFYCPRDRKYRNSTRPNRVTGAGFWKATGTDRPIYSSDGSKCIGLKKSLVFYKGRAAKGVKTDWMMHEFRLPSLTDPSLPQKKPLEKIIPPNDSWAICRIFKKTNSTAQRALSHSWVSPPLSSTNEAYTAPVSQTTQRSQHTSDNTSSVMTDAISSTIQFTGSSYLPSTVPSCHNPLSMIDSNSRPDASVPLPSPVAEHQTMGILSAIPLDITAGIDIASMVFNASSFTLPNMDRMTANIEFGQPQKCNSSSSMTNRCVVDMPDVANNINSGPRSINFNLQGTLSDDWRMTLPWESLPCTTEVSTNFQSTKCYT

SEQ ID NO: 17486 - protein, 515 aa, Oryza sativa
  unsure (1)..(515): unsure at all Xaa locations
  Clone ID: TF_OSC400240j.C1.p17.np
MAPVSLPPGFRFHPTDEELIIYYLKRKINGRQIELEIIPEVDLYKCEPWDLPEKSFLPSKDLEWYFFSPRDRKYPNGSRTNRATKAGYWKATGKDRKVNSQRRAVGMKKTLVYYRGRAPHGSRTDWVMHEYRLDERECETDTGLQDAYALCRVFKKTAPGPKIIEQHHHVEQPQWMTSSIDRSPTLDVSCDGRGDDFESSSFSFPTETPMDSMHGGFGMQMSAPHEDGKWMQFLSEDASNPFLTNPVSANFSCLPSKVDVALECARLQHRLLPPLEVEDFPHDTKIGILRSNPNDDILQEFLSVATASQELINGSTSSYPEMWLGASTSSASYVNELSSLVEMGVGTSNHHESARLQVEIADMEVFKDEKKRVEKSQVGEHSIPYSIQTVYRYSSCMHXLRARLQEAGHRMTDPTDVGGIELPRSSRNLNLTTLLLVSTTSTLASFDLYEKVDVNHRLFVSRVAAAKTFFHRIEPSKKVSFHSNPATAVSKATEKFHFPVTTKVSGRIMGIALSA

SEQ ID NO: 17487 - protein, 966 aa, Oryza sativa
  Clone ID: TF_OSC401213j.C1.p53.fg
MARLVTVAAAKVKGSASRFRYVCSTPRTLDQPWIIAGGKVIATKIRNATQLLSCKLGELVPEAWRECPNCKCHIDNSDVTLQWPEFPDGVKFDPSDLEVLEHLERKINLGNPGPQGLIDHFIPTLEKVEGICYTHPENLPGIKLDGTSSHFFHRISNAYGSGQRKRRKISHTGHAASDENIRWHKTGKIQQIYHNGVLKGWKKILVLYKGSKKNKIVQANWVMHQYNLGVEEGGEDGELVVSKVFYQLSSKQTGTPEMDSVTEEASDALTIRSDPITPITNPPLPRCLMNSPCDTEQNGTISHDQEGECSTSTLRPMVEAGNRAGCSAGASTAGDFNEDLLQRCEFPEDPVPTLDDTLPFLYTDETDLFSWEDFQFGSQESFGWVDGDHTLVQFLYLCMWDRLLVDDLLREKSIPLPNSVENSRKTLLRSPQFHMAPPTSAAAAVAAAARASPTSAAALALFKSVLSADKALSPLAVLPHLDGAPSSLPNLLLTASAAVRPHATSLRLYSRMKSLSLPISTASLHPLLSALPSAPAFALFADMFRLRLPLCTTTFNIMLRHLCSAGKPARALELLRQMPRPNAVTYNTVIAGFCSRGRVQAALDIMREMRERGGIAPNQYTYGTVISGWCKVGRVDEAVKVFDEMLTKGEVKPEAVMYNALIGGYCDQGKLDTALLYRDRMVERGVAMTVATYNLLVHALFMDGRGTEAYELVEEMGGKGLAPDVFTYNILINGHCKEGNVKKALEIFENMSRRGVRATVVTYTALIYALSKKGQVQETDKLFDEAVRRGIRPDLVLYNALINSHSTSGNIDRAFEIMGEMEKKRIAPDDVTYNTLMRGLCLLGRVDEARKLIDEMTERGIQPDLVTYNTLISGYSMKGDVKDALRIRNEMMNKGFNPTLLTYNALIQGLCKNGQGDDAENMVKEMVENGITPDDSTYISLIEGLTTEDERAIDDERLAAADAAKV

SEQ ID NO: 17488 - protein, 239 aa, Oryza sativa
  unsure (1)..(239): unsure at all Xaa locations
  Clone ID: TF_OSC401601j.C1.p17.np
XSFLVXDMEERNDVNMDKSDEILLPGFRFHPTDEELVSFYLKRKIQQKPISIELIRQLDIYKFDPWDLPKLASTGEKEWYFYCPRDRKYRNSVRPNRVTTAGFWKATGTDRPIYSTEGTKCIGLKKSLVFYKGRAARGIKTDWMMHEFRLPTLTDPSLPKKPIDKNIPLNDSWTIDSWTICRIFKKTSSMAQRALCQTWGAQLPGTIDPDIFSTLQSVQASQFALEKTQKVGLSHAKHH

SEQ ID NO: 17489 - protein, 333 aa, Oryza sativa
  Clone ID: TF_OSC900037j.C1.p9.fg
MSMMSFLSMVEAELPPGFRFHPRDDELICDYLAPKVAGKVGFSGRRPPMVDVDLNKVEPWDLPEVASVGGKEWYFFSLRDRKYATGQRTNRATVSGYWKATGKDRVVARRGALVGMRKTLVFYQGRAPKGRKTEWVMHEYRMEGVHDQQASSFSSKEDWVLCRVICKRKSGGGATSKSRSLTTTTTTIVHDTSTPTSSPPLPPLMDTTLAQLQASMNTSSSSAIAAVAALEQVPCFSSFSNSIASNNNNSNSATVNAQQCYLPIVTGSNNNGMSYLDHGLPEFGSFLDTQSCDKKMLKAVLSQLNSIGGEVLPGLPPPSEMAAAVSSSWMNHF

SEQ ID NO: 17490 - protein, 165 aa, Oryza sativa
  Clone ID: TF_OSC401231j.C1.p1.fg
MEMTMSSAATSLPPGFRFHPTDEELILHYLRSRATAGQCPVPIIADVDIYKFDPWDLPSKAVYGESEWYFFSPRDRKYPNGIRPNRAAGSGYWKATGTDKPIHDSATGESVGVKKALVFYRGRPPKGTKTSWIMHEYRLAADPLAAAANTYKPSSSSRFRNVSMR

SEQ ID NO: 17491 - protein, 346 aa, Oryza sativa
  Clone ID: TF_OSC401231j.C1.p13.fg
MEMTMSSAATSLPPGFRFHPTDEELILHYLRSRATAGQCPVPIIADVDIYKFDPWDLPSKAVYGESEWYFFSPRDRKYPNGIRPNRAAGSGYWKATGTDKPIHDSATGESVGVKKALVFYRGRPPKGTKTSWIMHEYRLAADPLAAAANTYKPSSSSRFRNVSMRLDDWVLCRIYKKSGQASPMMPPLAADYDHDEPSGVLDDAYSFYAPPMISTTLIPKLPKIPSISELFDEHALAQIFDAAADPPADHHQHALAVHPSLNQLLGVGDNFLAECYPSTASTATVAGGKRKASPAGDYAGGGHTPAKRLNGSCFDVAPQSVVGGLQATPSSVLAGLNHQMLPPQLF

SEQ ID NO: 17492 - protein, 470 aa, Oryza sativa
  Clone ID: TF_OSC900046j.C1.p19.fg
MATNLHLLLELGFRFNPSPEEVVTYYLPRLIAGHPPKDTESCIHRANVYGAEPRELAAQFAPVARSSNGDRFFLTECKRIKGKVSRVAGGGSWVSQTSKDIKNREGIKVGEAKNFRFKKDGTNTDWLMEEYHLCLRQASDLEPVLCRVYVSPRAAKDSAAHQESAALTPQEPAPPLAHAPAPAPIQEPAALPRQELAPAPPRLEAVITQQQATMKMGGSVPASKATRQSCVTASAPPPRRVAPQPAPPSLRTAPAAVAPPRQVPVITQQQAPPLKRPAPPVPSPPCAKKIRGPVSASPAARQSCVAASAPPPWCVPPPPRPAPPSRRVMAPLPPYPMDPFETPPSPHAPRHDPFEPPPSPDPPIQSYAIDPPIQSYAMDPFEQPPSPYAPHGVDDMDEFTRSLEAQLEEADGDEIAAATVAPPMAQNVAPDDDMDEFTRSLEAQLEEADGDDKIDDDEIDEEIFQIPLKD

SEQ ID NO: 17493 - protein, 252 aa, Oryza sativa
  Clone ID: TF_OSC400590j.C1.p15.fg
MAMTPQLAFSRMPPGFRFQPTDEQLVVDYLQRRTAAQPCVTPDITDIDVYNVDPWQLPAMAMYGSDHDRYFFTMAAREAQARRTTPSGFWKPTGTKKTIFVVAGGHEVPTAVKRRFVFYLGHHQPSGSNNNNKTSWIMHEYRLMNSPRAAVPSSSSVNRLPTDDLTEEMVLCRISNKDLPKPPFIHNSLLQFSSVGLNGDGYNYLILDHLEPPAMEYPNVGIGNVDDAAAGTDDPGDLDEEIDDSMQRNHGG

SEQ ID NO: 17494 - protein, 370 aa, Oryza sativa
  Clone ID: TF_OSC400934j.C1.p72.fg
MTWCNSFNDVRAVENNLATAAAVAAAKKQQQQQQVSQHVNLIKTCPSCGHRAQYEQSQLQAAAAATIQDLPGLPAGVKFDPTDQELLEHLEGKARPDARKLHPLIDEFIPTIEGENGICYTHPERLPGTRQPSGHWNWSTGYYDYEATLVVLLTCCCMHARVGKDGLIRHFFHRPSKAYTTGTRKRRKVHTDEQGGETRWHKTGKTRPVFTGGKLKGYKKILVLYTNYGKQRKPEKTNWVMHQYHLGSDEEEKDGELVVSKVFYQTQPRQCGGGSAATAKDLSVDLVAGNNIKASNAAAEHHHNDGVGGGGHGGNNSSMLKEAAGIVDFYNPAAALIGYSQAAPNNRAAASAHLTMPNFEVHTGGAGFGP

SEQ ID NO: 17495 - protein, 505 aa, Oryza sativa
  Clone ID: TF_OSC400431j.C1.p21.fg
MYTSPTLLALSFALLLLILLLYYSSSLLYSQLATRRRLTHACARSLPDAYESGMNRGHISSSELIDAKLEERRISTAKHCPSCGNKLDCKPDWVGLPAGVKFDPTDQELIEHLEAKVREEGSRSHPLIDEFIPTIEGEDGICYTHPEKLPGVTRDGLSKHFFHRPSKAYTTGTRKRRKIQTECDVQKGETRWHKTGKTRPVMVSGRQKGCKKILVLYTNFGKHRKPEKTNWVMHQYHLGDLEEEKEGELVVCKIFYQTQPRQCSWSSDRGGGAAATASAVTTAAVQQDQQRRRDSGSGSCSSTRDHEVSATSYSTAGYAVAAAVEMQHLKHAADHFSFAPFRKSFEEVGISGDQVHSNQLGRSEQQHAGQEQQPHRPLLATTTAVPATAFLISRPTNPVSNIVPPAMQHASVVLDHDQFHVPAILLHHDKFQQQQQQKLDRRSAGLEELIMGCTSSSTKGVVYTCTFRKLQFLTPKRQNGLTSHTGLLTTRIIMDSSNKAAFDMH

SEQ ID NO: 17496 - protein, 445 aa, Oryza sativa
  Clone ID: TF_OSC401826j.C1.p36.fg
MNRYDNNGHAAAAAAAAVAGGGGGGGGNKAAGEVDGHEDDLVMPGFRFHPTEEELIEFYLRRKVEGKRFNVELITFLDLYRYDPWELPGIEHLINKLDGGAAMAAIGEKEWFFYVPRDRKYRNGDRPNRVTASGYWKATGADRMIRAENNRPIGLKKTLVFYSGKAPKGVRSSWIMNEYRLPPADTDRYHKTEISLCRVYKRTGIDDGHGQVSTARSSAHSRGGGAAPVQDNKQGSSSTSTPTPPPTPSKLHLLSSECTSPPAIVTDHAAMVAHKAPSPRHHQQQQQLHAAKPCGGYLQNSSMASAAGGDQQQQFQQDFAAALYQQYSKNTSGAFASTYSLLNLVNAASMGSSAAAIDELSSLVGHGTPSYINPAAGSHNYSQFLHLPTTPSSHQPTPAPLGTTTAAAAATLPMSLAAFSDRIWDWNNPIPEAGGRDYSTSTGFK

SEQ ID NO: 17497 - protein, 365 aa, Oryza sativa
  Clone ID: TF_OSC1203j.C1.p9.fg
MAEEDDKKQKGPDVTVPSGYFFVPKPEQLIRDYLNHWITGRPIEELRDIVREADVYGSDPATLTEAHRAYGHDGKSWYFLTVAKWKGGRGGAGTAGRLNRCVEGGGTWHNSQRRRVIEGYGDRQAFEYRAPGNKKTNWLMEEIASNLPAAITDEGIMVICKVYLSPRAKEATADEEERQETNVVPGPKRLREAEATGYDAPAPETPQPDVGCSYSGGGETSQATASMDYCCSTTTHTADDTANAAAYYYGDVDAIKPDAYDGGDYGIGINADGELVLCGNGHGGIGTQGQMPLAMQNTNGEMTLFSPMNGYGVGFNEEVRQEPQVGGEVEMNDFFNDLFVDFDGAGDPNPNPNEGGDSHGHILCE

SEQ ID NO: 17498 - protein, 351 aa, Oryza sativa
  unsure (1)..(351): unsure at all Xaa locations
  Clone ID: TF_OSC401589j.C1.p15.np
FGCQHELSLSLSMVEARLPPGFRFHPRDDELVVDYLSRRRRRRRRRPTPTLIDVDLNKCVVDYLSRRRRRRRRRPTPTLIDVDLNKCEPWDLPEIACIGGKEWYFYNLKDRKYARGQRTNRATESGYWKATGKDREITRKGSLVGMRKTLVFYRGRAPKGERTDWVMHEFRQELDHANHHHHLKYMQEGWVLCRVFYKSRTEAVAAPTMESTLPRTSRSPLPPLVDSSISFNQEVLPCFSSSHHHGVDERVGCXSNPPSTSTRKGKETNTKGEVYGPQLGPCKVFAXASXAAQLLHLDSFSRAELFLLATAAGEGDRSDGNVGAGESGAYGEGPLCYLLADLVLGQRCWAC

SEQ ID NO: 17499 - protein, 364 aa, Oryza sativa
  Clone ID: TF_OSC401196j.C1.p76.fg
MDGSSMSSSSTQQQAQVPPGFRFHPTDEELVDYYLRKKVAARRIDLNVIKDVDLYKIEPWDLQERCRINGGSAAEEQNEWYFFSHKDKKYPTGTRTNRATAAGFWKATGRDKPIYATKQHSLLVGMRKTLVYYRGRAPNGHKSDWIMHEYRLETTETAPPQEEGWVVCRVFKKRLPTTRRDSDHDAPCGSWYVDEDAPGAFMSPMMITRSSILRPHQHHAGITLQEQHLHTTYKHRDLTTKIQQLQVPAAGHHLLNTMPHDLESSTSSFHSLLVSPDHHQINMHHAQADPFFDDMHAVDQATTTDWRVLDKFVASQLSNDATNKPADHYTDEGDILQVSDKQQEVAAADYASTSTSSSQIDPWK

SEQ ID NO: 17500 - protein, 240 aa, Oryza sativa
  Clone ID: TF_OSC2467j.C1.p1.fg
MHLPAVGMSHPTEGELVFHYLYRRAVNMPLPSEFICDVNVLPHNPWDIVPGSEKPVYYNQGGGSDCMLVGMRRTLTFYFGNSRTAERTKWGMQEFRLAGNGLSPYPAMKHATGDGSKPPCNCAETTIAKRNDGLSAVLRNVLAVTPLVETVVEPDGSWLICRIYRTRQRALPVITPPAIENAREIIIPPANGNAREAQVRFIDFLQQGSHIESSSPCSCIVGPSLAEGSDESAGSVDQKD

SEQ ID NO: 17501 - protein, 290 aa, Oryza sativa
  Clone ID: TF_OSC401137j.C1.p28.fg
MSPSRPDEADPAADFGSHPTDQELVTKYLRRHVDSGGNPWRYVHEADVYAADPDDLTGKYSPAVASDGSRAWYFFTTVRSKSTGGQRRARAVGDGGCWHSEAGAKDVVGGIRSPRPIGRRQFFSFVNKEGPRRVRSGWIMVEIGLKYAQQNASSDELVLCKVYRSPRAPPAAAAANKSMAAPPPTATKSKTEEATPPPDDVKPVVAAAQTPDTKILRAAKEAAATGCKRKADVKSSGARRGKRLCSRCRAETSESDSETAVLDRSPSIEDETADSSEIHGSSDGKFIRFL

SEQ ID NO: 17502 - protein, 300 aa, Oryza sativa
  Clone ID: TF_OSC33262j.C1.p5.np
EGSGGGGSAKKKEESLPPGFRFHPTDEELITYYLRQKIADGGFTARAIAEVDLNKCEPWDLPEKAKMGEKEWYFFSLRDRKYPTGVRTNRATNAGYWKTTGKDKEIFTAATPELVGMKKTLVFYKGRAPRGEKTNWVMHEYRLHSKSIPKSNKQDEWVVCRIFAKTAGVKKYPSNNAHSRSHHIHTRHGHLSSQLYCNKTHLVVDTTLTNPVDMAELSRFARGSRGCTHTSNHTPVTSTRLRPLSGLNLNLGSSPAMPPPPPPPPQSILQAMSMPMNQPRSTTNQVMVTEQMIPGLANGV

SEQ ID NO: 17503 - protein, 414 aa, Oryza sativa
  Clone ID: TF_OSC401927j.C1.p13.fg
MACAETYIENMEDRCIYFFSRRLFAAKARNKRQPMRVANGGTWKASGGSKTVRSKKVGGIDVGQKLTMVFYERRFEGDQNPVKTNWAMHEYTKIIPSSKNQCIYNKEGGHRAGERCRRGVEHGQALHAGGTATAYATATAIAEHGRIIVGNVATATAIARPGWVVVDDAAGTATAAAWPARVVGGDVALPGLAGEMTSMADQANMASTSQASAPSSELPQDWYDEYEVAYGAAAPPSPSTISCAALPSSPTAWWPSSIGGPVQHDGYLGMADPASCNTLEHLLPSAAIPPEPMAPPKNSPAAPPPADAGGNYDHPELADYGGGVQAQHEHHQPQELTDGADGDAQLELGAAEFDSERVAEMISQIMDGEFVFKFEDDTIVSFNEVAAAPMLIDGGGDGDGDGADGGVGDDPFDN

SEQ ID NO: 17504 - protein, 131 aa, Oryza sativa
  Clone ID: TF_OSC412891j.C1.p1.fg
MDDDEIALEPGYAFRPSDDGLITLFLRPKIAKIPFEHRLINHADVYSADPTELVGEHRPAPGTHGSGSVWYFFCSPRYTSKRKASGRRQRAVGGESVWKSEGGKKAVIGADGRRVGYLQKFSYHYTGQGHL

SEQ ID NO: 17505 - protein, 325 aa, Oryza sativa
  Clone ID: TF_OSC14633j.C1.p4.gm
MAGADGLLPGLRFDPSDDELVSRYLLRRIQQKPLPLDGVIVDADPLSVPPWTLLADHTRGDEAFFFAEARAKNGKGKRQKRTVEGGGFWQGQRMAVDGERLVVPGDDGGGGGDEGLEITWRKYVLSFFAEGERGSSGWVMHEYAVTSPADLASSQLRLYRVRFSGHGKKRKREPQCLDSHDDDDGGDQESATHRRAVAETTLFDGYVPRPAADGTDQGTYGVIDGESSLASHCLPDQIVPPAEEADATAGVENPLLDEERWSPPQPALVKQNSYDLMAISSLLFSDLPDRIDDDDLSVSQTEGTDLFEQGSSGVIDDDYCRVFHG

SEQ ID NO: 17506 - protein, 321 aa, Oryza sativa
  Clone ID: TF_OSC14633j.C1.p5.gm
MAGADGLLPGLRFDPSDDELVSRYLLRRIQQKPLPLDGVIVDADPLSVPPWTLLADHTRGDEAFFFAEARAKNGKGKRQKRTVEGGGFWQGQRMAVDGERLVVPGDDGGGGGDEGLEITWRKYVLSFFAEGERGSSGWVMHEYAVTSPADLASSQLRLYRVRFSGHGKKRKREPQCLDSHDDDDGGDQESATHRRAVAETTLFDGYVPRPAADGTDQGTYGVIDGESSLASHCLPDQIVPPAEEADATAGVENPLLDEERWSPPQPALVKQNSYDLMAISSLLFSDLPDRIDDDDLSVSQTEGTDLFEQGSSGVIDDDYCR

SEQ ID NO: 17507 - protein, 340 aa, Oryza sativa
  Clone ID: TF_OSC407201j.C1.p2.fg
MGDALWEMLGEEMAAAAAAAGEHGLPPGFRFHPTDEELVTFYLAAKVFNGACCGGVDIAEVDLNRCEPWELPEAARMGEKEWYFFSLRDRKYPTGLRTNRATGAGYWKATGKDREVVAAAAAGGALIGMKKTLVFYKGRAPRGEKTKWVLHEYRLDGDFAAARRSTKEEWVICRIFHKVGDQYSKLMMMKSPASYYLPVSHHHPSSIFHDLPPVPFPNPSLVPFHHDLPTSFHPPLLQHSHANSKNSSSNNGGFVFPNEPNTTNSSDNHISCNGAMAAAAAAAFPSFSCASTVTGKGGPPAQLGVNAGQQEPPPPTWMDAYLQHSGFIYEMGPPAVPRGA

SEQ ID NO: 17508 - protein, 320 aa, Oryza sativa
  Clone ID: TF_OSC401860j.C1.p15.fg
MGEQQQQVERQPDLPPGFRFHPTDEEIITFYLAPKVVDSRGFCVAAIGEVDLNKCEPWDLPGKAKMNGEKEWYFYCQKDRKYPTGMRTNRATEAGYWKATGKDKEIFRDHHMLIGMKKTLVFYKGRAPKGDKTNWVMHEYRLADASPPPPPSSAEPPRQDDWAVCRIFHKSSGIKKPVPVAPHQVPAAANYQQQQQMAMASAGIIQVPMQMQMPSMSDQLQMLDDFSTTASLSLMAPPSYSTLPAGFPLQINSGAHPQQFVGNPSMYYHQQQQMDMAGGGFVVSEPSSLVVSPQDAADQNNNAADISSMACNMDAAIWKY

SEQ ID NO: 17509 - protein, 376 aa, Oryza sativa
  Clone ID: TF_OSC400524j.C1.p1.fg
MEVEARIHLLLIKLVFYRSAEERESASVHINLLPVRELYFDPRKKMDAFSHVPPGFRFHPTDEELVDYYLRKKVALKKIDLDVIKDIDLYKIEPWDLQEQCKIGNEEQNEWYFFSHKDKKYPTGTRTNRATTAGFWKATGRDKPIYVKNCLVGMRKTLVFYRGRAPNGQKSDWIMHEYRLETNEYGAPQEEGWVVCRVFKKRVAAVQRAAGDGGDSPFWFNEHVAFMAPAPGLDSPYHGHRQSHPCKLEVEYHHHLLPQEAAPFMHLPRLESPKLPAADIIVATAASSALQPCGHTTAQQLQLQIEPVYVTADASAADWRDLDKLVASQFGHGDSTAKEPSYCNPVQVFQVEGKQEDSLDYVSTSASCGGEEDLWK

SEQ ID NO: 17510 - protein, 370 aa, Oryza sativa
  Clone ID: TF_OSC401780j.C1.p17.fg
MDTFSHVPPGFRFHPTDEELVDYYLRKKVASKKIDLDVIKDVDLYKIEPWDLQEKCKIGMEEQNDWYFFSHKDKKYPTGTRTNRATGAGFWKATGRDKPIYARSCLVGMRKTLVFYKGRAPNGQKSDWIMHEYRLETNENGTTPEEGWVVCRVFKKRVATVRRMADGSPCWFDDHGAVGAFMPDLSSPRQLLPHHHHHHPGSSAALYHGHHHQQLQQMYGHCKPELEYHHLLPQEAFLQHLPQLESPKPPPPPPAAAAYIGGHLGSSSSTALTTHDDEASGSAAQQQPPSLEAVYMAGAGVGIGVDASVTDWRLLDKFVASQLLSKESMSSYGSHPAQVFQAADGGKHEEALDYASTSAGSGGGEADLWK

SEQ ID NO: 17511 - protein, 225 aa, Oryza sativa
  unsure (1)..(225): unsure at all Xaa locations
  Clone ID: TF_OSC900198j.C1.p15.np
LKLIAGAASASASASPCGDQIIIRMSSRHRGAVAVEEDGQAHDMVMPGFRFHPTEEELIEFYLRRKVEGKRFNIELIAFVDLYRYDPWDLPALASIGDKEWFFYVPRDRKYRNGDRPNRVTPSGYWKATGADRMVKVEGDRPIGLKKTLVFYVGKAPKGLRSSWIMNEYRLPHGDADRYQKVEISLCRVYKRPGIEDNCSAIESRSTRHLAICRLITSSALLXLP

SEQ ID NO: 17512 - protein, 571 aa, Oryza sativa
  Clone ID: TF_OSC414191j.C1.p15.fg
MDVDPPPPLPPPPPPPPPPATPQQNKAVELPPGVYFNPTREEAMHHYLNRWIAGKTIPEMEAGFVAGADVYGDGPDALRRRHRPGYWCNCVYKWFFLCHRKRQSSRRTTGNKRAERVVAAGGRWKVEQGKKVLGGGGGGGERDSLGFYSSNSTKKTSWIMEEYTSSAADGAAAARGEEDRMEPVLCKIYLSPRAPAGEKRALFGEDGVAVGPDGRKRNARVTVLATLFDDVAALLGQPVAAPPLPAPGEQLGHGHGHFDDVAARFGQVAVAALPASGDLGHGDFDDDAAALLGQVAMAPAPAPGHHQQGYVVAEAPLPESGYLGHYHHDGHLAQAAAAPEQDHYLGYHSHDAHVVDAEATPEQGYHDDAHVAVAPAPEQGDLGHDQGHLAAALTPEECGEIVGAYEFHPEMVQMLSIGFAAPDEQLLPQLLDPTGGGYDMASSAIAAVGDVNAYAAAAPTPRIRPNAAEAMAATATAETMPPPLDAVAAELSAPPRGLPPELAFSALPSVQQEPSCDDGDNFGELVAEAMPPLIGENAGVDAGSDEPLPDLAGIMTELDFGHDFFSNQHRE

SEQ ID NO: 17513 - protein, 503 aa, Oryza sativa
  Clone ID: TF_OSC5990j.C1.p1.gm
MTWCNSFNDVRAVENNLATAAAVAAAKKQQQQQQVSQHVNLIKTCPSCGHRAQYEQAAAAATIQDLPGLPAGVKFDPTDQELLEHLEGKARPDARKLHPLIDEFIPTIEGENGICYTHPERLPGTRQDIGTGVGKDGLIRHFFHRPSKAYTTGTRKRRKVHTDEQGGETRWHKTGKTRPVFTGGKLKGYKKILVLYTNYGKQRKPEKTNWVMHQYHLGSDEEEKDGELVVSKVFYQTQPRQCGGGSAATAKDLSVDLVAGNNIKASNAAAEHHHNDGVGGGGHGGNNSSMLKEAAGIVDFYNPAAALIGYSQAAPNNRAAASAHLTMPNFEAQDVQRWLALLEIWSLILEILALRAELAPTWRLRGCHAGRREVDDDPAANGRRVAAASSGANHGDTGKSEHTGRLHVTRGDEPTARIRRRLLDGGGLRRRQPAAGEEGNGDEVTRGRFPAVRASTRRRELDASVGLGGTTPSEAGDERVLRSSGGDGGEHTASDGNSRGGAG

SEQ ID NO: 17514 - protein, 292 aa, Oryza sativa
  Clone ID: TF_OSC400621j.C1.p20.fg
MAGGGGGDRAPSSSSTAMISRLLPPGFRFRPTDGELVAHYLARKAADAGFTSAAIRDADLYRAEPWDLLPPPRCDAAAEEEEEEEERCGYFFCTRSFRWPSGTRTNRATATGYWKSTGKDKAVLHGGGGGGGRPVGVKKTLVFYRGRAPRGEKTSWVMHEYRLLHGGAAATASSSPTPTTVVARSEWVICRVFVRKTPDGNNDRGTTEHHLPSDDAHLRSSPAPANSVDGAGHASCSFFSGANESMAPSDHFNIGDDMILHGHDEEELLMMNCSSAFDLPELLDYESFSLDL

SEQ ID NO: 17515 - protein, 425 aa, Oryza sativa
  Clone ID: TF_OSC12503j.C1.p3.fg
MESPDSSSGSAPPRVLRRQQQQPGSAPELPPGFRFHPTDEELVVHYLKKKAASVPLPVTIIAEVDLYKFDPWDLPEKANFGEQEWYFFSPRDRKYPNGARPNRAATSGYWKATGTDKPIMSSGSTREKVGVKKALVFYRGKPPKGVKTNWIMHEYRLTDTSSSAAAVATTRRPPPPITGGSKGAVSLRLDDWVLCRIYKKTNKAGAGQRSMECEDSVEDAVAAYAPSSQQHATAAAGMAGSDGAGGVAAAHGGDYSSLLHHDSHEDTFLVNGLLTAEDAAGLSTGASSLSQLAAAARAAATPCDATKQLLAPSPTPFNWFEAFLPRAKEFPSGLSRSSRDIGDMSLSSTVDRSLSEAGAVAIDTGDAANGANTMPAFINPLGVQGATYQQHQAIMGASLPSESAAAAAACNFQHPFQLSRVNWDS

SEQ ID NO: 17516 - protein, 366 aa, Oryza sativa
  Clone ID: TF_OSC400780j.C1.p51.fg
MESCVPPGFRFHPTDEELVGYYLRKKVASQKIDLDVIRDIDLYRIEPWDLQEHCGIGYDEQSEWYFFSYKDRKYPTGTRTNRATMAGFWKATGRDKAVHDKSRLIGMRKTLVFYKGRAPNGQKTDWIMHEYRLETDENAPPQEEGWVVCRAFKKRTAYPARSMVETWDYSLHERNIMSAAAAAAFADPSAAYAQMRRQHRSGRFKQEAELDGAATALLHYSSHLAELPQLESPSAAAAPLQPNPSQLATAGEDDDCKGDNGGRRAKKARAAGDKVATTTDWRALDKFVASQLSPGECGSMEATAEAAAAAVAGVSSPLDHGDDDMAALLFLNSDERDEVDRWTGLLGSGAGASGVDGDLGICVFDK

SEQ ID NO: 17517 - protein, 664 aa, Oryza sativa
  Clone ID: TF_OSC32412j.C1.p3.fg
MASAAGDGLPPGLKFEPKDDELVARFLLARIQGKPLPLHGVILDADPLCAPPWRLLADHGRGDEAFFFADARAKNGKGSRQKRTVEGGGYWQGQRMCVDGERLVVPDGGLEIAWRKYVLSYFADGEKGSSGWVMHEYAITTPADLASSTMRLYRIRFSGHGKKRKREPESQSAHHDDGRARCAPQIAMPETALLEDSAPPPQPVLPPAAVVNSVSDGAVPPPAPVVNCDSDVTDEDELQSFVPEFSARNLFVSLPQGSHEAEADVVGGALPAQSMSSFADVGGPENMDDQSCSGVVFANLSDLIVLPPVEASGAAPAPSWASSLDNQNDEAPVFFEFPESMDDIIGCFDFATMDDPSCTSAISEEPFLPPAAMVNHDDGYASDNADQGCSGAVPLPSAVVDLPNETDGADQSCSGVVDDSSMVFANIHPLDSPAEGGHEAEAGAGGGRAAPAPSWVSSLDNQNDEAPMFFELPESLDDMVSCFDFAAMDGQSCTSAVSETALIEELVLPPAAMVNHHDDSVSDIADHGCSGAAPPPSAVVDLPDDSDGADQSCSGMVDDSLPGYYEAELKVPLEYAARNPVDSPSKGGHDHEAEVDASGGAGSMMSSPDKEKEHSSSGVMDVEATGFGVPDSMDGLSCIDFAETMDDLSCIDFTIDDELFDLWS

SEQ ID NO: 17518 - protein, 303 aa, Oryza sativa
  Clone ID: TF_OSC400909j.C1.p25.fg
MSGGQDLQLPPGFRFHPTDEELVMHYLCRRCAGLPIAVPIIAEIDLYKFDPWQLPRMALYGEKEWYFFSPRDRKYPNGSRPNRAAGSGYWKATGADKPVGSPKPVAIKKALVFYAGKAPKGEKTNWIMHEYRLADVDRSARKKNSLRLDDWVLCRIYNKKGGLEKPPAAAVAAAGMVSSGGGVQRKPMVGVNAAVSSPPEQKPVVAGPAFPDLAAYYDRPSDSMPRLHADSSCSEQVLSPEFACEVQSQPKISEWERTFATVGPINPAASILDPAGSGGLGGLGGGGSDPLLQDILMYWGKPF

SEQ ID NO: 17519 - protein, 314 aa, Oryza sativa
  Clone ID: TF_OSC401024j.C1.p4.fg
MTWCNSFSDVRTAVDSSLSPAAAVAAAAGKKAAASLAVLVKMCPSCGHRARYEQETTTIQDLPGLPAGVKFDPTDQELLEHLEGKARPDSRKLHPLVDEFIPTIEGENGICYTHPERLPGVSKDGLVRHFFHRPSKAYTTGTRKRRKVHSDEVDGGETRWHKTGKTRPVMANGRPRGYKKILVLYTNYGKQRKPEKTNWVMHQYHLGSDEEERDGELVVSKVFFQTQPRQCGSTAAAAAAKEASAAVAAAVVNSNYSIVHGHQGGGGGSFLKEANVVHEFYDPAATMGYRPPAPAAHFAPNFAVHAARNSFGGP

SEQ ID NO: 17520 - protein, 382 aa, Oryza sativa
  Clone ID: TF_OSC413292j.C1.p1.gm
MAMGGSSPAAGGGLGGRRGGGGAVEAAGLGAGGGPLARPGGGTVGRQRRRWRCRRRAVLRGALERCAAAGRKKEKCDVRTAVDSSLSPAAAVAAAAGKKAAASLAVLVKMCPSCGHRARYEQETTTIQDLPGLPAGVKFDPTDQELLEHLEGKARPDSRKLHPLVDEFIPTIEGENGICYTHPERLPGVSKDGLVRHFFHRPSKAYTTGTRKRRKVHSDEVDGGETRWHKTGKTRPVMANGRPRGYKKILVLYTNYGKQRKPEKTNWVMHQYHLGSDEEERDGELVVSKVFFQTQPRQCGSTAAAAAAKEASAAVAAAVVNSNYSIVHGHQGGGGGSFLKEANVVHEFYDPAATMGYRPPAPAAHFAPNFAVHAARNSFGGP

SEQ ID NO: 17521 - protein, 172 aa, Oryza sativa
  Clone ID: TF_OSC401927j.C1.p10.fg
MGSGRGRRRWCPSTARTGTACLSAATSSPRTLELFAILRCKLVCGQLPGALNNVFEHIRILEFHPALLHETYIGKEEDGYIYFFNRWQFATKAGNKRRPTQVAKGGTWKASSGSKTVRSKKVGGIDIGQKLTMMFYERRFEGDRNPIKTNWGMHEFTKIIDDSKNQKPGSPC

SEQ ID NO: 17522 - protein, 567 aa, Oryza sativa
  Clone ID: TF_OSC900009j.C1.p21.fg
MAAADGLLPGLKFDPSDHDLVGRYLLRRLQGQPLPLDGVILEADPLSAPPWKLLADHGRGDEAFFFAEAHAKNGKGKRQKRTVEGGGFWQGQNTCVDGERLCVPDDGDGSGGGGGGLEIAWRKYVLSFFANGERGSSGWVMHEYAVTAPDGLASSQLRLYRVRFSGYGKKRKREPQCPGAHGDDDGELQCAPPPRSMAETALLEERGPLPHPVLGPASVVDQCTDQGSSGVIDDSSLVFRDLPDLIDLPVAEEADASHGAETALLNEHLPLPPPQLFVPPTAVPLDLADDSNGADQNSYGMMGDDQLLLPDLPGTINDDMPDLFVSQAEEASAVPAISYHSSGFMGNEVAALSDFELPESYSSSDAMDGEALALSNYEFPESFEEDLSCIDFATANASSLGFPMDGYPMDELFDDMPDQGSSGAMDDSSVVFRDLPGLINLPAAEEADAIGDAETALLRDLADDSNGTDRNSYGVMGDDQDRLLLPEIPRRIDMPDLFVSQAEEAGLGGGAALDSSSGAMDGEALALSDFEFPESVEEVLSCMDFSTVDMSFLDVPIDELLDDLPAD

SEQ ID NO: 17523 - protein, 401 aa, Oryza sativa
  Clone ID: TF_OSC401001j.C1.p48.fg
MAESSESAWPQQSQQLQISSTMPAGSAWPEEENLENLEQPLPLLMPSSEDHREQQLVPVPWLQQDQDQEWHEQEQFLPLKNQNQEQLQDQQPLQDQEETRRYLGVPGIRFVPSDIELILDFLRPKLRGEQLPSYSYMHVCDVYSDHPKELTSKLGPSREGNWYMFSPRNRKYNKGKRPSRSTGQLGFWKSTTKNEAVLDALSDNMLIGYKACLTYHEYDESMPTPKLKKENAIKTPWKMWEFVCSNSNRPFDAEEEPMRLNDWVLCKVTNKDNKVTTKKFKPQRSKKPKKPKKLQQEEQPQNQGIVIRQPSESGSASSSHQEIPGSSLPGAGGDAAAAAATAAAVVDPMPLHMIPPSSWNYFSTGVTADGIVMDDSTGVDSYGCVDGAGALNFQRNIFYHR

SEQ ID NO: 17524 - protein, 489 aa, Oryza sativa
  Clone ID: TF_OSC418099j.C1.p5.gm
MEEEKRLERIIKEIDSPISPGGGAALLAEDDDLVFPGFRFHPTDQELVGFYLTRKVEKKPFSIDIIKEIDIYKHDPWDLPKVSHGAVALQGSSSSSSLSTAAAAEKECGYFFCLRGRKYRNSIRPNRVTGSGFWKATGIDKPIYSSSLAAAAAAAGAGDCIGLKKSLVYYRGSAGKGTKTDWMMHEFRLPSSISDSDHLQDASETWTICRIFKRSMTYTKGRAAAAAASMNKRISHELQHIHHHQQQQFYYHEVVHDGHGHHHRRHLQHYAGSASMAAAAANIVDVIDHSSDAETTTRSHSHSQSHLVADIRHRQSPFMLDFHAGTASSSSSTAAGWSEVMSFSRDGGSSSGSSWDELGRIMDISTNSANNNYYFAPPPSPAGAARLLLERASPLPPPPAGAARLLLARTRRSRLTLPAAACFPARAAPRRDGEEREAGGEGAIGGGLEVAAHGPSASARLAGQEASANRGAGEEQAAGAVVGEGADWR

SEQ ID NO: 17525 - protein, 359 aa, Oryza sativa
  Clone ID: TF_OSC410931j.C1.p1.fg
MEHDVHHHRQMMQQQQQQEMDLPPGFRFHPTDEELITHYLLRKAADPAGFAARAVGEADLNKCEPWDLPSRATMGEKEWYFFCVKDRKYPTGLRTNRATESGYWKATGKDREIFRGKALVGMKKTLVFYTGRAPRGGKTGWVMHEYRIHGKHAAANSKQDQEWVLCRVFKKSLELAPAAAAAVGRRGAGAGTDVGPSSMPMADDVVGLAPCALPPLMDVSGGGGGAGTTSLSATAGAAAAPPPAHVTCFSNALEGQFLDTPYLLPAADPADHLAMSSASPFLEALQMQYVQDAAAAGGAGMVHELLMGGGWYCNKGERERLSGASQDTGLTSSEVNPGEISSSSRQQRMDHHDASLWAY

SEQ ID NO: 17526 - protein, 753 aa, Oryza sativa
  Clone ID: TF_OSC401138j.C1.p3.fg
MTVMELKKLPLGFRFHPTDEELVRHYLKGKITGQIRSEADVIPEIDVCKCEPWDLPDKSLIRSDDPEWFFFAPKDRKYPNGSRSNRATEAGYWKATGKDRVIRSKGDKKKQQVIGMKKTLVFHRGRAPKGERTGWIMHEYRTTEPEFESGEQGGYVLYRLFRKQEEKIERPSPDEVDRSGYSPTPSRSTPDNMEPIEDGNTPLNRESPESALHESPIDLPALTEAQAAPITRWLADRTDNATTNEVNISHMPHHGLDGGAKASPSAGAFPQLIGSQQNIHDNNELATVSAPMLPHEDFNNFPLGAIGNFDGNMNPRDPVEEFLNQTIADPDEHSSTTSKAQYDSDTGIIPTEFENHGVMQGEFMDDLSGLENLDFWPDDRNPQLSALYEDTPLLPYDSTDQDVLSMDSGAESLQDLFNSMDDSNARNNVWGNEPFLQGTGFPMSWPLQPNSAFPNQGTANRRLMLQLSESLSPDFDVSMTRDECEDEEPGIVVTSKYVNEAPEESTAEKDMPSDGDDAEPTGITILRRRHAPTASSFSDGDDAESTGITILRQHQAPNASLLSDGDDAESTGITILRRRQAPTASSASSFTQQGAAVQRVRLQSNLDAAPCSSVDGSSSCIINEGESERTMEKPEIEENAGSTLAEGGTCHEDDQKEHDASAANAKSVLRLRKTAEGSDKENKQEEEEGVLASHMLVATYPSCSAVDTLKERVERKLKKASCKREDGHLLPSGLWAKADFDLLENDFKGWFGL

SEQ ID NO: 17527 - protein, 543 aa, Oryza sativa
  Clone ID: TF_OSC400138j.C1.p85.fg
MAAPEDGEDKNFGKNKHGLPIGFYFAPTDQELLAILEAKRLGRPLSRAHDAFFHDIRILDFHPAELYEKYAKDEEKGYFYFFSKREFPTSSKKRPLRVAEGGAWNSSGAVYKVVKSSKSGGGYDVGHKKTLVFHQRFPGDKEAVKTNWAIQEFTRIIGPQNEVPDLAVYRLYKMRKEGRETPADLAADEAAAAAAMNNRGQQASAAAMALPPPATGLPGGRMMSMADKANMASTSKAYGPSKSSSSQLQQDAAAAAAPPNAAGASNWAPRPCNCRECAPAAGHYGYFAAAAAMNNRGGQASAAAKALPLPAPGLPGVRRMSMADKANMASTSKAYATSQSSSSQLQQGAAAVAAPPNAAGPSNWAPRPCNCRECAPAAGQYGYFASMVPRPSLDRKGKGKAPMDCAEQAGGGGGCHAESTSTPAPPKGAEYYGCSVAVEDDDEELLKFLQAMVRGEEVEGDGDHAMADERGPQQGSSPVAAAAASGSAPAGHDGRRGSLQGGHHGSSSPTSLAAAAATGDDVTSAASAGDDVSGSQQEDHPAR

SEQ ID NO: 17528 - protein, 343 aa, Oryza sativa
  Clone ID: TF_OSC418457j.C1.p11.fg
MKRGCEDELGAGDVILRGVEEVEEEDDDDLVLPGFRFHPTDEELVTFYLRRKIAEKRLSIEIIKEMDIYKHDPSDFLKTSTVGSEKEWYFFCLRGRKYRNSIRPNRVTGSGFWKATGIDRPICSAAGGGGGDCIGLKKSLVYYRGSAGKGTKTDWMMHEFRLPPPPADDLAAGRSSPPPSLQEAEVWTICRIFQRNITHKKQPQPQLAVAAAAVPAPVPDATSSITGSLESDSAGDDVVEYMNTLQPPPASNVNGGYSNQRYFQEQWNSSSNDNTTVFHQHAAAAPPPEPSPATAMAGFGHDQSVLSSPAPSDFYYKDGCNDDIYRMVMELADPSLFYDHIYA

SEQ ID NO: 17529 - protein, 195 aa, Oryza sativa
  Clone ID: TF_OSC401435j.C1.p9.fg
MEGVDRIGWNLGLGFLRKERPPVHGDSGGSGGSNSNDGKWKGKEKVVPEYGKNRHGMPVGFYFVPKDLELLAILMCKLVRGKVPGALNNVFKHIRILNSTPPSSMTYIETMEDGYIYFFSKRQFATKARNKRRPMRVADGGTWKASGGSKKVGGIDVSQKFTMVFYERRFEGDRNPVKTNWGMHEFTKIIPGTKN

SEQ ID NO: 17530 - protein, 656 aa, Oryza sativa
  Clone ID: TF_OSC900369j.C1.p22.fg
MSHPSSSSSSAPPAAAEATSLAPGFRFHPTDEELVSYYLKRKVHGRPLKVDAIAEVDLYKVEPWDLPARSRLRSRDSQWYFFSRLDRKHANRARTNRATAGGYWKTTGKDREVRNGPTTVGMKKTLVFHAGRAPKGERTNWVMHEYRLDGQTTIPPQDSFVVCRIFQKAGPGPQNGAQYGAPFVEEEWEEDDEDVGLLPVEEKDNSDDQEKEISGAMEKGYLQMSDLVQNLVDQNENGTIALPVSDNSNNSNHSEDVDGNSGDILSDQNLGSNFLHHVEPVEQNGLVLNENMFSSANAGDLFNISSPNDGFLELKDFADIADLENPLANESTIWPSDGWPWKSTDSMEAVNGASNEFSPLAGEQIFQPEELEQLLQSLQEDSHMGSTISDPPHSSITNLAKPEEDCLMFYDAPFDSSMCDDGFRQLNGFLGSPSTNLSGIDMVDDGMPYYDAMDDNLFNDLLSSVQPSAGSSSHAFSGPVLTQEVNNSTYTYSPTQKVLEPNFVVGAPSSARLPEAGSQLNYVVLPDSQTKSSLIGKRFVKILDSISAPPAFAAAEFPASLRKSLAPISGAHHNTIRVSAEVISIGSLTPDSQDKWSLEKDEGMELLFSAGFEPDTRVHFGCNTITAVLRGGFCLFFFSAIMLLVSYEVGMCIYGK

SEQ ID NO: 17531 - protein, 164 aa, Oryza sativa
  Clone ID: TF_OSC414158j.C1.p9.fg
MESCVPPGFRFHPTDEELVGYYLRKKVASQKIDLDVIRDVDLYRIEPWDLQEHCRIGYEEQSEWYFFSYKDRKYPTGTRTNRATMTGFWKATGRDKAVRERSRLIGMRKTLVFYKGRAPNGHKTDWIVHEYRLESDENAPPQARSPFISLSINKIDLQFLEKIN

SEQ ID NO: 17532 - protein, 886 aa, Oryza sativa
  Clone ID: TF_OSC400167j.C1.p22.fg
MAKDKEVGPPPPPCVDSDHEDLPLAERRRRLLRPPAESKPPAPERREASAAAAAAEDSGGAAQQGWPGLPRGVEFNPTDSDLLWHLAAEVGNGQARRHPFINEFIKSVDETIGFGYTHPQDIPGIRQDGCASYFFHKNFKECANENSKCIRWQKSGNPISITLDGNLQGCKEVFVLYAYETDGNNPQITDWRLHQYHIESTEKDEGELVVSKIFYELEKNQFKWAEKSHAQSAQGASAIDDDSKEELQLDNHSFNMITENSSVQGNENKQKQTQTGTCPNLDKLSYFNVVSNMHIGNQINDHDEIEELDHMSLQERYRILMAENHSSSAVVSSEQCAIDGLENSCKPGTNGMIPKRIHEGTAFRDGMYSMLQEISSAPAIIGSIDNDNNRRLLTEGLSNNQQSHEAGCESGFLSTSSSAAPPQCQVVCSHDLLVNGKTLIYSRDPSSSSTPTFGDKNIQLEGTDDRTLLVDIKLEPALEGDFTEKITSSVQRTDPNHGTEGSNLVGSINSVSSAISKRISEAARSNPENSHVEGLLPSSRIKSEVTGSELPLVVCGLTSISIAELTAKKTNTLNHDGVLAYCSRKRKRRKTLRDPSEKTLEEDSLRNDEGTAYFSRQRRRRKTATDSIETALEEDAPGLLQILLDKGILVKEIKLYGVEEEDDMVPDCTESDFQDLENVITKLFPQRTSLLKSALRHEKGEKAIYCLTCLISLIEQSRYLQFRDCPVEWGWCRDLQSFIFIFKSHNRIVLERPEYGYATYFFEIVKSLPIQWQIQRMVTAMKLSGCGRTALIENRPLLIGEDLTEGEARVLEEYGWVPNSGLGTMLNYRDRVVHDRWNERSGTDWKTKIGKLLMNGYSEGHLVLSHFPTKVGKIEDDTEIKQEDPL

SEQ ID NO: 17533 - protein, 426 aa, Oryza sativa
  Clone ID: TF_OSC417910j.C1.p16.fg
MNPTIENGGSGGDGSAAAAAAEGSAIWKSELVPQLQLPPGYHFVPTDEELVDFYLRGKIEGRDPPRHFISEENIMRYDPQKLIEKYKGYGEDRWYFFMVREPSKTKKKDEPNRKVVVDGVEEGSWSATGSVVQIHSTKETNRKAIIGSKRVLTYKSARSAENDMWSMHEYVLAGKSQMGQYVLCAIQLKQTYEREEKAREEQKNDNKRNKKAARRKNMQQQPTACQAQDEQQETAPTPGEETIVDPDQFMDIAHSMHMMFGGVDQDAPPFMPSLIAPCNNDDGMLQLQPLQLQNPNPAMLYSNQLEPSYIGDQSMFTPCCCDRNCISCRQLQFYQQQQAEDGSVAFEKADLYNNMIGLWEILVYTLTMFGWMVTWQIMLSVRFTMIKIMVVLFRATYWLRSWAQLLKCDEEIKSVKAACRNLESMV

SEQ ID NO: 17534 - protein, 417 aa, Oryza sativa
  Clone ID: TF_OSC400477j.C1.p49.fg
MEKGKLDFLLELGFRFNPSPEQVVTYYLPCLVAGQQPKDTEGCIHSADVYGADEPRDLAGKYAPVARSSNGDRFFFTGCKRMKGKFSRSAGGGTWVSQSSKDLKNREGIKIGEVKNFRFKKDGKNTDWLMEEYHLCGQESGDVVEPVVCRIYVSPRAAPDSVAHQESAVLQPQEPAPLPVPAAPAPPRQVPVVTQQAPPPPPPLVPVITQDAPPLKRPAPVAAPPCAKKMRGDVSAFPVVRQSCVAAPRCAPRVVAPPPRHPPIQTYPTDPFESAPLDPFEPPPAAASVTGGHHTPQPSVPVPATPEQGFSLAASNSPELDPANIGIDMDELMRYLGNTPLDGVLPSQLFVLPTNDDEDVELAKVLEDGLQGGGGRQWQSTAVCDSSSSATGILARHGATAASSTHPDLSQGSVRAQ

SEQ ID NO: 17535 - protein, 567 aa, Oryza sativa
  Clone ID: TF_OSC401688j.C1.p13.fg
MDGVVAEDQAGGSGSGHRRLIGSRIEEHRKYMSEESCCPRCGHKIDRKLDWVGLPAGVKFDPTDQELIEHLEAKVRPGGEAAAHPLIDEFIPTIEGEDGICYTHPEKLPGVSKDGLSRHFFHRPSKAYTTGTRKRRKIQPPAAAASSGGGGGNASSSSSASAAAAVARHGHQQQQQQQRSETRWHKTGKTRAVVGGGRQRGCKKILVLYTNFGKHRKPEKTNWVMHQYHLGEAEEERDGELVVSKIFYQTQPRQCAAADAAATASASAVDRRTTSLRDRAAAAAAAAAAAAPMASANVSVAAFHGGAAGIDEFSFAQFRSSFEEAGMGASSSDHQSAMVDQRRRQQQHDDDEHDHRRGGGGHHYVGQQQSVAATFHVVSSPADPIARLMSPPPAHQGTVMLRQPEPPYIYHHQEDERPHQPRKFDGRSTSGSGLEEVIMGCTSRRSKGGETSGGKDGTEWQYPSFWPSDSQDHHGDKDDIEAKQKGETEKEKGEEKQSFSRYTFAKKYSMNKETLKISSILHSGILSESKLPENFPVCVVEGEYDEHGNAWMNLILPFSDSSKLRLM

SEQ ID NO: 17536 - protein, 267 aa, Oryza sativa
  Clone ID: TF_OSC900391j.C1.p8.fg
MASTSRKRSARSLQEDEQTSSAAEAPAAVREDEERVAVAGMEAWRFGFSRFSWFPAFKFDPTDADIVASYLLPRALYGRGHAAVIQDDVSRCEPWTLMREHGHATSAHAFFVHDHESVGGGGGGGRRKVQRAVKNGGGVWRIQKGEVAILTIVRGGGGGGGELDVVYKRRNLSFHRRGESSSSGWVMHEYEITSPPLPATVLSRIRATPRAKDKKLCIKEEPSCSTSAAGERSGPNPDHTAAGAGDSATANHNNTTSAATTTMAAAV

SEQ ID NO: 17537 - protein, 316 aa, Oryza sativa
  Clone ID: TF_OSC416913j.C1.p16.fg
MAAAVAVAGPSMEVEQDLPGFRFHPTEEELLDFYLSRVVLGKKLHFNIIGTLNIYRHDPWDLPGMAKIGEREWYFFVPRDRKAGNGGRPNRTTERGFWKATGSDRAIRSSGDPKRVIGLKKTLVFYQGRAPRGTKTDWVMNEYRLPDYGAARAAAPPPKEDMVLCKIYRKATPLKELEQRASAMEEMQRGSSHGDYTATRASLVHDASASTGDDYFSSDDVHDSGFLIQSSSSSAAPSGSSSKNGGAGAPREAKKEEADVTVTVASATSLQLPAVSQLPSLQLPAMDWLQDPFLTQLRSPWQDQHCLSPYAHLLYY

SEQ ID NO: 17538 - protein, 404 aa, Oryza sativa
  Clone ID: TF_OSC400477j.C1.p36.fg
MASLDLLLKLGFRFNPSQEEVITYYLPRLIAGHPPKDTEGYIHRADVYGADEPRDLAGKYAPVARSPNGDRFFFTGCKRVKGKFSRSAGGGTWVSQSSKDLKNREGIKIGEVKNFRFKKGGNNTDWLMEEYHLCGKEAGGVVEPVVCRIYVSPRAAPDSVAHQESAALPPPQELVPPPQELAPPPYPAAQAAPQAPAPPRQVPVITQQQAPPQKRPAAPVAEPPCATKKMKGAVSAKPMAPQSSVTASAAPPRCAVAPSQHHPPFQTYPTDPFEPPAPAASVTQPSVPATPEQGPAYVPDPADIGMEMDELMSFLDSIPVDGILPSQLYEYDELAKELEDALQGGGEEDGNDNPPRRRGRGGCDKQSQGGYRVLLKDMGDDQIDQQWLKVSLKDYHHLMKSCKL

SEQ ID NO: 17539 - protein, 518 aa, Oryza sativa
  Clone ID: TF_OSC404859j.C1.p32.gm
MAAAKMAGLTPGFKFEPSDEQLVQFFLLPYLRELPVPLGGLVIRDDPRSVPPWKLFARNGRGDEEDAYFLAPADGEGRQARTCDGGRGRWITQRLERTGNLRLAGGGGSGEAVVFEKHRLNYHAGEGRCGSTGWVMHEYAVVKPAALGARHRACHIAFTGHGQKRKRVPDGYVDVEDDGSKASTNAAAAVPPSSTAAMSACPSNVTYNQGCHISPEQSIEQHFPAEHNNIQIQQQAYYQSQDHEQCQYSDEEKYLLQQIKQEQYYYNQQNCFLPGQGNQELYYNDEQQQIFSLPEHQCSQEQYWHHDDQQDCVLPEQHSQELHGYNNEDQGSLLPPEPIDQEEQALFVGGEPQHEQQPLTSTPRQALLDYDDGKLLPPVGVNGAIAIPPQDAAVASNDDDGGQATEAPAAKMTAEEKKWFMEELLTEGCWSGPLLFDQPYYAAAPTGRYRATLRVALAASATPAPRQAAAARAAAAAPAPLRYCLFATTAVSARKEWIRARKEERIRARREIRRKTLR

SEQ ID NO: 17540 - protein, 518 aa, Oryza sativa
  Clone ID: TF_OSC418655j.C1.p1.gm
MAAAKMAGLTPGFKFEPSDEQLVQFFLLPYLRELPVPLGGLVIRDDPRSVPPWKLFARNGRGDEEDAYFLAPADGEGRQARTCDGGRGRWITQRLERTGNLRLAGGGGSGEAVVFEKHRLNYHAGEGRCGSTGWVMHEYAVVKPAALGARHRACHIAFTGHGQKRKRVPDGYVDVEDDGSKASTNAAAAVPPSSTAAMSACPSNVTYNQGCHISPEQSIEQHFPAEHNNIQIQQQAYYQSQDHEQCQYSDEEKYLLQQIKQEQYYYNQQNCFLPGQGNQELYYNDEQQQIFSLPEHQCSQEQYCHHDDQQDCVLPEQHSQELHGYNNEEQGYLLPPEPIDQEEQALFVGGEPQHEQQPLTSTPRQALLDYDDGKLLPPVGVNGAIAIPPQDAAVASNDDDGGQATEAPAAKMTAEEKKWFMEELLTEGCWSGPLLFDQPYYAAAPTGRYRATLRVALAASATPAPRQAAAARAAAAAPAPLRYCLFATTAVSARKEWIRARKEERIRARREIRRKTLR

SEQ ID NO: 17541 - protein, 350 aa, Oryza sativa
  Clone ID: TF_OSC400138j.C1.p84.fg
MAAPEGQNKFAGVRFLPKDLELLAILDAKLRGSPLGPVEAIFHDTQILDFHPYKLYEMYAEDEEEEGYIYFFSTMQFRCRKIVERAAQGGRWKVNNCETLEVGGVAVGRKFTMNFYEHIGGDNDLIWTNWGMQEFARIIGPNKELADLALYRLYKKKITRGTGEEKPEDIAAASDGDTESSMNKRRRVEASAAAMALPPPPPSPGLPGTMMFMAADQANVASTSQEWHGQFANGAAAAPSPSGCWPWAPPPTPSAVEPFSFWASASAATPPAAANYHPSPQPQPLPPQGGEYYSRHGAFSVAPVPASACSTPSPEAATSCLLATTSPLPAAGTEGSDSQQQEPPCELMEF

SEQ ID NO: 17542 - protein, 193 aa, Oryza sativa
  Clone ID: TF_OSC400773j.C1.p103.fg
MAEQPLGGGGGGGGDGNNNGKWKGKEKVVPEYGKNRHGMPVGCYFVPKDLELFAILRCKLVRSQLPGALNNVFEHIRILEFHPALLHETYIGNEEDGYIYFFSRRQFTTKARNKRRPTRVAKGGTWKASGGSKTLRSKKVGGIDVGQKLTMVFYERRFEGDQNPIKTNWGMHEFTKIIDGSKNQVVLVDLIRI

SEQ ID NO: 17543 - protein, 249 aa, Oryza sativa
  Clone ID: TF_OSC403854j.C1.p1.fg
MGGATNLPPGFHFFPSDEELVVHFLRRKVSLLPCHPDIIPTLLPHRYNPWELNGKALQAGNQWYFFCHLTQSRTSSNGHWSPIGVDETVRSGGRNVGLKKTLLFSIGEPSEGIRTNWIMHEYHLLDGDCVAGGSSNLTSSSSNRRSHRKRGHSSMESNNWVLCRVFESSCGSQVSFHGEGTELSCLDEVFLSLDDYDELLATSNYLRICMDIVFYHHKEKRKVGGAYAIIWPSMLSMEIMHACVEIALR

SEQ ID NO: 17544 - protein, 218 aa, Oryza sativa
  Clone ID: TF_OSC900350j.C1.p4.fg
MAPVGLPPGFRFHPTDEELVNYYLKRKVHGLSIDLDIIPEVDLYKCEPWELEEKSFLPSKDSEWYFFGPRDRKYPNGCRTNRATRAGYWKSTGKDRRINYQNRSIGMKKTLVYYKGRAPQGIRTSWVMHEYRIEESECENAMGIQLQDSYALCRIFKKNVVLGEFDKKGECSSSQAKGNEEVTDFGDAGQSSGANENDKDNSWMQFIAEDLWCTNKLK

SEQ ID NO: 17545 - protein, 613 aa, Oryza sativa
  Clone ID: TF_OSC411286j.C1.p19.fg
MDAVQPSNASINRVHLVYVLVRRLALVGSLVGRGGLRLPAGGAGAAMTGCIVLFMRPGVRTASYIRGTVCSCLRTSWIIDSHRIASKIKNASGSVDASKHKWVSNPTKACPRCNHIIDNSDVVHQWPGLPRGVKFDPTDQELLWHLLAKHGKVGAKAHPFIDEFIPTVEEDDGICYTHPQKLPGVKQDGSVSHFFHRTFKAYNTGIRKRRKINTGDLADVRWHKTGKTRPVVVDGKHLGCKKFMVLYMSTMKGGKPEKTNWVMHQYHLGTGEDEVEGQYVVSKLLFQQQFKPGEKNAQDLTSADALESIVAEDLPNIPPLPLEEHVFTNQELEVLEKSETITDQGKETSEINNEDNAVEDVAHMATEKPEDGDNPSSQDPKWWEGESQFLLDSQQLAENLAICDEFLQSQSQTSCGGGDDETDKIKPRLAVYAQLPVEDLKKDLEECQRLDPSDGTNLELENASEFRLSQIEFSQDSFTTAWAGGKALFPVRNLPRALAERHWVGPTARPRETEGSNKYRAVGRSHSTGSTGPIVWPSKCGVWIKVGPSPWRRAHHPAEAERDTVGLGKNRNGVSLRYNGESFANTINTPGNIFPLANLICKELSARKALEMT

SEQ ID NO: 17546 - protein, 528 aa, Oryza sativa
  Clone ID: TF_OSC8412j.C1.p1.fg
MRSSHQPLCTRAHQAAALLLVAATFFLTRLLDRSPLSAPPPPCAAPYSPWPHRDLRIYVYAEDEVDGLRALLRGRNDDVTAATCIKGQWGTQVKIHQLLLSSRFRTFDKDEADLFFVPTYVKCVRMTGKLNDKEINQTYVKVVLSQMPYFRRSGGRDHIFVFPSGAGAHLFRSWATFLNRSIILTPEGDRTDKRGISAFNTWKDIIIPGNVDDSMVKSDRLAVKPIPLTKRKYLANFLGRAQGKVGRLQLVKLAKQYPDKLESPELKLSGPDKLGRIDYFKHLRNAKFCLAPRGESSWTLRFYESFFVECVPVILSDEVELPFQNVIDYTEVSIKWPASKIGPGLLEYLESIPDGRVEEMIGRGREIRCLWVYAADTERCSAMSAIMWELQRKFLGQDVELTVYYLKRKLLGKHLRCNAVSELDLYKFAPWDLPEKSSLQSKDREWYFFCPRDRKYSSGSRTNRSTEAGYWKATGKDRPVIYNSQTVGMKRTLVFHLGKPPRGDRTDWVMYEYRLEDKELSASGVKLV

SEQ ID NO: 17547 - protein, 236 aa, Oryza sativa
  Clone ID: TF_OSC414184j.C1.p4.fg
MERAAAAAPVVVRHGGVVLPPGFRFHPTDEELVVQYLRRKAFGLPLPAAVIPDLHNLFKLDPWDIPGASSDGDKYFFAVRPPAARGRRQHVTASGGCWKPAGGRDKPVVVARCGGSHLVGVKKGMVFVPRQGRKAPAAAAAAAGGGCWVMHEYSLALPMHKKGCLAEAEEWVVCRIFQRSSSGSRSPRRPDNDVRRTMPAVAELGRSPSPSSSSSQSSCVTSSSDQEECNVTGRKH

SEQ ID NO: 17548 - protein, 637 aa, Oryza sativa
  Clone ID: TF_OSC900216j.C1.p14.fg
MAAAADGLPPGVRFDPADDELVSRYLLRRLRKQPIPLHGVIHEADPLGAPPWMLLADHGRGGDEAFFFAEARAKNVKGKRQKRTVEGGGFWQGQRVCVDGERLSVPGGDGGGEVGGGLEIEWRKYMLSFFAEGERGSSGWVMHEYAITAPDDLASWPIRLYRVRFSGHGKKRKREPERLGARVHDDDVDGGQRAAPRRAVTETALFVQPSAVDCAESAGQSFSGAIEPVFHDLPDMMPEQADAGDTTETTAAVVNLTDAMSEQPVLPLAADGDDQSSYGVIDPAFRDLADLIVLPPEPDDGGMERATPCTPMSETALFEQQGPPGNADCADHQSSYGVIDPAFCEQADAGEAETTVSAAVVNQNYSMALCDFNFPEVLSYVDFTAGMEPSWQQRWPPMSESAPFEQQEPPLAPVAMVDLPPGNADCADHQSCSGVIDPAFRDLPDMTVLPPEQADTGGGAETTTAMVSLTDKLKYSSSMDGEAAQAWCDFDFPESTDEALSYIDFTAGAHTDNDGGVSETAMFEQLGSPPQHDPLPMDADGADQSSSGPLIDTVFRDHAEPIVLPLEQADTGGGAAAAVNLMDKQKYSSSMDGEAVPAWCDSDFPESIDEVLSYIDVSTDDTSCIDFSMDDLFDLAD

SEQ ID NO: 17549 - protein, 605 aa, Oryza sativa
  Clone ID: TF_OSC416548j.C1.p4.fg
MAAGGGGADGLPPGLRFDPTDGELVSRFLLRRLQGKPLPLNGVILEADPLSVPPWKLLAEHGRGDEGFFFAEARAKNGKGSRQKRTVEGSGLWQGQRVCADGEKLLVPDGGGVEVEIVWRKYLLSFFAEGERGSSGWVMHEYAVTSPAELAASPIRLYRVRFSGHGKKRKREPQSGEDGVGRARAAPQSAGTETALLEERVMPPQPAPQSVGTEDALVEERIPPPQPVPIPPIAGTEDALDVGTEDVRGRAAPQSAGTESALLEECVLPPQTAPQITGTGVALLDEVVPPPQTVSISPPAALVDAVDDADCANQGCSGVMDDSTMVFSHLPDMITLPAEEGDAAGGAALASMDYSWADFEFPEINMDELPNCIDFTTTDPSCLDIELSMGDLHEPQSTGIESDLLEEFVPQPQPVLVPPLAALVEVADSSEGPDQGCSVVMHDSSAVFTHLSDPIVLPEEEEADRPDAPAGTMSLDYQNYSLSDFEFPEYPLLDVAGDADGADQCSSNVMDDSSMVFSHLEDLITLPAEEAEADACSAAPAPSLDNQKYSSQGIIDSEAPALSDFEFPETIDEVLNSINFTMADPSCLDMEFSMDDLLDFDPPAD

SEQ ID NO: 17550 - protein, 384 aa, Oryza sativa
  Clone ID: TF_OSC400651j.C1.p2.fg
MPALPPGFRFHPTDEELIVHYLMNQAASVKCPVPIIAEVNIYKCNPWDLPGKALFGENEWYFFSPRDRKYPNGARPNRAAGSGYWKATGTDKSILSTPTSDNIGVKKALVFYKGKPPKGVKTDWIMHEYRLTGTSANSTTTTKQRRASSMTMRLDDWVLCRIHKKSNDFNSSDQHDQEPEESTVEQLEDIHDNNSSEQPPAPADMNNQQSDFQPMTAMSMSKSCSLTDLLNTIDCAALSQFLLDGSSDAIAEPPAPPSPLIYTTPHPNYQTLNYNINSNSSMPHAFESRLDHHDGYVNNYNVNGLRRKRMMACSATSFDDGSSSNDFVHAVVKKPQLLPSDSRGSGFGGGYCNQQLSETATGFQFQNGNLLSHPFPLNNHLQMQ

SEQ ID NO: 17551 - protein, 503 aa, Oryza sativa
  Clone ID: TF_OSC401083j.C1.p2.fg
MAAAARSQGLSPGFKFNPSDQMLVELFLLPYLIDGELPVRGLVFVEDDHLGGLPLPPWILLDRHGRGDEDEAYFVAPMGAGDGARQVRSVAGGGKWVKQRSEGKGEVVVAPGGEAFLWENFSLNFHRDDRRSGSTGWVMHEYIVSPPAGSAVAASHRATHIAFTGHGQNRKRVPDGYVLVLDDAVPPAAAAAAPPPESEQSNQEEQEYAAYTDQIQQQCFVPEQQMSNQEYFPEAAAEQSNQQFFVPAEEQSSHQLFLPAEEQSNQQFFMPAEEQSSHQFLPAEEQSSHQFLPAEEQSNYQQFLPALEQMTQSNQEFAYGEQSQCYIVPEQQQLSNQEYAYSEQSQCYILPEQQQLSDQEYAYSEQSQCYILPEQQELSNQEAEYAFVCYDEQQQQQQQSNQEAEYAFACYDEQQQQQQQQYLHGDLTSWQEPFVTSSSSSSQQFLGQEQLLPDGLLLDGFGEISQQQGDQEYAYCEESQCYIMPEQQQQSNQEAEFAFACYD

SEQ ID NO: 17552 - protein, 304 aa, Oryza sativa
  Clone ID: TF_OSC414142j.C1.p2.fg
MSGMNSLSMVEARLPPGFRFHPRDDELVLDYLERKLLDGGVGGAAAAAAAVTIYGCPVMVDVDLNKCEPWDLPEIACVGGKEWYFYSLRDRKYATGQRTNRATESGYWKATGKDRPISRKGLLVGMRKTLVFYKGRAPKGKKTEWVMHEFRKEGQGDPMKLPLKEDWVLCRVFYKSRTTIAKLPTEGSYNNIDSVATTSLPPLTDNYIAFDQPGSMQNLEGYEQVPCFSNNPSQQPSSSMNVPLTSAMVDQEQNNMGRAIKDVLSQFTKFEGNVKREALQSNFSQDGFDYLAESGFTQMWNSLS

SEQ ID NO: 17553 - protein, 776 aa, Oryza sativa
  Clone ID: TF_OSC900216j.C1.p13.fg
MAAAADGLPPGVRFDPADDELVSRYLLRRLRKQPIPLHGVIHEADPLGAPPWMLLAAHGRGGDEAFFFAEARAKNVRGKRQKRTVEGGGFWQGQRVCIDGERLRVPGDGGGGEVGGELEIEWRKYMLSFFAEGERGSSGWVMHEYAITAPADLASSPIRLYRVRFSGHGKKRKREPERLGARVHDDDVDGGERAAPRRAVAETALFVQQSSAVDCAESADQSFSGVIEPVFHDLPDMMPEQADAGDTAETTAAVVNLTDAMTEQPVLPLAADGDDQSSYGVIDPAFRDLADLMVLPPVLAQQEPPLAPVAMVDLPPGNADCADHQSCSGVIDPAFRDLPDMTVLPPEQADTGGGAETTTAMVSLTDKLKYSSSMDGEAAPAWCDFDFPESTDEVLSYMNFTAGAHDNNDGSVGRAAPWRPVSEIAMFEQPSAVDLPPGDADCTESADQSFSGVIEPVFHDLPDMIREQADAGDTAETTAAVVNQNYSMALCDFDSGIDFTAGAHDSGMERATPWTPMSEAALFEQQGPPLAPAAVVDLPPGNADCADHQSSYGDMIVLPSEQAGAGGGAETTEALFDQPVPPLAADCANQGSYGVIDPVFRDLADLIVLPPEQADAMDGEAAPAWCDFDFPENIDEALSYVDFTAGAHADNDGGVSETAMFEQPGSPPQHDPLLMDADGADQSSSSGALIDTVFGDHAEPIVLPLEQADTGGGAAAAVKLMDKQKYSSSSMDGEEAPAWCDSDFPESIDEVLSYVDFSTDGASCDFSMDELFDLAD

SEQ ID NO: 17554 - protein, 1601 aa, Oryza sativa
  Clone ID: TF_OSC101853j.C1.p5.fg
MRRRRWRRRLAPVFRFYPTEEELICLYLRNKLDGFRDDIERVIPVFDIYSVDPLQLSGTSTRVYLLLPAARRGSGWFYFCPRQEREVRGGRPSQTTPSGYWKAAGTTGVVYSAEPWPRAVGNKDRVEDDEREREGGRWKMRSYRWVFPIAKRQITVLAEKCLPRDTDEDLGGGHVDDMTKLTYLNEPGVLYNLKRRYALNEIYTYTGSILIAVNPFTRLPHLYNEYMMEQYKGVRLGELSPHVFAVADASYRAMVNDSRSQSILVSGESGAGKTETTKFIMQYLTYVGGRAAIDDRTVEQQVLESNPLLEAFGNAKTVRNDNSSRFGKFVEMQFDANGRISGAAIRTYLLERSRVVQINDPERNFHCFYQLCASGKDAELYKLGHPGSFHYLNKSKTYELEGTNNEDEYWKTKRAMDIVGISRNDQDAIFRILAAILHLGNIEFSPGKEIDSSKIKDPTSNFHLQMAAKLFMCDPDLLVSTLCTRAINTLEGAIIKALDCSAAAANRDALAKTVYARLFDWLVENINKSIGQDVDSKVQIGILDIYGFESFKNNSFEQFCINFANEKLQQHFNEKPIGIIALLDEACMFPKSTHETFATKMFRNFSSHHRLEKTKFSETDFTISHYAGKVTYQTESFLEKNRDYIVAEHCNLLSSSRCPLVSGLFGTLPEESLRSSYKFSSVASRFKQQLQALMETLNSTEPHYVRCVKPNSVNQPQIFENQSVLHQLRCGGVLEAVRISLAGYPTRRTYAEFVDRFGVLVPELMLGSYDERALTKGILEKMKLDNFQLGSTKVFLRAGQIAILDMRRAEVLENAARHIQGRFRTFITRKEFVKTREASISIQAYCRGCLARKKYMVKRETAAAIIVQKYVRRWRLHRTYQQSHSAALLIQSCIRGFIARHYFSVIKEQKAALVIQSLWRKRKVIILFQQYRQATVAIQCAWRQKVARRELRRLKMAANEAGALREAKNKLEKKLDDLTLRLTLERRLRAAGEEAKSVEILKRDKLIESLSAKCAAAKSAAQSEHDKNLLLQRQLDDSLREITMLRSSKIMTAEAERENSNLKNLVESLSKNNSSLEYELTSARKGSDATMKKLKDVEGKCNHLQQNLDKLQEKLTNMENENHVLRQKALNMSPLNNMPMTTKAFPQKFATPIGLPNGEQKHGYETPPPAKYLASLPQSLTRSRRTRMPVERQEENHEILLRCIKENLGFKDGKPVTACIIYSCLLHWRAFESERTAIFDHVIEAINNVLKGEEADGRLPYWLSNTSSLLCLLQKNLRSNGLFATPSRRSGGTLGIGDKIVQTLRSPSKLMGRSDNLGQVDARYPAILFKQQLTACVEKIFGQLRDNLKKEISPLLSVCIQAPKSSRAQPGKATKSPGIGAQPPSNSHWDNIVKFLDLLMDTLHENYVPSFFIRKLITQLFSFINIQLFNSLLLRRECCTFSNGEYVKAGLSLLEKWITDATDEFAGTSMHELNYIRQAVGFLVIHQKRKKKLEEIRNELCPNLSVRQIYRICSMYWDDKYNTQGISNEVVSAMREEVNKDTQNLVSNSFLLDDDLCIPFSTEDLSIAIPAIDYVDIELPESLHHYASVQLLLKHHDPQPV

SEQ ID NO: 17555 - protein, 326 aa, Oryza sativa
  Clone ID: TF_OSC401648j.C1.p39.fg
MEANLPPGFRFHPRDEELVVDYLYHKLSGGGEFYGGVAMVDVDLNKCEPWELPAYFLHNLIIFPARARARAAGRRRREDAARVGATEWYFFSLHDRKYATGQRTNRATRSGYWKATGKDRAIVTRRRAAAGEAVAGGEVVGMRKTLVFYQGRAPRGSKTEWVMHEFRVDGHAVADHPSSSTSSSSSNLLKEDWVLCRVFYKSRTATPRAVVSGEAAVSLSGELSLPPPLPPPVAPAVVDGYTGGGYYEQDSSAGYHHHHHHRPPPSAALPFKDLTDFRDLLSNMAQGGGGGAAAAKTEGFHLGWSEEESSGYVQQSAMASQAWNPF

SEQ ID NO: 17556 - protein, 421 aa, Oryza sativa
  Clone ID: TF_OSC400138j.C1.p82.fg
MAAPGDGEEKKAGSGRNKHGFPRGFRFVPRDQELLDILDDKLRGAPLDRALDAVFHDTRILDFHPAKLYGMYAEDEENGYIYFFSTIEFKAAKPKQKKWPRRAAQGGRWKAVLGSSQMVEVGGVPVGRKLSMEFYVKGVRTNWGMHEFVRIIGPNIEVADLAVYRLHKLWTNGEEKPGDLAADVAKSTNQSGQASAADYYQTYQNAVSQAYAYAPPYVLQPGWSQGYPYDVAAAPPTAPWPVCWAPPSAPGSYDCCYASTFSRPPPPPPIAASTLDKAPITSTDHGASTNTSAATPVANNKPPPPPVAATATTLGKKGEGKGKAPTTTSTDHAGSTNTSAPPAANYQPPPTTTTPPLQGTQHVFAPGVVVGHEDEEGYLIVDEVNTWRNTQQLVLEDDDDDDDGRAAGAGAGEGGASASGR

SEQ ID NO: 17557 - protein, 260 aa, Oryza sativa
  Clone ID: TF_OSC400221j.C1.p12.fg
METTAAKKLPPGFRFRPTDEELVVHYLRRRALGSPLPPAVDIPDVRLLAHDPSDLLPPGWSEQERYFFTCKEAKYVKGRRANRATGAGYWKATGKEKPVAVSVAAAPRSQAAAVVVGMKRSLVFYRGKPPTGKKTDWVMHEYRLAGAGLAPCRRAATADHPARPAEGWVLCRVFRKKGSAAASTASPTADADDDDATTERADDAAAGVRFIDFFARADARRRRAASPVSSSCVTDASAEHCREQETTSRNGGAAAGDASD

SEQ ID NO: 17558 - protein, 337 aa, Oryza sativa
  Clone ID: TF_OSC404770j.C1.p8.fg
MGEQQQQVERQPDLPPGFRFHPTDEEIITFYLAPKVVDSRGFCVAAIGEVDLNKCEPWDLPGKAKMNGEKEWYFYCQKDRKYPTGMRTNRATEAGYWKATGKDKEIFRNHHMLIGMKKTLVFYKGRAPKGDKTNWVMHEYRLADASPPQPPPPPSSAEPPRQDDWAVCRIFHKSSGIKKPVQVPMQMPMQMQMPVAHQVPAANYQQQMAMASASIIQVPMQMQMPSMSDQLQMLDDFSTGSLMAPPPPPPSYSTLPGFPLQINGGAPAVCWEPVDVLPAAAAAAAAADGHGRRRLRGERAVVAGGVAAGCCRPEQRRRHLVGGMQHGRYHLEQYVCV

SEQ ID NO: 17559 - protein, 331 aa, Oryza sativa
  Clone ID: TF_OSC400095j.C1.p9.fg
MGLRDIELTLPPGFRFYPSDEELVCHYLHNKVVNQHRFAGVGGAAAAGGGTMVEVDLHTHEPWELPDVAKLSTNEWYFFSFRDRKYATGLRTNRATKSGYWKATGKDRVIHNPKLHAAAHRRASIVGMRKTLVFYRGRAPNGVKTNWVMHEFRMENPHTPPKEDWVLCRVFYKKKAETETESSYSMENEQEAVIAMARSAAAIKAGGCYSNSSSSHDPAAAGHHSPPPFPASLAACSSSHHYSSHPPPPPDHHHHHHMPVTGGGGGSLNEFIPTTSMALYSSIFDFSQHLDGGAVAASASAAGSRVDGGEQCGLMELGLEEHYNYNGLMPM

SEQ ID NO: 17560 - protein, 359 aa, Oryza sativa
  Clone ID: TF_OSC400651j.C1.p8.fg
MVETSTSLVKLEQDGSLFLPPGFRFHPTDAEVILSYLLQKFLNPSFTSLPIGEVDLNKCEPWDLPSKAKMGEKEWYFFSHKDMKYPTGMRTNRATKEGYWKATGKDREIFNLQPTSYGGSSNNKNNKQLVGMKKTLVFYMGRAPKGTKTNWVMHEFRLHANLHNDNPNLRLNLKDEWVVCKVFHKKGDDREAINKQQAQAAAVDQYSAGTPNNGSSVEAGDDDDDLFQLDSIIDPSIYFSNSSAANILSAPPNMSNSVVAANYGASTTTTGTASAGSFQQQPNYCSLINKSISSSNVSSWNNMPPPPPVAEGGVHGIGSSYSLQHQAAMVKALRDVIRLPNPLGMPQYKLDDAYLWDSS

SEQ ID NO: 17561 - protein, 218 aa, Oryza sativa
  Clone ID: TF_OSC29117j.C1.p1.fg
MEKVQASCEGDQGICKRGAKGGHPIDQNLVGGMTMSTGVPTTVPPTPALAALKNLLIRVVAAAAGKGLSSSAEEARCLWAKLPAPEEEEEAGQQPERPPSSYRRPPTSTLMAPVGLPPGFRFHPTDEELVNYYLKRKIHGLKIELDIIPEVDLYKCEPWELAEKSFLPSRDPEWYFFGPRDRKYPNGFRTNRATRAGYWKSTGKDGGWCTSTGGAPSG

SEQ ID NO: 17562 - protein, 362 aa, Oryza sativa
  Clone ID: TF_OSC400510j.C1.p28.fg
MVTSKEFARDQAAMDQKIKSDVGEVVLAGDEEEDGDVVLPGFRFHPTDEELVTFYLRRKVARKSLSIEIIKEMDIYKHDPWDLPNASTVGGEKEWYFFCLRGRKYRNSIRPNRVTGSGFWKATGIDRPIYSAAVNSNSGESIGLKKSLVYYRGSAGKGTKTDWMMHEFRLPPAIAAADASPCMQEAEVWTICRIFKRSITYRKQQQQQAWRPPATVTVKAPPPGDSSSNTGSFESDGGGDEFMNCGLTPAISQQQQHGGRHQMMSTMSCNGGYFFNDGIHHSHSHHKLHSQWGSLQMAPPEPKPEPEQKPLSSPAMTIAFHQNDHGFPAAAADFYKDGYLEEIARMMEVADPSPTGFYDCRY

SEQ ID NO: 17563 - protein, 247 aa, Oryza sativa
  Clone ID: TF_OSC900128j.C1.p13.fg
MATPGQQLPPGFRFHPTDEELVVQYLRRRALCRPLPAAVIPDVHDATVLDPWDLPGAGDGEAYFFSFRQLAAASGGGGWRRRRAGSGYWKATGAEKPVFLRGFGCGGGGGGGGQHLVGVKTTLLFLRAKPPSRTHWVMHEYRLAAAGAVAVAAAGQTKRGNHSCMAQPGEWVVCRIFLKNNRSSRRRAGDADGETPVTGVHGHRRRQPSPSPSSSSCVTAEVSDGEGEEEVSSGSINGAPSASQREA

SEQ ID NO: 17564 - protein, 366 aa, Oryza sativa
  Clone ID: TF_OSC900350j.C1.p5.fg
MEKVQASCEGDQGICKRGAKGGHPIDQNLVGGMTMSTGVPTTVPPTPALAALKNLLIRVVAAAAGKGLSSSAEEARCLWAKLPAPEEEEEAGQQPERPPSSYRRPPTSTLMAPVGLPPGFRFHPTDEELVNYYLKRKIHGLKIELDIIPEVDLYKCEPWELAEKSFLPSRDPEWYFFGPRDRKYPNGFRTNRATRAGYWKSTGKDRRVVHQHGGRAIGMKKTLVYYRGRAPQGVRTDWVMHEYRLDDKDCEDTMPIKDTYALCRVFKKNAICTEVEELQGQCSMALLEGACQQLLASGGGGSQEQYETPSPPDVPVGSTFGGADADAEDDPDKDDSWMQFISDDAWCSSTADGGAEESTSCVALAG

SEQ ID NO: 17565 - protein, 201 aa, Oryza sativa
  Clone ID: TF_OSC418825j.C1.p1.np
DPFATPGFRFYPTEEELLGFYLRHRLAGTRPDVERVIPVVDVYGYHPSQLAALAGEASARDTEQWFFFCPRAERELHGGRPARTTPSGYWKATGSPSCVISSATKVIGVKRTMVFYQGRAPTGTKTRWKMNEYKAVADDADAAAAAMLHQLQLRNELGVCRVYISTGTLRSFDRRPLDNQRWDTNKAKNQIISSGRLTPAS

SEQ ID NO: 17566 - protein, 543 aa, Oryza sativa
  Clone ID: TF_OSC1203j.C1.p2.fg
MATLPQMAATKERQEAANPTTTTRTLVESVTNWIRVYSDGSVDRLGPPEAAAFMVLVPPYDDPRDGVTVHDVATDHGVDVRLYLTTTTPAGRRPVLVHFHGGGFCLSHAAWSLYHRFYARLAVELDVAGIVSVVLPLAPEHRLPAAIDAGHAALLWLRDVACGTSDTIAHHAVERLRDAADFSRVFLIGDSAGGVLVHNVAARAGEAGAEALDPIRLAGGVLLHPGFILPEKSPSELENPPTPFMTQETVDKFVMLALPVGTTSRDHPYTSPAAAVTAAEGAQLPPMLVMVAEEDMLRDAQVEYGEAMARAGKAVETVLNKFPAQCIRVFVSPIRLRNFDLMEKHVEKMLSLGFRFNPSAEDLITFYLPRLIAGKPMKDTEKFICRADVYGSEPSDLAGKFAPVPRCEKGGRFFFTSCKRHKGSSTKKERTAGAGTWVRQNSKEVKNKAGVKVGETQNFRFKKDGSYTDWLMEEHHCCRQQAVAGDEEPVICRMYVSPRAPPDSAARQESAAFVQQQPAPQVSEPPCDKKKRDDVAEEAPAAA

SEQ ID NO: 17567 - protein, 149 aa, Oryza sativa
  Clone ID: TF_OSC11898j.C1.p1.fg
MHPSGGALSVPPGFRFHPTDEELLYYYLRKKVAYEAIDLDVIREIDLNKLEPWDLKDRCRIGTGPQNEWYFFSHKDKKYPTGTRTNRATTAGFWKATGRDKAIFLANACRIGMRKTLVFYVGRAPHGKKTDWIMHEYRLDQDNVDVQLC

SEQ ID NO: 17568 - protein, 376 aa, Oryza sativa
  Clone ID: TF_OSC406028j.C1.p19.fg
MHPSGGALSVPPGFRFHPTDEELLYYYLRKKVAYEAIDLDVIREIDLNKLEPWDLKDRCRIGTGPQNEWYFFSHKDKKYPTGTRTNRATTAGFWKATGRDKAIFLANACRIGMRKTLVFYVGRAPHGKKTDWIMHEYRLDQDNVDVQEDGWVVCRVFMKKSYQRGLNPADMAAVDDDDLLHHHHHPFPPAQLHGGAADHKHDGAGGHHHHHLMQPHHHYDDFPSFDPSMQLPQLMSADQPPPPPPSLLPGVPPSAAAALSSLDVECPQNLMKLTSAAAGGGATGLLHAGGDHRFATAATDWSILDKLLASHQNLDQLFQGRVIAGASSPAAMAAPSHHQHLMDQLAGGGGGTASSLQRLPLQYLGCEAADLLRFSK

SEQ ID NO: 17569 - protein, 396 aa, Oryza sativa
  Clone ID: TF_OSC1060j.C1.p1.fg
MVESTTSLVKLEQDGGLFLPPGFRFHPTDAEVILSYLLQKLLNPSFTSLPIGEVDLNKCEPWDLPSKAKMGEKEWYFFSHKDMKYPTGMRTNRATKEGYWKATGKDREIFRQPAAVNTSSYGGSSNKKKQLVGMKKTLVFYMGRAPKGTKTNWVMHEFRLHANLHNHHPNLRLNPKDEWVVCKVFHKKQGDEAINNQQQQPQYAAVDQYSAETPNSGSSVVQAGDIDGGDDFFQLDDIIDPSIYFVSNSSNILSAPPNNNNAVYSVSASTTTTNTTAVSFQQQPNYYSLINKSSSSSSSNYSAPLQQHVSSWNITPGAGGAHGIGSSYYNLQQQQAAMVKALENVIAVPNFGTLLPSSNKLKGLSKSAMAGLTQQNPLGVPQYKIENYGDHYISRQ

SEQ ID NO: 17570 - protein, 352 aa, Oryza sativa
  Clone ID: TF_OSC33262j.C1.p4.fg
MAMGMEGSGGGGSAKKKEESLPPGFRFHPTDEELITYYLRQKIADGGFTARAIAEVDLNKCEPWDLPEKAKMGEKEWYFFSLRDRKYPTGVRTNRATNAGYWKTTGKDKEIFTGQPPATPELVGMKKTLVFYKGRAPRGEKTNWVMHEYRLHSKSIPKSNKDEWVVCRIFAKTAGVKKYPSNNAHSRSHHPYTLDMVPPLLPALLQQDPFGRGHHPYMNPVDMAELSRFARGTPGLHPHIQPHPGYINPAAPFTLSGLNLNLGSSPAMPPPPPPPPQSILQAMSMPMNQPRSTTNQVMVTEQMIPGLANGVIPQGTDGGFTTDVVVGGTGIRYQNLDVEQLVERYWPGSYQM

SEQ ID NO: 17571 - protein, 386 aa, Oryza sativa
  Clone ID: TF_OSC1062j.C1.p1.fg
MPALPPGFRFHPTDEELIVHYLMNQAASIKCPVPIIAEVNIYKCNPWDLPGKALFGENEWYFFSPRDRKYPNGARPNRAAGSGYWKATGTDKSILSTPTSDNIGVKKALVFYKGKPPKGVKTDWIMHEYRLTGTSANNTTTTKQRRASSMTMRLDDWVLCRIHKKSNDFNSSDQHDQEPEGSTVDEQLEDIHDNNSSSQQPPAPPDMNNQQSDFQPMTAMSMSKSCSLTDLLNNLDCAALSQFLLDGSSDAIAELPAPPSPLIYPNQTLNYNINNNMPHAFESRLDHHDGYVNNYNVNGLRRKRMMACSATSFDDGSSSSSSDFLHVAKKPLLLPSDSRGSGFGGGYCNQQLSETATGFQFQNGNMLSHPFPLNQQLLLNNHLQMQ

SEQ ID NO: 17572 - protein, 326 aa, Oryza sativa
  Clone ID: TF_OSC422386j.C1.p8.fg
MTLPPGFRFHPTDDELVGYYLKRKVDSLKIELEVIPVIDLYKFEPWELPEKSFLPKRDLEWFFFCPRDRKYPNGSRTNRATSTGYWKATGKDRKIACAGEVFGLRKTLVFYKGRAPGGERTDWVMHEYRLCQDLAHGVSNFIGAYALCRVIKRHEAGLHGEPPAAKAKGMISKVSSSSSLVTVEHQLSSRGNASPSFTPTNNGSPLVDEMFVGGGGGDPFQLLPSCVPYHGGDACGFDLPPLCMPQTQDPFFSDAGFTQAAPPLYGDVMGSVSEHELKWDTLGGYSGGGGGELWNAAAAPLLCRQASDGDDLTAWFTAADDNMSVF

SEQ ID NO: 17573 - protein, 105 aa, Oryza sativa
  Clone ID: TF_OSC21481j.C1.p1.fg
MACAETYIENMEDRCIYFFSRRLFAAKARNKRQPMRVANGGTWKASGGSKTVRSKKVGGIDVGQKLPWCSTSVGSRATKTLSRPTGPCTSTPRSFLAPKTSVFTM

SEQ ID NO: 17574 - protein, 341 aa, Oryza sativa
  Clone ID: TF_OSC401316j.C1.p17.fg
MEQHQGQAGMDLPPGFRFHPTDEELITHYLAKKVADARFAALAVAEADLNKCEPWDLPSLAKMGEKEWYFFCLKDRKYPTGLRTNRATESGYWKATGKDKDIFRRKALVGMKKTLVFYTGRAPKGEKSGWVMHEYRLHGKLHAAALGFLHGKPASSKVHERTVFKKSLVEVGAAGGKKAAVVTMEMARGGSTSSSVADEIAMSSVVLPPLMDMSGAGAGAVDPATTAHVTCFSNALEGQFFNPTAVHGHGGGDSSPFMASFTQYGQLHHGVSLVQLLESCNGYGGLVDMAASGSQLQPAACGGERERLSASQDTGLTSDVNPEISSSSGQKFDHEAALWGY

SEQ ID NO: 17575 - protein, 200 aa, Oryza sativa
  Clone ID: TF_OSC101556j.C1.p16.gm
MSQSPPDSSSAAAVPLAPGFRFHPTDEELVSYYLRRRILGRRLRIDAIAEVDLYRLEPWDLPSLSRIRSRDAQWYFFARLDRKVTGAGAGGRGGPGNRTNRATPRGYWKTTGKDRDVHHRGKLVGMKKTLVFHSGRAPKGQRTNWVMHEYRLLDADGTQQQAKSEEEELVIACQVHLKRRVSLASGPQDITGPTDSDTDV

SEQ ID NO: 17576 - protein, 200 aa, Oryza sativa
  Clone ID: TF_OSC101918j.C1.p4.fg
MSQSPPDSSSAAAVPLAPGFRFHPTDEELVSYYLRRRILGRRLRIDAIAEVDLYRLEPWDLPSLSRIRSRDAQWYFFARLDRKVTGAGAGGRGGPGNRTNRATPRGYWKTTGKDRDVHHRGKLVGMKKTLVFHSGRAPKGQRTNWVMHEYRLLDADGTQVPVKSFDPSQISQDLPYHEITRLAVAPKKFCSFSLSPARLV

SEQ ID NO: 17577 - protein, 632 aa, Oryza sativa
  Clone ID: TF_OSC402917j.C1.p4.fg
MSQSPPDSSSAAAVPLAPGFRFHPTDEELVSYYLRRRILGRRLRIDAIAEVDLYRLEPWDLPSLSRIRSRDAQWYFFARLDRKVTGAGAGGRGGPGNRTNRATPRGYWKTTGKDRDVHHRGKLVGMKKTLVFHSGRAPKGQRTNWVMHEYRLLDADGTQDLHVVCRIFQKNGSGPQNGAQYGAPYLEEDWEEEDDAIENMPASGAFAEMAAVTDTADESTEEDGNFSLKTNDEPLQTQEYQPEITPVKAQGSNEETNGGGYSCDVFSLDEILQEPENVCKNEEQNAIDDKFTIAELSGYPRQDDGYVGENGPVNWIDPSNGDNTNWPLRAYSTQNHVNGTLSADGFFDTVNGTNSYSGPSDNQNLYLQDDGLTSSHQVGDNMPFYDASSNHKWVDGKDDYLNLNDLLYPPAENQPLFDAGDDLMAYFDATEDDFKFDIMGTEDSNSQLPDMSNFVQKDDNNNKFTLDGISNTALYGASSSGSHGNMYPDTAVPDMPMDDTVDKSFGKRLASMLGSIPAPPAMASEFPPSTGKSVVPLSAVNPSSSIRVTAGIIQLGGITFTGSTEHLQKNGDFNLLLSFTVEGDVSTKSIGFEPDTQMSTTPMVLRSGMYLFFVSAMILMLSYKVGLCIYSR

SEQ ID NO: 17578 - protein, 324 aa, Oryza sativa
  Clone ID: TF_OSC400500j.C1.p36.fg
MAGLREMESTLPPGFRFCPSDEELICFYLRNKVANHRVASGTLVDVDLHAREPWELPEVAKLTAEEWYFFSFRDRKYATGSRTNRATKTGYWKATGKDRIVHEGTTRAVVGMRKTLVFYLGRAPNGQKTTWVMHEFRLETPNSQPKEDWVLCRVFDKKKPSTIEAEGGGSSGSDLFIPGATDGSTDPSSPTTMAPLLGSSPDPTVVDRFDHRSAAVPPLMVLMQGGGDQMISGSGVHCSNNDNSGSSSALLNLTMLQYSFLEHRPTGDDMAVGAHFGTCQGGNNDATMALGMGFEEHGMGEIIEMEPAWRQGGSNCVYRDELYF

SEQ ID NO: 17579 - protein, 351 aa, Oryza sativa
  Clone ID: TF_OSC101628j.C1.p7.fg
MAGADGLPPGLRFDPSDDELVSRYLLRRIQQKPLPLDGVIVDADPLSVPPWTPLADHTRGDEAFFFAGARAKNGKGKRQKRTVEGGGFWQGQRMAVDGERLVVPGDGGGGVDGSGGGGLEITWRKYVLSFFAEGEQGSSGWVMHEYAVTSSADLASSPLRLYRVRIDDDDLSVSQTEGTELSEQGSSGVIDDDYWREADATGGAEREEIALLDEERCPQPQPAPPTDALVPPLQGQNSYDVMADSSLLFADLPGRIDDDELQRSLRVSDMPDLFLSQTEEAGAGGGGGAAPVLNKQSNSSPLGVMDSEVPIVLSDLEFPESIDEVLSYIDFATDDCLDFDMDELFSDMPAD

SEQ ID NO: 17580 - protein, 288 aa, Oryza sativa
  Clone ID: TF_OSC419079j.C1.p12.fg
MVEARMPPGFRFHPRDDELVLDYLLHKLAAGGRGGGVYGGGGGVAIVDVDLNKCEPWDLPDAACVGGKEWYFFSLRDRKYATGHRTNRATRSGYWKATGKDRSITRRSSISSGEPSSSAAAAAVGMRKTLVFYRGRAPKGRKTEWVMHEFRLEPQPLHLKEDWVLCRVFYKTRQTIPSPSSEEAVTLPNELDLPATPSLPPLIDAYIAFDSAPTTTPSMVGSYEQVSCFSGLPALPMKGSISFGDLLAMDTSAEKKAIRVLHNSNTAKLELSPDWGQESGLSQMWNPQ

SEQ ID NO: 17581 - protein, 492 aa, Oryza sativa
  Clone ID: TF_OSC401860j.C1.p13.gm
MAVEGFEEAIKCLENLKLESGEASLEQRLPAAACGDHHTAAGAGLPPGFRFHPTDEELLLHYLGKRAAAAPCPAPVIAEVDIYKYNPWELPAMAVFGESDGEWYFFSPRDRKYPNGVRPNRAAGSGYWKATGTDKPISISETQQTVLLGVKKALVFYRGRPPKGTKTSWIMHEYRLANAAASSSSSYTSNMKQLASSSSSSSSSASMRLDEWVLCRIYKKKEANQQLQHYIDMMMDDDNDDEHNLQVQQQQQQQAQSHRMPRPPSISDYLLDYSDDLPPSTDQTPSLHLGFTAVNEGNNKRHKTMEEYYSISISTADMLHASSSTSNNKSTQINFSSIFEPQTPAAAGHQLIDEGRWPGGAWRSGPQVQTSDGRKSSGWALSVEAVELWIWGFGAAVVARFGENNGGGHWAPARSEMGSWRDKELGDFVIEMLLSMIKVLVTELLSSWLVTSIVQATWLPYVESTLDVTWQMTAVDVEHGGSDMECARVLAL

SEQ ID NO: 17582 - protein, 364 aa, Oryza sativa
  Clone ID: TF_OSC401559j.C1.p11.fg
MSDGKDSLDLSGLGAAVPNAKELSAEDKANLVESIKNTLQGLAARHTDVLESLEPKVRKRVEVLREIQSQHDDLEAKFFEERAALEAKYQKMYEPLYSKRYEIVNGVVEVDGVTKEAADETPAEQKEEKGVPEFWLNAMKNHEILSEEIQERDEEALKYLKDIKWYRISEPKGFKLEFYFDTNPFFKNSVLTKTYHMIDEDEPILEKAIGTEIEWFPGKCLTQKVLKKKPKKGSKNTKPITKTENCESFFNFFSPPQVPDDDEEIDEDTAEQLQNQMEQDYDIGSTIRDKIIPHAVSWFTGEAAQDEDFEGIMDDEDDDDEDDDDDEDEDDEGDDEDDEDEKKGGRVPAGEGQQGERPAECKQQ

SEQ ID NO: 17583 - protein, 408 aa, Oryza sativa
  Clone ID: TF_OSC400419j.C1.p15.fg
MVREPQDLRLGERDLLEEMSMNEEVEDGEVKPLGRVESMDETPGEVAKLRCRHGARGAAVVASAWRGSNTGSFVLVRSYITITFRGFRPPRLARLIRSPSSPCSKTCRLITPESIIATISHRSTMNGIELSSEDKAILVETLKNKLQALAEQHVDVLESLAPSVRKRVDVLMEIQSQHDELEVKFFEEKAALEAKYQKLYGPLYSKEKGVPDFWLNAMKNNEILAEEIHESDEEALKYLKDIKWCRIDDPKGFKFEFFFYTNPFFKNQVLTKTYHMIDEDDEPILEKAIGTEIEWHPGYCLTQEVLTKESSESTKPITKTEECESFFNFFSPPQVPDDDAKIDENTAEELQNQMERDYDIASTLRDKIIPHAVSWFTREAVQDEDYGASWVDDEEEDDNNDEYSDEEA

SEQ ID NO: 17584 - protein, 186 aa, Oryza sativa
  Clone ID: TF_OSC25825j.C1.p2.fg
MNGIELSSGDKAKLVETLKNKLQALAEQHVDMLESLAPAVRKRVDVLMEIQRSKIVSGVLEVEGETEEREEKGVPDFWLNAMKKNEILAEEVLTKESSESTKPITKTEECESFFNFFSPPQVPDDDAKNDEYTLAHVARSTLRDKIIPHAVSWFTREAVQDEDYGASWVDDEEEDDDDDEYSDEEA

SEQ ID NO: 17585 - protein, 374 aa, Oryza sativa
  Clone ID: TF_OSC23522j.C1.p5.fg
MGGDKENLDLSDLNASLPAAAAALSAEDRAGLVNALKDKLQSLAGQHTDVLEALSPNVRKRVEYLREIQGQHDEIELKFFEERAALEAKYQKLYEPLYTKRYNIVNGVVEVDGGNDEPASENAAEGKDADAKGVPDFWLTAMKTNEVLSEEIQERDEPALKYLKDIKWARIDDPKGFKLDFFFDTNPFFKNSVLTKTYHMVDEDEPILEKAIGTEIEWYPGKNLTQKILKKKPKKGSKNAKPITKTEVCESFFNFFSPPQVPDDDEDIDEDTADELQGQMEHDYDIGTTIRDKIIPHAVSWFTGEAVQAEDFDDMEDDEEDDEDDDEDEEEEEEDEDEDEDDEEEKSKPKKKSAGKPKYFALNCPGNYWLVVHG

SEQ ID NO: 17586 - protein, 301 aa, Oryza sativa
  Clone ID: TF_OSC400044j.C1.p55.fg
MSNPELLSEEKAILVETLKNKLQALAEQHVDVLESLAPVVRKRVDVLIEIQSQHDELEAKFLEEKAALEANYQKLYGPLYSKRSEIVSGVLEVEGETEEREEKGVPDFWLKAMKNNEILAEEIHESDEEALKYLKDIKWCRIDDPKGFKFEFFFDTNPFFKNQVLTKTYHMIDEDDEPILEKAIGTEIEWHPGNCLTQEVLTKESSESTKPITKTEEYESFFNFFSPPQVPEDDAKIDENTAEELQNQMERDYDIASTLRDKIIPHVVSWFTGEAVQDEDYGASWVDDEEDDDDEYSDEEA

SEQ ID NO: 17587 - protein, 233 aa, Oryza sativa
  Clone ID: TF_OSC420713j.C1.p28.fg
MTAPADKGKKAKTDADGGAAEENEQIDGALVLSIEKLQEIQDELEKVNEEASDKVLEVEQKYSEIRRPVYLRRSDVIQTIPDFWLTAFLSHPLLSELLTEEDQKMFKYLESVDVDDSKDVKSGYSITLTFSENPYFEDKELTKTYAFADDGTTTINATSIKWKEGMEIANGNAKKKGSKRPLVEESFFTWFTDTEHKSLADGVQDEEAEELGEDDDEEGSDADEGEEDEEEEN

SEQ ID NO: 17588 - protein, 593 aa, Oryza sativa
  Clone ID: TF_OSC401316j.C1.p10.hg
MAAAEQKGKKPRTDGAEAEPVDAALLQSIEKLQEIQDEIEKVNEEACDKVLELEQKYNEVRRPVYVRRNKIIKQIPDFWLTAFLSHPMLGELLTEDDQKIFKHLESIDVDDSEDIKSGYSITLTFSPNPYFEDTKLTKTYSFSDDEAVKVKATSIRWKKGMDIANDRAYTKKGDKRILIDESFFTWFNSEKNRSFAHGAMDEVADVIKEDLWPNPLKYFNNEFEEELELLDDDDEQYFFALDWYLMMTMRRRMMKTKVKERRMERRTELSVMSDSFGLDNLCLQKAETGPPGGLKQQGVPFCGVVVLDLAGSLNSGGRVRWAARFAGPSGPPSVPARRLVPCLRRSGATGTTEPLGVASTQRRGRKAEARPPRVRSTRGDFANLPYKALPQSPSPPTSSSSPDRRMSGERCAGRPLFGGAISSTFPVRFQEVFVDPARDESLIFELLDLKGEVEDGGSALWFLRDIANEQDAGDNLVVEHSGTIELGGLRFGDAPAVAGTAVGQLAISKGRQGREAQNIVRLYLANIRLKNAATDVVITAYEPLLINPLSESASAVAAGPAVPAEQAGCLAMSEIFKLAVMNFNAPRIRMTNM

SEQ ID NO: 17589 - protein, 1698 aa, Oryza sativa
  Clone ID: TF_OSC4252j.C1.p2.fg
MDHIAEEETVGVAEDPGLADVGKADETKEEGGGAGVHLDETRVAVDDPTEVRASQIDDGTAMVSVLGGDGDSFVEQDGQDTSGGGACNEGNEPEEDARVQVRLDDTSAAVDEGGASLIDDVMNTLPVGGVASFDDGPQTDKNAQDEGALIDVVSSTVLNDASIDLVKASDSVSEEGTGMDILVQPGEDIKEMVTIACDAATDDEGRKVDAVSSSSDRNEEVVGAAGLDETDEDMRLGTVGLSGDDNVANEAAAAAAGGADDEDLKMDGVITAGDKDVENGKADNADGVPEVNVVAISRDNSAENEAAAAGDDGADEEGIQMNVLNTTRGEGEEDDEAAQNVVEYAVDGTEELETIGLTGDDKAEKEAAPAGNNSADEEGMQMDAVTTTGAEDEDGKADENVVEDDDGVSEEAVADTVGEDIPEEDAVQIDEDEDDDDVPPPLTRKGGGRRKRGRASSKAQVVVKPPVRKKDDEEVCFICFDGGDLVVCDRRGCPKAYHPSCVNRDDEFFKSKGRWNCDSGMPDVDFDDKTSWWYLFKDYWLNLKTKLPLTFEEISAAKSQKNGSSLVIRDNDLSEPHDTNDEEEGNSDSSSVRHLEGNSKRKGRKRSKQAANDDSSVVKDSTRKSTKRGLTGGRDTKSSTGRKVRKLSKRALSSDHRPRESESVGTSTSSAEETSWASKELLDFVANMKNGDKSVLSQFEVQSLLLDYIKRENLRDPRRKSQIICDSMLKSLFGKARVGHFEMLKLLESHFLMSEVSPVEIDDNHGGVVDPDPSLDADGNSEASMVMSSEKRKKSRKYDQKALQTNLDDYAAIDNHNISLMYLRRNLLEELISEVDTFDEKVLGSFVRIRISGTGQRQDIYRLVQIVGTGIAPEQYKCGKKSTDITLEILNLDKREVITIDITSNQEFTEEECKRLRQSIKCGFIPRLTVFFWHMCTVSLFLNYLTIQGEVYEKAKVLQSLKVNDWIEIFTLRECVEKLKLLSTPEERVRRLNEEPEVHADHTMDPDYESPEEQEQDTGRSSFNKSRGSFSKKDNNPVSPGKGEGRSPAQRDLKTNWESNRNTWGESSTHIESPLGRRPAFSSHGESAGYTSKSDSPNIGTHAVKVGATAGANIGSGGTHASQSVINESEKIWQYMDPTGKIQGPFSIVQLRKWNGSGYFPPNLKIWKSTEKQDDSILLTDALLGRFEKDLPPWEPPVGSSSDVDGRPRNDSLLEEGTRAGEQPSKSAVLSSTQSFSGRAGQGNDAANLGPATIQSSTQGYYGMQNSQAAYAVQQSLSGSWNASSQFGTAINPVTLSQPAMGSFVVGQNAALGSAGQLTPVPGPATVSAEVVNSQLQSQNQIASFLSQSDGRLADGNDSKLGEDASRERMRSSGEDLGLSGAQPGGVQSNTQQLEDARNQLQTDASNSVKPSQLISTPSAEAVQPSSTAMAGGDNQNTAWAQLASTSGQSQPQAAGNMTWGATLQGNANMGWGMVGQNNMNMSWGGTAQSATGYNMGLAMQAQPNAVPNMGWVTPNPGNTNMNMMWATQGQGTPNAAAMVGTQMQGVAMAPWGAIAQGNTNSYPGWGGQVGNMNQNVGWGAPMQVNPGPSTGNGTGQDNNNMNWNSPSGNPNWNNQQRDNGGRHSGHGGDFNGGDSGGRSWRSQSGGDGGSWRPKRGVCYSILDKGYCKNGEHCNFSHSIPNDGYPSRNSRHFDRQNS

SEQ ID NO: 17590 - protein, 1777 aa, Oryza sativa
  Clone ID: TF_OSC900152j.C1.p16.fg
MDHIAEEETVGVAEDPGLADVGKADETKEEGGGAGVHLDETRVAVDDPTEVRASQIDDGTAMVSVLGGDGDSFVEQDGQDTSGGGACNEGNEPEEDARVQVRLDDTSAAVDEGGASLIDDVMNTLPVGGVASFDDGPQTDKNAQDEGALIDVVSSTVLNDASIDLVKASDSVSEEGTGMDILVQPGEDIKEMVTIACDAATDDEGRKVDAVSSSSDRNEEVVGAAGLDETDEDMRLGTVGLSGDDNVANEAAAAAAGGADDEDLKMDGVITAGDKDVENGKADNADGVPEVNVVAISRDNSAENEAAAAGDDGADEEGIQMNVLNTTRGEGEEDDEAAQNVVEYAVDGTEELETIGLTGDDKAEKEAAPAGNNSADEEGMQMDAVTTTGAEDEDGKADENVVEDDDGVSEEAVADTVGEDIPEEDAVQIDEDEDDDDVPPPLTRKGGGRRKRGRASSKAQVVVKPPVRKKDDEEVCFICFDGGDLVVCDRRGCPKAYHPSCVNRDDEFFKSKGRWNCDSGMPDVDFDDKTSWWYLFKDYWLNLKTKLPLTFEEISAAKSQKNGSSLVIRDNDLSEPHDTNDEEEGNSDSSSVRHLEGNSKRKGRKRSKQAANDDSSVVKDSTRKSTKRGLTGGRDTKSSTGRKVRKLSKRALSSDHRPRESESVGTSTSSAEETSWASKELLDFVANMKNGDKSVLSQFEVQSLLLDYIKRENLRDPRRKSQIICDSMLKSLFGKARVGHFEMLKLLESHFLMSEVSPVEIDDNHGGVVDPDPSLDADGNSEASMVMSSEKRKKSRKYDQKALQTNLDDYAAIDNHNISLMYLRRNLLEELISEVDTFDEKVLGSFVRIRISGTGQRQDIYRLVQIVGTGIAPEQYKCGKKSTDITLEILNLDKREVITIDITSNQEFTEEECKRLRQSIKCGFIPRLTVFFWHMCTVSLFLNYLTIQGEVYEKAKVLQSLKVNDWIESEKMRLGHLRDRASDMGRRKEYPSSLFTLRECVEKLKLLSTPEERVRRLNEEPEVHADHTMDPDYESPEEQEQDTGRSSFNKSRGSFSKKDNNPVSPGKGEGRSPAQRDLKTNWESNRNTWGESSTHIESPLGRRPAFSSHGESAGYTSKSDSPNIGTHAVKVGATAGANIGSGGTHASQSVINESEKIWQYMDPTGKIQGPFSIVQLRKWNGSGYFPPNLKIWKSTEKQDDSILLTDALLGRFEKDLPPWEPPVGSSSDVDGRPRNDSLLEEGTRAGEQPSKSAVLSSTQSFSGRAGQGNDAANLGPATIQSSTQGYYGMQNSQAAYAVQQSLSGSWNASSQFGTAINPVTLSQPAMGSFVVGQNAALGSAGQLTPVPGPATVSAEVVNSQLQSQNQIASFLSQSDGRLADGNDSKLGEDASRERMRSSGEDLGLSGAQPGGVQSNTQQLEDARNQLQTDASNSVKPSQLISTPSAEAVQPSSTAMAGGDNQNTAWAQLASTSGQSQPQAAGNMTWGATLQGNANMGWGMVGQNNMNMSWGGTAQSATGYNMGLAMQAQPNAVPNMGWVTPNPGNTNMNMMWATQGQGTPNAAAMVGTQMQGVAMAPWGAIAQGNTNSYPGWGGQVGNMNQNVGWGAPMQVNPGPSTGNGTGQDNNNMNWNSPSGNPNWNNQQRDNGGRHSGHGGDFNGGDSGGRSWRSQSGGDGGSWRPKRGVCYSILDKGYCKNGEHCNFSHSIPNDGYPSRNSRHFDRQNSGNERRYDRQNERTDRQFDRQSSGNERRDDRHNGRDSDRHDDRLTDTRSQSRERQ

SEQ ID NO: 17591 - protein, 55 aa, Oryza sativa
  unsure (1)..(55): unsure at all Xaa locations
  Clone ID: TF_OSC27143j.C1.p2.gp
FHPSCMGMTIEQAKKLDHFLCADCVKENGTKRPSNSYPASSNSDSKVEPKKRKRX

SEQ ID NO: 17592 - protein, 687 aa, Oryza sativa
  Clone ID: TF_OSC400970j.C1.p1.fg
MEEVKESPVQPTTSTAQTITSSGTADFQGFHGAPKFAVGVPRNLPAVAALPATAPVTSASLVTLKPPGSSPVKSVNNPSVVTMPHMAPSHLKSDKGVNGPPNLVRTGATYGNLNKSFHDTCARSNLNAVQSSNPVAKNQDTKTASIDATAGNPLTGHHATPSVAPVPPKPTFANHSEIAKSVQRVLHQPANHPSWIPPSTEYMRSRLDCQICKVAIMDMESLLVCDACEKGAHLKCLQHYGNKGVPKAEWHCPTCLTKSKGKPLPPKYGKVTRTAVEPKATPPPAGTQVSSQGAAENIAVKENHQKVAVNGNLLNQNSTQAGSVAQSSTVLALGVTAAVAQSQPLSISRLPEGNLNNDAALSSEKTGNVGPCSSIAHRNEKPPDELQSSGLPANSKTGTQSGKSPNEEVSSVLVSGSADSTNDTLHEQKSHEISGEKCSDNSSIVASEANIKSKADSELISGRDVEMVDNDIPPKDQTNNIATEDKPSTQETSEAHKMEVVEVSANTGIQISQGDSAGTEENLHTEVTSVPHMINDVAMATNAGTPICPSNNVAIEEKPKSTVISEVCTTKDTEMTTDATLDQNTNVATEEIPLPESISATEDADMTTDTGIPTNQRQEVNGLAENGRKEHPLGETDKHKSDHSTMPDMSTAPQITSNGVMHSKDEAACGHEGEIVDISAAATEENN

SEQ ID NO: 17593 - protein, 869 aa, Oryza sativa
  Clone ID: TF_OSC401107j.C1.p34.fg
MTIPSAEGFLHAASCLPCTAEEERDLVVALTREAEENVKDGDLRYLVSHSWWLNWQSYVGLIKPDENDADMLPQAPSRPGEIDNSKLVSEESSSIGDEPELQRTLREGDDYALVPQEVWRKLHEWYKGGPELSRRVICSSPTSRSYIVDVYPLRLKLFDGRDSLERIIRISRKAKVSELYSLVCSLLSVEQSKIDIWDFYQKTKGKKLINLNETVEEAQLMMDQEIIIEAKADDAWCSDLGTRSNNELALIPLEPSTSSFSIAGGPAFSNGFSSGFGSSFSQDNSFSPLLRDAEDGYSFSNGTKDDIHGLSGLHNLGNTCFMNSAIQSLVHTPPLVEYFLQDYSREINTENPLGLQELLAFLLDGLHEDLNRVKKKPYIEAKDADGRPDEELAEECWNYHKARNDSIIVDKFQVYVCSQLFTTHQYTFSIACCFCNDYLLETRPERLGQGQYKSTLVCPDFTRMINVTVFSGTGDALPMPYTVKVYDHRIYRYWNPSEPLCHVKDEDKLVAYRLPVGSENLLRVEILHRVVDRYTSESMFNLSRKLIGSPLVTCIPSDSTRKADIYATVSSLLAPFVRAKVHTLDESATKLNSNGPSLDGIVLTDNGVTCEEDVSTSNVDEEAADEEVLPFQLWLTDDKANKREHIDADSNGVPGSTMRLLMDWSDREHEVYDIKYMDELSVVFKPGFMSKKNRQEAVNLFSCLDAFLKDEPLGPDDMWYCPRCTEHKQASKKLDLWRLPEILVVHLKRFSYSRFMKNKLDTFVNFPIHDLDMSRYANHSRGDQPPIYELYAVINHYGGMGGGHYSAYAKLVEEDSWYHFDDSHVSSVGEEDIRTSSAYLLFYRRVGSSSCSVSKNVAVDTDMVDSLDT

SEQ ID NO: 17594 - protein, 826 aa, Oryza sativa
  Clone ID: TF_OSC401949j.C1.p34.fg
MALCPDCGAITVCEVCGVLGYKNLLLSCKNCNGAAVHRYCLDKVDFDGTVDWSCDECHPRHGKGTNRRSLEVTLDDKTVVGKQPENQSSLDTNHDKPGMNGGNDDYVSDDLMLERNKERFQLHDEANNDIHLKSMSANVPRSSTLHENSVARNVSSSANTGLPMDSNCVPSAHIDIGNPRDSSVRLILTGENRRESSMLLDGACSGSLSKDSSKEKIDREANSSHMEPSDAVKNFCKDNPMKRRKLMLLDDDDDDVGVELSDTVQNVVKDNPSKRRKLILPDDDDVEVELCNTVQSIAKDNPGKTIQLIVLDDDDDKQEDAENLNHLSLEFEGPIEKHKIHIGYATGQRCLEDDEHGLLDSLDHRSLENTCPTKKRRRYICPSDDEEEEVIKGSTTTGCAPNDVANTASQHVDAKDHHLQSRMAFASDFTKHQYYIYSEPMGEPAWSGIFMTDSNVPIMLAAHLSTKACQRVSEFARSLQPVVEVIKLPRLKAWPERWDKSGPTDDSIGLFFFPHSMRPNEELDKLVKEVIESDVVLKAVLGTVELLIFPSILLPEQYHEFQGKYYLWGVCKARKHNPDTAVLVEEQCGLVSASEEGSSDKESYVMKHVEDRLPADCNPEAREGDIKTALGEGCFSPDSCLSSNKASPVKGGSPCFMQPGLGDKPHEPGVADQKEDEQDFTSLPRRNDQNATNPPIDSLPSATRLFGFVTARSERCQQLIQEMVKEGALLFSVPEDMTINRSTISKSNGVGAAQAPDSGCQHVQERCEPIEFVPIDHNDPDSASEACLDLFPVRHEQIGLTSQVDVKEVELDLSLGAFRRAPSELP

SEQ ID NO: 17595 - protein, 256 aa, Oryza sativa
  Clone ID: TF_OSC27184j.C1.p6.fg
MVENHVSKEDSKNYKLRMGFVDGHICAICDDGGNLIRCEGACRRYFHRTISNDADFNCETLNMSQEQVESSKFICKNCVYKQHQCFGCGELGSSDMSSGSAEVYQCSKSRCRRFYHPKCLAEFDSSKNPPVFECPLHECFACKNKGEKYNEETCKNKGQESIKKKQGAENNKKMHLALCRRCPIAYHRKCLPRCDMYLALFASDSALLKGYFVDTVFSFLGIFPLFPKVVFQGNGKLIRAKFSSIACKLFALHPFC

SEQ ID NO: 17596 - protein, 821 aa, Oryza sativa
  Clone ID: TF_OSC400909j.C1.p27.fg
MGRRSKQKVEDMAEELCFVCKDGGDIRVCDFKNCLKGYHPHCVGKEESFLDSAEQFICELHKCVSCKRNSEYHCLCCPSSSVCGECLGKVEFAQFRKQSQTKGLCNNCLKLALFVEKNSEANSDGETVEFRYTENYLVLFKDYWETIKDNEGLALIDLQQANICLRTSLSCKQGRDSEKPPDEDYRADKNSLSVNDGAEQPFPVDVKVQPSEAKMSLKRKKSNKKTYVGWGSKELIEFLSCIGKDTTKPLDEFILTGVVKEYIQQKNLFKDRKRKSVICDDKLHSLFRKRKVKSNMILNLLEIHLAANAASEDDFLDDSEDDEGRIMRKRPCNTLKAAETSERDPKRNKKCFAALNHNNLKLIYLRRTLIMNLMGQDTFEQKVVGSLVRVKNDDNHYSYQMPKKHYQLGLVTGIRKSPQEYKIKDKRTDILLCVSNLWDDIKISMLSEEDIEEDECNDLLLLAKKGLFKRPTVADLEEKAASIHVDIVNHYATQCATGHVPNSVKVLMEDSRGATGHIADSVKVLMEGLPGGATARVADVFNVDMAKSQDASGQVTDYLEVVEEETPEDASGQVADILDVVEEEPPEDASGQVADILELVEEETSEDASGQVASILEVVEEETPEAPGKDLCNGGIPGSGLQNKMHNAQDGGTAQGSDMCNGGNTSRRLNDRKSVIVIDSDSDEDEDPHPEQHEPERAAPRAAMDVVMAPTHGAPVAMNGTSAPTLPCAKRGKNGTTAPKGRVPAIAALHALQSMNAPGEHEYIWNYADPQGKVQGPFTMEHMRNWHRNRFFPPDFRVWRLGQTQNDSVLLTEAMGLKFSS

SEQ ID NO: 17597 - protein, 758 aa, Oryza sativa
  Clone ID: TF_OSC401826j.C1.p1.fg
MGRRSKQKVEDMAEELCFVCKDGGDIRVCDFKNCLKGYHPHCVGKEESFLDSAEQFICELHKCVSCKRNSEYHCLCCPSSSVCGECLGKVEFAQFRKQSQTKGLCNNCLKLALFVEKNSEANSDGETVEFRYTENYLVLFKDYWETIKDNEGLALIDLQQANICLRTSLSCKQGRDSEKPPDEDYRADKNSLSVNDGAEQPFPVDVKVQPSEAKMSLKRKKSNKKTYVGWGSKELIEFLSCIGKDTTKPLDEFILTGVVKEYIQQKNLFKDRKRKSVICDDKLHSLFRKRKVKSNMILNLLEIHLAANAASEDDFLDDSEDDEGRIMRKRPCNTLKAAETSERDPKRNKKCFAALNHNNLKLIYLRRTLIMNLMGQDTFEQKVVGSLVRVKNDDNHYSYQMPKKHYQLGLVTGIRKSPQEYKIKDKRTDILLCVSNLWDDIKISMLSEEDIEEDECNDLLLLAKKGLFKRPTVADLEEKAASIHVDIVNHYATQCATGHVPNSVKVLMEDSRGATGHIADSVKVLMEGLPGGATARVADVFNVDMAKSQDASGQVTDYLEVVEEETPEDASGQVADILDVVEEEPPEDASGQVADILELVEEETSEDASGQVASILEVVEEETPEAPGKDLCNGGIPGSGLQNKMHNAQDGGTAQGSDMCNGGNTSRRLNDRKSVIVIDSDSDEDEDPHPEQHEPERAAPRAAMDVVMAPTHGAPVAMNGTSAPTLPCAKRGKNGTTAPKGRVPAIAALHALQSMNAP

SEQ ID NO: 17598 - protein, 1563 aa, Oryza sativa
  Clone ID: TF_OSC422386j.C1.p2.fg
MRAPQERTVRDLYDRTRHKDLALPEESVEGRGSGRRVEGPGHREVVAKMEMLGGDSDPTMLSTIRDKLTARKRPVPLDSPNVKTESGTCNVCCAPCSSCLHRNIALTDSNMDCGSSQTCFARSETKNSSFVRVDKGLRTKAKGGENDDEFSATSSPASYSENGENKVIARSSVAADSEVDKPAKRRRLVNHGSRSPIVECHDDSNSCVTGVSAASKLLLDKKKDKLSTSASSRDLTVNYKDNGINRLRNYCAEESTGKKRSDVHAMHRSSSDRSLPAESPFATKRLLRTQSSLSASHGLSPKRPTHEFGNAQNNLAHQPCEKASSNKTVERSLGGKSDPSVLGGERHSMMTSCGTSNRDKIKAGSLTKNLENGTSCSRNGSLEHADIQSNDAVNRNDNDKQERNQGCSMDTGSGRKLNTQNDVMTDSGNSEGLIDVNVCDICGDVGREYLLATCTRCLEGAEHTYCMRVKLEKVPDGEWLCEECCLKEDENQTRSNGGTSRNKVLDGKNQNSESTNNSKTLKVVVTDLDSQQITCGTPVNDPLAGSNQKLHLASSDLEARQVKCATPTAERLDVKNKNSGIMGNRKKLQVVTSSLEARQSSCRTPTSGSLDKKNQSLDKRSQSSEVLLKRKKLRVATDMESPLSNDGVRSPPKSCKRYAENTLSSTPRLLKADSPRNHDVFSRENSFKSSNKGSIKSPDNAPMRSQAVNSSVTLPRSYSLGNLANVKTPGPSPRGLLSKQPSFNNSSNEPKVKQLAEPVLSKLKPSKHSPRDPRESIRKVMKSGPLKHEASICKGSSSSKQKQSVHSSQNEQPRILKPVKPTILLERGASFNLQKPNISSSPRPDSSIKSGDPRNDQDSPRPGPSILKSSKKPGIVENKHSSILSKSDEQGITSTGVVCSKDTCVVKASDPLIPMDKIKNDSTDGACESPLILVNNDNEMSTKPEVLSIPRASKTCGSDFQDIAPTSSSEDLPPEEVQYEQKVVESDGNISCKSAAAIQASEDLLPESPQGCLVAQNPYSPDTKSNDLNLKQQALVDQSSTVGSSLGALVIPEQSYIWQGTFEVSRPGSSPEMYDGFQAHLSTCASLKVLEIVKQLPQRIQLVEVPRHSSWPLQFKEVKPNEDNIALYFFAKDVESYERAYGKLLENMLAGDLSLTANICGIELLIFTSDKLPERTQRWNGLLFFWGVLYARKASSSTELLVKGMNHSPLEQINGPVNQLVCSPKMPQSLGIDLNECPVDELYDPAVSVQTEMENRGASVNHETLLRSNHEAERLNLCEIHFPETAGTGKILLGTPTAVPYGVHVHTSSKRECLNIKPEYPSDIIGSEGTAGRDNMEEEESFTKNGVPCFTKQHTGATTRSVSDEILANTQARVSFQEVSPQHSVRPKLSDDPSDSVLKDFVLPDSSSIYKRQKTSEGKYSTCSFGDGQLTSKCLSKIPLPADQHTSLDDVQYIGRVPADPCSPTKPILDHVIHVLSSDDEDSPEPRNNLNKTSLKEEEGPSPLLSLSLSMASKKHNLTGSDTGDDGPLSLSLGLPGVVTSNQALEMKQFLPEKPGMNTSLLL

SEQ ID NO: 17599 - protein, 171 aa, Oryza sativa
  Clone ID: TF_OSC400235j.C1.p43.fg
MAGAGTVCSMCGDVGFPDKLFQCARCRYRFQHSYCTNYYGDAAPAPAGADMCDWCLSDVAGKARYSSAAGKQQGAGSQESSTTTSSSSAGRGGGGKPGAGEQESGRRGTKAAGRSFGAGELRSNWPSRTLHAAKPSHVDVGVNESYPKTQSGRQRHAPTQTSSSARPPLYE

SEQ ID NO: 17600 - protein, 466 aa, Oryza sativa
  Clone ID: TF_OSC400822j.C1.p33.fg
MAGEGSGGEGGAGAFEDEAEPTVTIGEYIEGIEAEELEADLVLGGDDGKECTYGGGYLKRQAVFSCLTCVPAGVAGVCTACSLACHDGHELGLVSMFIWVRRMSATRVILGVALAVAKLSIAIFCIKYLYDWVMRTQLMLGWFFLLKVVELWTKRKFRCDCGNSKFGSHVCKLCPEKDPENPVNSYNHNFKGSYCTCGRPYPDPEAEKQVEMIQCCICEDWFHEDHIGLNSIEEIPRDEEGEPLYEDFICPKCSPKCYFLKLYPDTIWASNKQSSAPQAETTNSTVMNGNSSLGDIEKSENGALINHLNCEKTSDNENCPKDSVAPEKASLDDSSDGKCKLGMNICSNTPSADSEKKMPFFMSKSWREVICRCETCTDFYAQQGVAYLIDKEDSIEEYEKVAKQKREKKLEQQEGVEANFLNSLDHVQKIEILSGINDMKNELQSFLSISQINGDTSHVSVSGFEF

SEQ ID NO: 17601 - protein, 639 aa, Oryza sativa
  Clone ID: TF_OSC17126j.C1.p1.fg
MIAAGIRKKPRKRAKKAAAAGSKVTVPADVIIVDDDVNQPSSNTDAQSNADDDLKKAAVASPAATRSKTRSKCKTSSNSAAASPSARSSAIAARKKNNATATGTTATPPPPEAKKHTVLTWLIDTGFLKDKAKVFYVPGDAGAAEKVISGMVTKTGIRCRCCNTVVPVAVFETHARCERPGQPWEKLLLMSGKPLSKCMQEAWAQERVTAMRAREKAMASLEQEKEKSSQAKRKLAKTKKMQLLDGVVVVSTSSPRHQVKKNGGGKDCSDDACGVCADGGQLLCCDTCPSTFHPDCLAIQFMIKSWLLFDRQQLTTIYGQQPWLQTAPGAAISADHQYCRPLQSPGFEIGAYCSETCKKMSSHLSDMIGVMNHTEDGFSWALLKIQKDELVTSEDMPVILESNVKLAVALGVLNECFNPVQDRRTKIDMLHQAVYSLGSEFKRVNYEGFYTMVLEKDGEIISVALLRFHGRKLAEMPFAGTLPAYQKQGMMRRLVKAVEKVLASLQVENLVIPAVADLVETWKRSFSFRPMQAEVRDEAKKLSLVAITGTTLLQKPISAHQQQPVPSRKGSSSSRSKRASAPATVTGSSKEEEEQMTTTAARLTDDELAFLEMAPLCSFTDLLAGGVYPTGLQLLRGMK

SEQ ID NO: 17602 - protein, 897 aa, Oryza sativa
  Clone ID: TF_OSC401197j.C1.p46.fg
MSSSAAPARKENGTVAAPAASSAAASNTFHVLNSGSAAAAVAAGRAYVQSPRATALRSPQVRAITNYGMFPTTGASAARTAMAGRTINGGASMLTTTTTTTTPPHLIQQLMVLAGWTTRSPWLQNHASMSPRGSPSSFSSGRFSDPRGMPSTFAYRTPGASSGRVIDNGAVAGRGKQMAGTSRSLEIIAVDTGAGSSKNASPAGGHANAGVVVKRLAPVLAMPSAGAAGKGKEEAAAAAAAPSPNGRGRKRAPPKVSNDPAAGSDKKPRKRAKKAAAAGSKVTVPADVIIVDDDVNQPSSNTDAQSNADDDLKKAAVASPAATRSKTRSKCKTSSNSAAASPSARSSAIAARKKNNATATGTTATPPPPEAKKHTVLTWLIDTGFLKDKAKVFYVPGDAGAAEKVISGMVTKTGIRCRCCNTVVPVAVFETHARCERPGQPWEKLLLMSGKPLSKCMQEAWAQERVTAMRAREKAMASLEQEKEKSSQAKRKLAKTKKMQLLDGVVVVSTSSPRHQVKKNGGGKDCSDDACGVCADGGQLLCCDTCPSTFHPDCLAIQFMIKSWLLFDRQQLTTIYGQQPWLQTAPGAAISADHQYCRPLQSPGFEIGAYCSETCKKMSSHLSDMIGVMNHTEDGFSWALLKIQKDELVTSEDMPVILESNVKLAVALGVLNECFNPVQDRRTKIDMLHQAVYSLGSEFKRVNYEGFYTMVLEKDGEIISVALLRFHGRKLAEMPFAGTLPAYQKQGMMRRLVKAVEKVLASLQVENLVIPAVADLVETWKRSFSFRPMQAEVRDEAKKLSLVAITGTTLLQKPISAHQQQPVPSRKGSSSSRSKRASAPATVTGSSKEEEEQMTTTAARLTDDELAFLEMAPLCSFTDLLAGGVYPTGLQLLRGMK

SEQ ID NO: 17603 - protein, 1116 aa, Oryza sativa
  Clone ID: TF_OSC100733j.C1.p4.fg
MEASAGLVAGSHNRNELVVIRRDGDPGPKPLRQQNGQVCQICGDDVGLNPDGEPFVACNECAFPVCRDCYEYERREGTQNCPQCKTRFKRLRGKSHPQCRIGCARVPGDEEEDGVDDLENEFNWRDRNDSQYVAESMLHAHMSYGRGGVDVNGVPQPFQPNPNVPLLTDGQMVDDIPPEQHALVPSFMGGGGKRIHPLPYADPNLPESAKGSCATVQPRSMDPSKDLAAYGYGSVAWKERMESWKQKQERLHQMRNDGGGKDWDGDGDDGDLPLIFSPVELLYHFGWTKMDEARQPLSRKVPIPSSQINPYRMVIIIRLVVLGFFFHYRVMHPVPDAFALWLISVICEIWFAMSWILDQFPKWFPIERETYLDRLTLRFDKEGQTSQLAPIDFFVSTVDPLKEPPLVTANTVLSILAVDYPVDKVSCYVSDDGAAMLTFEALSETSEFAKKWVPFCKKYSIEPRAPEWYFQQKIDYLKDKVAPYFVRERRAMKREYEEFKVRINALVAKAQKVPEEGWTMQDGTPWPGNNVRDHPGMIQVFLGQSGGHDIEGNELPRLVYVSREKRPGYNHHKKAGAMNALVRVSAVLTNAPYMLNLDCDHYINNSKAIKEAMCFMMDPLVGKKVCYVQFPQRFDGIDRHDRYANRNVVFFDINMKGLDGIQGPIYVGTGCVFRRQALYGYDAPKTKKPPSRTCNCWPKWKSKKKTTKPKTEKKKRSFFKRAENQSPAYALGEIEEGAPGAENEKAGIVNQQKLEKKFGQSSVFVASTLLENGGTLKSASPASLLKEAIHVISCGYEDKTDWGKEIGWIYGSVTEDILTGFKMHCHGWRSIYCIPKLPAFKGSAPLNLSDRLHQVLRWALGSVEIFFSNHCPLWYGYGGGLKCLERFSYINSIVYPFTSIPLLAYCTLPAICLLTGKFITPELTNVASLWFMSLFICIFATGILEMRWSGVGIDDWWRNEQFWVIGGVSSHLFALFQGLLKVIAGIDTSFTVTSKGGDDEEFSELYTFKWTTLLIPPTTLLLLNFIGVVAGVSNAINNGYESWGPLFGKLFFAFWVIVHLYPFLKGLVGRQNRTPTIVIVWSILLASIFSLLWVRIDPFLAKNDGPLLEECGLDCN

SEQ ID NO: 17604 - protein, 1256 aa, Oryza sativa
  Clone ID: TF_OSC403261j.C1.p1.fg
IGTSSDVEFCARYYNHCDVVKVVQILASSDAYTDICRRMTEYWSHLLDIFQNERSKISKEVGRSLMSQSNILSTATPVKANNGSVQATLKDGQDSKMAVLSQTNAHQVMDNQFTLCSANNNEAFRQTPLAKTYVDNAYRNGAFGPSGTSSISHQSMSMVTVMPNRTQAQPAHGLIRPDLSCGSVIGNGMSRENIRSSISARADLISPPYKSKPPVQLITENMSGGKPAKFSSFRPQAYMNLYNHGNVAASAAANLAVLKSDEGKAPTSHLTTNQRKKLAADCALQVKAFSSAALQFVWPSTEKKVMEVPRDRCGWCLACQSSAGGTKKACFLNMATANASKGSARILSGMRLIKNSDSHFPSIVTYLSHMEESLRGLLVGSLQDVQRRQQWYNQLKDASNCGNIIPLLLELESNIRGVAFSTSWLKLIDDWPVESPSASAGASRPAAYQKRGTGGRRGRKRSMASESAPVTDDDNSWKEVNWWSGGNVSKRILQRGALPILTIRKAARQGGKKRMFSVSYHEGSNFPRRTRQLAWRACVGLSQSSSQLALQVRYLDSHIRWKEFIPPDQIPSEGKSVDSDYSVLRNAVVCDKKIVDNKIRYALKFPNQKHLPVRVTKNILEAEDNQDGDGKFWFSENHIPLYLLREFEQKAGVSSLPTPGMLDSNCFANFYQRRVKSSIGDVFFYLLHKGDVYPCTSCKKDVSFRDIIKCSSCQGNCHKECTLRSVGSKGGNAASSLTCKLCLQKRSLMLTNYNTNASFILPQQKSNVHHAVAAPKIIFKVGSSHSAEPATKVEAPPIVKVEAQPVVKKETWPVVKMETQPTANVEAQPTAKVEAFPISNLATQNNAGAQVQPKTKSKKPKPEKPRKSKKTEEIKYFGLVWKKSTNDKNNNENSGEVFRANDVILKGKDGVGSSIKPTCCLCNKPYCPDFLYVRCERCKKWFHGDALQLEEEKIFELVSYRCCRCRRRAIPKCPHSDDYKKPEPEYSEQTVATSSQSTMLSSEENFAVADQDPLLASYGRVEPFGAQTMDADLSMNMMSFNPGNQKLSVRRGQNKNCEYVDQSSIHVDDYYIQNQPQGNANINFSHSNEFSLSEADGVDASELLGWDFSQGNTSAAPSDFAANCPWNDISCGSVAGDEYEPQTYFSFTELLEADDTQFDNTFGMSNSVQDDGDQQGIGFDEMAFMMEDGASNMPFPAIDSASDEVACDRCKNPQPPPDLKCAVCGLQMHRHCSPWEDGEQPSDSADWSCGACREWR

SEQ ID NO: 17605 - protein, 1092 aa, Oryza sativa
  Clone ID: TF_OSC404183j.C1.p2.fg
MEASAGLVAGSHNRNELVVIRRDGEPGPKPVKHTNGQVCQICGDDVGLTPDGEPFVACNECAFPVCRDCYEYERREGTQNCPQCKTRFKRLKGCARVPGDEEEEDVDDLENEFNWRDKTDSQYVAESMLHGHMSYGRGGDLDGVPQHFQPIPNVPLLTNGEMADDIPPEQHALVPSFMGGGGKRIHPLPYADPNLPVQPRSMDPSKDLAAYGYGSVAWKERMESWKQKQERLHQMRNDGGGKDWDGDGDDADLPLMDEARQPLSRKIPISSSLVNPYRMIIIIRLVVLGFFFHYRVMHPVPDAFALWLISVICEIWFAMSWILDQFPKWFPIERETYLDRLTLRFDKEGQQSQLAPVDFFVSTVDPMKEPPLVTANTVLSILAVDYPVDKVSCYVSDDGAAMLTFEALSETSEFAKKWVPFCKRYSLEPRAPEWYFQQKIDYLKDKVAPNFVRERRAMKREYEEFKVRINALVAKAQKVPEEGWTMQDGTPWPGNNVRDHPGMIQVFLGQSGGHDVEGNELPRLVYVSREKRPGYNHHKKAGAMNALVRVSAVLTNAPYMLNLDCDHYINNSKAIKEAMCFMMDPLVGKKVCYVQFPQRFDGIDRHDRYANRNVVFFDINMKGLDGIQGPIYVGTGCVFRRQALYGYDAPKSKKPPSRTCNCWPKWCICCCCFGNRTNKKKTAKPKTEKKKRLFFKRAENQSPAYALGEIDEGAPGAENEKAGIVNQQKLEKKFGQSSVFVASTLLENGGTLKSASPASLLKEAIHVISCGYEDKTDWGKEIGWIYGSVTEDILTGFKMHCHGWRSIYCIPKRAAFKGSAPLNLSDRLHQVLRWALGSIEIFFSNHCPLWYGYGGGLKCLERFSYINSIVYPWTSIPLLAYCTLPAICLLTGKFITPELTNIASLWFMSLFICIFATGILEMRWSGVGIDDWWRNEQFWVIGGVSSHLFAVFQGLLKVIAGIDTSFTVTSKGGDDEEFSELYTFKWTTLLIPPTTLLLLNFIGVVAGVSNAINNGYESWGPLFGKLFFAFWVIVHLYPFLKGLVGRQNRTPTIVIVWSILLASIFSLLWVRIDPFLAKNDGPLLEECGLDCN

SEQ ID NO: 17606 - protein, 1574 aa, Oryza sativa
  Clone ID: TF_OSC400188j.C1.p8.fg
MGRRKSRPARAVGLGPGAAAAAEPDAPSPSGSGGASKSRRAAKGEARRREDVCFEVDDSTWCLSDGDRRDLAELVMRDVRISGEGEGALDVAALHEAEREKRCSLRLRVRDAPEEGFRLGQWPVVPSDCVILEYAIAGMVFSGCFDGPDEGVSGLAHLVRLRFVTLRVHAFAVSRSADSVSVASFRVRLGLMEQAFATCESLLEVTRHPWRKSFMNMMAWVRPEVMTSAAIYGMDGLARPINGGANGDFTPKKDSQFDLAAFYEAVKPSMEAGLLEEELPDLLPHLRTYQLRAANWMVQREKGNTMISSPNQHYVHSAPYCVPIDFMHKKSRMFYNPFNGNVSMHPEPSPPYVSGGILADEMGLGKTVELLACIFAHRRPYSADCSVSSNIKGADQIKRHKRERVECICGAASVTSAYQGIWIQCDICDAWQHASCVGYSPKEEMHVDDDDGDEASNNEKGTLKSKNRRKKKDRHTRPGSLKVCIYEGAKNTDLTSTQKSDMAEISTADIVLTTYDVLKEDLSHDSDRHDGDRRFLRYQKRYPVTPTVLTRVHWWRLCLDEAQMVESSKTSVTEMAMRLNAQHRWCITGTPIQRRLDDLFGLLRFLKTHPFDTYRWWVDIIRDPYEKGDMVAMNYAHKFFKEIMWRSSKIHVSRELQLPPQEECFSWLIFSSIEEYFYQKQHATCMDHAHEIIRRIRDDANKSEPISDSNVVSNLYLSNDDIAKLLVPLLKLRQACCHPQVGSFGLCSLQRTPLSMGEILQVLIGKAKVEGEEELRKIVVALNGLAGLAVIEQNNQEAISLYKEALALACENFDDFRVDPLLNLHINHNLAELLRASSEYLQECPLKEQTSEVHGARKRKETSPADSETSKEDKNINTQVCGSEEMDVENDSGCHTSSVSTLSMELQNQNMNWWLYALDCIEQNKDSADELIRKIDISSNKSTTGLGSTGMSSRVQTIAGLKYTIQTGIDSLQSSRQQVMDRLLELDKTMDSPKDEDIECQRYCPNCYDGNGSLCIQCELDDLFQGYEARLFLVKKSNNDSVIASVEEARDLQRRKYELNQFFRNTKTNEGSEPGDDNKNPRSAREGFLVYRHPSRIETSLRVILTHSKTIMGEQSAKIAKKNLLLFEAMRKEFSQARNLSIAQTQLLRAHDEIKMSLSRLQLKEKDDEPSAVNIVTREELIPYNVQFTSEKFLSLSSLARIRGQLRYLKGLVLSNKKPLGKHGESLPESGNSVAIATSIPATGQTASDIINEPCPICQEKIFDQKMVFQCGHFVCCKCCLYMTEQAAAHFGRSKKWIMCPTCRQRTDLENVAFVVENQRGNADREIEDLAESAISVQGSYGTKIEAVTRRILRITSTDGAAKILVFSSWNDVLDVLEHSLAANNISYVRMKGGRKSQTALAQFKGLASSISGEKAKKSFSKMQPAQVLLMLIQHGANGLNLLEAQHVILVEPLLNPAAEAQAISRIHRVGQDKSTFIHRFIVKNTIEESIYKLNRGRAVCSTIHRKSKNFKDELVLTLKDIESLFPVATLDQPSEQENKNYGGAGGHMRSLPPSVAAGLAAERRLLEQHDNQH

SEQ ID NO: 17607 - protein, 95 aa, Oryza sativa
  Clone ID: TF_OSC401336j.C1.p5.fg
MEASAGLVAGSHNRNELVVIRRDGGGGGGVGGRRAAEAKAACQICGDDVGEGPDGEPFVACNECAFPVCRNCYDYERREGSQACPQCKTRFKRLK

SEQ ID NO: 17608 - protein, 1189 aa, Oryza sativa
  Clone ID: TF_OSC900180j.C1.p3.fg
MAANAGMVAGSRNRNEFVMIRPDGDAPPPAKPGKSVNGQVCQICGDTVGVSATGDVFVACNECAFPVCRPCYEYERKEGNQCCPQCKTRYKRHKGSPRVQGDEEEEDVDDLDNEFNYKHGNGKGPEWQIQRQGEDVDLSSSSRHEQHRIPRLTSGQQISGEIPDASPDRHSIRSGTSSYVDPSVPVPVRIVDPSKDLNSYGINSVDWQERVASWRNKQDKNMMQVANKYPEARGGDMEGTGSNGEDMQMVDDARLPLSRIVPIPSNQLNLYRIVIILRLIILMFFFQYRVTHPVRDAYGLWLVSVICEIWFALSWLLDQFPKWYPINRETYLDRLALRYDREGEPSQLAPIDVFVSTVDPLKEPPLITANTVLSILAVDYPVDKVSCYVSDDGSAMLTFEALSETAEFARKWVPFCKKHNIEPRAPEFYFAQKIDYLKDKIQPSFVKERRAMKREYEEFKVRINALVAKAQKVPEEGWTMADGTAWPGNNPRDHPGMIQVFLGHSGGLDTDGNELPRLVYVSREKRPGFQHHKKAGAMNALIRVSAVLTNGAYLLNVDCDHYFNSSKALREAMCFMMDPALGRKTCYVQFPQRFDGIDLHDRYANRNIVFFDVFLGHSGGLDTDGNELPRLVYVSREKRPGFQHHKKAGAMNALIRVSAVLTNGAYLLNVDCDHYFNSSKALREAMCFMMDPALGRKTCYVQFPQRFDGIDLHDRYANRNIVFFDINMKGLDGIQGPVYVGTGCCFNRQALYGYDPVLTEADLEPNIVVKSCCGGRKKKSKSYMDSKNRMMKRTESSAPIFNMEDIEEGIEGYEDERSVLMSQKRLEKRFGQSPIFIASTFMTQGGIPPSTNPASLLKEAIHVISCGYEDKTEWGKEIGWIYGSVTEDILTGFKMHARGWISIYCMPPRPCFKGSAPINLSDRLNQVLRWALGSVEILLSRHCPIWYGYNGRLKLLERLAYINTIVYPITSIPLIAYCVLPAICLLTNKFIIPEISNYAGMFFILLFASIFATGILELRWSGVGIEDWWRNEQFWVIGGTSAHLFAVFQGLLKVLAGIDTNFTVTSKASDEDGDFAELYVFKWTSLLIPPTTVLVINLVGMVAGISYAINSGYQSWGPLFGKLFFSIWVILHLYPFLKGLMGRQNRTPTIVIVWSILLASIFSLLWVKIDPFISPTQKAVALGQCGVNC

SEQ ID NO: 17609 - protein, 1093 aa, Oryza sativa
  Clone ID: TF_OSC401656j.C1.p43.fg
MAKTLQGTQQQYAASGFPTQQYPTSGWTQSAAEILQLDNMDQDTSVVRNIIHRKIVEYLNERKEFCNFDLSFLMEIGKCIDRHLFEKADSKIKYMDLETLRTRLNAIVNSASFRGRYNQYENCMGAANFAHSLADKPKQMPERLANTIFTSCASTLPKCSPSIDVLHIGHIKEHFSGDAYQNDSSQPSTSGSSSSLSAVWDQTTCSSAMRTLPMDSFSTVNGQNLSTNNKSLYPTTGQGPLLQQYIECEMKQETWSRSLEQSDQSNITTGNRDLYHAQIHPYINGEHKRDRCIQMKEKLGHTSDHEGFSREKSSNLSNHFMHHQQGFMTNYGACSPVSKTVDRAEQTSNSTVSKPTSPASDGSSGKHYPAKRLKVDVPHLVHVNEMEASKEQQPAANETYASAETVQSEVTNSPTKSPCCTSLGDNIACTDNVHGMDMVRLSGSAVQTEEEFRRENSDIEMKDAKVDLLDQTLSGDSLRARKRRGASVLYALTSEELKDHLCTLNHDTSQSKVPTEELLSVEGLPDQNTCNLCGMERLLFEPPPRFCALCFKIINSTGSYYVEVENGNDKSSICGRCHHLSSAKAKYQKRFSYAETDAEAEWWVQCDKCKAWQHQICALFNPKIVDPEAEYTCAKCFLKEKDNEDVDSLEPSTILGARELPRTRLSDHIEQRLSERLVQERQQRAIASGKSVDEVPGVEGLTVRVVSSADRTLQVQPRFKDFFKKEQYPGEFPYKSKAILLFQKNEGVDVCLFAMYVQEYGSACPSPNQRHVYLAYIDSVKYFRPEIKSASGEALRTFVYHEILIGYLDFCKKRGFVSCSIWTCPSTKRDDYVLYCHPTIQKMPKSDKLRSWYQNLVKKAVKEGVVVERNTLYDFFLQPTNECKTNISAAWLPYCDNDFWPGEAERLLEKKDDDTSQKKETQLGRLLRVAKRDDRKGNLEDILLVHKQFCKHCHHPIVSGSSWVCTSCKNFFLCERCYAEELNTPLKDRHPATTKQKHAFERDYLEGLVHASRCFDRSCTSKLCLTLKKLFFHGVRCHTRARGGGGCHMCVFMWKLLFTHSLLCDNADCSAPRCRDIKAYIADRSMTDLSISG

SEQ ID NO: 17610 - protein, 767 aa, Oryza sativa
  Clone ID: TF_OSC419836j.C1.p17.fg
MALDPADDPLLADCKYKLNHFRIKELKDVLHQLGLPKQGRKQELVDKIIAVLSDQQEQDSRLNGLPNKKMVGKETVAKIVDDTFAKMNGSTNAVPASRNQTDSGHIVKPKRKSDDSAQLDVKVRCPCGYSMANDSMIKCEGPQCNTQQHVGCVIISEKPADSVPPELPPHFYCDMCRITRADPFWVTVNHPVLPVSITPCKVASDGSYAVQYFEKTFPLSRANWEMLQKDEYDLQVWCILFNDSVPFRMQWPLHSDIQINGIPIRVVNRQPTQQLGVNGRDDGPVLTAYVREGSNKIVLSRSDSRTFCLGVRIAKRRSVEQLVGYGQNSVDSLSIYNTSWYLGGTWQLLRFRNPVLFIKGPLNFHSIQVLSLVPKEQDGENFDNALARVRRCVGGGTEADNADSDSDIEVVADSVSVNLRCPMTGSRIKIAGRFKPCVHMGCFDLEAFVELNQRSRKWQCPICLKNYSLDNIIIDPYFNRITALVQSCGDDVSEIDVKPDGSWRVKGGAELKGLAQWHLPDGTLCMPTDTRSKPNIRIVKQEIKEEPLSEETGGRLKLGIRRNNNGQWEINKRLDSNNGQNGYIEDENCVVSASNTDDENSKNGIYNPEPGQFDQLTSNIYDLDSSPMDAHFPPAPTEQDVIVLSDSDDDNVMVLSPGDVNFSSAHDNGNAFPPNPPEASGICGEQPRGAGPDVTSFLDGFDDLELPFWESSSSQDAAGTQVTDNQCEMQNFIVNHQFLHEPILGVNLGGTAASNTLECEHDGALQA

SEQ ID NO: 17611 - protein, 1055 aa, Oryza sativa
  Clone ID: TF_OSC900335j.C1.p17.fg
MEASAGLVAGSHNRNELVLIRGHEEPKPLRALSGQVCEICGDEVGRTVDGDLFVACNECGFPVCRPCYEYERREGTQNCPQCKTRYKRLKGSPRVPGDEDEEDIDDLEHEFNIDDEKQKQLQQDQDGMQNSHITEAMLHGKMSYGRGPDDGDGNSTPLPPIITGARSVPVSGEFPISNSHGHGEFSSSLHKRIHPYPVSEPGSAKWDEKKEVSWKERMDDWKSKQGIVAGGAPDPDDYDADVPLNDEARQPLSRKVSIASSKVNPYRMVIILRLVVLGFFLRYRILHPVPDAIPLWLTSIICEIWFAVSWILDQFPKWYPIDRETYLDRLSLRYEREGEPSLLSAVDLFVSTVDPLKEPPLVTANTVLSILAVDYPVDKVSCYVSDDGASMLTFESLSETAEFARKWVPFCKKFSIEPRAPEFYFSQKVDYLKDKVHPNFVQERRAMKREYEEFKVRINALVAKAQKVPAEGWIMKDGTPWPGNNTRDHPGMIQVFLGHSGGHDTEGNELPRLVYVSREKRPGFQHHKKAGAMNALIRVSAVLTNAPFMLNLDCDHYINNSKAIREAMCFLMDPQVGRKVCYVQFPQRFDGIDVHDRYANRNTVFFDINMKGLDGIQGPVYVGTGCVFRRQALYGYNPPKGPKRPKMVTCDCCPCFGRKKRKHGKDGLPEAVAADGGMDSDKEMLMSQMNFEKRFGQSAAFVTSTLMEEGGVPPSSSPAALLKEAIHVISCGYEDKTDWGLELGWIYGSITEDILTGFKMHCRGWRSVYCMPKRAAFKGSAPINLSDRLNQVLRWALGSVEIFFSRHSPLLYGYKNGNLKWLERFSYINTTIYPFTSLPLLAYCTLPAVCLLTGKFIMPPISTFASLFFIALFISIFATGILEMRWSGVSIEEWWRNEQFWVIGGVSAHLFAVVQGLLKVLAGIDTNFTVTSKATGDEDDEFAELYAFKWTTLLIPPTTLLILNIIGVVAGVSDAINNGSEAWGPLFGKLFFAFWVIVHLYPFLKGLMGRQNRTPTIVVIWSVLLASIFSLLWVRIDPFTIKARGPDVRQCGINC

SEQ ID NO: 17612 - protein, 681 aa, Oryza sativa
  Clone ID: TF_OSC20379j.C1.p1.fg
MPRPSTSASATASRFAAFWAADALAGDDALDFAVTKAMVGVSPDSVRAAPEAVRERVALRCLQEVVSLASSDGERGATASAIAAPGEGMLGVEDASRTCEDLLLQLIREVGSSGSLEKDMLPPFRQDIQKFICIKRPTLPETSFELLRKVYPEITPVVPPSPVEQNGNDQHDNISHDLVNTEKTGFTTDGAQLQQDDLANLVDERNTENLQKDAMATSDFQQPCTSDNRCFDQRQEDSINTVGVNIRSPEDSPTNVNRHMSVAAEPSLASSADLLGSNTGRMSEQDTIDHTTIVQSQSCGVRYPNKHHSNNGDMPLVASIQSPKDSIHEGSTMQTTVSPAVDRSNDALPASNMTHLPEFIAVEDKIMTSEPHFSKTHPNSGQHDTGDKANQDVGCGSTGIQTAAALPSEGFNGDVQGDKSEIKDPAGNTTQHTETFEQENSDKAHLEVGCSDKVNQALYDDGNIIKNNMVFGGLNKQTALESHGCSMTLHNRNSEANHFSEQNIGRNRTEVQNDCCSIPTSPNDVNDKRAKQASNKETMANTVAETLHVHSSDGSFSGFAAGGLLSMAEKLPFCTQDQYANGTVEGLSEQELCIKCGKDGQLLKCSGCFLAVHDTCFGSSVTFDDSGQFYCPVCFYTKATEAYQKAKKTYSEARKNLSAFLGRKQLAEQYQQAAVRQKAAN

SEQ ID NO: 17613 - protein, 850 aa, Oryza sativa
  Clone ID: TF_OSC900210j.C1.p1.fg
MVGVSPDSVRAAPEAVRERVALRCLQEVVSLASSDGERGATASAIAAPGEGMLGVEDASRTCEDLLLQLIREVGSSGSLEKDMLPPFRQDIQKFICIKRPTLPETSFELLRKVYPEITPVVPPSPVEQNGNDQHDNISHDLVNTEKTGFTTDGAQLQQDDLANLVDERNTENLQKDAMATSDFQQPCTSDNRCFDQRQEDSINTVGVNIRSPEDSPTNVNRHMSVAAEPSLASSADLLGSNTGRMSEQDTIDHTTIVQSQSCGVRYPNKHHSNNGDMPLVASIQSPKDSIHEGSTMQTTVSPAVDRSNDALPASNMTHLPEFIAVEDKIMTSEPHFSKTHPNSGQHDTGDKANQDVGCGSTGIQTAAALPSEGFNGDVQGDKSEIKDPAGNTTQHTETFEQENSDKAHLEVGCSDKVNQALYDDGNIIKNNMVFGGLNKQTALESHGCSMTLHNRNSEANHFSEQNIGRNRTEVQNDCCSIPTSPNDVNDKRAKQASNKETMANTVAETLHVHSSDGSFSGFAAGGLLSMAEKLPFCTQDQYANGTVEGLSEQELCIKCGKDGQLLKCSGCFLAVHDTCFGSSVTFDDSGQFYCPVCFYTKATEAYQKAKKTYSEARKNLSAFLGRKQLAEQYQQAAVRQRAANSEDHFNGCNNAIKRQGNHQSEGNNLSHRDEEPARQRKKQKTNARDACTQEVVTKKAPTVHNSDVVSMKKNSVLQNNRKQAQVAEQEQPEENAEASGESGNTNSSHKTAHSSQNKCSPAASQNIDADKEDVLASSQQSEDSDEIEATSSSDPSKQPSPHWRKLRHRKARYQDNNTAIPINSKKTLGHHDQHMASPSRKRNYAYPPKR

SEQ ID NO: 17614 - protein, 123 aa, Oryza sativa
  Clone ID: TF_OSC4045j.C1.p1.fg
MASGGTVCSMCGDVGFPDKLFRCARCRRRFQHSYCTNYYGDGAPVEAGAGVCDWCLSDAAVVAGKKGPSSEGNEEPFSREYRGRSKQAASTGGGEQEGGGGGGRRVSKAGAVRRYKLLKDVLC

SEQ ID NO: 17615 - protein, 708 aa, Oryza sativa
  Clone ID: TF_OSC400792j.C1.p5.fg
MEDAWRKAKRALGLGLCVHVPEAEEGEREDCSSERRRRLPAAASGARCRGEAAVTVGPESVPAPSDVPVPLPLPGVVRRSKSGSSRSSSKRKCAICFDSMRHGNGQALFTAECSHMFHFHCISSNVKHGNYFCPICRAKWKEIPFNRSLSSNIPHGRIGVSRARLTQQDANMALLHQVPNHHQRVRRPHTSEPADFNDDEPLQQPEVFDNLNVRSTKTAEINTYPEFSTIPQSSSKDDFAILIHLKAPSANPDQGTGKLANESSAGSSRNRAPVDLVTVLDVSGSMAGTKLALLKRAMGFVVQHLGPSDRLSVIAFSSSARRLFHLQRISHHGRQQALQAINSLGASGGTNIADALKKAMKVIEDRSYKNSVCSIILLSDGQDTYNISSSVQGASPDYKSLVPSSIINDARHTVPLHAFGFGADHDSDSLHSIAQASGGTFSFIEDEGVMQDAFAQCIGGLLSIVIQEMRVSMECVHPGVQLSSIKSGSYPSKVARDGRNGSVDIGHLYADEERDILLSVNIPQSRHQTSALKVSCAYRDPVTGETIKIQGDEVKINRPTTSNISEHVSIEVDRERNRIQAAESIECARAAAEKGALSEAVAILEDCRRTLSQSFASRSGDRLSLSLDAELREMQERMANRQLYESSGRAYMLSGLSSHSWQRATARGDSTDSSTVIYSYQTPSMVEMLQHSQNHLPSPQGRQRPRPR

SEQ ID NO: 17616 - protein, 1623 aa, Oryza sativa
  Clone ID: TF_OSC900208j.C1.p7.fg
MSGQAPQTNQVGGSGVGGADGLPQQMQDVVGLGGLDTQFLLMRNTMRDRIFEYIGRKQSSTDWRRRLPELAKRLEEILYRKFLNKADYLNMMRGPVEPQLQFAIKTLSAQNQQNQQNQQMPRQMASSSGYGTMIPTPGITQSATGNSRMPYVTDNTGLPSSGATMVPQGANTGTSLPGSMSNGYQHLTTSVPLNSTTSSIPSTMGPVGIQRQVTHMIPTPGFNNQQNVPVNPDFSNGAGYFNGEPTVTSQMQQQKQFPSNQNSHQIQHIGGHSNSGMHSNMLENSSAYGLSDGHVNGGMGVHGSNMQLTNRSAASEAYINISTYGNSPKPVQQQFNQHPPQRIPTPVDISGSGNFYNTGSSALTAANNHSMGATNLPSRSRMNSMLHTNQLNMQSIQPQPQIKTEVLDQPEKMNFQSSQLTHEQLIRQQHSMQQHQMQPSSQFVQNQYHLNQQQPNSQHQQSILRSNSLKQPQLSSSHSMQLSEQGALPHTELISSQATEHADIPIYQGQYQQRSAHDNVKGGQVFGHLSSSQNFHSNASHDSQQLLPTNQQLDDSSNDVSYVLKGSQPEQMHQAQWRPQTMEKAPVTNDSSLEKQIQADLCQRTMSQDGAQQPFSSDWRLPGCTVTPADPALPKLPSGGLEQAAGNIYYFRQMKWLLLLFHAKSCLTPVGSCKFHRCFQCPVCSNAKKLLQRSAELASKQKPPEPRKIAQQNTAQRIMNGVEGDIMDIDLVSDEIFDSQPSVPKRLKMQPVSPSTAEREVSMPSNAGLILQETHSELPDQNNKVGQLKMDVKIDPRPLQKPAKIGYGTDGNVPTARHNVAPGGSNEIKTHVKQEIMPIDKETSETAPEVKNEANDSTDITVSKSGKPKIKGVSMTELFTPEQIQEHINSLRLWVGQSKAKAEKNQLMGHNENENSCQLCKVEKLTFEPPPIYCSPCGARIKRNAPYYTVGTGDTRHFFCIPCYNESRGDTIEVEGQNFLKARFEKKRNDEETEEWWVQCDKCECWQHQICALFNGRRNDGGQAEYTCPNCYVEEVKRGLRMPLPQSAVLGAKDLPRTVLSDHIEDRLFKRLKQERQDRAAQERKSIEEVPGAEGLVVRVVSSVDKKLEVKPRFLEIFQEDNYPTEFPYKSKAVLLFQKIEGVEVCLFGMYVQEFGAECSYPNQRRVYLSYLDSVKYFRPEIRTVSGEALRTFVYHEILIGYLEYCKQRGFTSCYIWACPPLKGEDYILYCHPEIQKTPKSDKLREWYLSMLRKATKEEIVVELTNLYDHFFITMGECKAKVTASRLPYFDGDYWPGAAEDMINQLRQEEDDRKQQKKGKTKKIITKRALKAAGHTDLSGNASKDAMLMHKLGETIYPMKEDFIMVHLQYSCSHCCTLMVSGKRWVCHQCRSFYICDKCYDAEQQLEDRERHPSNSRDTHTLHPVDIVGLPKDTKDRDDILESEFFDTRQAFLSLCQGNHYQYDTLRRAKHSSMMVLYHLHNPTAPAFVTTCNVCCHDIETGQGWRCEVCPDFDLRKMLDLLVHASTCRSGSCQYPNCRKVKGLFRHGMQCKTRASGGCVLCKKMWYMLQLHARACRDSGCNVPRCRDLKEHLRRLQQQSDSRRRAAVNEMMRQRAAEVAANE

SEQ ID NO: 17617 - protein, 712 aa, Oryza sativa
  Clone ID: TF_OSC402966j.C1.p8.np
VLPILNTWCRYNYQPPPGKPNHTCGGADRWADVVSTDDTSNSSSSSPSASTSTSKMELKMSKKISFSRIPRNLKDLLATGLLEGHPVKYIMRKGKVVSPYYFEVHAGSTKKHPSDYIFLENGNNLHDILRACSDATLDMLQSAIQNAIGPAPKKRTLCQTCKSELSSCCTGKFALLCDSCLESKDLKTVPGKLCHSSTFCQRQKIWRTSKIGRNPTSSARRSKNETSKIGRNPTSSARRSKNESPGSKYCNSSARGSKNAFPGVKTTSTGRITRKDKGLHKLAFMSGVLPEGTDVGYYVGGKVSPSQFEAHAGRAARRKPYHNIYMSNGVSLHELSVSLSKGRNMSNRQSDDLCSICSDGECVGFTTIPRGTWCCRYCENRQQRESSLAYNHNAIAAGRIDGIDPMEQIFTRSIRIATTPVTGFGGCALLCRLHDFSKKKFSARTVLLCDQCGREFHIGCLKEHNMADLTAALPEGAWYCTADCVRISETLKDLLSRGAEPISSVDVEIIKRKEQKALNKDGDLDVRWRVLKDKSSADSKLVLSKAVAIFHESFDPIIQIATGRDLIPAMVYGRSVRDQDYTGMHCAVLTVGNTVVSAGLFRVMGSEIAELPLVATSRDSQGLGYFQALFGCIERLLASLKVKHFVLPAADEAESIWTQRFGFVKITQDELRLREYLKGGRTTVFQGTSTLHKLVPKLDASSVNICIGMCRE

SEQ ID NO: 17618 - protein, 1078 aa, Oryza sativa
  Clone ID: TF_OSC400769j.C1.p19.fg
MDTASVTGGEHKGKEKTCRVCGEEVAAREDGKPFVACAECGFPVCKPCYEYERSEGTQCCPQCNTRYKRHKGCPRVEGDEDDGGDMDDFEEEFQIKSPTKQKPPHEPVNFDVYSENGEQPAQKWRPGGPALSSFTGSVAGKDLEQEREMEGGMEWKDRIDKWKTKQEKRGKLNRDDSDDDDDKNDDEYMLLAEARQPLWRKVPIPSSKINPYRIVIVLRLVVLCFFLKFRITTPAMDAVPLWLASVICELWFALSWILDQLPKWSPVTRETYLDRLALRYERDGEPCRLAPIDFFVSTVDPLKEPPIITANTVLSILAVDYPVDRVSCYVSDDGASMLLFDTLSETAEFARRWVPFCKKFTIEPRAPEFYFSQKIDYLKDKVQPTFVKERRAMKREYEEFKVRINALVAKAQKKPEEGWVMQDGTPWPGNNTRDHPGMIQVYLGSQGALDVEGSELPRLVYVSREKRPGYNHHKKAGAMNSLVRVSAVLTNAPFILNLDCDHYVNNSKAVREAMCFLMDKQLGKKLCYVQFPQRFDGIDRHDRYANRNTVFFDVSTAFFSGVRASRRDINMKGLDGIQGPVYVGTGTVFNRQALYGYDPPRPEKRPKMTCDCWPSWCCCCCCFGGGKRGKSHKNKKGGGGGEGGGLDEPRRGLLGFYKKRSKKDKLGGGAASLAGGKKGYRKHQRGFELEEIEEGLEGYDELERSSLMSQKSFEKRFGQSPVFIASTLVEDGGLPQGAAADPAALIKEAIHVISCGYEEKTEWGKEIGWIYGSVTEDILTGFKMHCRGWKSVYCTPARAAFKGSAPINLSDRLHQVLRWALGSVEIFMSRHCPLWYAYGGRLKWLERFAYTNTIVYPFTSIPLLAYCTIPAVCLLTGKFIIPTLNNLASIWFIALFLSIIATGVLELRWSGVSIEDWWRNEQFWVIGGVSAHLFAVFQGLLKVLGGVDTNFTVTSKAAADETDAFGELYLFKWTTLLVPPTTLIIINMVGIVAGVSDAVNNGYGSWGPLFGKLFFSFWVILHLYPFLKGLMGRQNRTPTIVVLWSILLASIFSLVWVRIDPFIPKPKGPVLKPCGVSC

SEQ ID NO: 17619 - protein, 1081 aa, Oryza sativa
  Clone ID: TF_OSC400765j.C1.p1.fg
MDGDADAVKSGRHGSGQACQICGDGVGTTAEGDVFAACDVCGFPVCRPCYEYERKDGTQACPQCKTKYKRHKGSPAIRGEEGEDTDADDVSDYNYPASGSADQKQKIADRMRSWRMNAGGGGDVGRPKYDSGEIGLTKYDSGEIPRGYIPSVTNSQISGEIPGASPDHHMMSPTGNIGKRAPFPYVNHSPNPSREFSGSIGNVAWKERVDGWKLKQDKGAIPMTNGTSIAPSEGRGVGDIDASTDYNMEDALLNDETRQPLSRKVPLPSSRINPYRMVIVLRLVVLSIFLHYRITNPVRNAYPLWLLSVICEIWFALSWILDQFPKWFPINRETYLDRLALRYDREGEPSQLAAVDIFVSTVDPMKEPPLVTANTVLSILAVDYPVDKVSCYVSDDGAAMLTFDALAETSEFARKWVPFVKKYNIEPRAPEWYFSQKIDYLKDKVHPSFVKDRRAMKREYEEFKVRINGLVAKAQKVPEEGWIMQDGTPWPGNNTRDHPGMIQVFLGHSGGLDTEGNELPRLVYVSREKRPGFQHHKKAGAMNALVRVSAVLTNGQYMLNLDCDHYINNSKALREAMCFLMDPNLGRSVCYVQFPQRFDGIDRNDRYANRNTVFFDINLRGLDGIQGPVYVGTGCVFNRTALYGYEPPIKQKKKGSFLSSLCGGRKKASKSKKKSSDKKKSNKHVDSAVPVFNLEDIEEGVEGAGFDDEKSLLMSQMSLEKRFGQSAAFVASTLMEYGGVPQSATPESLLKEAIHVISCGYEDKTEWGTEIGWIYGSVTEDILTGFKMHARGWRSIYCMPKRPAFKGSAPINLSDRLNQVLRWALGSVEILFSRHCPIWYGYGGRLKFLERFAYINTTIYPLTSIPLLIYCVLPAICLLTGKFIIPEISNFASIWFISLFISIFATGILEMRWSGVGIDEWWRNEQFWVIGGISAHLFAVFQGLLKVLAGIDTNFTVTSKASDEDGDFAELYMFKWTTLLIPPTTILIINLVGVVAGISYAINSGYQSWGPLFGKLFFAFWVIVHLYPFLKGLMGRQNRTPTIVVVWAILLASIFSLLWVRIDPFTTRVTGPDTQTCGINC

SEQ ID NO: 17620 - protein, 1350 aa, Oryza sativa
  Clone ID: TF_OSC400272j.C1.p8.fg
MFDDDDDVEPPVNDVDIYYFEESEDKPVCFSVLPIKFDENEEVSCSDYKELNLRGFTDNNRHVFKKVIAWRVDLDCQRPKISVLSSDGKWIELLKPRMCYYEKKVRSILITVQMLHFVRKCPKKQQRSLFDHLGEVFNKFGPVPNGDDIKKHHHLIKLFMERDPILVKSKIIRCFIEDASRKAIEPIPRRACTEDRFIVSDESLESSDDCSYSNSDSSDDNNDDSTDEDTDTDGNATDDDTDMICAICDDGGKLLSCEGPCKRSFHARVKHGRKSKCRTLRFTSVELKLKESGTFLCENCEHNEHQCFKCGELEPSYGPNAKGSPDIIHHARYVGVLSTIRHGLMVFQCNKESCGHFYHPKCIAVLLEPEDTDGACKLEEMIADGMSFTCPVHWCFKCAKMEDRTRSEFQFAVCRRCPRSYHTECLPSYHVLMASNGIFHSEISFETKDKGAPKLAWKIKKRSYFYCLHHGIDATTGTPSGEHIKFPSIPKIKKTKNLSKKDAKVTGKRKKSGNKFSTKSTKLANVSPRGESKQTRRVARNSSSEHIALEHGCAVKRLKKDLQFEVPLVDVSARLSGAKTVEGKEGQPGTPSSFVMGEISKSASCAVDGETEKRVTSTAEKEISAGTSQDMATKDVLRQPRIEIDGLSECLVQIADKLHWYVQPGNTESCGKLPDGVLLERSIVVVREIVDLCFNMDNFSRLMKEKLEDVSKGCNFKNYDLFQHKNNLCFDESNWVTMQPKDLPHGLNLVMVLDLPLDIQAVSANKFVDKVLTFKPRLIIIVSPTDIERLDCKEEPYHLIWEYNQHIFGKPLYQPGDVDVNDDAKNGLHVIPLCVSLWSFPDKTEENMRIAGKHGHLNVGHKAHSVMLKDSSVDKGAKGDNEIFTVGKEDTSEREQTSEHCSGERLIIPNVVTFHANQEQNDELQSLYKEKHANGSGGGNNLTSGKESDVHRGENACGHNSAARQKTEISKRENRMTDSTHEENMRSGKEKIPRDGSNKGTVKPDLVDGLPPDKHVDVAFVHKTTTNRVDTQQECGYNVAVDVDDNYALQHEPKSPHGNDNLRGTEMDTSGDNSRKTREQKEVTDGKRLDLDRKREAVRMKNARDGHHEDDRTAHPQCVDVKSPSHNDDQRARGASVCKSRKRGTSNRILESRDTVSENSARRQVPVERRNGHAPYSRRPDYSATARRGSPSYPRRRRRSRHFSSERDWSTVPPRGNSPDTEYDGTRYNTEYDGYGSQSGCGYHGMDTLPVDRYYPQEHHNGAYRPQTNFGEEEQAAAYGRRRNDHGWGPDYRRRDSFDWEHRSSARGTVTDRYVPDLEQTNHQIPGQASLQDGYFMRRSRSFVNMHVPY

SEQ ID NO: 17621 - protein, 1237 aa, Oryza sativa
  Clone ID: TF_OSC102169j.C1.p27.fg
MAKPLRSTVLVCASAAMAPTSAPRLPTSAPPISPASSRKPKPNRARAGTLCRSSSRAERHRGGRTSTRWAAVAAEGGGEAMRRWVDRRLRDSFPVDTVEEMTTLALQCVAKDAAAQPEMSWPRGSPPRCPSSSCPEPQRQEFGGGNPLRRLPLVSPPPRPADFPPRPGGAVLDSAVRGLPRAQGVDVQPEESHIRRGVEIRVSLYSPPMKGGRLHRLERPPAAHITTAAAATTPAPAPADDWGDGSWTVDCSCGITYDDGEEMVSCDECNVWVHTRPSAPPPPPTRLRSPSSWPSWPTHRPRPLYRRWAEVPLPSRVHVHGLPGGTDTALFRSAAPSPVFSSALWRCAGYVPKRFGFRYCEFPYWADDKDGANALFALAREKRKEKAETRFPLRLGAIHKDKNYVRTLSICGDKVDGVEHSVDDDAKRTSPPSDAKKRGTSISIVEPDTWDNGCEKKRDFDVPASEDQHAKTNMVNSDLHVLVEAKKKRASSSERSGDKKCSASKEITGMLKKYEPKESKRLVISSGVATTAAVAEQEVHSRFVKLYPPHLSAPGGGEMHGSELHLPMGGGAEWQSHQQTLAWRRCKPGVHQGSVYEGLDGNQNVGLQTGVRSNGVVKRDDAKRSNGDVQSDAAPEKMNEGLDLQKQSNQTSNLLVVGGVPDLQTNQSESLTIKKEASTDDHERTEAIQFVSDEHKSGKQDTAMLSTLQRHSSKLASDLVYQHPKSETQNPMHTIPEHPNSSLGNVKVCTASSGPNSTTFDLSCSLLSTEPSSEETTVRLVKKDQTRLVSSADSENDFAKKSESSQDRTRSSDKVQLKGFVPSAPKSSQGSRTYVSSAKNRFIVPKEQLQKTSTEGNAPPGSLQGEVAPLHSRNKAMPLSFYQRKDKIHHRSIHITQDTSNSSASAELQSTETTASLSDEQLALLLHQQLNSSPRVPRVPRCHQASTMQMLHPTGASVFSKRSSAHGGRDQALVLKKRNKDDAWRDNDETKKTGKVSSVERRHRDSSTERVLAAKDSCKFTENIESEQRNRGICSTGATSGVGNDAPIDRGVSHDLPGLIEEIISKNTNITYGELCNAIRQHWGDLSKPNVENNAYPNYLHAVNDCLRNRNDWAHLVDQAAMMNPNKRRKVEESDSLSADVLATEKTNKEAKRGPEDTNAESHHEILPRGKRKARKCRRLELKGRRVNDTRKRSSFDSASDDDDTTLSDSSSDRNDTPMDKSLEDSFVIAKNADSSS

SEQ ID NO: 17622 - protein, 1954 aa, Oryza sativa
  Clone ID: TF_OSC401196j.C1.p89.fg
MPRKKASSPSPTSTARETRSSSARGHASPTPTPTLRRSTRETTSRFSSSSSSSANKHEGSPAKQSANNNTAKRKMNNAAADTSTRPIKKNKKLNAKSYLALFSTPQQTAKSPPAPGGNSRLYSNFGNVAPPLLVQVDDDNASTVPMQDSGTLLEHEEADTQEQGYQSGLHKVPEVVLEETDVSKNKADEHASTSEAKKTIEAGDPREIKGASTSNQALVTHSDGTDYNEYLCAVCRSRETPGILKFKMRQLRRCHHERLWERSCDGKDCKNRYHDSCLDPPLQYVSLGIWLCTLCTKKRLQFGLFAVSEGIESLWDVKEVKWKDLGYEYATWELETSSFLCTPEAKDLKRNYESRHEDARRGFDPAKINKGKQCLFQKLQKLPDGFPPGLDKDHLSSLNRLREFWHNSDGAICLDDQERVIKTILFSMSILPDVCQPLLIVSTSASLSLWEAKFNRLAPSINVVVYNGEKDVRKQIQDLEFYENGLVTFQVLLSHPDAILEDIQTMESIVWEAVMVDDCQSLRVSKCLEQLKHLSTNFRMVLLSFPLKESIPEYINLLSFLNPEGSVISSSSNGDFTDTGDILATLKEKFARHVAFERKADSSKFLEYWVPARLSRVQLEMYCYTLLSNSPALRSHSRTDSVGALRDILVSLRKCCDHPYLVDQSLQSSLTKGHSLTDILDIGSGGGAGNPMGDILDDFVRQRFGFESYERVERGLLVPKKQTALNMFNDKTKGRFIFLIDSRACVPSIKLSSVDAIIIYCSDWNPTNDLRVLQRISIESQSECVPIFRLYSSCTVEEKTLILRSMIIFLTATSRILEEFQKHDYSSKDSEDDGLFMNNVFLEFAAKLSTNVEASTKMENAVISRAQQSGSFYSRDIAVISEREGISAVDGDLPKFWTFWSNLLGGRSPHWQYISEPVQRNRRKIQNMEDQMRIPAEETDEAIMKRRKIGEIMDSSPKILPVKDNDAVLPENSTASSSHETSVDDTWQELGAESLQGTQKGLHTQLKPELSKLYELLELPETVKCLCEELLDYILKNHQCWRAASLLKHKINRRESLALSVRNLNYECDEVLAEYVYEKLRILKKKFSRRASETSKQSQSTPVNNTSSYKQQTSPKLRSDGSICHQVTTIDGDLENVSHEEAPHDILTEEMILEQKELISVLETHREEHVLRDELLERITEKRINLINMVFSLREKNIQDKQGNETTLLDMHKQKEVAKLQETCNLVVEHLRKGHIDSEDRDATVKLIIEWFTLLLYAFLNHMRCQHNKLKMQQSTSWNKELQLKEIFLQQAKSGHLDRSFDQQIPLPDSCFTLEEFSHFKEIVGNFPVGAATSANCQHSLASTMEIALVRSVSPSEVGNSEAAINGAVEVPVHTEKRPTSEVGLSQNRMDNDSDGIDSQGGPPLAVQHSLSSNPAIDNSNNLESSVASHRSEHLGDIAVEVNADNCGTTLADSPHLEAPTVAALPSQSALPMAMEVDIQTDHVVQSAQQNIVTGRVPQEEEREGSTTVTSAQPLQPEMRPSSPVSGILRERTNPDQRRESRQPEAAPSSVDPTQLFPVASLMFNHPPLGNEPLKNELHRLQVHMDSLNKIYELKKSQLQTECSQEIEKIKQKYDLLIKEQDSAHHQHRKTLDDLYGKVLLNQSLADDFRVKFVSTSAAQARAVSPPLCQTTRQTAGVSQQVPTRPSVAGSIALPVGSSSASRPSLQRHCAQPSHVDRSSSSGGSHSSSPSSQVVRPPPAILGSVVRATSTPFSHTPAARGNYGVGSEVARAPAPHLQFRLPRAHPTAPVNQQQRQLPVRLESTCSRTQLTPVSTPVNARQLSSQSVSPVSNSSSSSSSHPGPALSNPALAANSSSNPVLSAGTVALPPSPHPPESIAAPRGQQKGAPSGLNTVPVVGSGLPPSRSMSDSVSLDAWLTSNLGLKDGETSTPRTRMDSHRTVDVVCLSDDEPEEH

SEQ ID NO: 17623 - protein, 1990 aa, Oryza sativa
  Clone ID: TF_OSC900291j.C1.p5.fg
MPRKKASSPSPTSTARETRSSSARGHASPTPTPTLRRSTRETTSRFSSSSSSSANKHEGSPAKQSANNNTAKRKMNNAAADTSTRPIKKNKKLNAKSYLALFSTPQQTAKSPPAPGGNSRLYSNFGNVAPPLLVQVDDDNASTVPMQDSGTLLEHEEADTQEQGYQSGLHKVPEVVLEETDVSKNKADEHASTSEAKKTIEAGDPREIKGASTSNQALVTHSDGTDYNEYLCAVCRSRETPGILKFKMRQLRRCHHERLWERSCDGKDCKNRYHDSCLDPPLQYVSLGIWLCTLCTKKRLQFGLFAVSEGIESLWDVKEVKWKDLGYEYATWELETSSFLCTPEAKDLKRNYESRHEDARRGFDPAKINKGKQCLFQKLQKLPDGFPPGLDKDHLSSLNRLREFWHNSDGAICLDDQERVIKTILFSMSILPDVCQPLLIVSTSASLSLWEAKFNRLAPSINVVVYNGEKDVRKQIQDLEFYENGLVTFQVLLSHPDAILEDIQTMESIVWEAVMVDDCQSLRVSKCLEQLKHLSTNFRMVLLSFPLKESIPEYINLLSFLNPEGSVISSSSNGDFTDTGDILATLKEKFARHVAFERKADSSKFLEYWVPARLSRVQLEMYCYTLLSNSPALRSHSRTDSVGALRDILVSLRKCCDHPYLVDQSLQSSLTKGHSLTDILDIGSGGGAGNPMGDILDDFVRQRFGFESYERVERGLLVPKKQTALNMFNDKTKGRFIFLIDSRACVPSIKLSSVDAIIIYCSDWNPTNDLRVLQRISIESQSECVPIFRLYSSCTVEEKTLILAKHDHILDSNVQNVMPIVSHSLLSWGASFLFNRLEEFQKHDYSSKDSEDDGLFMNNVFLEFAAKLSTNVEASTKMENAVISRAQQSGSFYSRDIAVISEREGISAVDGDLPKFWTFWSNLLGGRSPHWQYISEPVQRNRRKIQNMEDQMRIPAEETDEAIMKRRKIGEIMDSSPKILPVKDNDAVLPENSTASSSHETSVDDTWQELGAESLQGTQKGLHTQLKPELSKLYELLELPETVKCLCEELLDYILKNHQVSQEPKGILHAFNIALCWRAASLLKHKINRRESLALSVRNLNYECDEVLAEYVYEKLRILKKKFSRRASETSKQSQSTPVNNTSSYKQQTSPKLRSDGSICHQVTTIDGDLENVSHEEAPHDILTEEMILEQKELISVLETHREEHVLRDELLERITEKRINLINMVFSLREKNIQDKQGNETTLLDMHKQKEVAKLQETCNLVVEHLRKGHIDSEDRDATVKLIIEWFTLLLYAFLNHMRCQHNKLKMQQSTSWNKELQLKEIFLQQAKSGHLDRSFDQQIPLPDSCFTLEEFSHFKEIVGNFPVGAATSANCQHSLASTMEIALVRSVSPSEVGNSEAAINGAVEVPVHTEKRPTSEVGLSQNRMDNDSDGIDSQGGPPLAVQHSLSSNPAIDNSNNLESSVASHRSEHLGDIAVEVNADNCGTTLADSPHLEAPTVAALPSQSALPMAMEVDIQTDHVVQSAQQNIVTGRVPQEEEREGSTTVTSAQPLQPEMRPSSPVSGILRERTNPDQRRESRQPEAAPSSVDPTQLFPVASLMFNHPPLGNEPLKNELHRLQVHMDSLNKIYELKKSQLQTECSQEIEKIKQKYDLLIKEQDSAHHQHRKTLDDLYGKVLLNQSLADDFRVKFVSTSAAQARAVSPPLCQTTRQTAGVSQQVPTRPSVAGSIALPVGSSSASRPSLQRHCAQPSHVDRSSSSGGSHSSSPSSQVVRPPPAILGSVVRATSTPFSHTPAARGNYGVGSEVARAPAPHLQFRLPRAHPTAPVNQQQRQLPVRLESTCSRTQLTPVSTPVNARQLSSQSVSPVSNSSSSSSSHPGPALSNPALAANSSSNPVLSAGTVALPPSPHPPESIAAPRGQQKGAPSGLNTVPVVGSGLPPSRSMSDSVSLDAWLTSNLGLKDGETSTPRTRMDSHRTVDVVCLSDDEPEEH

SEQ ID NO: 17624 - protein, 430 aa, Oryza sativa
  Clone ID: TF_OSC401546j.C1.p3.fg
MHAHQHQHALLAALLACALAASSSTAGAQPAGQQGYAYGDVSGQQVHVSTTMIVLLAAVVGVFLFIAISTIYLRHCTGYDPATEGGGVGGSRSMILPANSFVSRRQRRPRGLDSSVVRMFPTMKYAEAKALRVGKVAGAALECAVCLSEFEDDEMLRFLPKCSHAFHPDCIGQWLASHVTCPVCRRNLDPNKDTTEEVIIPAAAAADPNSTSSEIVVIRQEDGAHPAAVVIDVVTEEDDEERRKEELELQAIGTQLRAMRSRSGLRPKTSAAKLPRSHSTGHSLAVRLDGDLERYTLRLPEHVHREMVAAGEQSVRRGRRLGEGVGMGARCSPRFSRSGRWSSFLSNSLSGKLSFLSPSSRRTPDSTQVEVSSSSSSSVTKVKGKRVAAVDVADDGSAHGTAQYPGCTVASSAAAAAVDVEKAATRQVRT

SEQ ID NO: 17625 - protein, 272 aa, Oryza sativa
  Clone ID: TF_OSC401826j.C1.p29.fg
MEGGGGGGGGGGGGGGGGGGGGAPYATRTAEEVFRDLRGRRAGMIKALTTDVEKFYKLCDPEKENLCLYGYPNETWEVTLPAEEVPPEIPEPALGINFARDGMNEKDWLALVAVHSDSWLLSVAFYFGARFGFDREARRRLFNMINNLPTIFEVVTGAAKKQAKEKTPNSSSKSNKPSSKVQSKAESRSKSKLSAPKDEEGSGDDEGEEEEDDHDNTLCGTCGTNDGKDEFWICCDNCEKWYHGKCVKITPARAEHIKQYKCPDCTNKRARA

SEQ ID NO: 17626 - protein, 697 aa, Oryza sativa
  Clone ID: TF_OSC419229j.C1.p1.fg
MPSMRALERLASWPTPPPPPPPPPPPAKAAAAEAERPCPPSSAATTSSSSSSSASAAPAAAGAPRVYPLRDFPGREAAGLGGAFRDNVRWLLRQWGGASPASPAAGGPGSASAAVAVAWRVLLSDDRTGVVVPIFAVEEPVASSPKPLCDYCRWAGWSHHWVSKRKYHFIIPAPADWDRQLAADVILGRTDHLLHGLIHSNGFGHLVMLRGRDGGSTALSGRDIMDIWDCLCSALRARAVSVVDFSQKRSLDLRLLLSVAHGDTWFTRWGYCLARGCFCVSTSTYAASVEALAALPVDYLRSRHVRRVVTIYRRLSNKPLVTVREFLRCLLDWKHLEPPLQLPPVKTCTRLQFMLPKPSVMKRHRQQPCQRFEDVIDLLQCRWSKKRLLDAAEVVVDRLLEHGSGAEMTRQAVRDAARGAIGDTGLLDFVIKSLGDTIVGNYIVRRVPDAETRVLHFSLEEYEEPTPALLDVEVECTPLPPVVRWPSTVEVERDLRAVYRAMVEVRSEAAQAVLDCKHWVKWWGLGDESDDQLRFFVEWQPQPWEAAELIRPMPLGEIVVVPLHASMGELLVESEHALRDTYYFFEEFQAEGLHGIAGEKWDPVMLGGAENGDTISVYGNGADMETELRCHGGLDLWEVRCVCGAQDDDGERMIACDACDVWHHTRCVGIADSEPVPPLFLCVLCGGALMAAGPINS

SEQ ID NO: 17627 - protein, 895 aa, Oryza sativa
  Clone ID: TF_OSC900291j.C1.p21.fg
MSTSPGRTRSGRPLSSSSSSSSSSSAPAPAPKRRRRPDKPPDHDPAPAPAPDKDLLVSPHTPPMDAEAPKPIHLLNDKDKDKEGDDGSHQDTPTLQSPPRGSDAHPIPTELNVSAAVARPPQPPHAQPTELNAVAAAASALPMELDAAAAAAVPAESTELNAAATAVPAQPTEVNAAAEIVKPIGLNAVAAETAKPDMAMELQEPPTVTAANGRDVSHESFEQNLQHQVLDNALTDPSLLAESTATPASTAGLKPARRFTRSLLKNKPEEEPTASKSQDPAVSMISEDNNEASVDLALAPGKPQRRFTRSLLKVKVEARSTNNLLQSKEAIDSTSDSSRSVKKMEMKMSKKVACLTKHPSNIRELLNTGLLEGMPVRYIIPSSKLQKAVLKGVITGCNIRCFCLSCNGSKNIFLHHKLKSLEAFCVNVALSQNNIKIPLPHLMLVRAIPGTPGYTNWSLKFCLMRKVDGYIKDQRIYCNHCNRVVSPSAFEAHAGEGTRRKPYDNIFTSNGVSLHELSMKISKDMELSERETDDLCRECGQGGDIFPCKMCPRSFHPACVGLSGVPSEWYCDNCSNLVQKEKALAENKNAKAAGRQAGVDSIEQIMKRAIRIVPISDDLGGCALCKQKDFNNSVFDERTVILCDQCEKEYHVGCLRSQWQVDLKELPEGEWFCCNSCSEIRSSLDKIISDGALILAESDIDIIRKKHEMKGLSMDTNTDLRWRLLAGRKASEDGDLLLSAAVPIIHQSFDPIIEVQSGRDLIPEMVNGRRPKDGMPGQDYSGMYCAVLTLGTSVVSAALLRVMGGEVAELPLVATSKDLQGLGYFQALFSCIERMLISLKIKHFMLPAAQEAEGIWMNKFGFTKIPQEQSDAYLNGAHLTIFHGTSNLYKAIPSS

SEQ ID NO: 17628 - protein, 244 aa, Oryza sativa
  Clone ID: TF_OSC401827j.C1.p32.fg
MEMAAPVSPAPRTVEDIFKDFSGRRAGLVRALTVDVDEFYGFCDPEKENLCLYGHPNGRWEVALPAEEVPPELPEPALGINFARDGMHRRDWLSLVAVHSDSWLLSVAFFFGARLNGNERKRLFSLINDHPTVLEALSDRKHGRDNKSGADNGSKSRHSGKRANDVQTKTSRPAVVDDGYDEEEHSETLCGTCGGRYNANEFWIGCDICERWFHGKCVRITPAKAEHIKHYKCPDCSSSKKSRQ

SEQ ID NO: 17629 - protein, 751 aa, Oryza sativa
  Clone ID: TF_OSC400505j.C1.p44.fg
MGTGGGRVALDGGGRRRRKLDEEDDEEYVADDDEEEDEDEDEEEYQQAAAPSDDGEEGGDDEAEPEDESDADFVGDEEEEEEDLEDEDDLEEVKAPRPKRPPKGKPPPRSRRRRQKDDDDDYEEEEEEDADFDPDVDEDDEEEKDSTKNHVAKRKPPPGRKKKKRKPSRVSKAKPKKPTSGRRRRKRWATDDDEEEEDDADFIVEDDQEEEEDDHRPKKKAKAARKTRDVTPEPDVEASAWPAVESDTSEFEFVTSDEEAADKEAPAAEPAKTKGKKGRKRWGSGSESSSDSDYVISEQELKDLEVSMPPDAALQSPATLPRRTFLSRRVGEKGKEPEEAWKQTCGICLSEEQRATIQGVLNCCAHYFCFACIMEWSKVESRCPLCKRRFTTITKSSMADLGLGSRKAVIRVEKRDQVYQPTEEEMRRWLDPYENVVCIECNRGGDDNLMLLCDICDSSAHTYCVGLGRQVPEGNWYCGGCRSGGEGPSAQDTVVHCRESNTNPANSSSGSFGSATPSGVFQRPPPINTQPSLQGFDLNLSPRETPDEDKREESHVSADAVSTPTGRHATLDRRRAFNRRIRILLFRPRVTPNGWQNPIQSDRTIPENEQNPQSTSTPTEVNPSCSRDSSMQNQQSSSSFVQPARGLIERTYGGGSNFQQTEGAKEQLIPIVKRNLKLMCAQSPLGQSDFKNVARRATHTILALSGIAHNEDFVVTILDEREMEMNIVQSNVMLRNGCSTEYRPCLSCLRS

SEQ ID NO: 17630 - protein, 258 aa, Oryza sativa
  Clone ID: TF_OSC421348j.C1.p6.fg
MDASYRRDGRGGGGGGGGGGSAPRSVEDIFKDFRARRTAILRALTHDVEDFYAQCDPEKENLCLYGYANEAWQVALPAEEVPTELPEPALGINFARDGMNRRDWLALVAVHSDSWLVSVAFYYAARLNRNDRKRLFGMMNDLPTVYEVVSGSRQSKERDRSGMDNSSRNKISSKHTSDVARVENNIKEEDEGYDEDDGDHSETLCGTCGGIYSADEFWIGCDVCERWYHGKCVKITPAKAESIKQYKCPSCSSKRPRQ

SEQ ID NO: 17631 - protein, 679 aa, Oryza sativa
  Clone ID: TF_OSC419173j.C1.p1.fg
MAPKMVISLGSSRRRKRGEMLFRFEAFCQPGYPANFAGAGGFRDNVRTLLGFAHLEAGVHGETKCWSFQLELHRHPPTVVRLFVVEEEVAASPHRQCHLCRHIGWGRHLICSKRYHFLLPRRESAAEADGLCFAINHGGGGGAEKASSKGTTTTASSRGHLLHGVVHLNGYGHLVALHGLEGGSDFVSGHQIMDLWDRICSALHVRTVSLVDTARKGHMELRLLHGVAYGETWFGRWGYRYGRPSYGVALPSYRQSLHVLGSMPLCVLVPHLSCFSQELPMVVTKYQAISGHKLLSLGDLLRFMLELRARLPATSVTAMDYRGIMSEASCRWSAKRVDMAARAVVDALRRAEPAARWVTRQEVRDAARAYIGDTGLLDFVLKSLGNHIVGNYVVRRTMNPVTKVLEYCLEDVSSVLPAVAAGGGVPAQGKMRVRFQLTRAQLMRDLVHLYRHVLKEPSQALTGGAFGAIPVAVRMVLDIKHFVKDYHEGQAAASSNGGGGFGHPHINLCCTLLVSNGSPELAPPYETVTLPAHATVGELKWEAQRVFSEMYLGLRSFAADSVVGVGADQEGLPVLGLVDVGSAVVVQGSVGEQINGEDHERKEEAAAAAVCEGSGGGERVVDCACGAVDDDGERMACCDICEAWQHTRCAGIADTEDAPHVFLCSRCDNDVVSFPSFNC

SEQ ID NO: 17632 - protein, 256 aa, Oryza sativa
  Clone ID: TF_OSC413151j.C1.p11.fg
MDGGYGSVTIVHDARSPEDVFQDFCGRRSGIVKALTIEVEKFYKQCDPEKENLCLYGLPNGTWAVTLPADEVPPELPEPALGINFARDGMQEKDWLSLIAVHSDSWLLSVAFYFGARFGFDKKARERLFMMTSSLPTVFEVVSGGVNTQSKTANGSSKNKSGSKPPKRPNSDSKPQKQVQAKYEEENGGRGNGGDEDQAETICGACGEAYANGEFWICCDICETWFHGKCVRITPAKAEHIKHYKCPGCSNKRTRE

SEQ ID NO: 17633 - protein, 439 aa, Oryza sativa
  Clone ID: TF_OSC16959j.C1.p1.fg
MESEAGSAPNGCTSTVKGSEERHSLERRHDDGSCISEIKLISNMVVKKKRGRRAPPSSRRLSGNKVISGEDAVQNRNHAKEEDQAGNSSDVALSPSSRKTEGQDQSTNPKDLFEKACHQATEMVTESTTGCKKSFWEEKGSDNRRGRQATLCVKQDGLDIETTGKDVSASEAYEKSSTLEDTSVGHAAAKSVNPEDNSLDPMDNVSDTHVNATSSEDKSSEEVEDVKVCDICGDVGEEERLAVCTTCNDGAEHIYCMRVIIQEVPEGEWLCKKCENELEYEKKKQLEKSQLKVGASKSQFFERKTNTIANASKSNSYEDEPSKALEGKISKPDTALKNRSSFENEVENENGDKKELNSTNQCNNSNSKRKEEGAGIISSIKQSITERCGFSMGAESRKRLPLSCESSFRLDVEKGKQAATKVPTSLAFDAAKNLGPPLR

SEQ ID NO: 17634 - protein, 1696 aa, Oryza sativa
  Clone ID: TF_OSC422248j.C1.p10.fg
MEGLVGRAVRKEFPGFGVFDGVVESYDAEAGYFRVMYEDGDSEEVELGEVVGLLVGGSPVGVEMAHPLPLTPGRRPKKRRRGDEEGGVGVGAVVAMEVDSVVLAVPAGGAEPASPVVVVEGSSRDEVDGDVVSEMAEKRRRVVSPGPESSGKPLRRSARQAKAAARVAEMEAAAAVAAAAEAEAAAAAMAEAEAEAAVTPPQSGSKRKRASGAGRYRSVAKDLEKAAVERLPPKPELPPSSQSLDLEGLPALDVFQVYSCLRSFSRQLFLSPFLLETFVAALRCIYVNPLIDWVHFSLLRAMKSHLEDLANEGDPPAMHCIRNLNWELLDLATWPIYLAEYLLTRGSELRYGMKLTDLKLLNTEYYTQPAMVKLELLRALCDDVLEIEAIRSEVVSRMSELDGNDELCKSTRTRRKRRASAVKNLLNSSRAPEDSSDTEDGNSDECYLCGMDGNLLCCDGCPAAFHSKCVGVVEDLLPEGNWFCPECLIQKNDGFKNMVKPGRGAEVLGMDPHDRLYFGTCGYILVVESTAEDSLDSTCHYYGIFDHHSLFNVLRTCHPSYSSITNMISLFWGTAIDSFDSNGRCENNKEFSIFDAKIDCSHLLPSKQHTEHEQLKSDKNGSCEQLACGKAHASDPDRLDHDTSHHKFSLRSAVISENGNATSAKTQQDVCSYANGLPAENKIDQSPHKKISDCYIHSNPAMYVNYYSFGQIAASAAEELKDKLSENKEGKKVGQDAASFQLKTICKKYANIFALTDQKLSVELRKEKCGWCNSCQISGGVDCIFRVTDGKCMEGLQSEKNMNSHIILAIHIILSIEERLNGLLIGPWKNPQFSSYWRKAVLKASDVSSLKQPLLMLESSVRRVAFSVEWQKPADSVEVVGSAAHVLVRTSNKSSRHGSTRKPGRKPFIVELKVDSRDVGVYWRRGGRLSRQVFHWKRLPKSLTYKAVRQAGRIKIPTILYSDGSQFARRSKYIAWQAAVEMAENVAQFILQIKELEFNIRWTEILSTLPASLATKETQKIARLFKKVIVRRKRVDGTNVEYLLDFGKRENIPPVIAKHGKKLDEPSNERNRYWLSEGHLPLSLLKAYEAKALTRLLKKKDIDHLPKKMIDLKPPKPKKSGFDDLLEKAKKQVLGLCGHCDKEVKISDAVNCQYCEALFHKKHFKVPRGATDAYYVCNKCLSEKVLNVKSPQKKVVSKKNSLKKKTKKQSLKIVTRSKQIVAKSKKKMGKNKGKRGRPRKYPLNESKNKLPELRVKEPANVPKNEPAKRISKRLYSKYMKGNSNISERSAKRRRTASHYSYWLDGLRWTQNPNDDRAISFRTERVVFPCEDADLSEVFPVCRLCQKCYSGESIYIACEDCGDWFHGDIYSITLENVNNLIGFKCHRCRLKDVPVCPYVQTDNILMAQSDKDDVTSRSIEDKEDRSPTDLVAHDSLEGSHGHIIEKEVNDHSFEKEVGDHICLQAQEDHNEKELDSHSTEKELGDHNKTEEFDGNMKVLFNLNSTKELDSTSTEKELGDHNKIEEFDVNMEMFFNLNNTKELDSTGESICAGGEAHCLHELNNHEILKECHSLDNNLGELDNQDCQKECHNQNSLKELENHRSSQELDSHKSPEELDNIISPKELDCTENNEHSAAVTQSDGFLDDPFNIRISDKGLIIASENGKIKESIPLQTKNKPEENPVPADHDIDLQVVVTL

SEQ ID NO: 17635 - protein, 973 aa, Oryza sativa
  Clone ID: TF_OSC415418j.C1.p2.fg
MIFKRNQRSEILSLRRCNAGGGAGVGEDDGDGGERRPKRRRGDEFFPVELLGDVPVAGIPYAAFGFRWCEEAEVASPAAASRAAAAAAAASRPPVVRTSRGRAQVLPSRFNDSVLIDPWKKDKPAKPPVPAKAVQLVPKSEVLYRKGAIADRSLTMSELDENGDDDYEEGHNFVASRKYSMSLSTVTSVHGEPYSYYHRKGLMKRQYDDDDDDDDDDDDDDDDEDEEAEEEEEEEEEEEEELSYWRNDFVYGDIVWARLGKRQPVWPGVVVDPAQPAAAQALPPQPRSGAVLCVMLFGWAAEFGDEKKFIWVRQGGIFPFVDYMDRFQGQTELSSCKPGDFQRALEEAFLADQGFFEVPMDGNTTGQPARYKRALQCESCGNCFPNKDPSMMVYVMEQLACRQCAKILRSKEYCGVCLKSWQHKCGGRWKSSKPDKVAVICFGMEGTYLRDLELISCHCGPCKGQKFLFNEWERHAGCRSKNWKSSIKIKDTLMPFGKWIEQHQSSSYSTNPAKRSSQKMKKQKLLDLLSEPYDTVNVKWTTERCAVCRWVEDWDYNKIVICNRCQIAVHQECYGVRGKQDFTSWVCRACETPDQKRECCLCPVKGGALKPTNVDNLWVHVTCAWFQPQVAFASDELMEPAIGILNITPLLFMKMCVICRQIHGSCTQCYRCSTYYHAICASRAGYRMEIRCLEKNGKQTTNKISYCAHHRAPNPDNVLIIQTPAGTISSKKLVQSNGTVAASRLIRKDLPKDSVSEVEISENLSAARCRFYVKKELKRSREGAIAHRVRGSCQHRWDEIDSLNPPREERDPESFSTFKERLHYLQKTEHTRVCFGRSGIHRWGLFARRGIQEGEMVLEYRGEQVRRSVADLREEQYRVQGKDCYLFKISEEVVVDATDKGNVARLINHSCTPNCYARIMSVGHDESRIVLIAKKNVSAGEELTYDYLFDPDEADDRKVPCLCQTANCRKFMN

SEQ ID NO: 17636 - protein, 1478 aa, Oryza sativa
  Clone ID: TF_OSC401520j.C1.p5.fg
MARAEGLPEGAAPGVGVDLYAQARKALSVRTPFEGEGTAPRVPTLPARLVNWSGQSDARKKHKKIQPQDVADVELPPQPATEPSAKTGVWEQFEAYFRPVNLDDIDMLMPKFPFGYGGLDSCILIPFVGSGKELMDTAETFDVAVAETSSYLGLGGEERVSNKEHSERSERSEQSVEQGIHEVIVRQFVGNKERGEQSVEQGIHEVVVQQENWPLEVEQATSSAGIVSSKCEEEGESSLNWLLGSKERFVLTSERPNKKRKLLGVDAGLEQLVLLPRSGAEASSVCDVCCLGESSTVSNSMLNCNRCKVTVHQKCYGLHVVPDGQWLCTWCKDLESLQSLKKDADNTLSMPCVLCPKEKGALKPVKGEPGQTAHGGNLKFVHLFCSLWTPGALVEDMESMEPVTNVGSVQENQWKLVCSICKVKHGVCVRCSHGTCRTPFHPICARESKHQMEIWGKFGYPNVELRAFCSKHSTIGYANSLERSNCASHQSPTEARLKDANLITGKVPKLRFTRKNKDKFMNYEATSFNSSNLIKVETIEQASLPHTVRSSDSLAIQGMEVDTDNLSVGGNLMRNSADVALVLRKLIDQGKVSVGDVASEVGISSESLEAALVGETTTFSHGLKLKIIKWLQNSAHIPAAQAKILKGGPMVVHNSKPGRSEDTNSVNMKNSLVPNDEKGTTAYLSDSAVMKSSSTRSKDNNKIMRDNTAVCATGVTTLLQNGIKKMAEAGAERECSSPAEDCAKGTPKEEHGGLISNNISGNTQFGTSMAIPNENKGTSPGKKRYNLTEAEPGSELEGVSSLNQYFPPGDNVKHELNLVENGVGNNHDCNADHVPGQPFSNFNDSHYYIHPLIKEKMTQLWDNTFKQDKLAPCHPEDPLCYPDERRRVGSSIKLTETTDVMDQVSRAKSLGILEHSPDDEVEGEMLYLQARLLDTAAFLKHRYEDLIAKVVQNLSRELDAFSRRKWDFIFVNQFLRDVREAKKRGRKEKRHKEAQAILAAAAAAVVASSRNSTVRKDANDDVVPAKQENSPKFGTGPPNVGQRTSSLLRLKDLSKPPNNKISQDNNRSTFHMPNYSKENALYCDVCMRSETVLNRIFVCSRCKAAVHIGCYRNIENISGPWKCELCEDISPEDTCVGDQSDCNGTNLSLVQCDLCHGTSGAFRKTADGQWIHAFCAEWLLETEYVRGQDSPVKGMESLVKDKDTCCVCLHTVGACLKCNNGDCQTTFHPYCARHAGFYMNTKGSGGILQHKAYCSKHSIEQKEADMQQYGLEEFNNMKRMRVELEKLRLLCERIIKREKVKRERVLCDHDILAKTKDTLVFSYLTHGASSESATTSVNNKSYSGTMQRSDDVTVDSTISGKKAIRFSLNNRDAEINTADSSRTLISFKRKFSERGSLAGKQLPRRPVTSQKLEAGEKKTKDKKNRETFQKELFMTSDQASTQNQRLPKGYAYVPRDSLSKDKLRNRNTQAHEPQEPGG

SEQ ID NO: 17637 - protein, 1671 aa, Oryza sativa
  Clone ID: TF_OSC401369j.C1.p50.fg
MLASRIPLKRCTAAAVVPLPGELEMEEGPTPPAGGGEGSGAAVVPAKRRRERVVPSRFRDSVVSLPLPPAKKGRPAKKAAAREGGDGEVYDVEVRAVEQQGATAAAFGAVETAVWPGDERPAQTEEELYRACRNIRRSSSSSGFSGSVVTSLSNAGGSVAPEGKPVVVVECKPKREGGDKKEDFYWPEDFVLGDVVWARSGKKCPAWPAVVIDPLLHAPAVVLNSCIPGALCVMFFGFSSGGHGRDYGWIKQGMIFPFVDYLDRFQGQALYKLKANRFRQAIEEAFLAERGFCELEMDEGCSLEKSVNDQSVPDGLQEGSGSNNDQECQSEAQVVGKSTGCCDSCGNRVPPKIAKKKKQAGEQLLCRHCDKLLQSKQYCGICKKIWHHTDGGNWVCCDECQIWVHVECDLTCINMEDLENADYFCPDCKSKRKTVPPVEQMNTPNSSECASTSKEKLPEMIPVFCFGMDGMYLPKKHMILCQCNSCKERLMSLSEWERHTGSRKKNWKMSVKLKSNGDPLVTLLDDIPCANVKSSTPSINKEELLKLLGTLALEFMLVSAVANSFRPVNARWTTERCAVCRWVEDWDYNKIIICNRCQIAVHQECYGARDVQDFTNWVCRACELPKQKRECCLCPVKGGALKPTDIDQLWVHVTCAWFQPKVSFPVDETMEPAMGILSIPSEYFKKACVICKQMHGACTQCYKCSTYYHAMCASRAGYRMELQYSEKNGRNITRMVSYCAFHSTPDPDNVLIVKTPEGVFSTKFLPQNNEKQSGTRLVRKENLQEKVLPAKISDCPAARCLPYEMLKNKKEPGEAIAHRIMGPRHHSQESIEGLNACMKIENKRVSCGRSGIHGWGLFAAKKIQEGQMVIEYRGDQVRRSVADLREARYHREKKDCYLFKISEDVVVDATEKGNIARLINHSCMPNCYARIMSVGDEKSQIILIAKRDVSAGEELTYDYLFDPDESEDCRFFSAVQFQFQIGREWRCCSHPRVETDLKTLARRFWKVAAPYWWSEDKVQARLRLAAVFALTLATTGISVGFNFLGRDFYNALADKDQEQFTKQLLYYLGGFAVGIPIVYTRIISHITRFSFFVLRDYARETLSLRWRSWMTSYYMKRYFKNRTFYKIQSQSLIDNPDQRINDDLSAFTGTALAFSLTFLNAAVDLISFSNILYGIYPPLFIVLIVYSLGGTGISIFLGKNLVNLNFMQEKKEADFRYGLVRVRENAESIAFYGGEENELQLLLDRFRRAFENLSELLIASRNLEFFTNGYRYLIQILPAAVVAPMYFSGKIEFGVINQSVSAFNHILSDFSLIVFQFQSISAFSAVIDRLGEFDDLLDGNGSSLSKPDNIDGINIIFKSTGPTVLSSNGSPTQSNPSMVLEICNLTLLTPRSGNILITDLTMELKEKDHLLVMGPSGSGKTSLLRALAGLWTSGTGDIIYHVRGSMELQTSNSGPDEPSNIQSNGEELLQSSKQRRDNGIFFVPQRPYMVLGTLRQQLLYPTWTEDVCHSSNNDPQSTDPLTFEVSTSDGVGSKSEMPTTDELIRVLEAVKLGYILPRFNGLDSMHDWASVLSLGEQQRLAFARLLLAKPTLVLLDESTSALDDMNERHLYSQIEAAGITYISIGHRKTLHKFHNKVLYISNSDSTDSNPRNWYLKPTEQMSIEESSSFAS

SEQ ID NO: 17638 - protein, 710 aa, Oryza sativa
  Clone ID: TF_OSC403241j.C1.p2.fg
MVVNSRPLKRARTRVEARDFAGFPPAGDGGAAGTFREAVRGFLARYARLLPLPSIFSPAAAAAPPHLLTWRVSLRVGEEGDEEGGGGAVELNVVEEDVLRSRSVYCDQCRVVGWSGHPVCGKRYHFIIENDNNQVCGKRHSCCLRCGTPTVAGESRCLLCNFDMDGEELEECGYMHLDDNTHLLHAVVHANGYGHLLRVNGREGGSRCLTGRDIMSFWDRLCKVLHVRKVTVMDISKKHGMEYRLLHAITSGHPWYGEWGYKFGAGSFALTSDTYQEAVDTLSGIQLALYFSHRQPIRTPLQNTIALYWALSDRQLVTVRDLFRFIMHLLHQARKKNETSKPTTDEHKEVASNVLCKWTKEDIDRAETAMLKVLRVVQPGQWVSWRALRGAASKAVDSQELLDYSLRGLGGKLMDDGHFIAVRCNAETSAIEYRLEDNSNQSVDAAAFGPSVDHLLHDLKFLYNALLNPETMLASQPEVIGASSHSAAAKILDCKQFIKHYDQHTPRAPLNPFLLSVRCSIELLDHPKDYTAPPVELVLLPASATLAELKIQATRAFQETYLMFQSYQVEQLPDFPNFSDTTLVKHVLGSSQLVRVRGRCTGDNRRIVQFRMERGLENWTVDCTCGAKDDDGERMLACDVCGVWQHTRCSGISDFDDVPEKFICRKCASPRRETGRVGAGAMWGSRMNASMSWLYTMKGSHIVESGVLQF

SEQ ID NO: 17639 - protein, 716 aa, Oryza sativa
  Clone ID: TF_OSC403247j.C1.p23.fg
MVVNSRPLKRARTRVEARDFAGFPPAGDGGAAGTFREAVRGFLARYARLLPLPSIFSPAAAAAPPHLLTWRVSLRVGEEGDEEGGGGAVELNVVEEDVLRSRSVYCDQCRVVGWSGHPVCGKRYHFIIENDNNQVCGKRHSCCLRCGTPTVAGESRCLLCNFDMDGEELEECGYMHLDDNTHLLHAVVHANGYGHLLRVNGREGGSRCLTGRDIMSFWDRLCKVLHVRKVTVMDISKKHGMEYRLLHAITSGHPWYGEWGYKFGAGSFALTSDTYQEAVDTLSGIQLALYFSHRQPIRTPLQNTIALYWALSDRQLVTVRDLFRFIMHLLHQARKKNETSKPTTDEHKEVASNVLCKWTKEDIDRAETAMLKVLRVVQPGQWVSWRALRGAASKAVDSQELLDYSLRGLGGKLMDDGHFIAVRCNAETSAIEYRLEDNSNQSVDAAAFGPSVDHLLHDLKFLYNALLNPETMLASQPEVIGASSHSAAAKILDCKQFIKHYDQHTPRAPLNPFLLSVRCSIELLDHPKDYTAPPVELVLLPASATLAELKIQATRAFQETYLMFQSYQVEQLPDFPNFSDTTLVKHVLGSSQLVRVRGRCTGDNRRIVQFRMERGLENWTVDCTCGAKDDDGERMLACDVCGVWQHTRCSGISDFDDVPEKFICRKCASPRRGKGRGGGGGNGGSRMDVSAAGRCKDEIGSSVGGAGKFGRMATVG

SEQ ID NO: 17640 - protein, 1027 aa, Oryza sativa
  Clone ID: TF_OSC900067j.C1.p9.fg
MRKGICTGHITYTGRTRGPITEGKEASSAICRGSAKRENGTTWTMEMDGGDEATSSGTRENLGIPERAARYGASFPCVEEHGETKVGQAGVQAPSREECSPGFKWQWITHYRHSWGSRRVCDCELGFGAAGRGRGGGLAEAAAALEGFLADPWLLRPAAAGEGVGVEEEGGVATVQVEVPPVEAAEEGEEEAGRAAVLRQAAAAEDYARRLEGAAAAGTGLRFMPNGFSVLLTLCFFIWGVDTHDYDVVKLEEGDEEDWGQEDVGNAAVKVMCRICFSGENEGSTKAAKMLPCKLCNKKYHRSCLKNWGEHRDLFHWSSWVCPSCRSCEVCRRPGDPNKLMFCKRCDGAYHCYCQQPSHKNVTHGPYLCPKHTRCHSCGSGVPGSGHSTRWFLGYTCCDACGRLFVKGNYCPVCLKVYRDSEVIPMVCCDVCEKWVHIECDGISEEKYQQFQSDQNLQYTCGACRGECSQIRDTEDAVRELWKRRDVVDHDLMASLRAAAALPSLEDVSPSHPNSDDEKLGAYVMKNDGRNTLKFSFKSNSTKPALDSSEQEKNAIKSSGSNKKHSKKKGNQNNKTVSEQDEIFLEKRNETKSLGSLGDQIADVTRDKSSFKNDADAFVLSSAQSAEKALKLQSAKAAAHNADMIPKVKIKGTKVPSLHFKDVGEENAAKSDTGKGTKLVIHIGSRHKSRSGSPKSEMSNSQKEQELVSMHGGKVDVTSQFKSSRSEIKEKSVMKLVRETGVQQNSLLGDLGASKKHATGKRSNAIVSAMENASESGTRSRSFGQKQSVNHLTENQGNASFSVNNSPDSLKPSLLKLKFKRPIFEQPSTQSSQPEEPGTWASPQEELNVAKGQRSKRKRPSLDKMDGSESKAPAAKRHEQSTGEEAMDANWILRKLGKDAIGKRIEVQLASDGKWHQGVVSNVINGTLCLQLDNGRSENIELGKRAIRLIAQSQLPATRVVSRPLQAPAFGSSQSLIHGRLGGLKRIGFILTSGSVGTNNWEGFLGATLDVEEMPDDGHVHVAVAAE

SEQ ID NO: 17641 - protein, 267 aa, Oryza sativa
  Clone ID: TF_OSC416032j.C1.p4.gm
MDEGGGAGAAAAAAGNAAGAAVHHNARSAEDVFRDFRARRAGIVKALTTDVEKFYRQCDPEKENLCLYGLPNETWDVTLPAEEVPPELPEPALGINFARDGMIEKDWLSLVAVHSDAWLLSVAFYFGARFGFDKEARRRLFTMINGLPTVYEVVTGIAKKQTKVSNGSSKSNKSNPKPSKQSNSNSKPAKPPQPKDEEDSGPEGTEDEDQAYMCGACGETYANGEFWICCDVCEKWFHGKCVRITPAKAEHIKQYKCPGCSSKRSRE

SEQ ID NO: 17642 - protein, 1442 aa, Oryza sativa
  Clone ID: TF_OSC400485j.C1.p3.fg
MPPVASGSGRKRQLVLESSDSEADEFFVSTRRKEDDDDDAGNAGGGSGGGGDQGGEKVVTVSPEKVSGAKSTDEGGGSDKSKGSEVGKSVLQPDVKRIRTEAAHGGGSGSGGSVSKDGTGGKMLRPGFPKWRFEKPEVRAGRVLDEKGGVETKVSSSQKVKDHASSSVYERRRPEPLKPEKSTPSKTNQEVIRVQGKSGVLKIRPKNNKVASETGDGKNLPKNAKVDGDTGDGKVLPKKTTVEENGDGKILTKSGVLKLLPKNNKVAKETSDGNPRSKNTKVVGETSDAKILMKNKANRESGDDKAPKNCTVNLETSAGKILSRNTKEDLKTSDVCRQDKEKSDAIDVSQKQGADGEKRITEKLVSPILLRKSDPSVVGISLGQKMKQQNSKAQLKISSLGQRQPSLNLKDEKNKKKRLLDHKMSPENLSKKAKPNAIDQDTSRPSLEKHGIKKERKGPRYTMKQKLRGQIKDILLNNGWKIDLRRRKNKDYEDSVYVSPQGNGYWSITKAYAVFQEQSKSGKHTGKSSKHKAGVADAACNAISENDLAMLQRNVVKRRTKKELGASKKKYEDSSSRNSKDNNAGRSSGNKHQSSGVRGCALLVRGSTHSMEGNVDGYFPYRWKRTVLSWMIDMGVVSEDAKVKYMNKKGTRARLEGRITRDGIHCGCCSKILTVAKFELHAGSKEQQPYENIFLEDGGATLSQCLVDAWKKQSQSEKKGFYKVDPGDDPDDDTCGICGDGGDLLCCDNCPSTFHLACLGIKMPSGDWHCSSCICRFCGSTQEITTSSAELLSCLQCSRKYHQVCAPGTMKDSVKAESNSSTDCFCSPGCRKIYKHLRKLLGVKNAIEAGFSWSLVRCFPDKLAAPPKGKAHLIHCNSKTAVAFSVMDECFLPRIDERSGINIIHNVIYNCGSDFNRLNFSKFYTFILERGDEVISAAAVRIHGTDLAEMPFIGTRGIYRRQGMCHRLLNAIESALSSLNVRRLVIPAIPELQNTWTTVFGFKPVEPSKRQKIKSLNILIIHGTGLLEKRLLATGTINQENTTVNDMMDAQTHVEATGSRTPVHFSCELPVGGDPDIKHHDDSHPLVGNSKGLTLNLPCVPEEKTAELTSPVLDVVQCMPESENTQEMKNGETDATLTSEDIIAEQKYEDKSNSSLTDSSAIPMTVDPGSCSSNETVKGEHHTSSEPSVEAILVRDKPEPSISCNVTNQEDKNSSMVPVDTTVHLATIVGNHDIQNSVEVKGMEHNTAKDQTFVSAVANNVATTEDPSDSVADCEVPIVRSIQQKDEVIADKNACATIDQTAVDDVANNFVATTENDTDSTAELGVSMERCIQQKVEVIKDKSDSPLRTSISKVMLEKSDQMKSTESDSVKMKDMAIEVKVTVENFSEAGKPASALVMSNDINGEVMAKPNLTCGDDQLHGGDGTYKNSMEDDLASREPVNA

SEQ ID NO: 17643 - protein, 388 aa, Oryza sativa
  Clone ID: TF_OSC401369j.C1.p51.fg
MGEPPPAGEGSGMMMPAKRRRERVLPSRFKDSVLVLPTAAAKKGKPAEAAAEGGVVDGELYDVELEEGDPGMLWTGDERPVQTEEELYWACRNIRRSSTSTSGSFSSSIFSGSSAVTSLSNAGGGGGNGRPEGKPTVVVECKPKSDGGERKEDFYWPEEFVLGDVVWARSGKKCPAWPALVIDPLLHAPRVVLNSCIPGALCVMFFGYSNSGLRDYGWVKQGLIFPFVEYLDRFKGQTLYKIKASRFREAIEEAFLAERGLFELETDEGCSLEKSVNDQSIPDGLLEGSGSNNEQECQSEAQVVGKSPGCDICGNRLPCKIASKKKQAGERLLCRHCDKLLQSKQYCGICKKIWHHTDGGNWVCCDECQIWVHVECDQTCIKMETCSM

SEQ ID NO: 17644 - protein, 1988 aa, Oryza sativa
  Clone ID: TF_OSC900258j.C1.p11.fg
MPTPSQTIVFGSITGLVKEKEDSYLEFSWWFREDFGGVNGLLLCSSGALHLGTNAADGAHLTEFAVQLPHFEGLHLKNTALYDGNQFMPAFGLAHCLSMRQQFTSMDRDIMADGNIVQRSIHLRRKRRDLPQTSSLPKFAENHELGSANIFMDPSFYTKATESSSTENKSSSKPPKFLGENSSRRPHHRTVGLPVQYSDFFITSLGEIDKRPSYHNSYQIWPVGFTSYWHDRITGSLFECEVCDGGNFGPLFKVRRISCSVFPLPDASTILSQNSTRKAETIETNENNTLLEDTANDTDDNILMLLSDSSETNQDLLSCFSNDMESKMTSLGCNDLHSSNRSVPTVPSHSGTDKIGEFTFEGTSPSSVWRMISCAMMEACEKMYKEHGHLVFFCTHGTEKHSFDSGSGFQDFNGPYTPLTRFCSSYGPSIPRIVEKENDVEPTYSLLKEWLYQDRIGFDLEFVQEIVESLPRSRACSNYQFLCNRAEFVSSLTVASGSLRVVHKNGQSNGDVMSYGRHGSVVTGLQDHTQPSGFRIRELPLGRPISNKLPPELAGEVLQIWEFLGRFSEIIGLKEIPSYEQLEDELIDPWPICADQKEKLSNDIHRDHTSPINSPANVSTSYSNGESGLTSNEEIVSLFIPVETSSMKKAAQDKSAAQTLGRCSGVVLPGVHLTLFRVLFGELLSKVAIFVDPNIDPKESKTRRGRKKDTENLISAKEFKFDMLTANKLTWPELARRYILAISSISGCMDLSDISSREGVKLFRCLQGDGGILCGALPGVAGMEKDALLLVEAENLICKSSVNEESKVFMMDQKDTDMVDSPEVSATDNKTLPDWAKSLEPVRKLPTNVGTRIRKCVYESLERKPPEWARKILEHSISKEVYKGNASGPTKKAVLSVLTEACRVKVPHNPEKPRKERNAISISEAILKKCRIALRSAISSDESKLFGNLLGTTLVNSNENEDEGILGFPGMVSRPLDFRTIDIRLAMGAYYGSWEAFLEDVQEVIRNLHTAFGDRPDVLEMVVALSQSFESLYKTEVLDLVEKFDKYLSDKNAGSEMHEELHDILTAANSLPKAPWEDGVCKVCGIDRDDDSVLLCDKCDSEYHTYCLNPPLARIPEGNWYCPSCMLGQTKAHHDQGVQDVKRQQKKFVGEEAHAFQEELNKLATAMEEKEYWDLNMQERIYLLKFLCDEMLNTALIREHLDQCSDKLGDLQQKFRASNFELKDLKYKEEMRTSYARQSRSSKTEQHFNNSSGPVENQQQCTPTALDHLEEAEQGNVGVNLNNPADGVPDGQLNVGKPYKSDKDISSASMVEERKSSGLSEQPSGMAIDQIDGDAIDEGSQSCEKRSLGAKSSTCDNLNLKDTEFSTPGRELPDERASTSFQDNLEASSTKSIELDADNNEMDTLSDDISKLQDSISLLESQINMASSRRECLGKDSIGRLYWVIGRPGKRPWLVADGSMLKPKERDISMVNSYPPSAFDCKGWNSASIFIYESDEEIQCLLDWLRDYDPREKELKDSILQWQRHFCHQSSSPLVDPPISGPKGEQLMELPNTKAAVILEQKYGLQLDQDTSDLPKKRGKKIKLSSEDRTYRCDCLEPVWPSRYHCLTCHETYLISTEFEGHNDGKCSKIHQSPDESRENDEPKVKVTKSDTKEKDSLECSSVIEPSSDRKLMQCPYDFEEICRKFVTNDSNKETVKQIGLNGSNGVPSFVPSPAFFLEPAIVQSQNRKDDELKDWTSSLEECNAMSAQKLVQEVSKSGQSCPGNVGDEKVQKSKKPTPDNTSGEEAHSTTGKPTRLLAVNGGLVPESSLRPLIGRNSHILKQQKINLLDIEAALPEEALRASKCQQIRRRSWRAFVKDAESISQMVLAANLLEGMIKAEFLKNDWWYWSSFTAAMKTSTVSSLALRVYTLDDCIIYSKDQVPSVEPADNTRFQKEELVLHVRAFDLDATMGGALGRCIDHLFDVSGKFATSDRNVDSSCDRYNFDCN

SEQ ID NO: 17645 - protein, 187 aa, Oryza sativa
  Clone ID: TF_OSC400909j.C1.p25.gm
MNWISSIFTPPEAPDPINLISHRCCSPGSIAFIKGWPTSSAIDASFATGCGWPQLVVTNSEIVRDKASIEDEAMDNGARALIELSQGTPGSFCKVPKIILCDGCDEGYHLYCLIPPLTLVPEGEWHCSSCIVQEEKETKRRLHGKDIATNVSMLETDGFAELEAANVLMLLKNSSTDGEIVVSPVSQ

SEQ ID NO: 17646 - protein, 385 aa, Oryza sativa
  Clone ID: TF_OSC401197j.C1.p44.fg
MGRRALPPSSSSSSSSSTTTTSPELRRKRTAAPPPPPSPRRYRSISDVMRRSLPVDAAPPVARAYESTRCDVCGSGERDEELLLCDGCDRGRHTFCLRPIAARVPTGPWFCPPCAPRSKPVKRFPMTQTKIVDFFRIQKGAEDAEAEKYGLFQDVKKRRKRSLVMHKKRRRILPYVPTEDKVQRLKQMASLATAMTSSKMKFSNELTYMPGMAGRSCNQATLEEGGMQILPKEDKETIELCRTMQKRGECPPLLVVFDSREGFTVQADADIKDMTFIAEYTGDVDFLENRANDDGDSIMTLLLTEDPSKRLVICPDKRGNISRFINGINNHTLDGKKKKNIKCVRYDIDGESHVLLVACRDIACGEKLYYDYNGYEHEYPTHHFV

SEQ ID NO: 17647 - protein, 1146 aa, Oryza sativa
  Clone ID: TF_OSC401058j.C1.p97.fg
MDGVDKDKGNGKVHFRDSSPQEAFRTYKRRRQPRPEPQQQPQPQPQSEPEPQQQPQPQPQPQPQPEAEAEAEAEAKAADVLARQVTETFWKSRDIGWKHGIMIDENRQHWKCMYCHLTRYGGGVSRLKRHLAGDLDVKMCPKVPADVSEKIREHLRKKRERRKKRAAQNRDNCVTAKSTSDDIKSGKDPLPVDSEVLTGVDTVLEEVTNQTNHDNQDLTYPKATMLLRGIRDIGWEHAVDLDGNKRRWKCKWCSLCRSGGVTTLKAHLTDSSCPNIPKEISKKVLNFIEEKRAARHLFNSAAKSPFNVKFDEDAVNLSEIQVEGTPPLTDDRQPLGNSLHIQTSECTINEFEKVAAGSNQQGAEHSNQLLNHGEQLMKSSDQPEEHCTLEHGRCQVLDNNKQQTMDNKTDNPEHKEVLKHPKKTRFNIRKHIVIVDESARHWRCRYCGLDGYGKTSRLHFHLAAVFRHPKCPSVPKEVFAKARHHIHLKRRLNVKKAGQQARSRPHILGQSSQQQQNNNPVLSNYPTRLRDNAWEHSLIHDKEKGHWKCKWCSLEGYHGITRLKWHLVGWQNRPQCLNVPEDVAKTIRDKMISREKQKEGRLNLDVIDSCNMPCSSESLQFDQENFAEVMQGKGSSEDFNQAERQSNTLNTVCNTTHPPQNSNNYQGLQENGLYSSKNKSEKQTERYDCWSHWRYVLDGLMHLPGALEGPGIQSCIRDVLLYGSAEFGTVGDKVEMDSNRKVSSDGNIAKCQSVLVDVLKSENFALLCNVLGRTVHQDEQRTKYFDFTMIDSRMKNGDYGRAPLLFKHDLKMVERERGSDDSEENLKGAAATNLEPMNMVKSNALVLSTSQGFNQLDQPDPMDVCDEQNGTNCNECGKVAKIDSILTCKRCMLAFHVSCIEPPVPSTSTGSWCCKTCSTICNESAEVGMALVHYEPNRLHGHCVACKDLEFCRPPRCEETASERAPADNSRAIVIPSAEPVEDVELSDIDVRGLCKMCGNPEEKDKRFLVCGHTHCLYKYYHISCLKATQIASDKQLDKPCWYCPSCLCRVCHSDRDDDLTILCDGCDEAYHLYCITPRRTSIPKGKWYCSSCAIERAKEGMARHEKRMLKLHRKDDPGLQGMRYEMVDMILAAAEMLSDDEQQGT

SEQ ID NO: 17648 - protein, 78 aa, Oryza sativa
  Clone ID: TF_OSC400756j.C1.p2.gp
EGQVKRSRVVAEEYEDDDEEHNETFCGTCGGLYNANEFWIGCDICERWFHGKCVRITPAKAEHIKHYKCPDCSSSSSK

SEQ ID NO: 17649 - protein, 296 aa, Oryza sativa
  Clone ID: TF_OSC400756j.C1.p3.fg
MAPAAQVASNPRTVEDIFKDYSARRGALVRALTSDVDEFFGLCDPDKENLCLYGLANGSWEVALPAEEVPPELPEPALGINFARDGMNRRDWLSLVAVHSDSWLVSVAFFFAARLNGNERWRMCLHVHMYPVLFFLFPFFALSELESCVLDVLAVVYWPFYFKKSAYAMSWKRLFNMINDLPTVYEALVDRKHVRDRSGVDSSGKSKHSTKRTGEGQVKRSRVVAEEYEDDDEEHNETFCGTCGGLYNANEFWIGCDICERWFHGKCVRITPAKAEHIKHYKCPDCSSSSSKKTRL

SEQ ID NO: 17650 - protein, 476 aa, Oryza sativa
  Clone ID: TF_OSC900059j.C1.p1.fg
TSKIGRNPTSSARRSKNESPGSKYCNSSARGSKNAFPGVKTTSTGRITRKDKGLHKLAFMSGVLPEGTDVGYYVGGKVSPSQFEAHAGRAARRKPYHNIYMSNGVSLHELSVSLSKGRNMSNRQSDDLCSICSDGGELLLCDSCPRAFHRECVGFTTIPRGTWCCRYCENRQQRESSLAYNHNAIAAGRIDGIDPMEQIFTRSIRIATTPVTGFGGCALCSMSGFMDKQSVLSRSRPDYDDELAVLDQLHDFSKKKFSARTVLLCDQALPEGAWYCTADCVRISETLKDLLSRGAEPISSVDVEIIKRKYEQKALNKDGDLDVRWRVLKDKSSADSKLVLSKAVAIFHESFDPIIQIATGRDLIPAMVYGNTVVSAGLFRVMGSEIAELPLVATSRDSQGLGYFQALFGCIERLLASLKVKHFVLPAADEAESIWTQRFGFVKITQDELREYLKGGRTTVFQGTSTLHKLVPKLDG

SEQ ID NO: 17651 - protein, 1740 aa, Oryza sativa
  Clone ID: TF_OSC400295j.C1.p8.fg
MDGGTGPGAELLSPGEAEWPPELRLPPPPPPHPPPPPPLEPAPPSTPQLRGEASPPPPPPPPVGPPGAAVVAAAARKEASASAEGFDDSHFLGSIMGAPAHQHQHQHQQPPAVGPPVVVKRKRGRPPKNRDGAAPPPPPKPVKKREDDEDVVCFICFDGGNLVVCDKKGCTKVYHPACIKRDESFFRSRAKWTCGWHLCSTCEKAVQYMCYTCTYSLCKGCIKQKPVKFFGVRGNKGFCDTCYSTILLIESKDDRAKAKVDFDDKNNWEYLFKLYWLDLKGKHSLTLEELVNAKSCWTVRSTSARREKEDSSNDLYDANFDLDASSDGASRKRRRNSFSGKRGRKRQNNGAESLPKRVQNEGMTFIGDTQWASSELLEFIGHMRNGDISYISQFDVQILLLEYVKQKNLRDPRRKSQIICDARLANLFRKPHVGHFEMLKLLEMHFHAKETVNGDGQKGIDSDSAQIDSGGYSDMPSKLCSDKRRKIHKKIERESPANLEDYAAIDMHNINLIYLRRSLLEDLIDDNGTFSDKITGAFVRIRTPCVGQKQDIYRLVKVLGTHKVAERYSVGKKTTDHALEILNLDKKEVITMDTISNQDFTEEECKRLRQSMKCGLITRLKVVLLIKIHYTGDIHEKAKIFQLLRVNDWLENEKQRLSHLRDRASETGRRKQYPFNLIKDLHAYGHHRLIYEAFNSYHHCEIIICMRIHFFMHTLLMEYVECVEKLQLLGTPEERARIINEDPEVHVDPCMSPDYESAEELDVKKAVDSTSRNGSDLLFLGRKGIETNSLQNHRQNCSATSHHTTTSPPTEGMTHGQGEEASFASSEIVSGDMEPEKVWHYKDPSGSVQGPFTLLQLSKWAAYFPRDLRIWLTFESEQNSLLLTEVLSKQQKDFIQPSPKVDNNRSTWEGVGQDRVDSSLTGNNSSSPIGYNVIYSSRLPSPSADYCASAREGPNLPSGTLPFMTSQKTQKDPQMLHGQAQHQGDYSCTIPSSVVSYRPAGSHDEWPPRGNIGEWNNSQDSGGMWSPTTPHMSRSNLEHQPDRCITKKQLQNDSKRNTLAGSAENLNSQMDFGSQKVHIPTPQQPERDLATSVGTSRQFEFKTCHQEGSHWSSTADSITHDGLQLSLASAKPESCSAVNPIRDGDSSSASRVPNQSGAHVYSPPHPATTNLSKSEETMNQCKSCEPEASNKSRKPDASHAPVNQHPKPESDPLLPDTQDFERTHPSPSTEHDTKEPLKDQSRSTSVAPEGSGTMAHGQSSIAFISEASGPLSSKIVGLQPPKDTSFLVEKDIKDGGSITQTEQQKEESTAFKKENVAVDPISDSEAIVSGVLESLTETYNLHEETALENFTPTSAEEEQPQCSTPIALSPWDETSDYQGEAVDSALWGVQDDQNNEMWSLSSPTPTLQPSGIGADTKGASCAIEEVIVAQGNSGVVEPSPALEKKRIEKVPSASIDRGVPEQVKPKSDAALSPEESRKPSGLQLSSTYLQGSTKSSGLPPSGTSLDGGIEPSGLLPSGTSLEWGTKISGVQSSASSLEGSKKAFVRQPSGSSLEGNTKASEKLQHGNHQVLRLLQGAQKHQVGSHHLARARNLSLIPHGVPAKAATRLRTNQQHQQLNTHQKPQGDKETTTQILLAGETLSETRAGIHPQAMRAAEAAILATTMTGTIRAANHGVVAQIIPGDQIIVKNMATVARRDHRRRGGNLKGGSVDTTRMATAGRALPASSSTVENALTFLYSPK

SEQ ID NO: 17652 - protein, 658 aa, Oryza sativa
  unsure (1)..(658): unsure at all Xaa locations
  Clone ID: TF_OSC421069j.C1.p1.np
ICLSQDQTTSHSTATQSMILLLPHLSRDSTASAHFVQLDNSVRILVRQAQKAVAAKRKPQAWEKYAKKRPRVLRINDDDLLITAMVKNRDLGYAKKFTKFKSSKKCAKKFTKFKSSKKCGRLLARMSGKGGSKLGGKRVSLARKTVLCWLIATGFLTVKDVIQYQNLKSNEVVKDGQVTWEGILCNCCTKTFSISDFKVHGGCSLPKSSLGLFLQSGKSYTLCQVEAWSAEFLSRKCDASGRKVEAMDENDDTCGFCGDGGELLCCDNCPSTYHQTCLSDQELPEGSWYCHNCTCRSCGNPLSEKEVSTFSAILKCLQCGDSYHDTCIDQEMLPCGDKQSNIWFCGRYCKEIFIGLHNHVGIENFLDNELSWSILKCNTDGQKLHSSKKIAHMTECNTKLAVALTILEECFVRMVDPRTGVDMIPHVLYNTRSNFARLDYQGFYTVILEKGDEILCVASIRVHGTKAAELPFIATSVDYRRQGMCRRLMDTIEMMLRSFHVETLVLSAIPELVNTWVSGFGFKPIEDNEKKQLRNVNLMLFPGTSLLTKRLDGITAANAGEVRNPEQIKINGRREELGLAAGVARGEGDGEEVLGLGDGAGAAELDDVPTLNWLSGSCAWYFFLMRSRRLYFGXGASRTTSTPTVLSAFVVTTRPVSC

SEQ ID NO: 17653 - protein, 1108 aa, Oryza sativa
  Clone ID: TF_OSC900258j.C1.p16.np
MGSKQIVAVLQVGGEFKTDDDGQMSYSGGEAHAMHVKSDWTFKTFKHEISSTLNNLKLDSYVFKYFLPRNNKTLISISNDKDLKRMVEFHAESETTYIYVMKKADNRVKTSAVVPAASADVKTSAVVPAASADHAVAATTPDGSKRQKICASWENAITGAGQVFEGPKEFRDALHKYAIAHRFHYRFVKNDSSRVTVECTAEGCPWRIHASKSPAKKDFMIKKVFGSHTCESESVKSHRLASQKWVASVIKEKLRDSPNYRPRDIANDLQREYGLSLNYSQAWRGKSIAQKELYSSHEEACNQLPWFCQRIVETNPGSAATVEALEDSKFRFFVAFHASIQGFVHGCRPLLFLDVISVKPNKHWKLLAATSVDGEGDMFPVALSVVDDESQENWHWFLEQLKASLPVSGELTFISNGKCGLLDEVSLIFPDSYHGYHVNYFIEEFKAQLDDSWSEELKDTMVEHVKKAMYSCKVDEFNQCIELIKVESDKLAEWLLETKPEKWSDAFFKGSRLGQYTCNVPETILQWVPSRYELSVVQLVDTIRCNLMEMMYTRREYSNSWTEPLTPSTNQKIQEEMGKALTHSVVCSTGNDGNNNVFEVCDGAVNVVNIDTWDCTCRKWHVSGIPCSHAIAVFERTDHNPLDFCAKYFTTECYRLTYAMSINPIPDIVVAAPSTDPSQGEALHQSPILTRRQVGRPKEKPADPRIAIKRAVRCSRCKGYGHNKATCKVPILIDRYTSTRFTYHENTYTPSRGANGFSRRVHQPKHTSASPPETAARTDTATTTGARATRASTLPHPTPRAVIDSETSDFFAAPIRLPDTWVPHLPQPTRQRHNRKGGRPHQRETSDLLRPASESPTSGSHSTTASSSAPHLAPRLDSPRIPLSSLNPLLALLVLCFACCSPRTAPAAVGGAVVSQVGMLPYEAREVAMGIHRDAVAQAQALRVAAASAIESVTARAPPFGPPAARHPGEAGRGNPPPPCAACGLPENPGGTIVCDSCERGFHLACVRVWPPLMPPPPPPPAPPGARRPRATANEDWICPECEMRGARTNRWKLGPVPLDINVPPPSTPDAEDPVAVATRDVTRQLSQLSFPQLLLLTADLIRWSKKC

SEQ ID NO: 17654 - protein, 370 aa, Oryza sativa
  Clone ID: TF_OSC401605j.C1.p16.fg
MDAQYNPRTVEEVFRDFKGRRAGLVRALTADVEDFFRQCDPEKENLCLYGFPNEHWEVNLPAEEVPPELPEPALGINFARDGMQEKDWLSMVAVHSDAWLLSVAFYFGARFGFDKNDRKRLFGMINDLPTIFEVVSGKSKAKPPSANNHSNSKSKSSNKTKSSEPRAKQPKPQPQPPVKNEGREEEGGPDDEEGGGGGGGGGREEEHGETLCGACGESYGADEFWICCDICEKWFHGKCVKITPAKAEHIKQYKCPSCSGGNGRWRRRQRQRQACAPVLSTKREAIISQYLVRDERSKNTSTHARSPLISDNPYEVISDIRIMLAEQYTTNAREDDFDAKPNDKDNQGEGNVAWGGINKELYSLQVTIQN

SEQ ID NO: 17655 - protein, 1790 aa, Oryza sativa
  Clone ID: TF_OSC1881j.C1.p2.fg
MPPTRPKRRRGGSARSRGRKKQKRLDAIHDVAPVSAPPAGAAVVVGGGGESEDSDAEGPRRSTRVRRAPALLDTSPLPSPRRKRARGGGGGGVAGSSGGSSRRRSRGRARGEAGVAREIGEEEEEEEDDEAGNVVWRSRLRDRVKGKAKLDKRVRSLWFDEDYEVELKEEEEVVVEEEEEDEEEGDEEEEEEQVRTLVVDLREGAEEETMGEGSGSLPMRGREVMDREINLTIDLNVEEHEAVEGVNVVEEEDGEKGGEADEEKGDAIGPGNDLHEGKHEEVGDEEGLHEKERTEELGSAVLEGRNGDELPCNENNAEDGTGSSHEHEHLLVQNEQTVEESNLCVEQQMELDGSSPSEQLKEVQQDVQTGGASNVVLPEEAPKEGVRKFPVSEEKQGTMEIKEGRRCGLCGGGTDGRPPKVALHDTVDSDNEAYEGALPSEDPNYDMWDGFGDDPGWLGRLLGPIHDQFGIARVWVHQNCAVWSPEVYFAGLGCLKNVRAALCRGRLLKCSRCGRPGATIGCRVDRCPKTYHLPCSRAEACIFDHRMFLIACNDHRHYFQPQGDKYVELLRKMKIKKMKADIRKVSHDAWRKDIEAEEKWLENCGEDEEFLKREGKRLNRDLSRIAPVYIGGTSENEKAYCGWESVAGLSNVIQSMKEVVILPLLYPEFFSSLGLTPPRGVLLHGHPGTGKTLVVRALIGACSQGNRRIAYFARKGADCLGKYVGDAERQLRLLFQVAERCQPSIIFFDEIDGLAPSRSRRQDQTHNSVVATLLSLLDGLKSRGSVIVIGATNRPDAIDPALRRPGRFDREIYFPLPTFEDRSAILSLHTKKWPSPISGAFLSVIASQTVGYAGADLQSICTQAAINALKRTCPLKEILLSAEKGFEHGRLPLPSILVEERDWLAALAAAPPPCSQREAGIAANDLVSSPLVSYLVPCLLKPLLHLFISLYLDERIWLPSSLLKAFASIKQVIFSSMEKNNVPHTFWSSYLPSLIQQKGIAKRIASILSGYGLIAYQLGNHDSVLNHNEQHEKFDAHRLNSTGSHPKGGLAHKLSGFRALAAGAPRSGQQHLIRCLLHGFVGHTVIHKLDLATMAQEGNGDILSGLTQILQHTIPRFSVNVDSYFTWDEVIDACCLRISHDLVQQHVQLLHDRAHNNHDEQKEVFVPMEISAPGEHRSSGSKEASMLTKYPLNMDKHPSCGVSSREHPTQLGTCSAQQEPPTSNVEDKEDNTEKIDFNEKVATNRSNRIVKDSESLAIMAFGIQILQHPQFSKLCWVTSKLREGPCTDINGPWKGWPFNSCLLQSTTADKSLSGGNNVLKGKEKIPSVRGLVAVGLLAYRGAYASVLEICSEVRKVLELLVGQVRTKILEKRSRYRYFHILSQVAYLDDIMSSWAYTFQRLHSENRRVKTSPKVTVGKSSTRECQGDSNTAEANILGAPAGCSEAQGTPGQHTDDLEVIPAHCPSEMQENSVQHAPGHLEIHGIVCDLDNDNVTSISSINAVEPDLIHSASLDVHTDSLTPADAVINDGQSCGVDNDGQMSRVINGEENHISNIERPESHTVSVADFNELQRKNAVASSTSTDSAGTSRNMVSSEARGSDNERNTDFPVDDVKLGHLVNPQSQDTMKSLSVLKPPCLYKCCPVCFNAVYKMVHDILSNSVRPSLHCLAVDDMHDLLSSWSVNLLATVRKWYTSQGIVGSEENSGEGHCVCSSDNGCVPRECTCHLESNEDAGTIKDESYYLSGQPLSFFFKDGVLIPPDITAPTTLHCSYMRLCVCSIPGSISMFNRISS

SEQ ID NO: 17656 - protein, 37 aa, Oryza sativa
  unsure (1)..(37): unsure at all Xaa locations
  Clone ID: TF_OSC401827j.C1.p19.gp
CERWFHGKCVRITPAKAEHIKHYKCPDCSSSKKSRQX

SEQ ID NO: 17657 - protein, 1345 aa, Oryza sativa
  Clone ID: TF_OSC403329j.C1.p21.fg
MKDLEKSTSLEVDDSTIDGDVDLGGGLTVVGRKRKDGRGSVDENGASTKRILRSNSMKMHVDAETAGGVALDVCKGDILEKKQCDIIAEGDRGGVLTVDTCNAEEDGEVTGAVVSDAVVEAVRCSANNVESLGLAEVEIAEGNGLDADIQESDGEMDKADDKLSTPSEEQNESGGGTSVGGINDSQENKGVNGLCQGEVIDPLATANGDELSMGLSRSASGRESIEQEDTVMCASDDQKVENHCQFDDKHKEAEISQIELAVDNHIMLTDCTNQKKGIDSPVNETKGDSTPDIVFIRRKSITRKTCEAKQVKSEDEVRFEKRVTRSATVRQREVSASMCVGATNDANLESKERKEDVHHYTRKVGSTVRSKVHHTGVAECDTDTKKKLKGTVTTRRNSDAIANDDPPSITQNKESKTQMKIDIKSQPLTRRGSIVNKTEDAVSGLDQNICSSAITDKNDIELTDSEGVKSENKAAVRKSILSVGAKIVASKKRILESGLDKASGESPVAIPSLKKARDTSSDTELEQPKMSSGKKLTRNNCGSSKKGMSTRRQHQSQTAKLSTSVNCSNKNESKLSQNESDDDGTGSDTSLKNTCVRRTRSGGVVPKKQEDSSESEEPIILRKNHQRGKYSGKRAGSTPRKVKAPKGNRKEVKASSLKSSGPSEQINTGSLREEKQKISDHIKGMLLDAGWTIDLRPRNGRNYLDSVYIPPSGKGSYWSVTKAYAVFLEGMESEKKGRAKDQRPSKKSVGSPGKSHVSEEILSKLKRIVVNKRRTKVELQKLKKRKHGLLKKQKTSKRNSRGSKNKISNSRKLHLGSERKKRGGCALLARGSNKDGGSSTNGFVPYEWKRTVLSWLIDLDIIDINAKLKCVDETHSKVLLEGVTTRDGINCRCCSKVFTVLEFVAHAGGPVSKPYRNVLVDGLDTDLLHCLINAWDKQSDSERQAFFPISTETDDPNDDTCGICGDGGNLICCDGCPSTFHMSCLELEEHSRQDAQDIAEVDSSLCTCSQCEEKYHPGCSPETTNTSNVSSQACDLFCQQSCRLFSIRFLGGNDIYGTVNSALMQSLRYIYSLFSCDIHYRGKLFEGLRNLLAVKKDLEPEFSCRIIQRIHENVPETVVALDERVECNSKIAVALSLMDECFLPIVDQRTGINLIRNVVYNCGSNFVRMDFHGFYIFVLERGDEIIAAASVRIHGTKLAEMPFIGTRNMYRRQGMCRRLLDGIEMILSSLNVEKLIIPAIAELVDTWTSKFGFSSLDVSEKQEVKSTSMLVFPGTGLLQKPLLKKTSPGENSSSQEVDGVFSELESGKTSNVANEDSLCSANAETQGSAAPCYGDNSKDASACND

SEQ ID NO: 17658 - protein, 142 aa, Oryza sativa
  unsure (1)..(142): unsure at all Xaa locations
  Clone ID: TF_OSC401520j.C1.p8.gp
KVTVHQKCYGLHVVPDGQWLCTWCKDLESLQSLKKDADNTLSMPCVLCPKEKGALKPVKGEPGQTAHGGNLKFVHLFCSLWTPGALVEDMESMEPVTNVGSVQENQWKLVCSICKVKHGVCVRCSHGMYFTLCLHFTILVRX

SEQ ID NO: 17659 - protein, 729 aa, Oryza sativa
  Clone ID: TF_OSC900333j.C1.p1.fg
MVIAVEGGFVHEEEEVDHPIRYLPLGRVYSSSAPCPLPKKPRSAEDGKPPVIVYYRRRRKKPRVEGPPPSPATAPPMLHPREDDEDEEVTRRKGSLKYELLSLGQAPPALGGDGEEPARRRCLRRSGGAERRGYFSEPKRRQRQGVHKEAASSAGRRWLELEIEAADPLAFVGLGCKAKVKYDDGESEDLNLADERIKFSISSEEMKCRNLKFGISNLNKRGYDELLALAVSLHDYQGLDPGDLVWAKLTGHAMWPAVVVDESNVPANRALKPGRLDQSILVQFFGTHDFARFLCTQLLPENMLQLQKSMEKGSSDANSNKDVHSCDNLSEDKTAESGGDYDEMTPIELGNLRVSKLGRIVTDSDYFHNKKHIWPEGYTAFRKFRSVKDPHVVILYKMEVLRNSDIKARPLFRVTSEDGTQIDGSTPNTCWKEIYCRLKEKQRNVASGLDRDVCQGSGSYMFGFSNPQIRQLIQELPNARSCLKYFENAGDTFRGYRAVHVNWKDLDYCSVCDMDEEYEDNLFLQCDKCRMMVHARCYGELEPLNGVLWLCNLCRPEAPRVSPRCCLCPVTGHAFNYINPNFGTETCLKDVKRMEPIDGLSRINKDRWKLLCSICGVAYGACIQCSHPTCRVAYHPLCARAADLCVELEDDDKIHLMLLDEDEDPCIRLLSYCKKHRQPSTERPSLESNLAKPAVVVQTDAVPPSGCARTGKRANVYLRLRASFVKFSA

SEQ ID NO: 17660 - protein, 998 aa, Oryza sativa
  Clone ID: TF_OSC900332j.C1.p8.fg
MVIAVEGGFVHEEEEVDHPIRYLPLGRVYSSSAPCPLPKKPRSAEDGKPPVIVYYRRRRKKPRVEGPPPSPATAPPMLHPREDDEDEEVTRRKGSLKYELLSLGQAPPALGGDGEEPARRRCLRRSGGAERRGYFSEPKRRQRQGVHKEAASSAGRRWLELEIEAADPLAFVGLGCKAKVKYDDGESEDLNLADERIKFSISSEEMKCRNLKFGISNLNKRGYDELLALAVSLHDYQGLDPGDLVWAKLTGHAMWPAVVVDESNVPANRALKPGRLDQSILVQFFGTHDFARFLCTQLLPENMLQLQKSMEKGSSDANSNKDVHSCDNLSEDKTAESGGDYDEMTPIELGNLRVSKLGRIVTDSDYFHNKKHIWPEGYTAFRKFRSVKDPHVVILYKMEVLRNSDIKARPLFRVTSEDGTQIDGSTPNTCWKEIYCRLKEKQRNVASGLDRDVCQGSGSYMFGFSNPQIRQLIQELPNARSCLKYFENAGDTFRGYRAVHVNWKDLDYCSVCDMDEEYEDNLFLQCDKCRMMVHARCYGELEPLNGVLWLCNLCRPEAPRVSPRCCLCPVTGHAFNYINPNFGTETCLKDVKRMEPIDGLSRINKDRWKLLCSICGVAYGACIQCSHPTCRVAYHPLCARAADLCVELEDDDKIHLMLLDEDEDPCIRLLSYCKKHRQPSTERPSLESNLAKPAVVVQTDAVPPSGCARTEPYNIHGRRGQKQPQVMATASVKRLYVENMPYIVSGFCQNRVGHDAISEPIQSVGFLDVAHQEAVGNVSSMIEKYKSMKATFRRRLAFGKSRIHGFGVFAKVSHKAGDMMIEYIGELVRPPISDIRERRIYNSLVPEGYMWKTLVKLIGLFMEFNLKALMGVIITTFLGAGTYMFRIDDERVIDATRAGSIAHLINHSCEPNCYSRVISVLGDEHIIIFAKRDINPWEELTYDYRFVSSDQRLPCYCGFPKCRGVVNDVEAEGQSAKIRGSYLELPQGTGLRTVLLRG

SEQ ID NO: 17661 - protein, 799 aa, Oryza sativa
  Clone ID: TF_OSC400342j.C1.p6.fg
MGKGGEGAVPVGESGGRRRRRPGEDGGDDDDEEYVVEEDEEEECDEDLSASSAGEGGEGTDEEYEEGDEDEEEDETPRPRQPVKSRENGRKGKADPPVARSRRRKYEDDDDYSEEEDDRVDEYGEDLEEEEEDLEEEEEEDDEAPRSKRMKKRGGRNVEGKLPLERSNRRRYEEDMDFDPDMDEEEEEEDVDFDPEVEDEEEEDFEDEEDDELEATKVRVKNMGRRKSTLNQRRGKMKSSSKVASRKVGSVKARNAASIRRRQKKRSMLDRYEDDDFIVEDEVMADWQPRKKARIRKQMEVDPPTPVFEAEIWPTIDSDTTDFEFVTSDEEAAIAEPTRVIKKGRKKRVFVSDSSSDSEFVVSDKELGNLKESEPPESLKVLPSSPRKISVTGNGEHKGKEKKEPQEAGRATCGICLSEEQRVTVQGVLDCCSHYFCFACIMQWSKVESRCPLCKRRFTTITKSSKEDTGLELTNSVIRVEERDQVYQPTEEEIRRWLDPYENVVCIECNQGGDDSLMLLCDICDSSAHTYCVGLGREVPEGNWYCGGCRLDGEAHSYHNHVNGNSGMFGAISPIGTFERQGIDLNVSPREIPRGNHSVESQASTAGASTPSGRQTNATNFRRRQMHDWIRSLLSRPRTTLGPVMHHNGVHQSGFVPSTEPDHMNFCAPLESDTLHNTGSVPQSEPSQNFHVMSEANTSETSFGRHAALSERRQIYERFFMLLSRPSPTIRPDLCHNASEHGSSVPRVEPNHMNFHAPPVANSPQTLLDGIPNRSNGFSFTQAHSNFVDGNNFQGTEGV

SEQ ID NO: 17662 - protein, 1103 aa, Oryza sativa
  Clone ID: TF_OSC400766j.C1.p6.fg
MAGGSSPSPAAAPIQVRCAGCRGVLAVGPGMTEFICPKCGMAQRLPPQLMPKPPPSSSSSAAATPAPPAPAAPPPPTSRRGGGGGAALPPPQAQGVDPTKIQLPCANCQAVLNVPHGLARFRCPQCGVELAVDLAKLHNFLASSNNNAAAAPPDNVPPASGPASRAPLVPAPPPAPFPPVPTPGMTQAPQMVPGALIPMVLPITDPPEEINEVAIDVEREEDEGGTVGETFTDYRPPKLSLGLPHPDPIVETSSLSAVQPPEPTYSLNIMDELDETKALSCLQIETLVYACQRHLYHLPTGDRAGFFIGDGAGVGKGRTIAGLIWENWQQGKHKAVWVSIGSDLKYDARRDLDDVGAKCVQVHPLNKLPYSKLDSKAIGIKNGCHKAKNLIPDAGSQPTRTGSLEKGGVGALELVAMDMKARGMYVCRTLSYKGVDFDIVEAPLEERMMNMYRKAAEFWAEFRLELLSAGESFTEGISNQIWRLYWASHQRFFRHMCMSAKVPAVVKLAKEALAENKCVVVGLQSTGEARTEEAITKYGVEMEDFVSGPRELLLKLVEENYPLPPKPDSFQQGEEKVTEIHRKRHSAPDVSFKGRVRKVAKLVEVSDDDSDDYSPSESDHGSTESDEEFHMCQICNTEEEKTLLLHCSGCSRHVHPGCLTPPWTGVLTDDWSCYTCKKLEGEENEQDAHVADFSQRYDAAVEKKKKILDMIRSLDLPNNPLDDIIDQLGGPDNVAEITGRRGMLIRASDGKGVVYQARNAKEVSMEMINMHEKQQFMDGKKLISIISEAGSAGVSLHADRRAKNQRRRVHITLELPWSADRAIQQFGRTHRSNQTSAPQYRLLFTNLGGEKRFASIVAKRLESLGALTQGDRRAGPSLSAFNYDSNYGKKALTIMYRGIMEQSYFQDDQDSFPVVPPGCSDNQSSIQEFIAEAKAALVSVGIIRDAVVCNGKVAGKLSGRIVDSDMHDVARFLNRLLGLAPKIQNRPFTLIACQARQLYFLLSPLTEELLGRQKDGAGSSNDGFYESKREWMGGRHFILAFEGSIEGMYKIIRPAIGEALREMPLTELKSKYRKVSSIEKVNKGWQDEYDASSKQILKRIRIS

SEQ ID NO: 17663 - protein, 744 aa, Oryza sativa
  Clone ID: TF_OSC401951j.C1.p1.fg
MVEHMDWQPVTTLGPNFSPELHSLLLSDHRASLLSLLRRQDDELRTKIKNHLLALGWTIASKPKPPGLAPRLRYVSPAGTKSYYSLRRLIQTIHLHHHPTQSQSQSQSDSCGCGDTPLLLEESDDDQYQEQQEDDAIAGYVAFMEEQNARRDRGQGNDEEQRSMAKELRIKAKDQLRSSGWTFSMKVKYNGREELRYTEPRGRSHISLITACKAYLLHHTPSTTMASCSNNNNKRPAPPAACKTATSSKKNKKKKASLQQARVLRPQPRNEEGNALTTARARTLLSLLIDKKILAPRDQLIYTTKRGLITGDGMVKCMCGGCINNNNKRRVAEYTVAEFAVHGDGDVASSSSRQPWARMFVGDGRSLSQCLVQLMMADDEAGSGRKKKKKKYLPYVWRGARVKRKWEEDDDYVCSVCHDCGELLMCDRCPSMFHHACVGLESTPQGDWFCPACTCAICGSSDLDDPPATTTTQGFSSDRMVISCEQCRREYHVGCMRERDNGLWYPEADGEGPWLCSEACSKIYLRLEELAVVQAPCRSVASGLSLVVLRRGAARDGEEEEHAKLCMALDVLRECFVTLIEPRTQTDLTADIVFNTESELRRLDFRGFYVVGLEKAGELIAVATLRVYGEEVAEVPLVGTRFARRRQGMCRLLMDEIQKLLGEMGVERLVLPAVPEMVATWTGPSFGFREMGQADRQDVAHHAILRFQGTIMCHKQLPPQPQPQPQLGHTTTTPAGRIPSPIPL

SEQ ID NO: 17664 - protein, 1764 aa, Oryza sativa
  Clone ID: TF_OSC401375j.C1.p5.fg
MASFYCVRVQIDSASLRHILRPFAAQGAAPPEQLAASHPSSQYGQPARAAPSTSLLAQVAGNHPHATHVSDRKALFGMLNAGNAANVIDLTRASPLGGAEPLPKHPRHGLEASSSVEQPSCLGPLFQNTSANVQGSFPGECSVNNGISQGAIQFQDSSTCAVQKLPSQSTPRHHPALLGDQICVSCLNVGGEFFVGEAGIFGVRCFCHRLRMSVAKFCEHSGGPAEKAGEIVIMDNGMTIVQWLKYCMGVGASISDTKWDWPEWAYMRYSSEEYWTKSLLTTNNNMEKTGLFSGHGKSTGHINNPVYSSDIHNEVGRFTSVEKLVNKPDETFYRKSVGLHEAFSKNPAIQQSSKINLANHMIHDMNMNSISRPSERTYSTANMGITYSRNHLAHDYANFLEKNLNNLSRSPGPSSTRVLSNDSRACMPDVPHKIIQDGSESLGADAYPKQTTKANKTIENIEPSFGTGNRKRSLDVSNGTSHSELNEITDDAAKNSFISLFLSHLERNSTSESIDDVLNSNEHYLLKAPDVAYSSDRLKTASTQVETRANDNQLKLAPAIIHTKRISDSRSLPVPVASKGYVHQDVLHANSQEPLINGDCLPHLLPSQPNAGISKICAEVSSPVNCRCCNHVADKSHLAHSETGAPCFYDRTENQCIDAVAKLKKILPNLVLELAISADLISVMMALQFQPIGLDEVRTRSTFIPRSSLCSRELMLQSCCHACPIDGYYRSSMGHTANSLTKNTLLDAPNNTECSPYRDGKCCCSLAPKCLAGYGFTKHCVARIDQTDHTVQKSKDDGMQAAARCCTLGESEKLICQCSSEIIARKSDSKASFQNEVSTEVLNRPCVPTLQQLKNVTEASAVGGHWPYETVKEKASACRDSGIFKELKSGFSSGFSSDVVTKFSASPELNKYGLEHKNLVFDEGSRIEKCSSSSYLPISTGCEEAQNSFSRFHLEPSLVKHKNNQISEGSTRKEHENEGQCSEMSKKTRTLRCCANKSESDDCTRKIDLSSREGDSQPQHKAGPFSRRVSKTKRKHPPTHLNKHVKRLHSNCKVLNVDNERSDDEGIYVGESNSSDRKKQEDNMTTLDRTKCQQQGSRLLVRKLPKYVSLNCIVNETNSEDACSGSASIDSSLIATGITNDNRKSPKIVPLNLILKKAKRCHAIKPLSKTENIHFSEEKSSDGSADKSSSGDRSFSPQDELWSPKKNRYSSNVSRPHVKTDCQSPCCVLEEDEPLSLADMGTSQLSASRSRGSKNQRACISLNRMERYIQRPSLDASCCVCGISNLEPSNQLIECSKCFIKVHQACYGVLKVPRGQWFCKPCKINTQDTVCVLCGYGGGAMTRALKAQNILKSLLRGIATAKRSDKYVYSSGNVNSECTSKLHGEYVRHDSFNGHRSRSFNAISSFGIKEASIGSARGDIISKSWTSNRNSSLLGPRTRQWVHVVCGLWTPGTKCPNTITMSAFDISGASPAKRNTECSMCNRTGGSFMGCRDVNCSVLFHPWCAHQRGLLQSEPEGEHNENVGFYGRCLDHAMLDPNHVNPKKECLRSNDWTCARTEVFRGRKGDSFGANRSRKPEEKFGECSVSQEQINAWIRINGSKSCMRGQKEYVHYKQLKGWKHLVVYKSSIHGLGLYTSEFIPRGSMVVQYVGEIVGQCVADKREIEYQSGKRQQYKSACYFFKIGKEHIIDATRKGGIARFINHSCQPNCVAKIISVRNEKKVVFFAERHINPGEEITYDYHFNREDEGQRIPCFCRSRGCRRYLN

SEQ ID NO: 17665 - protein, 607 aa, Oryza sativa
  Clone ID: TF_OSC400426j.C1.p15.fg
MEFAVGSGSVRDLPPSKRFKYVGGSSLGMAPCLPARKRLCPPMLEAAAAAAAAVPVCLPAKKRAYAAAAAVEGGGFALCLPAKKRAYAPPVDDAVAPACLPAKKRIHAPPPPPPDSGASPSVPTTKRVDTLPPAAADKAAISPSIPVPVRKRVHAPQPPPAPAPEKAAVSPSIPVPAKKRVSATAAAAATDASPRVPFKDLVNTLPPPRDAAVSPSIPAKKSARAPPSPKDTAAPVSVCLPSNKRVMPPFLPPSPPPSKESDGARVAAVKEAKPQGSNKRGATTNSSVANGVEDDYARAEASKIQEKPKIPEKPINHEEIKEQVSKKQRSNTCRESKDQECNQSCSAISAKQSEVEALEKACKAIDLNEAAREEDSWDGERVAREPTQEAMAAAAEEEVEEEDDGVHCAVCGSTDGDPSDPIVFCDGCDLMVHASCYGNPLASFIPDGDWFCSVCTAAAAKKSKGNKPPPPPPRCCLCPARGGAMKRTTDARWAHIACALLVPEVFFRDPDGRDGVDCSRVPAHRFATACYVCESGGGCALECSQPRCGLGFHVSCGLDAGLCIEYQEAKAGGGGGGVVAGFCLEHTKLWEKQQLTGKYKIVSRGQK

SEQ ID NO: 17666 - protein, 1774 aa, Oryza sativa
  Clone ID: TF_OSC401733j.C1.p15.fg
MEGAAAAAGGGEMLSPGEADWPPELRLPPPPPPSAASEGEPPPARAAVGMDDSQFLGSIIGLPAQPPQATAEALAVVGVKRRRGRPPKKRDGAAAATAVVPAARPARRREDEEEVVCFICFDGGNLVVCDRRGCPKVYHPACIKRDEAFFQSRSKWNCGWHICSSCEKAVHYMCYTCTYSLCKVCIKQGKFFSVRGTKGFCDTCYSTILLIESKDEGDTKIVVDFDDQNSWEYLFKLYWVDLKGKLSLTLEELTSAKARWNAPTTYTRKEKDESSDDLYDANNDDDAGSDCSSGKRKRNSSRKKGRKRRKPNSDCSIATKKVETVTRDDGTLPNKVPTEEASLPVDTKWASPELLEFVGHMRDGDQSFISQFDVQALLLDYIKQNNLRDPQRKSQIICDSRLHRLFRKTRVAHFEMLKLLEMHFIVSEPSAVNDGSQGIINPDSAQIDHASGYNDMAAKFSPDRRRRMHRKMEREPQANPEDYAAIDMHNINLIYLRRSLMEDLIDDPTLSDKISGAFVRIRISGLGQKQDMYRLVKVVGTHKVSEKYSIGKKMTNFALEIMNLNKKEIITMDTVSNQDFTEEECKRLRQSMKYDLISRLKVGDIQEKAKIFQFVRVNDLLNTPEERARRINEVLDVHVDSHMDPDYESDDEFGNKKAVERSVNWARSDPFVSPVKVKYSNSSQKNGDATRHLKNLSKQNTERKSGAARNFENSHSPVGMDIPKSGTNVKSTRCETTSPSSHGVVSSDMEPEKVWHYKDPSGNVQGPFTLVQLSKWTSYFPRDMRVWLTFESEERSLLLTEVLSKQPKDFGQPASVTTSSKSTVADTGQNRNTEIVDLNKAPSPVGYSMLNSFETTVQSTKHSAPERESVNSLDDRLSHSTDSVPPKDANASNSQAMCQIKHSGSLPSPGSPHQRSDLHHDEVQGGRSGEWNNQHNSELWSPSMPQTSSSAHSNVESHHDHYPSWSQVQHDPKNSLQAGSGKDLNSRYDIAQKLPSQRITRDVPSPVFAWSPSESRTASSQHEGSCLSSTTNLCTHDELHSSIASAKAKSFAPATPVEDRGSSSPSGMLSLSERAPICSPQSAPSASASDTCKMEENMNQQKTLEADISNTSVNQSPQSKILPESSPDNQDAEHEYRSPPPISESKELSPQSRTTPGSSPDNQDTEREYPSPPPISGSKEISPQSRTILESSPDNQDNGHEYPSPPPIPESIELSPHSKALPESSPDNQDIEPECPSPPQIPESKELSRQSKILPESSPGNQDIEPECPSPPQIPESKELSQQSKILPESSPDNHDIKCEYSSPTPIPESKELSLQSKILPESSSDNQDIKCEDPSPTPISKSKEVSPQSKILSESYLDNQDVERECPSSILITESKELAVDLPGSISLAPEKTASTDVGENSSLAFIFPKSTLAGDDALKSVFDMAKAHLECEDSKVKEELYVESTVVIRDDMVVNPASGVESIDMSENLLESLMEQSCGTFYMDGTTALEGFLSGSTKEEPQCSSPIALSTCSSPIALSPWGEHGYYQGDSVGSSLWGVQDDDPIGNIWPLSSQAPALQYSSGSTAHFIDEATVTHGNNGVVLSSTPGEEVGLPNSGVCTDWGLVEQVNPETNDASVSMIDKNSGLVDSQPSANDGSDVGTARNTNHNTNLSLNHETAVPLSRSSGEASRKHGFITDLNVATSEEALGNTKNWNPYAGNANRGSQRNHHRDRYSQISESWLLSSNYSRSRSDGFGTGGSSRSTPRGQTQRGICKFHENGYCRKGASCNYLHP

SEQ ID NO: 17667 - protein, 361 aa, Oryza sativa
  Clone ID: TF_OSC400429j.C1.p18.fg
MGPATPLRRRTRARPAATRAEGGSGGDGDDDDVRCEACGSGESAAELLLCDGCDRGLHIFCLRPILPRVPAGDWFCPSCASPSPHSKKSHAAKKPKQFPLVQTKIVDFFKIQRGPAAALAAAAESSEGKKRKRKVGGIRLVSKKKRKLLPFNPSDDPARRLRQMASLATALTATGAVFSNELTYVPGMAPRAANRAALESGGMQVLPKEDVETLNLCKRMMARGEWPPLLVVYDPVEGFTVEADRFIKDLTIITEYVGDVDYLTRREHDDGDSMMTLLSAATPSRSLVICPDKRSNIARFINGINNHTPDGRKKQNLKCVRFDVGGECRVLLVANRDISKGERLYYDYNGSEHEYPTHHFV

SEQ ID NO: 17668 - protein, 1229 aa, Oryza sativa
  Clone ID: TF_OSC101008j.C1.p5.fg
MACAPSSHLVHMDVLAVIFLEERSEKSSLCFEFGGRESRGRKPPSGSRKSSSILMTSDELAGEGEVDGAELILSLPEDVLGLISAHLRPRDLLALSAASRSLRNAVSTADKAWLAQCRRLLPTASHLLAWRTALAHSSLAVCRFLHSAAPLLGLWAHQNPELGNLVLALPGFLSLVAVRSIPQELSPRLLWAPVFELLADHRGHPAFLFLHGAAHDSLFPGLLSSSLHPLANTLFLEAHTSTSTSHFSRLAFADRRRLLNALVAASRLTLPPDVATAPLFARSDADLPLLAARREAMLRLHSQSGGGMVRRAEIEALLIGARKTAALPADTAGDKMRLRRTFSVVAGFVRNSLRQMVTRSASANSRAEYAHPKHLPLDEFLRAGESVGLSLRGARMRLSIYRNWPSMHDNRFVLYKLTTQAPMPGREYAGLWGGTFGWPPGRPEDERKPGKALFFLLLSYEEDSEGKLQLIATKVLEGTHYVVHPNGSSMFIVRVGEPSTETFPWQTDEESRAVEINRSFAGEGIATGYGFRYPGSKPGSLFVLLDGRLAFVWRENKAVLTLQRLDLEDMIRRGERVPSLPPIPNFAYLTKSYSNVFAVAPGSTSFPASPRFIYFGNSVVSKIRRFMLNFRYKLKCQNLANELQSQIQPPDDNIMSIDYLRAIATSTAVMVEYKWRSKRNATSCIWAFGGVWSVDFGPARPLPLMANGANSKKDAKAQHWISWRDTLHGFLQSPAISQGGGIQTCIRHALQHNPCLLTNGVVVHTEFKGNPAHSQGEEAKVQHPNGAAGGKVVSADAAIQDAAAAASSEANKAMCNNALFDILVSQKFALLCHLLLGTFHVNKPGDVIDLEKIDAKMRNGDYAHNPALFDDDIQQMWEKFEQVGQEMTGLASNLSTISRVSYQKQASGFSEAEVAEHRIEEISLPGAVHVVTKESTTTVQLAPCDSSHSTIPKRTVPPGRDLCPCDGCGTKVDVEEGLICDECDTMYHFACVKLLNPDIKQVPAIWHCSTCSFKKKELAADTTNNVAHDCLHGGNCVLCDQLELVKTEEEDPKLPIKIELAEEREGSSVSSMGEDNEPDLSTTALSNLCKHCGTCEDDDKRFMVCGHPYCVYKFYHIRCLKTSQLAIEQQKKLGCWYCPSCLCRGCFQDKDDDQIVMCDGCDEGYHIYCMRPARNTIPKGKWYCTFCKIRRAAEGMHKYEDSVLKIHGNSKHACNVNQSKDSEGDGTEK

SEQ ID NO: 17669 - protein, 614 aa, Oryza sativa
  Clone ID: TF_OSC421502j.C1.p2.fg
MDQARISFFPDGLRVMIIDDDAKAVRRATATLSQLQYAVVATHSTASAGLRALSGDNVVEIQAILCDVHKVVSSGFDFRRVVESELRIPVIYLLSKMEEEDMVAGEDAEFLNHLLLTATYIVRKPLNPTVMARLWRVVAWRMYCLEERIQANVAANAGAGGEDDDDDDDVVIVEEPQVHFKVVRRTSGGSRKRQLTINVVDDGNRGSGSGGGGGGGADANPTRILQHITSNLQEFRTKHQKKDMAIERPLISSDSMFLKAILPTLKISPCNPLTLTGGIGSSSVAAEAFAGGSSSAAPLQIPVFQQQSTGNGNTVISFSNNASPMAMRAPTDNTMISFNNVSAAPVANAVISFSNISRSAAMQAPAARGQHLSGDVQQLDFPQQKLYFGPFSYQGPPPPSMHNHINLLPPTSSPVTCSMDKGKVPIIELPYGMPVDDFLVSQTTYGGAGPSIGATDAAAAAYPYTDAPSNNVATGCLMVPPMGPAFSITEPTVVAQGEGTGTGVDAGTSEKNAIVEAPNNPAPLMVLDQVAADAAMDVQEDIMFSLESLLGPDYDLLPMEDVSAPDTAAAGDAAGGSLDGEEGGMDIGWDLDLDDILVENVNDFAFLDNLAGSE

SEQ ID NO: 17670 - protein, 188 aa, Oryza sativa
  Clone ID: TF_OSC407404j.C1.p6.fg
MSSIGAGAGGAVVGAAVAAVAVGGGAPPHVLAVDDSSVDRAVIAGILRSSRFRVTAVDSGKRALELLGSVAVICSRNFLMFLWLAHHLAGTKCEHDNHGLLDAGDDGIRAPEESQGVIQAEEDPRGDHVLGECANKNQQITEHLTIVLPSLLCSIGLLTRCLEEGAEDFLVKPVRPSDVSRLFSRVLP

SEQ ID NO: 17671 - protein, 288 aa, Oryza sativa
  Clone ID: TF_OSC405568j.C1.p1.fg
MLNVMVIDEDRRHAYSTSSMLTQFNFCVTVYTSPIKALDFLENHAQDFDLVLAEVHMEELNGFAFLTASRKIHKSIQVINLKVVRMEKIKGLLQDDSSKNTKVIKNKGTTDCNQIATHVHQMQVLNGDDVYTAMRRSLHLGTIFDESNYSNDPCSNEYKVGEDEIGGYGCANEANATHSSDDHNVVVPDLSCNIADDVSQEIMSKATTCVDHRKQDTTRTDGPAAMSADEANATFSTGNLQQVNVIVTCNGDGSQESIQKNTCDDQHAPTGSKPETFRLVNYSDSESD

SEQ ID NO: 17672 - protein, 252 aa, Oryza sativa
  Clone ID: TF_OSC405568j.C1.p4.fg
MAQRVGHSADGVFVMIVDEDKSHANFARGMLSSLNFHVIVYSSPVNALVFLENNAQDVAVVLAAVDMKQLSGFQFLEAARVKRQDLQVIMMSAETTMSTMMRCVKLGARFLVKKPLNEETVGNLWQHVDLKVLKMEKIRELLQDENNEEEEVNSFEAKKADSVKVQSDEKGHDNAKISNTAAAEGSDEKVSSGDGHVVPKAYNNVNVEESIGSNNTSGEQVSDKIKSDARVGVILVDYPDFEDDETKKPTST

SEQ ID NO: 17673 - protein, 293 aa, Oryza sativa
  Clone ID: TF_OSC421794j.C1.p4.fg
MATRLGREARGERWVQGIAAYVHGGGRLGTPDRERWRWGEVTRLRKGAEVGREYGRSRWEYDGQETLPGDGTPTPWYSTGIRTMRVPAAVTGGCGCGVDGGGGCCRGGGKLADWEEGKDDEMKSVVVKGWTRMAQVVPLHDNASAEDDDDDEEDDDEDDDDDDDEDDEEEAAPPYVMAVDDSSVDRAVITALLRRSKYRVTAVDSGKRALEILGSEPNVSMIITDYWMPEMTGYDLLKKIKESSELKQIPVVIMSSENVPTRISRCLEEGAEDFLLKPVRPADISRITSRMLQ

SEQ ID NO: 17674 - protein, 610 aa, Oryza sativa
  Clone ID: TF_OSC404834j.C1.p7.fg
MQNSIDLVLTEVVMPGVSGISLLSRIMNHNICKNIPVIMMSSNDAMGTVFKCLSKGAVDFLVKPIRKNELKNLWQHVWRRCHSSSGSGSESGIQTQKCAKSKSGDESNNNNGSNDDDDDDGVIMGLNARDGSDNGSGTQAQSSWTKRAVEIDSPQAMSPDQLADPPDSTCAQVIHLKSDICSNRWLPCTSNKNSKKQKETNDDFKGKDLEIGSPRNLNTAYQSSPNERSIKPTDRRNEYPLQNNSKEAAMENLEESSVRAADLIGSMAKNMDAQQAARAANAPNCSSKVPEGKDKNRDNIMPSLELSLKRYHTPVASNQGGTGFMGSCSLHDNSSEAMKTDSAYNMKSNSDAAPIKQGSNGSSNNNDMGSTTKNVVTKPSTNKERVMSPSAVKANGHTSAFHPAQHWTSPANTTGKEKTDEVANNAAKRAQPGEVQSNLVQHPRPILHYVHFDVSRENGGSGAPQCGSSNVFDPPVEGHAANYGVNGSNSGSNNGSNGQNGSTTAVNAERPNMEIANGTINKSGPGGGNGSGSGSGNDMYLKRFTQREHRVAAVIKFRQKRKERNFGKKVRYQSRKRLAEQRPRVRGQFVRQAVQDQQQQGGGREAAADR

SEQ ID NO: 17675 - protein, 200 aa, Oryza sativa
  unsure (1)..(200): unsure at all Xaa locations
  Clone ID: TF_OSC8667j.C1.p1.hg
MSKPSPPWKATRRSNAISYRIISTSRSSSVGRARRHRIRAFRFGKVAGCIAKIWLGKVGSNREIVRSGGFLGXEEKNISVLALPSSMAVAIEAPFHVLAVDDSLPDRKLIERLLKTSSFQVTTVDSGSKALEFLGLHDHEDSPISTQSDQQEVAVNLIITDYCMPGMTGYDLLKKIKESSYLRDIPVVIMSSDNIPSRIN

SEQ ID NO: 17676 - protein, 224 aa, Oryza sativa
  Clone ID: TF_OSC400220j.C1.p88.gm
MTPSRTGRGPAAAGAASPRLRRARLLRGTSPPLASSAAAASSAASSAAAARLLCRRSLPHPSPPLPLAASSPTAARRPLPAADCRRDIDLMATCRSRGVERGGAPHVLAVDDSSVDRAVISGILRSSQFRVTAVDSGKRALELLGSEPNVSMIITDYWMPEMTGYELLKKVKESSRLKEIPVVIMSSENVSTRINRCLEEGAEDFLLKPVQPSDVSRLCSRVLR

SEQ ID NO: 17677 - protein, 127 aa, Oryza sativa
  Clone ID: TF_OSC400542j.C1.p8.fg
MARKMIRVLLVEDEEINRVVARAALKAAGGGDVVDEAENGEVAVQRVRDAAAPYDLVLMDKQMPVMDGHEATRRIRGMGVTTPIVAVSSDGLPADVDAFITAGADDFTSKPLSKEKLGVILAKFRLA

SEQ ID NO: 17678 - protein, 1048 aa, Oryza sativa
  Clone ID: TF_OSC412867j.C1.p3.fg
MREVEEVSKWRRRCCYFWILFPLAVIATCMTITVVTFCSSTMYMTEVMGEATKGAMDSALMHIAGNMRPLLEANRSVFTIANTLHVQGNMASFSHVGPKLFLAFSMQPLQAQISYAAVDGAAFAYYRAGGGDGEARAMFARPNGTWFTQAVDPATGRPVGNATAAAPHQQLPPNVTRLLLDGGGGGASLADGWARPGVRMLFLSAPVGGGGGAVSAAVAVDDVVLRGAAGLRQLRDLGMYYAVAGNGGATAAPPAPEPAAYRSLLGDGAAAEEMALFSSVKCTASAIDAPPKLDVHGVKSDKYRFACTNFDISGVQMGFRVVLRKSAMVGVFRRGGVTMVAVACAAAAAATVACVLMARALRRAVAREAALGADLARHRDALRQAERKSMNKSNAFASASHDIRSALAAVAGLVEVSRPEANPNIVDNLNQMELCTNKLLDILNSILDTTKVESGKVQLEEVEFNMADVLEESVDMANVVGITKGIEVIWDPCDFSVMKCDNIIGDSKRFKQILDNLLGNAMKFTQEGHVILRAWANRPIARGSIGAPSRFAYRSLENNFFSFFFGAKEDRVSQNSFNPLQNDPNSVEFYFEVVDTGIGIPKEKRESVFENYVQVKEGHGGTGLGLGIVQSFVRLMGGEISIKEKEPGERGTCFGFNVLLKTSGNQAAEEDIEEGPSTVSELDIRASVFRETNCFKGWHCILFVHGDETRRVLQAWMESIGMKVWMVPGVESISSTLEKARSSRDDCDVDRCFSSKEMVSQVLPTTLRNNNIMARNLGEHHPLGMLLIVDVSNGQLENIQRQARDFTQMRSQVPCKFVCLTDLRTSYKDFRRFEEMSCDLILRKPVHGSRLYSLLMTLRDVQSSPMHRSSLVGHENYVTRHQDSANIVALAEVGRLDQGLKTEEDRPLDGMHVLLVEDTLVLQTIQRKMLNQLGAIVELAGDGAKAVDMFRDAIERASVSEEHSVPLPYDVIFMDCQMPRMDGYEATRRIREEESRYGIRTPIIALTAHSMEDDLQKAIDVGMDLHMTKPIERRRIVEAVHGVCKGKN

SEQ ID NO: 17679 - protein, 665 aa, Oryza sativa
  Clone ID: TF_OSC406972j.C1.p7.fg
MGGGVEERKVVDLEDGDGEEGEDAAAVAAGSSRETRMLPRMPVRVLLAEGDDSTRHIICALLRKCGYRVAAASDGVKAWDILKEKSFNIDLVLTEVELPLMSGFLLLSTIMEHDACKNIPVIMMSSNDSVSMVFKCMLKGAADFLVKPIRKNELRNLWQHVWRKQLSSGVLDVQHTQQEDNLTERHEQKTGVTKAEHVTENVVHKNMECSEQESDAQMYLALQICINVGELIYQFFKSAKCHSSVLLGIAKWSTYDNSKSSCTRSELEADSRQTNNLLEYKQPMGRHFSKPDHKNTEKNGGTKIHASNDGNLIPRREEDASLRRMTCSNDINCEKASRDMELVHIIDNQQKNNTHMEMDVARANSRGNDDKCFSIPAHQLELSLRRSDYSRLESQEKNERRTLNHSTSSPFSLYNCRTASSTINAGDAQACSTSATHIDLENKNGDSKTPSQDKRETNQPPIRVVPFPVPVGGLTFDGQPFWNGAPVASLFYPQSAPPIWNSKTSTWQDATTQAISLQQNGPKDTDTKQVENVEEQTARSHLSANRKHLRIEIPTDEPRHVSPTTGESGSSTVLDSARKTLSGSVCDSSSNHMIAPTESSNVVPENPDGLRHLSQREAALNKFRLKRKDRCFEKKVRYQSRKLLAEQRPRVKGQFVRQDHGVQGS

SEQ ID NO: 17680 - protein, 1024 aa, Oryza sativa
  Clone ID: TF_OSC415694j.C1.p3.fg
MGKPEARSGWRNAAAAAWVLVAVACAAYMHWHLRRETMDRAEERLVSMCEERARMLQEQFGVTVNHVHALAILISTFHFEKFPSAIDQDTFAKYTARTSFERPLLNGVAYAQRIFHHEREMFENQQGWIMKTMKRQAAPPQDEYAPVIFSQDTVSYLARIDMMSGEEDRENILRARATGKAVLTNPFRLLGSNHLGVVLTFAVYRPGLAADASVEERVEATAGCLVVVVSSNQIPTNRYLGGAFDVESLVENLLSKLAGNQDIVVNVYDVTNASEPMAMYGPQSPDGKVSLFHVSTLDFGDPFRAHEMRCRLVASFSWHKFVGCFLLGSCTNSGNLSRYRQKPPLPWSAITNPLGTFVIWMLVGYIICAAWSRYDKVSEDCRKMEELKTQAEAADVAKSQFLATVSHEIRTPMNGVLVVQRSKILPFDVGMLDMLLGTDLSMTQKDYAQTAQMCGRALITLINDVLDRAKIEAGKLELEAVPFDLRSLMDDVISLFSSKSREKCIELAVFVCDDVPKVVIGDPWRYRQILTNLVGNAVKFTERGHVFVRVCLAENSKVEANQVLNGTMNGKDGKVETTANGAFNTLSGFQAADERNNWDYFKLLLSDKEPHMDELECDRSYQNDCDCVTLMISIEDTGVGIPLHAQDRVFTPFMQADSSTSRNYGGTGIGLSISKCLAELMGGQISFTSRPFVGSTFTFSAVLKRSCKDTSSDSKRSLSEALPTAFKGMKAILVDGRPVRGAVTRYHLNRLGIVVKVVNNLSMGLQTLAGQNGVKESREKLSMLFIESDIWRPETDILLLNRLHELKNNGQVHELPKLVLLVTSEADKDRYGSAFDIVMYKPIRASTIASCLQQLLKVVMPERKDNQNRPSFLRSLLIGKNILIVDDNKVNLRVAAAALKKYGAKVHCVESGKDAVSLLQQPHCFDACFMDVQMPEMDGFEATRQIRQMEVKANEERKALDLMEGSTFVESHLPVLAMTADVIQATYEECIKSGMDGYVSKPFDEEQLYQAVSRLVVGTKESAV

SEQ ID NO: 17681 - protein, 802 aa, Oryza sativa
  Clone ID: TF_OSC403629j.C1.p1.fg
MGSACEAGTDEPSRDDVKGTGNGILENGHSHKPEEEEWRNGMGEDLPNGHSTPPEPQQTDEQKEHQVQIVRWERFLPVKTLRVLLVENDDSTRQVVSALLRKCCYEDSRGFCASRFPSAVIPAENGLHAWQCLEDLQNHIDLVLTEVVMPRLSGIGLLSKITSHKICKDIPVIMMSSNDSMGTVFKCLSKGAVDFLVKPIRKNELKNLWQHVWRRCHSSSGSGSESGIRTQKCTKPKVDDEYENNSGSNNDNEDDDDNDEDDDDLSVGHNARDGSDNGSGTQFSLNVGQLCQCILMPSACFKTQSSWTKRAVEIDSPQQMSPDQPSDLPDSTCAQVIHPTSEICSNRWLPTANKRSGKKHKENNDDSMGKYLEIGAPRNSSMEYQSSPREMSVNPTEKQHETLMPQSKTTRETDSRNTQNEPTTQTVDLISSIARSTDDKQVVRINNAPDCSSKVPDGNDKNRDSLIDMTSEELGLKRLKTTGSATEIHDERNILKRSDLSAFTRYHTTVASNQGGAGFGGSCSPQDNSSEALKTDSNCKVKSNSDAAEIKQGSNGSSNNNDMGSSTKNAITKPSSNRGKVISPSAVKATQHTSAFHPVQRQTSPANVVGKDKVDEGIANGVNVGHPVDVQNSFMQHHHHVHYYVHVMTQQQQQPSIERGSSDAQCGSSNVFDPPIEGHAANYSVNGSFSGGHNGNNGQRGPSTAPNVGRPNMETVNGIVDENGAGGGNGSGSGSGNDLYQNGVCYREAALNKFRQKRKVRNFGKKVRYQSRKRLAEQRPRIRGQFVRQSGQEDQAGQDEDR

SEQ ID NO: 17682 - protein, 896 aa, Oryza sativa
  Clone ID: TF_OSC900171j.C1.p16.fg
MSPDADAAAAAAAGGEGAAAAGVGTAGEGRGVIRWDQILPRRSLRVLLVEHDDSTRQVVTALLRKCGYRVAAVADGMKAWGVMRERAYAFDLVLTEVTMPTLSGIELLSRIVASDECKNIPVIMMSSQDSIGTVLRCMQKGAVDFLVKPVRKNELRNLWQHVWRRHAMNSQTNASENNAASNHLSANGGNGSKTGEHSDEESDAQSSGSKREVEIQSAEKLPEVVADGGAGSSREHKIQNGFIDGMNTKSHALKGNDDAPSGNACGDSELQVLSTEKNVRSKFLNGITSAKVAGQIMDNALRFADSSSLRSSDPGKDLLVVAQTTADRKCKSSALENNAVMENNLSENSKGTATGHAESCPSHFVEINLEKQHHLNGYTNHKLNEKDIFNHSNSSAFSRYGNKRIESSAQRPFPPSFRVVHQQPVYDKNPQSSRVLLSCEHNTRESTVQAQVPLDRSTEGAAILCSSSVREDAGTSSSSPRKDSLTHPSYGFIPVPIPVGAAIPYHYGAIMQPMYYPQGAFMHCDSAAINKTAIQHVSCQSNYHENLGKPPQIDEHKQPEENHQLHHSRQILRESGEPVDLAKAHMERINQSASCSQDIRKGSGCTGSGETDANTNTVIALESGNESGVQNCSNNVLDGDRSRREAALLKFRMKRKDRCFEKKVRYHSRKKLAEQRPRVKGQFLSSISNGGRRSSGGAGRDAGRVRDRLAVGGVLRRRRGAGREPAVRQRVRDVPDDMHVAAAAASARAAVVVVAVDAVRAAAVLGASAAVPDAAAPAAISGGRERHVPASGGADDDEPAAITAASTVVTTAADDEEQQRVDGVAAVVLVPLLIAAVSAVVVQPVLLLLPLRQRQALRRRRRGERLHGADPSGVAAHRHIPDVTTRTNFSARYDRN

SEQ ID NO: 17683 - protein, 968 aa, Oryza sativa
  Clone ID: TF_OSC415438j.C1.p1.fg
MGDEYLAEPEDEVAISMWPENIGDKHQKQFKMEKLGKDQDALEDANFQQKPSSVDLNRLMELANSEKGVSQMQYFVKHWEYKRANTARLLKEQIGLLCQQRKEIEQRKQQILEEQQFQDESYYAVKWQVPILDEVYKDEWKRPSKKNDDLSHNQELKIDAEYDSISYWKERAMQLEKTLEASLQRERSLEEKLEENIKNLQSHTPVEEFSGMLKRADYFLHLVLQSAPIVIAHQDADLRYRFIFNHFPTLADEDVIGKTDYEILSGEGIEEMNNVKKEVMASGKATKREFVFNTPLFGAKTFVTYIEPVFSKSGETIGVNYVAMDITDQVTRREKMADIRVREAVQKAKETELSKSLHITEETMRAKQMLATMSHEIRSPLSGVLSMAEILATTKLDKEQYQLLEVMLSSGDLVLQLINDILDLSKVESGAMKLEATTFRPREVVKHVLQTAAASLKKELILEGCIGDNVPLEVTGDVLRIRQILTNLISNAVKFTHEGKVGINLHVLDKQLPGCRIEGGQLHSKAHSAPAAAAEHFSASPRKCDNDTLGCSNHEDACQTGIPSNDNFGEHHEGDEVVWLRCDVYDTGIGIPEKSLPLLFKRYMQASDDHARKYGGTGLGLAICKQLVELMGGTLTVVSKENEGSTFSFVLPCKIPVKEDHSDDPDDMPSSGGDFTTSDIEGSFIFKPQARPYLLTSGVSVMNNTKLIGGNQFYDPPNILEDRKPFSNGFVLAEDHSTNSASTAHQSNGPSVSRTNKEQHDNAMVIELNRQAERVSSSRGDTTSVSGLIHDERGPCRVHEEKSLHKKSKCSPSSNKAKILLVEDNKVNIMVAKSMLEQLGHGIDIVNNGLEAIRAIQKRQYDIILMDVHMPEMDGLQATKFIRSFENTGCWDTSVKPEHDQIIAGSDNLSDCAHMKKQGKRVPIIAMTANSFSESAEECLAAGMDSYISKPVNFQNIKECLQQYLPPQ

SEQ ID NO: 17684 - protein, 170 aa, Oryza sativa
  Clone ID: TF_OSC401250j.C1.p22.fg
MAAAAQAPAAAKVVVATSPRAGGGGGGGGDRKVVPVVVAAAAGDEAQSEMHVLAVDDSSVDRAVIAKILRSSKYRVTTVESATRALELLCLGLVPNVNMIITDYWMPGMTGYELLKRVKESSQLKEIPVVIMSSENVPNRISRCLEEGAEDFLLKPVRPSDVSRLCSRIR

SEQ ID NO: 17685 - protein, 170 aa, Oryza sativa
  Clone ID: TF_OSC900261j.C1.p15.fg
MAAAAQAPAAAKVVVSTSPRAGGGGGGGGDRKVVPVVVAAAAGDEAQSEMHVLAVDDSSVDRAVIAKILRSSKYRVTTVESATRALELLCLGLVPNVNMIITDYWMPGMTGYELLKRVKESSQLKEIPVVIMSSENVPNRISRCLEEGAEDFLLKPVRPSDVSRLCSRIR

SEQ ID NO: 17686 - protein, 494 aa, Oryza sativa
  Clone ID: TF_OSC415117j.C1.p1.fg
MVGAGEGDRVGGGAAVGGGQQFVDRSKVRILLCDSDPSSSREVLRLLCNCSYQVTCAKSPRQVINVLNCEAGEIDIILAEVDLPVSKCFKMLKYIARNKELRHIPIIMMSNRDEVSVVVKCLRLGAAEYLVKPLRMNELLNLWTHVWRRRRMLGLSEKNFFNDNFELALSEPSDANTNSTTLLSDDTDDKPKENINQETSTSNQHEYESNPSDAEPKQKGTPEGLLVSTEGGDQASYVKSSTPTTSSFDSELQKGGNRLDSSDHRGNFSSTTDRSDTGTDVNIRDKEAFEMPVQYPVVCFSSSNLHLERSNEGQNDASGTPPVYHFPFYYPGMMDHGMTHPPVQNFQGNINNAQVHTPQTLLPQYNVYPQCHGVSMMPPFQYNPAGMSIQSNQLPTQNMWPQASSTPMPEETCSRSERRAAALAKFRLKRKERCFDKKVRYVNRKKLAETRPRVRGQFVRQANYTDITSTGDDISEDEDDDPSSREVEMVSSPE

SEQ ID NO: 17687 - protein, 775 aa, Oryza sativa
  Clone ID: TF_OSC101556j.C1.p19.fg
MASIGWHLSLEPNIDSFTVADNKLVLLNFEQQQLVHWMMPPRFRCQDYLLPLLLALSPAAAAAREVEYHHCHCDGGGGGGGGGLWSMDSIFRWQKVSDLLIAAAYFSIPLEILYFVAGLRHLLPFRWVLVQFGAFIVLCGLTHLLTAFTYEPHPFMVVLLLTTAKFLTALVSFLTAITLLTLIPQLLRVKVRESLLWLKARELDREVVLMKRQEEASWHVRMLTHEIRKSLDRHTVLYTTLIELSRVLGLTNCAVWMPAAGEMCLTHELRRDGGGEDGVVGVDDADVVEVRGSDGVKLLGPDSVLAAASGGKEEGTGAVAAIRMPMLKVSDFKGGTPEVIQTSYAVLVLVPPAGKSWGRHEMEIVEVVAGQNRELLQARRDALMANEARQAFQGVMSQGMRRPIHSILGLVSMVQEEALAPEQRLVVDTMARTATVVSTLVNDVMEMSADSRERFPLETRPFHLHAMIRDAACVARCLCDFRGFGFAVHVENALPDLVVGDERRIFHVLLHMVGNLIGRTEPGHVTLRVRAADDDVLDDRLGQRWDPWWPSYSTGYSSVKFVIGVKRQQNGDAGSPLSRRPSGKGIDLRLSFSMCRKLVQMMQGNIWAILDPQGLPESMTLVLRFQLQSPLTSSSLGGSFEQKHSSPSCQIAGLKVLLIDDDDDINLVVARKLLEKLGCVVSSPPSGSGFLSSVGSSAAAFQLVMVNLEMKRVKALDVATRISQYRSGRWPIVMAMASDQKAWEKCAQSGINGILKKPVILQELKDELARILQST

SEQ ID NO: 17688 - protein, 799 aa, Oryza sativa
  Clone ID: TF_OSC101556j.C1.p3.fg
MASIGWHLSLEPNIDSFTVADNKLVLLNFEQQQLVHWMMPPRFRCQDYLLPLLLALSPAAAAAREVEYHHCHCDGGGGGGGGGLWSMDSIFRWQKVSDLLIAAAYFSIPLEILYFVAGLRHLLPFRWVLVQFGAFIVLCGLTHLLTAFTYEPHPFMVVLLLTTAKFLTALVSFLTAITLLTLIPQLLRVKVRESLLWLKARELDREVVLMKRQEEASWHVRMLTHEIRKSLDRHTVLYTTLIELSRVLGLTNCAVWMPAAGEMCLTHELRRDGGGEDGVVGVDDADVVEVRGSDGVKLLGPDSVLAAASGGKEEGTGAVAAIRMPMLKVSDFKGGTPEVIQTSYAVLVLVPPAGKSWGRHEMEIVEVVAGQVAVALSHATLLEESRAMRDRLAEQNRELLQARRDALMANEARQAFQGVMSQGMRRPIHSILGLVSMVQEEALAPEQRLVVDTMARTATVVSTLVNDVMEMSADSRERFPLETRPFHLHAMIRDAACVARCLCDFRGFGFAVHVENALPDLVVGDERRIFHVLLHMVGNLIGRTEPGHVTLRVRAADDDVLDDRLGQRWDPWWPSYSTGYSSVKFVIGVKRQQNGDAGSPLSRRPSGKGIDLRLSFSMCRKLVQMMQGNIWAILDPQGLPESMTLVLRFQLQSPLTSSSLGGSFEQKHSSPSCQIAGLKVLLIDDDDDINLVVARKLLEKLGCVVSSPPSGSGFLSSVGSSAAAFQLVMVNLEMKRVKALDVATRISQYRSGRWPIVMAMASDQKAWEKCAQSGINGILKKPVILQELKDELARILQST

SEQ ID NO: 17689 - protein, 232 aa, Oryza sativa
  Clone ID: TF_OSC400376j.C1.p28.fg
MTVVDAESRFHVLAVDDSLIDRKLIEMLLKNSSYQVTTVDSGSKALELLGLRDEGDDSSSSPSSSSPDHQEIDVNLIITDYCMPGMTGYDLLKRVKGSSSLKDIPVVIMSSENVPARINRCLEDGAEEFFLKPVKLADMKKLKSHLLKRKQQLPMAAAAPDKPPHKPDEAAASAAAIAEAATAQTDGIISDCSCSGSSKRKAAAMEQEVISSPDQRTKPRLSSTSSGLAVET

SEQ ID NO: 17690 - protein, 763 aa, Oryza sativa
  Clone ID: TF_OSC404904j.C1.p5.fg
MPPIPSLWIRVFFSWLLLSLPAAAAADFSHCGGCDDGDGGGGIWSTDNILQCQRVSDFLIAMAYFSIPLELLYFATCSDLFPLKWIVLQFGAFIVLCGLTHLITMFTYEPHSFHVVLALTVAKFLTALVSFATAITLLTLIPQLLRVKVRENFLRIKARELDREVGMMKRQEEASWHVRMLTHEIRKSLDRHTILYTTMVELSKTLELQNCAVWMPSESGSEMILTHQLRQMETEDSNSLSIAMDNPDVLEIKATKDAKVLAADSALGIASRGKLEAGPVAAIRMPMLKASNFKGGTPEVMETSYAILVLVLPEDGSLGWGEEELEIVEVVADQVAVALSHAAVLEESQLMREKLAAQHRDLLRAKHETTMATEARNSFQTAMYDGMRRPMHSILGLVSMMQQENMNPEQRLVMDAIVKTSSVASTLMNDVMQTSTVNREYLSLVRRAFNLHSLVKEAISVVRCLTGCKGIDFEFEVDNSLPERVVGDEKRVFHIVLHMVGTLIQRCNAGCLSLYVNTYNEKEERHNQDWMLRRANFSGSYVCVKFEIRIRESRGNLLSSSSSRRLQGPNSTSSEMGLSFNMCKKIVQMMNGNIWSVSDSKGLGETIMLALQFQLQHVTPVSGASSDLFRSAPIPNFNGLQVILVDSDDTNRAVTHKLLEKLGCLVLSVTSGIQCINSFASAESSFQLVVLDLTMRTMDGFDVALAIRKFRGNCWPPLIVALAASTDDTVRDRCQQAGINGLIQKPVTLAALGDELYRVLQNN

SEQ ID NO: 17691 - protein, 185 aa, Oryza sativa
  Clone ID: TF_OSC400678j.C1.p9.fg
MAVKYFGHRTPVIVVTKSHMYERGQIHQSLYIVWYIKIIKYTVTSDTVHFPQQQFKVTLHQKFAMSSPHVLVVDDTHVDRHVVSMALMRHNVRVTAVESVMQALMFLDSEHDVDMIVSDYCMPDMTGYNLLMEVKKSPKLAHLPVVIASSDNIPERIRKCLDGGAKDYILKPVKIVDVPRIMKYI

SEQ ID NO: 17692 - protein, 235 aa, Oryza sativa
  Clone ID: TF_OSC402928j.C1.p7.gm
MFTTKERGSCKESERRKRKWGRNRERIRGTGKRHFRVAIEAPFHVLAVDDSLPDRKLIERLLKTSSFQVTTVDSGSKALEFLGLHDHEDSPISTQSDQQEVAVNLIITDYCMPGMTGYDLLKKIKESSYLRDIPVVIMSSDNIPSRINRCLEEGADEFFLKPVRLSDMSKLKPHILKSRCKEHYQQEQNLQSNSESNNSSNPTSENSSSSTSSNSHKRKAVDEEILPHTIRPRHS

SEQ ID NO: 17693 - protein, 440 aa, Oryza sativa
  Clone ID: TF_OSC400888j.C1.p1.fg
MEALDDTSPENIEVTANSKNTMPYNTLSGLEVANNRKTLESFRMFKDSSDAIDSVNLLVTVEDTGIGITKDAQTRIFTPFMQADGSTSRTYGGTGIGLSITKRLVELMGGEIGFVSKPGVSSTFSFTAIFKENRKDPGDIKRYCPEPTPPDFQGMRALVVDGRCARAEVTMYHLRRLGIQCDLAATSESALSALLESCNSSVKSSLNMVLVDKEAWGEDSGLAFFRCLIDLRLKGTLKSWQTMPKFFLLAGSITPADSDCLRLAGYSNSIRKPLRLSTVAACLSKALGVGLTGRRSRDNSLVLRSVLTGKNILVVDDNAVNRIVAAGALKKYGAIVTCVDSGKEAISRLQPPHKFDACFMDVQMPEMDGFEATRLVRSVESKINDTIQAASAKNPFGDNNIAKQKSYAVNREQKFDWTAIYVSFDNWMKSISTSRLQPCA

SEQ ID NO: 17694 - protein, 1023 aa, Oryza sativa
  Clone ID: TF_OSC401583j.C1.p6.fg
MDEMSCGGGGGGARWKRARVAGMGEGKAGGGGGAAFLGLERVGMVVRMLPVPEKVSARARVVRGSLVAHFRGWRVVRETWWWVLLLWILAGSLGSFYLFLFMNAQSLDKRRDSLASMCDERARMLQDQFNVSMNHLQALAILVSTFHHSKTPSAIDQMTFARYAERTAFERPLTSGVAYAVRVTHGEREQFERQQGWAIKKMYSSSNKKQSSPGPGPGDAAVAEIREPAEEYAPVIFAQDAYKHVISFDMLSGNEDRDNILRARKSGKGVLTAPFKLLNNRLGVILTYTVYKYELPAYARPHERIQAAIGYLGGIFDIQALVEKLLKQLASQESIMVNVYDTTNESPISMYGDDTGSGMCHVSVLNFGDPSRKHEMHCRFEKKPPWPWLAITSSFGTLVIALLTGHIFQATVHRIAKVEDDFHKMSELKKRAEDADVAKSQFLATVSHEIRTPMNGVLGMLQMLMDTDLDTTQQDYVRTAQASGKALVSLINEVLDQAKIESGKLELETVPFDLRTVCDDILSLFCGKAQEKGLELAVYVSDQVPQILIGDPGRIRQIITNLVGNSIKFTERGHIYLTVHVVEEVMSCLEVETGIQNTNTLSGYPVANRRCSWESIRLFNRELHSSEKSFAPIASDSISLVISVEDTGVGIPFEAQSRVFTPFMQVGPSIARIHGGTGIGLSISKCLVGLMKGEIGFASKPHVGSTFTFTAVLMRAHCKGNDIKSSEFKGINALVVDHRPVRAKVTKYHLQRLGVKTELTAELNQFISKLNSGSLTAKLVLIDKETWLKESHCTPLLVNKLRNNDKPDSPKLFLLGSSASSPKGGSDTSREHNLNVIMKPLRASMLQVSLRRALGGVDKVHCRNGVVGNSTLGSLLHKKQIIVVDDNIVNLKVAAGALKKYGAEVTCADSGKKAITLLKPPHNFDACFMDIQMPEMDGFEATRRIRVMERDLNERIERGEAPPECASIQRWRTPILAMTADVIQATHEECLKSEMDGYVSKPFEGEQLYSEVARFFQNHDQVE

SEQ ID NO: 17695 - protein, 135 aa, Oryza sativa
  Clone ID: TF_OSC407447j.C1.p3.fg
MIEIIDLSQYIGPELDKKKAKLEKAKSKLLELEKKADIEENTRVTAVESVMQALVFLDSEHDVNMIVSDYCMPEMTGYDLLMEVKKSPRLVHLPVIIASSDNIPERIRKCFDGGAKDYILKPVKIADVPRILNYI

SEQ ID NO: 17696 - protein, 131 aa, Oryza sativa
  Clone ID: TF_OSC401978j.C1.p21.fg
MSTKTVPEPEPHVLAVDDSIVDRTVISRLLRSSKYRVTTVDSGKRALEVLSLDRNVHMIITDYCMPEMTGFDLLKRVKESAELKEIPVVLMSSENSPTRIRRCLEEGAEDFLIKPVRPSDVSRLCNRVIMK

SEQ ID NO: 17697 - protein, 777 aa, Oryza sativa
  Clone ID: TF_OSC401835j.C1.p36.fg
MAMVTARQFLASAAELGSGRRRCGGGGACDMREDGGVEALMQCQRVSDLLIAASFLSIPLELFYFATCADLSEVKCAVLHFCAFIVLCGATHLLAAFTHAHPHSAPLLRALTAAKVLAAVASSAAAVSLLTFIPKLLRIKVRESLLRDKASRLHRDLGLVRRREEATSRAVRELTGRIRASPPDAHAILRTTALQLADALGLHACAVWMPAAGRPHDLVLVHHLTSRPDDAADLLLEVGDACTVAADDPDVVDVMASKVAKVLGPDSALAMASSVGAAPAGAVAAIRIPILRVSIYDGGGTPEVTEASYAILVLLLPPHDAAGGWSSHDLEIVQVVADQAAVALSHAAVLEESRSMRDRFAEQHRALMQAKHRAAMATRAFSSIQSAMCHAMRRPVHSVVGLVSMLQHPEADTMRPEQRLAVDAIARTSNLLSALMDEVTVNRQHLSVQRKPFSLHALIKEAISVAGCLSHCGGAGFLHQPECALPEWVVGDERRVFHLLLDMVGTLLNRCNTGSGACRLSFSVRICNVGEERYSLDWIPMRPTFSGCNVCVKFKVGIGRSRSCAIERSLPCELPRRSAATTSSQMGHIFSGYFNKIVQMMNGNMWSASDSEGVGESVTLILQFKLQQGHVEASPPYIPHLNGLRVLLADDDAMNRGVTKKILERLGCQVMSAPSGAHCLSLLASAEASFQLVVLDLDDRAVPSAAMDRFEVALRIRELRNSCWLLIVIAVAAGVVATDDGGAVQELCQRAGINGLVQKPVTLPALGAQLCRVLQDN

SEQ ID NO: 17698 - protein, 247 aa, Oryza sativa
  Clone ID: TF_OSC900071j.C1.p16.hg
MSKPSLPWKATRRSNAISYRIISTSRSYSVGRARRHRIHAFRFGKVAGCIAKIWLGKVGSDREIVRSGGFLGWCGNPIRSEDLKPDYILIFNKSDAANWQPLPSVLPEKRNISVQALPSSMAVAIEAPFHVLAVDDSLPDRKLIERLLKTSSFQVTTVDSGSKALEFLGLHDHEDSPISTQSDQQEVGVNLIITDYCMPGMTGYDLLKKIKESSYLRDIPVVIMSSDNIPSRINSIIKEQAPQLTSS

SEQ ID NO: 17699 - protein, 233 aa, Oryza sativa
  Clone ID: TF_OSC900087j.C1.p6.fg
MAYENYANTTVSVNLNLQYRFHNLAEFDDGKKSCRKRLDGHNRRRRKPQHDALNPRSFLPYHQANQFSVYPQTFPIADQNADALMRPLDRHPPFSISFSGTFREPKQFPFMQDGGSGLGAARHDLLRPFSSPEDGANITTTRSACNGVPHGLDPECALSLLSSSLHPSPAAGISSATAPPQFAPSSFSRIAASSQAVTTAFASDGGSVAGDHVLVPAVTYEDPSQAMPFSWQV

SEQ ID NO: 17700 - protein, 36 aa, Oryza sativa
  Clone ID: TF_OSC400461j.C1.p1.gm
RCRDYHRRHKVCEAHPKTPVVVVAGQEQRFCQQCSR

SEQ ID NO: 17701 - protein, 400 aa, Oryza sativa
  Clone ID: TF_OSC33170j.C1.p3.fg
MATGGSGGGGGGGGGGDDVHGLKFGKKIYFEQDAAASASAAAVESSSTSSGGGGKKGKGVAAAAAPPPPLPPRCQVEGCGVDLSGVKPYYCRHKVCYMHAKEPIVVVAGLEQRFCQQCSRCSVHMVRFHQLPEFDQEKKSCRRRLAGHNERRRKPTPGPLSSRYGRLAASFHEEPGRSRSFVVDFSYPRVPSSVRDAWPAIQPSDRMSGSIQWQGGHELHPHRSAVAGYSDHHAFSSHGGSAAGAPMLHHPAFELTSGGCLAGVATDSSCALSLLSTQPWDTTQSTSSHNRSPPMSSTASAFGGGNNPVSPSVMASNYMAASPGWNSSSRGHDGARNVHLPPPHGVVLNEVPPGSVHHGHFSGELELALQGGAPSNRPEAEHGSGSGAFSHSTNAMNWSL

SEQ ID NO: 17702 - protein, 472 aa, Oryza sativa
  Clone ID: TF_OSC33084j.C1.p13.fg
MDWDLKMPVSWDLAELEHNAVPNMAAAASAAEPGIAAVAASRGAPGRPECSVDLKLGGLGEFGAADALKEPAAAAKAPVSSAAAAASVAKVPPSTSTLKRPRGGGGGGGGQCPSCAVDGCKADLSKHRDYHRRHKVCEPHSKTPVVVVSGREMRFCQQCSRFHLLGEFDEAKRSCRKRLDGHNRRRRKPQADSMSSGSFMTSQQGTRFASFTPPRPEPSWPGIIKSEETPYYSHHHHPHPVMTSRQPHFVGSPSSATTAAFSPKEGRRFPFLHEGDQISFGGGGGAAAAATLEISVCQTTVVAPPPPESSSSNKMFSSDGLTTATTTTTTAHHHHHHHQVLDSDCALSLLSSPANSSSVDVSRMVQPSPAAAAGAEHHHHHQIPMAQPLVPNLQQQFGGSSPWFASSPAAAAVAGGGFACPSMDSEQQQQQQLNAVLVPGSNENEMNYHGMFHVGGEGSSDGTSPSLPFSWQ

SEQ ID NO: 17703 - protein, 326 aa, Oryza sativa
  Clone ID: TF_OSC900405j.C1.p10.fg
MDWMPPPKPTSPRSPPLLWDWADAAVPGSSSGEVSAAAAAAAAHPGRRRKEKRGRAEEGGGGGGEVRCQVEGCGVELVGVKDYHRKHRVCEAHSKFPRVVVAGQERRFCQQCSRFHALSEFDQKKRSCRRRLYDHNARRRKPQTDVFSYASARPPSSLLFDDNRQISFVWNKAPLSHVRPFAISPWESSSEVGTTDGHIYLDKSHISKSLPAFNTDIDELLPMKGPDASLTASKFDGAPDLQRALSLLSSSSCGLPDPVQQASRVIQFTGASQNNRELPPLNGGNSASASCANVQTIAQPAQLVRFTMNASSNACQSNFFGLNQIN

SEQ ID NO: 17704 - protein, 1117 aa, Oryza sativa
  Clone ID: TF_OSC416193j.C1.p1.fg
MPRRRRSAGTRGRPPRWRRRRLREEGTGTPGCGTGIAAPSPPSRPPMRCASTRGLSHHQQQQQQSPPAAAKAAEALRQGGGGSGGLNLQLGLREDAATPMDVSPAATTVSSSPSPPASSAPAQEPVVRPSKRVRSGSPGSASGGGGGGGGGGNSGGGGGSYPMCQVDDCRADLTNAKDYHRRHKVCEIHGKTTKALVGNQMQRFCQQCSRFHPLSEFDEGKRSCRRRLAGHNRRRRKTQPTDVASQLLLPGNQENAANRTQDIVNLITVIARLQGSNVGKLPSIPPIPDKDNLVQIISKINSINNGNSASKSPPSEAVDLNASHSQQQDSVQRTTNGFEKQTNGLDKQTNGFDKQADGFDKQAVPSTMDLLAVLSTALATSNPDSNTSQSQGSSDSSGNNKSKSQSTEPANVVNSHEKSIRVFSATRKNDALERSPEMYKQPDQETPPYLSLRLFGSTEEDVPCKMDTANKYLSSESSNPLDERSPSSSPPVTHKFFPIRSVDEDARIADYGEDIATVEVSTSRAWRAPPLELFKDSERPIENGSPPNPAYQSCYTSTSCSDHSPSTSNSDGQDRTGRIIFKLFGKEPSTIPGNLRGEIVNWLKHSPNEMEGYIRPGCLVLSMYLSMPAIAWDELEENLLQRVNTLVQGSDLDFWRKGRFLVRTDAQLVSYKDGATRLSKSWRTWNTPELTFVSPIAVVGGRKTSLILKGRNLTIPGTQIHCTSTGKYISKEVLCSAYPGTIYDDSGVETFDLPGEPHLILGRYFIEVENRFRGNSFPVIIANSSVCQELRSLEAELEGSQFVDGSSDDQAHDARRLKPKDEVLHFLNELGWLFQKAAASTSAEKSDSSGLDLMYFSTARFRYLLLFSSERDWCSLTKTLLEILAKRSLASDELSQETLEMLSEIHLLNRAVKRKSSHMARLLVQFVVVCPDDSKLYPFLPNVAGPGGLTPLHLAASIEDAVDIVDALTDDPQQIGLSCWHSALDDDGQSPETYAKLRNNNAYNELVAQKLVDRKNNQVTIMVGKEEIHMDQSGNVGEKNKSAIQALQIRSCNQCAILDAGLLRRPMHSRGLLARPYIHSMLAIAAVCVCVCVFMRALLRFNSGRSFKWERLDFGTI

SEQ ID NO: 17705 - protein, 458 aa, Oryza sativa
  Clone ID: TF_OSC422778j.C1.p2.fg
MAVPAAAVAADVVDFGYAAPMPPPYVGFDPAGMGGERQLFQHGGACHGLYDGGLDFSAAAAFQEAATLGVGLPGGNLLQSLAPPAAAAATPSSLQMPMMMSLPGLPATAADVYPFGGGGFVKREDGPVLDVVGGGGGGRIGLNLGRRTYFSPADVLAVDRLLLRSRLGGMGMEMGMGMGVLGLGLAAAAHHHQPPRCQAEGCKADLSAAKHYHRRHKVCDFHAKAAAVLAAGKQQRFCQQCSRFHVLAEFDEAKRSCRKRLTEHNRRRRKPTAGGQSSKDSPPPPPSKKGTDASIASSYTSCDHHKAAASTTTASGVSCLQELADHHDVGGGHQAAMAAAPPPTLSLAALPPQEEDDEDEDGGLGNVLMMQQHHQRRRLQHDGDGDDDVAAAAAHHHLMRSLARQQQQHRHSSGCSNNNDGDDDDHNNNNNILSCSSASDQQNSSNNNNMHFFEVDFI

SEQ ID NO: 17706 - protein, 320 aa, Oryza sativa
  Clone ID: TF_OSC900393j.C1.p8.fg
MPMPGDVYPALGIVKREGGGGGQDAAAGRIGLNLGRRTYFSPGDMLAVDRLLMRSRLGGVFGLGFGGAHHQPPRCQAEGCKADLSGAKHYHRRHKVCEYHAKASVVAASGKQQRFCQQCSRFHVLTEFDEAKRSCRKRLAEHNRRRRKPAAAATTAVAAAKDAAAAPVAAGKKPSGGAATSYTGDNKNVVSMSAAKSPISSNTSVISCLPEQGKHAAAAARPTALTLGGAPPHESSAPQIGAMLHHHHHHQQDHMQVSSLVHINGGGGGGSNNILSCSSVCSSALPSTATNGEVSDQNNDNSHNNGGNNNNMHLFEVDFM

SEQ ID NO: 17707 - protein, 341 aa, Oryza sativa
  Clone ID: TF_OSC404997j.C1.p1.gm
DPPCAVDGCKEDLSKCRDYHRRHKVCEAHSKTPLVVVSGREMRFCQQCSRFHLLQEFDEAKRSCRKRLDGHNRRRRKPQPDPMNSASYLASQQGARFSPFATPRPEASWTGMIKTEESPYYTHHQIPLGISSRQQHFVGSTSDGGRRFPFLQEGEISFGTGAGAGGVPMDQAAAAAAASVCQPLLKTVAPPPPPHGGGGSGGGKMFSDGGLTQVLDSDCALSLLSAPANSTAIDVGGGRVVVQPTEHIPMAQPLISGLQFGGGGGSSAWFAARPHHQAATGAAATAVVVSTAGFSCPVVESEQLNTVLSSNDNEMNYNGMFHVGGEGSSDGTSSSLPFSWQ

SEQ ID NO: 17708 - protein, 195 aa, Oryza sativa
  Clone ID: TF_OSC422154j.C1.p2.fg
MAALAAAAAAGDGGAALPSPMEEDKKPRLVASSLAPVAGGGGGGSSSSAAVAAGASSSSSSSSVAAAARRGAGRAGGGAPSGGGGGPRCQVERCGVDLSEAGRYNRRHKVCQTHSKEPVVLVAGLRQRFCQQCSRFHELTEFDDAKRSCRRRLAGHNERRRKSAADTAHGENCRHADQDAGRSHQGTGNPPFQIR

SEQ ID NO: 17709 - protein, 337 aa, Oryza sativa
  Clone ID: TF_OSC900087j.C1.p1.fg
MDAGEPYTSDSLVLATAASQWSPLHLSLLLHQQQPRPVRSLSSPPGDTAPLWPRHRHQGNQQPGSFSAIRMGNALATVLGTATKLFLSKGWDVIFHYLKKMDAGEPKRATTEGNRQPGSRGRSSAGRAARGKEIGGGGGEGWGRRRGGGQGGDQHGGGGRDLAGGADDDDTRHRSARWLRDEGIDNDDAGAARPDGSETRCQQRRHARSRLAVERGVRDERPPPPLKRLSVAGPSSSSSSPDAAASAAAAAAAALHDFSVRARPAAAAPATRRARGGSGGGGGGGGGAEACSVDGCRSDLSRCRDYHRRHKVCEAHAKTPVVVVAGQEQRFCQQCSR

SEQ ID NO: 17710 - protein, 469 aa, Oryza sativa
  Clone ID: TF_OSC406405j.C1.p2.fg
MGSFGMDWNQKSSVLWDWENMPPIGNSANENPKNVMLAESKLAGVGVDIGHESGHSSGGTFSSSSEIGYGSSKSSISASIDSPSKVGNTIELNFASAEEHDKNMDKGKSKVDDTGTSRSPVVAANRVEPLIGLKLGKRTYFEDVCGGQNVKSSPSGVSVATPSPGLAKKVKVAQQNTQNPHCQVEGCNVDLSSAKPYHRKHRVCEPHSKTLKVIVAGLERRFCQQCSRFHGLAEFDQKKRSCRRRLHDHNARRRKPQPEAISLSSSRLSTLLYGDARQQASFLFGQAPYGQMGSCASSWDNPVPGGFKFTATKAPWSRPTIAAGVDGTHVSNQQASGNVLPHGAHHSFDGLMAFKETNAKVLNQGMEASAVASGSARGPDFEHALSLLSIDSVGAANLQPGSQIHPGVTAIAGTSNPVMMPSPAIWQGGLSLDQQAQFQAFDRLGNDDDEDHLQLPKPSYDNSHYDQMN

SEQ ID NO: 17711 - protein, 513 aa, Oryza sativa
  Clone ID: TF_OSC400657j.C1.p2.fg
MASFGMNWNQKSPVFWDWENPAPFGPNTMENPKSIPHPEPRGVVVAAANHGSTNSSGGTFTSSSELANGSSKSSLSASFDSSSKLGNSLEFRFASVKGHGKNMCKDGEAGRVEDSGTSPAVAVSHGEPVIGLKLGKRTYFENVCGGQNVKSSSAASGVTCPSTVVKKMKVSQQSTQSSYCQVEGCKVDLSSAREYHRKHKVCEAHSKAPKVIVSGLERRFCQQCSRFHGLAEFDQKKKSCRRRLSDHNARRRKPQQEAISFGSSRLATMFYDARQQTDIYFGQSPFGQVRSNAISSCDNLGGFKFTEAKLPWMKPMKTIGLEDLNFSTLQMPGNVVSHTVHHHDFDGLIPFKGNTPKVLNQACFMDKLEPQIVSQKNKNKNREARSTNYLLQAFWTSCLGVDPACAVVSSNSNGAPDLRRALSLLSSDSWGPADVQAGSQVHPGGVMPPLAVAAATVTAPTNPVSVMHALHPSTGGGGFWQDGDDPPPLDHASQAQAFMHPGNGSSSGYGHLH

SEQ ID NO: 17712 - protein, 343 aa, Oryza sativa
  Clone ID: TF_OSC401261j.C1.p16.fg
MECNPVSSTTSSSLLWDWDATASAEPPPPPGKRGGRDSSSASASAKRGRSAAAAGDAAAVAAEAPRCQVEGCGLELGGYKEYYRKHRVCEPHTKCLRVVVAGQDRRFCQQCSRFHAPSEFDQEKRSCRRRLSDHNARRRKPQTDVFAFGSGTLPRSLFDDRQQISFAWDNNAPLNHANTTSSSSWTSDLQLSQVMDISKRSRKAGADSANIRLSNALPTLCHDTNELLPIKGADASETASKLDGALDVQRALSLLSASSRGLTDPGHQTSSIIQFTNSNQNSTLPSVPSEGNSNVPFWVDGQHQAVEPQVFQFTMDTGNTVFPDLERIKPSYESSMFGLNQIH

SEQ ID NO: 17713 - protein, 179 aa, Oryza sativa
  Clone ID: TF_OSC222j.C1.p2.fg
MEAARVGAQSRHLYGGGLGEPDMDRRDKRLFGWDLNDWRWDSDRFVATPVPAAEASGLALNSSPSSSEEAGAASVRNVNARGDSDKRKRVVVIDDDDVEDDELVENGGGSLSLRIGGDAVAHGAGVGGGADEEDRNGKKIRVQGGSPSGPACQVEGCTADLTGVRDYHRRHKVEYAMQV

SEQ ID NO: 17714 - protein, 360 aa, Oryza sativa
  Clone ID: TF_OSC400235j.C1.p44.fg
MEGNGCGGSGATPRGVVGMHWAPVVTSPPSPQPPFLPPAPCRPDVQMQQQGGLTCLKLGKRPCFWGGDGAGQVAQGSGGGGGGGGGGSADQGKRKEKAATAVPVVPRCQVEGCDITLQGVKEYHRRHKVCEVHAKAPRVVVHGTEQRFCQQCSRFHVLAEFDDAKKSCRRRLAGHNERRRRSNASEAMARGSAHPHGMPVLGHGFPPYGLPTSSAGALSLLSSARATGPWLMPTPDISARSSAALDELIAENRAALLSWQFFSDRQPPPAGRPTGRSPGSETAGGWHAHLQARPPPPGAGGQHENQSGHVTLDLMQATTAAGGSGAPFRPVPARPPKEGGDAGCTSDAWTPSPMEGARVV

SEQ ID NO: 17715 - protein, 287 aa, Oryza sativa
  Clone ID: TF_OSC33170j.C1.p5.gm
MATGGSGGGGGGGGGGDDVHGLKFGKKIYFEQDAAASASAAAVESSSTSSGGGGKKGKGVAAAAAPPPPLPPRCQVEGCGVDLSGVKPYYCRHKVCYMHAKEPIVVVAGLEQRFCQQCSSGKGAMNSILTAAQLRDTVITMRSAAMVAQRLGHQCSTTQPLSSPQPWDTTQSTSSHNRSPPMSSTASAFGGGNNPVSPSVMASNYMAASPGWNSSSRGHDGARNVHLPPPHGVVLNEVPPGSVHHGHFSGELELALQGGAPSNRPEAEHGSGSGAFSHSTNAMNWSL

SEQ ID NO: 17716 - protein, 753 aa, Oryza sativa
  Clone ID: TF_OSC401478j.C1.p49.fg
MSSGLKKKGLEWDLNDWRWDSNLFLATPSNASPSKCSRRELGRAEGEIDFGVVDKRRRVSPEDDDGEECINAATTNGDDGQISGQRGRSSEDEMPRQGTCSSSGPCCQVDGCTVNLSSARDYNKRHKFYGNYLTCLVRFHFLQEFDEGKKSCRSRLAQHNRRRRKVQVQAGVDVNSLHENHSLSNTLLLLLKQLSGLDSSGPSEQINGPNYLTNLVKNLAALAGTQRNQDMLKNANSAAIASHTGNYVAKGNSLHDSRPHIPVGTESTAEEPTVERRVQNFDLNDAYVEGDENRTDKIVFKLFGKEPNDFPSDLRAQILSWLSNCPSDIESYIRPGCIILTIYMRLPNWMWDKLAADPAHWIQKLISLSTDTLWRTGWMYARVQDYLTLSCNGNLMLASPWQPAIGNKHQILFITPIAVACSSTANFSVKGLNIAQPTTKLKILIKAAFHFPLLLLKKMSHIRATSETPKDCTEGFPAARFRWLLSFAVDREFCAVIKKLLDTLFQGGVDLDVQSTVEFVLKQDLVFVAVNKRSKPLIDFLLTYTTSSAPMDGTESAAPAQFLFTPDIAGPSDITPLHIAATYSDTAGVLDALTDDPQQLGIKAWKNARDATGLTPEDYARKRGHESYIEMVQNKIDSRLPKAHVSVTISSTTSTTDFTEKHASQSKTTDQTAFDVEKGQQISTKPPLSCRQCLPELAYRHHLNRFLSTRPAVLSLVAIAAVCVCVGLIMQGPPHIGGMRGPFRWNSLRSGPK

SEQ ID NO: 17717 - protein, 806 aa, Oryza sativa
  Clone ID: TF_OSC418761j.C1.p28.gm
MALSTAQTGESMHSSTFASRYVRTALPRFRMPEKSIPKDAAYQIINDELMLDGNPRLNLASFVTTWMEPECDKLMMAAINKNYVDMDEYPVTTELQNRCVNMIAHLFNAPIGDDETAVGVGTVGSSEAIMLAGLAFKRKWQNRMKAEGKPHDKPNIVTGANVQVCWEKFARYFEVELKEVKLTQGYYVMNPEKAVEMVDENTICVAAILGSTLNGEFEDVKMLNDLLTAKNAETGWNTPIHVDAASGGFIAPFIYPELEWDFRLPLVKSINVSGHKYGLVYAGVGWVIWRNKEDLPDELIFHINYLGADQPTFTLNFSKGSNQIIAQYYQLIRLGFEGYKDIMQNCRDNATVLREGIEKTGHFDVVSKDSGVPLVAFSLKDSSRYTVFEVAESLRRFGWIVPAYTMPADAEHVAVMRVVIREDFSRGLAERLITDLTKTVADMDAHAVKKAAAEPAKKTVREIEKEVTTYWRSFVARKKSSLWEDEGNGGSGGPRCCSSSSPSQLPVRSSTARESLDHISINCTGGVGATSGCRSVHSRRSAPTRRARLLVPAQPRLCLDSPDWRQSAAGREWEQERDDGDDRRGSWLASESWWFVGDDATAAAATRVRREKRRACAGAGGAGGDGAARAPPSSSSASTRAAASTPGGGMRGSRMHYLRYYDAAFDAVDAAGLLETRPARAKVEEMFAREIRNAVAFEGAERFERHESFAGRRRRMEDGGGLQWGSKAEEKCLLPSSSLARRPRRQPSPPVSLRPDGSLPPAVAAAPLVLPLPRASAAEPPRCAPMPPTAAPLVLPPPLPTEKERI

SEQ ID NO: 17718 - protein, 255 aa, Oryza sativa
  Clone ID: TF_OSC22910j.C1.p3.gm
MITFGLNSRPHPEFRNDLRPSSSSLAAGESESPKAVERLEREGCTRSGSSRRQPRRGAAAALAVASAPSLASCCRRPSIRKLLSLPLHARPVPPPGSGMRQPLRPSPAALHPRGAAVAPTRSPGAAVAGAEMRQQATGGWGGGWRGAPPARPRAPAAAAAANLSRTAMALTKEAERLDVPFQFNPVVSRLDALDVESLRVKTGEALAICFSLQLHCLLASDDDATAGAGGDKERRSPESGLSPSKSRADAFLGAL

SEQ ID NO: 17719 - protein, 216 aa, Oryza sativa
  Clone ID: TF_OSC412551j.C1.p9.gm
MITFGLNSRPHPEFRNDLRPSSSSLAAGESESPKAVERLEREGCTRSGSSRRQPRRGSGMRQPLRPSPAALHPRGAAVAPTRSPGAAVAGAEMRQQATGGWGGGWRGAPPARPRAPAAAAAANLSRTAMALTKEAERLDVPFQFNPVVSRLDALDVESLRVKTGEALAICFSLQLHCLLASDDDATAGAGGDKERRSPESGLSPSKSRADAFLGAL

SEQ ID NO: 17720 - protein, 137 aa, Oryza sativa
  Clone ID: TF_OSC407154j.C1.p12.fg
MGAGRRRRQKMMPPPLSNFDARNGVPTPGQAEQETMELVRMLTACADSVSAGNHEAAIYYLARLCEMASLAGPMPIHRVAAYFIEVLTLRVVRMWPHMFNISPPRELTNDAFSGDDDAMALRILNTITPILLLGKHS

SEQ ID NO: 17721 - protein, 129 aa, Oryza sativa
  Clone ID: TF_OSC1414j.C1.p5.gm
GEIADIVSREGSSRVERHEQMPRWVERLRRGGMTQLPLGATGLWQAAMQLREFSGAGFGVQENGGFLTLTWHSQRLYSASAWRATAGKKMTMMASGAADAMEESQNSNTNGGGGGSSGGGHGALNQIMQ

SEQ ID NO: 17722 - protein, 542 aa, Oryza sativa
  Clone ID: TF_OSC9377j.C1.p2.gm
MAVEAMAWASKLLDGGGRRHSDGFVKPVVGVGDNADGDCDSEDGGNVGGGEGVGCKVGMMTARCGAVFGARRLAGEGRRCRGPTCRQSLCGGGASVHQSWLRRGNLVGSGGTGGGAAAVARQQLVLAGEGGDEAGVSCLFAPFQHHEPLGEHARGASRRNGEPDVPVARCEAHIDGGLPQGVQAVHGGLLRQEGERHLLIFSNKTIYNAVAGKRKLHIVDYGLSYGFQWPALFFLLGTREGGPPEETVRREDLHLDREEEEVLVVNCLHGLNNLQDESVVMDRDSPSPRDVVLNNNRDMRPHVFVQCVVNGAYGAPFKEASRVRRLIGLGISARCCLAGKQTSRSAPSSSPPRPSLHLHLHLRRRPPPSSSRHAADDAALHPLSRRRDAYVERMGEGEVVDGIWPDGGGERRPAAAVLALHRSARHRSACHSQTAAALARCQPPASAGEKRRATEGGLRARVEADEQDSTSAARRGRAGEAGWRSRGGAVAGELLALAGLHRRGEVAIHRLRRASRGEAAGRSSAEERPHGKGSWRGVARRR

SEQ ID NO: 17723 - protein, 240 aa, Oryza sativa
  Clone ID: TF_OSC414562j.C1.p7.gm
MPSPLVLLLQCFGDVALTDLLVGLALLLSCLQSRRRWLDARSKQQPAPLESERFEVGMDSVLLGAYELGFAALYPPLDSGLVGPTAMALMKEAERLDVPFQFNPVVSRLDALDVESLRVKTGEESGLSPSKSRADASPKVMVVTKQEASHNAALLTERFVEALNYYAALFDGLEEWHERLERWVGRLEGAGFGRIPLSYYALLQARRVAQGLGCDGFKVREEKGNLFLFFVSTWRGRRFD

SEQ ID NO: 17724 - protein, 165 aa, Oryza sativa
  unsure (1)..(165): unsure at all Xaa locations
  Clone ID: TF_OSC402543j.C1.p5.gp
VIDSPRDIVLSNIRKMQPHVFIHAIVNGSFSAPFFVTRFREALFFYSALFDVLDATTPRESEQRLLIEQNIFGRAALNVIACEGIDRVERPETYKQWQVRNQRAGFKQLPLNPEIVQVVRNKVKDCYHKDFVIDIDHQWLLQGWKGRILYAISTWTPNDALSYFX

SEQ ID NO: 17725 - protein, 190 aa, Oryza sativa
  unsure (1)..(190): unsure at all Xaa locations
  Clone ID: TF_OSC416737j.C1.p13.gp
CRAGEIEASKLGCEAGEALAVNLAFALSHVPDESVSPANPRDEILRRVRALGPQVVALVEQELNSNTAPLTTRFTDACAHYGAILESLDATIPRESAERARAEAALGGRAANAVAREGADRLERCEVFGKWRSRFGMAGFRPVALGPGIADQVLARQGPVAAGFAVKAENGVLRLGWMGRVVTVASAWRX

SEQ ID NO: 17726 - protein, 245 aa, Oryza sativa
  Clone ID: TF_OSC900243j.C1.p1.fg
MIRITVPSVRPAVPPLLAVSSSELGARLAIFAKSKGVQLEFNVVESATTTSPKKTSTTLCQELASVLSDPPSLGLRDGEAVVVNCQSWLRHVAPDTRDLFLDTVRALNPCLLTVTDEDADLGSPSLASRMAGCFDFHWILLDALDMSAPKDSPRRLEQEAAVGRKIESVIGEEDGAERSEPGARLAERMSRKGFAGVVFDEEAAAEVRRLLSEHATGWGVKREDDMLVLTWKGHAAVFTGAWTPN

SEQ ID NO: 17727 - protein, 493 aa, Oryza sativa
  Clone ID: TF_OSC401329j.C1.p80.fg
MDTFPFQWPMDPAASSGLDAGFLPPPAAVAPDDGVGYYDPPAGADVDAAALPEFAAAFPPCAPDAAAAVLAMRREEEEVAGIRLVHLLMSCAGAIEAGDHALASAQLADSHAALAAVSAASGIGRVAVHFTTALSRRLFPSPVAPPTTDAEHAFLYHHFYEACPYLKFAHFTANQAILEAFHGCDHVHVIDFSLMQGLQWPALIQALALRPGGPPFLRITGIGPPSPTGRDELRDVGLRLADLARSVRVRFSFRGVAANSLDEVRPWMLQIAPGEAVAFNSVLQLHRLLGDPADQAPIDAVLDCVASVRPKIFTVIEQEADHNKTGFLDRFTEALFYYSAVFDSLDAASASGGAGNAMAEAYLQREICDIVCGEGAARRERHEPLSRWRDRLTRAGLSAVPLGSNALRQARMLVGLFSGEGHSVEEADGCLTLGWHGRPLFSASAWEAAGDGGGDNNNNSNSNVSGSSGSDSNNSGSSNGKSSGARDGSSVCL

SEQ ID NO: 17728 - protein, 107 aa, Oryza sativa
  Clone ID: TF_OSC20530j.C1.p4.gp
DMLDATTPRESGLRLALEQNVLGPYALNAIACEGADLVERPEKYRQWQARNHRAGMQQLKLRPDIVDTIREEVNKYHHKDFLLGEDGQWLLQGWMGRVLFAHSAWVP

SEQ ID NO: 17729 - protein, 575 aa, Oryza sativa
  Clone ID: TF_OSC100759j.C1.p3.fg
MEVTMEDVAGDFEFSGCGSTTTTSSASSLDDGTGMCYAWGELSPVADWANFCCSDDDGGHDLHGLIESMLCDDTLVGVDDDGQAGLHHADMFRDDLYCYGNGSNPSSTTTTNPGSPVFDDPTQGCPEKGLRLLHLLMAAAEALSGPHKSRELARVILVRLKEMVSHTASANAAASNMERLAAHFTDALQGLLDGSHPVGGSGRQAAAAASHHHAGDVLTAFQMLQDMSPYMKFGHFTANQAILEAVSGDRRVHIVDYDIAEGIQWASLMQAMTSRADGVPAPHLRITAVSRSGGGGARAVQEAGRRLSAFAASIGQPFSFGQCRLDSDERFRPATVRMVKGEALVANCVLHQAAATTTIRRPTGSVASFLSGMAALGAKLVTVVEEEGEAEKDDDGDSAGDAAAGGFVRQFMEELHRYSAVWDSLEAGFPTQSRVRGLVERVILAPNIAGAVSRAYRGVDGEGRCGWGQWMRGSGFTAVPLSCFNHSQARLLLGLFNDGYTVEETGPNKIVLGWKARRLMSASVWAPPPLPVPSSPPEGVCQPVVGMAPVATGGFARTEFDYIDSFLVEPAYALV

SEQ ID NO: 17730 - protein, 583 aa, Oryza sativa
  Clone ID: TF_OSC20525j.C1.p3.gm
MAAAPKPEELVVAIEQPFSPSLFLDLPPTPHHDDDPNNVNDDLLLPFISRILMEDDIDDKFFYQFPDHPALLQAQQSYAQILHAPATSSSSDDTTINNNTTNSTSVPDTLAMPDHDADTQSAPDDMEMLYMAFLKGREEATKFLPTNNTLFSGFKAEPVLDIQPTFTFGPSGGGRGRKNRHAEEDDLETETSRSSKLMAPEHDDAAAADEIFDEIILNGYQMIIKGIDELRVAMGSQSQADKNGRRASRAKTAVVDLHTLLIHCAQAVATGDWRSATELLKQIKQNSSARGDATQRMACCFAEGLEARLAGTGSQMYQSLVAKRTSTVDFLKAYKLFTAACCIKKVSVIFSNKTIYNAVAGRRKLHIVDYGLSYGFQWPALFFLLGAREGGPPEVRMTGIDVPQPGFRPADQIEETGRRLSICARQFGVPFKFRAIAAKWETVRREDLHLDPEEEEEEVLVVNCLHGLNTLQDESVVVDSPSPRDVVLDNIRDMRPHVFVQCVVNGAYGAPFFVTRFREALFFYSAHFDMWTPPSRATTTIGCSSSGTCWGDAPSTSSPARAQTELIGRRRTSSGRCATIAPG

SEQ ID NO: 17731 - protein, 585 aa, Oryza sativa
  Clone ID: TF_OSC1203j.C1.p6.fg
MGPAAPPSEAAAAADDVVLPYISRILMEEDIDDDMFFCLYPDHPALLEAQQPFAQILSSSSGIAGEVNSAPMEDSAALMMQGSGNGRGRKGSKHGGDELEAEVGRASKLMATPEEEDDDDDGVGEMLEKMMLNGDEEMNAPRVPAEKNGGKAARRKRRQGKGEVVDLRELLMSCAQAVASGNRRSAGELLEQIKRHSSPTGDATERLAHYFADGLEARLAGAASLEHRLLASAEERASAMELLEAYQVFMAACCFKWVAFTFANMAILRAAEGRSKVHIVDYGGQYHGLQWPSLLQRLAEREGGPPEVRMTLVGHPQPGFRPARRLERTGRRLSNCARAFGLPFKFRAVAAARWETVTAEDVVGVDHDEAAVVVNDVLSLGTLMDESGVFDDPSPRDTVLGSIRDMRPAVFVQAVVNGAHGAPFFPTRFREALFFFSALFDMLDATTPEEGSHLRAVLERDVLRRAAVGVIAGEGAERVERPETYRRWQARNRRAGLRQVAVEADVVEAVRRRVRRRHHEEFVIEEDAGWLLQGWKGRILYAHSAWVVAEDATSVGELTVVTTSLVAIILSAASAQDELPLSTNE

SEQ ID NO: 17732 - protein, 492 aa, Oryza sativa
  Clone ID: TF_OSC400909j.C1.p3.fg
MPYMVTADGHSPSSADNSCSDVAKDSPLVSNVSQQNSQSISDNQSSELEVEFDEDDIRMKLQELEHALLDDSDDILYEISQAGSINDEWADPMKNVILPNSPKESESSISCAGSNNGEPRTPKQLLFDCAMALSDYNVDEAQAIITDLRQMVSIQGDPSQRIAAYLVEGLAARIVASGKGIYKALSCKEPPTLYQLSAMQILFEICPCFRFGFMAANYAILEACKGEDRVHIIDFDINQGSQYITLIQFLKNNANKPRHLRITGVDDPETVQRTVGGLKVIGQRLEKLAEDCGISFEFRAVGANIGDVTPAMLDCCPGEALVVNFAFQLHHLPDESVSIMNERDQLLRMVKGLQPKLVTLVEQDANTNTAPFQTRFREVYDYYAALFDSLDATLPRESPDRMNVERQCLAREIVNILACEGPDRVERYEVAGKWRARMTMAGFTPCPFSSNVISGIRSLLKSYCDRYKFEEDHGGLHFGWGEKTLIVSSAWQ

SEQ ID NO: 17733 - protein, 987 aa, Oryza sativa
  Clone ID: TF_OSC900004j.C1.p19.fg
MAAHTVTDPLEELWNHTMSMDKTHLMCFYPSKITMGGVWTGDNPLDFSIPLLLFQILLITSTTRAATLLLCPVRLPTYISQILAGFLLGPSVLGHLPHFSNLVFPVRSLFVLESMALLGLVYYTFIVGVEIEVSAITRAGIRSFGFAIGCTLPPFLVGALTGYVALSTDDKHKGDTFLNKLSFPIFLGSTFSSTAFAVLARNIAELKLAGTDVGQLTLSASLINDTFAWTGLTVATVLGHSRCTITQTTWTLTSGVVIFGASYLLLRPMLLRLARRAAEGEAVGEDRECWILIGVMVAALVADAGGTHAIFGAFVFGLAVPNGPVGVALVEKVEDFVRPPHRHRKITNMHSAVLLMVAAMVAAVLKVVAAIGVADHQEQHHLAAPMVRKRPASDMDLPPPRRHVTGDLSDVTAAAAGAPTLSASAQLPALPTQLPAFHHTDMDLAAPAPPAPQQVAAGEGGPPSTAWVDGIIRDIIASSGAAVSVAQLIHNVREIIRPCNPDLASILELRLRSLLNSDPAPPPPPPSHPALLPPDATAPPPPPTSVAALPPPPPAQPDKRRREPQCQEQEPNQPQSPKPPTAEETAAAAAAAAAAAAAAAKERKEEQRRKQRDEEGLHLLTLLLQCAESVNADNLDEAHRALLEIAELATPFGTSTQRVAAYFAEAMSARLVSSCLGLYAPLPSPSPAGARVHGRVAAAFQVFNGISPFVKFSHFTANQAIQEAFEREERVHIIDLDIMQGLQWPGLFHILASRPGGPPRVRLTGLGASMEALEATGKRLSDFADTLGLPFEFCPVADKAGNLDPEKLGVTRREAVAVHWLRHSLYDVTGSDSNTLWLIQRLAPKVVTMVEQDLSHSGSFLARFVEAIHYYSALFDSLDASYSEDSPERHVVEQQLLSREIRNVLAVGGPARTGDVKFGSWREKLAQSGFRVSSLAGSAAAQAALLLGMFPSDGYTLIEENGALKLGWKDLCLLTASAWRPIQASGR

SEQ ID NO: 17734 - protein, 671 aa, Oryza sativa
  unsure (1)..(671): unsure at all Xaa locations
  Clone ID: TF_OSC12505j.C1.p1.np
LTPPPPPPPPHPLHHLHPPPPAPVPPLAPPRPVVLRSPSQRERRATARAKPARGRAAAPPQPRGGDGGSKDATAVAGAWRGGNGESEDAAAIAHAAPSFLVPQPQLGQPPPPPLLQNPASSPPPAVPDTPSPDKEKTAHSSTDGVRRQFASAGSATATDRSLVSEGEVLSVPSSPALFALARPLLCSSLPPSNDPCCPSTHPRRLVCVQLSPTASCCCRPDPTXRPSPSRDREKNRVLLCSRKKNRSRPLIPSAWAPPATTREQLPATRQTAQAASPSRARQRTGEEEEAAAETRGLRLLSLLLRCAEAVAMDQLPEARDLLPEIAELASPFGSSPERVAAYFGDALCARVLSSYLGAYSPLALRPLAAAQSRRISGAFQAYNALSPLVKFSHFTANQAIFQALDGEDRVHVIDLDIMQGLQWPGLFHILASRPTKPRSLRITGLGASLDVLEATGRRLADFAASLGLPFEFRPIEGKIGHVADAAALLGPRREATVVHWMHHCLYDVTGSDAGTVRLLKSLRPKLITIVEQDLGHSGDFLGRFVEALHYYSALFDALGDGAGAAEEEAAERHAVERQLLGAEIRNIVAVGGPKRTGEVRVERWGDELRRAGFRPVTLAGSPAAQARLLLGMYPWKGYTLVEEDGCLKLGWKDLSLLTASSWEPTDGDADA

SEQ ID NO: 17735 - protein, 108 aa, Oryza sativa
  Clone ID: TF_OSC20530j.C1.p8.gp
DMLDATTPRDSGLRLALEQNVLGPYALNAIACEGADLVERPEKYKQWQARNHRAGMQQLKLRPDIVDTIRDEVNKYHHKDFLLGEDGQWLLQGWMGRILFAHSAWVRQ

SEQ ID NO: 17736 - protein, 450 aa, Oryza sativa
  Clone ID: TF_OSC415629j.C1.p8.gm
MEDVDERVDLHQGEAALQAAEKPFYDILGQSWEATEKPFYDILGKAYPSSSKETAINGDSQADYPDNGSSSYHEQACSGSFVSDLLGSQDAHSITTDWSSEFDRLALQFRRGVEEAKRFIPNIEKLVDDPEKNGLYACKQTTETTEQKGKHENKIRNHPHDPHVEHIELMEARNSKHMAISTSETIRDEMFDSILLCNRQLPGEVANLRGMMAKEASDNPKKFQSKGYGKGQRKPHSSKKKQKEAIDLSVLLIQCAQAIASNNHPFASELLRKIRHHALPDGDGSQRLANCFADGLEARLAGTGSQIDLQMKKGVHPSLGSQGIASRWETVQIEDLNIDKDEVFILGVVNGLYSSPFFLTRFREVLFHYSSLFDMLDNNVPRNHEARILVEKDLFGNDALNAVACEGAERIERPESYKQWQMRILRAGFKQRPGWKGRIIQALSTWKVET

SEQ ID NO: 17737 - protein, 731 aa, Oryza sativa
  Clone ID: TF_OSC101577j.C1.p23.fg
MGLDNNFGELSGMFCGLSYDGYTDHGSQSDYFRFADPQPAIVPQMDAGPSSAASSTASRAAVSSGTDNPEDWEFISDESLNYISRMLMEEDIDEKVSMYQEESAALRAAAKPFYDILGHKFPPSPDRQLVAWPLDSPSESSTSSYPHSLASSVTSSNISGAVDSSQRRYVGHSEYRSLSGHSSQPPVGPSSDVRNAMETLEDPLISNGRIPEYLFESFPTWDFRRGVDEAQKFLPGSDKVVIDLEAGGVAKRQEAGKAISLNVSKAEVLKVKKNRQSEDLDVMEGRNSKQSAFCSDEPDWIEMFDVLLRQTEKKATDLRKMMRFEASKNSQVAQPKGPSGTRSRGRKPTKKDVVDLRTLLIHCAQAVAADDRRTANELLKQIRQHAKPNGDGSQRLAYCFADGLEARLAGTGSQLYHKLVAKRTTASDMLKAYHLYLAACPFKRLSHFLSNQTILSLTKNASKVHIIDFGIYFGFQWPCLIRRLFKREGGPPKLRITGIDVPQPGFRPTERIEETGQRLAEYAEKIGVPFEYQGIASKWETICVEDLNIKKDEVVIVNCLYRFRNLIDETVAIDSPRNRVLNTIRQVNPAIFIHGIVNGSYSVPFFITRFREALFHFSALFDMLETTVPRDDAQRALIERDLFGREALNVIACEGSDRVERPETYKQWQVRNLRAGFVQSPLNQDIVLKAKDKVKDIYHKDFVIDEDSEWLLQGWKGRIIYAISTWKPNNN

SEQ ID NO: 17738 - protein, 495 aa, Oryza sativa
  Clone ID: TF_OSC401401j.C1.p8.gm
MSVWEGGTDIGRSSQQAGSSASGQNASSSSFTLTSPGLRPPTHAASTPPPPPWLDDADHHHDNAFLHWVINDHHHPLLDLDDVDLDYAKPAPFFFADRGLHHHHPASSSFPNPKPTADDNTSTVEQLVQAAKLTEAGDVLAARHILARPAINYRLPASAAPPLLRSALYFKDALRRALISDDDSSSSSTPPPPLHEPHPHDLLLKLTSYKSFSDLSPLLHFAHFTCVQAVLDELAPSASCIHLLDFDIGVGEQWASLMHDLAHRHPGVALKVTALNVTASSSSHHPLQLQLIHDTLSTFAADLSVPFRFAAFNLDATDLTPLLAVAAATDAIAVHLPVGSVHATAVPSVLHLVRRLGAKLVVSVDRGCDRGELPFAAHLLQALRSTVSLLESLDAMGTDSDVAAKIERFWVQPKIQECVRAAVGVGGDKTAASAWRATLASAGFVPVQVSSMAEAQAESLLKKLPVRGFRLERRAGSLFLHWQRGELASVSAWRC

SEQ ID NO: 17739 - protein, 602 aa, Oryza sativa
  Clone ID: TF_OSC401196j.C1.p71.np
MQDALLGRRCQRRAGAGSQRRWDSGRARIGSPLRARDFETAAGSGDGGERRRRGRGAAALERWRCWEWQQPDSLAAAASALDELDVSSKTLLGLTSPCTTGGLTTEWRIGVLYMLPMINIALMSSSSCHPHNPTTLPLPEPDSSKSPEPTSVLYNRSSPSTSLGSCSSKPPEDPPPPIAADDDCDWDAVVDMHMHMLAPAPAPDSSFLRWIMDTGYADADTFPDHPSFDSDLLQLPMPMPSDHPPQPLVDDLLDAARLLDAGDSTSAREILARLNHRLPSLPSPPGHAHPPLLRAAALLRDALLPPTALPVSSTPLDVPLKLAAHKALADASPTVQFTTFTSTQAFLDALGSARRLHLLDFDVGFGAHWPPLMQELAHHWRRAAGPPPNLKVTALVSPGSSHPLELHLTNESLTRFAAELGIPFEFTALVFDPLSSASPPLGLSAAPDEAVAVHLTAGSGAFSPAPAHLRVVKELRPAVVVCVDHGCERGALNLLQSCAALLESLDAAGASPDVVSKVEQFVLRPRVERLAVGGGDKLPPPLQSMLASAGFAALQVSNAAEAQAECLLRRTASHGFHVEKRQAALALWWQRSELVSVSAWRC

SEQ ID NO: 17740 - protein, 472 aa, Oryza sativa
  Clone ID: TF_OSC400553j.C1.p7.fg
MQFTHTAPPPPPLHPNGHGLGLGLYLDVGATRGGGGARPWSSSSSTTTLGGSGYFPSSAAASKISLGNLNSTGCMEQLLVHCANAIEANDATLTQQILWVLNNIAPADGDSNQRLTAAFLCALVSRASRTGACKAVTAAVADAVESAALHVHRFTAVELASFIDLTPWHRFGYTAANAAIVEAVEGFPVVHIVDLSTTHCMQIPTLIDMLAGRAEGPPILRLTVADVAPSAPPPALDMPYEELGAKLVNFARSRNMSMDFRVVPTSPADALTSLVDQLRVQQLVSDGGEALVVNCHMLLHTVPDETAGSVSLTTAQPPVSLRTMLLKSLRALDPTLVVVVDEDADFTAGDVVGRLRAAFNFLWIPYDAVDTFLPKGSEQRRWYEAEVGWKVENVLAQEGVERVERQEDRTRWGQRMRAAGFRAAAFGEEAAGEVKAMLNDHAAGWGMKREDDDLVLTWKGHNVVFASAWAPS

SEQ ID NO: 17741 - protein, 752 aa, Oryza sativa
  Clone ID: TF_OSC402781j.C1.p4.gm
PGRLSSRTCKRLLQGLDPLASVDLGSFSSSRPNGQPPRSRKEEIEGQSDLAAVDMDVRFGPEEQIVWPASVLAGILMCAAVYDITREVSSRCYKGYNGLNELHKLEWNNRGFSTFHALVAAVVSFYLLVISDLFSKDVHGAIIIDRKSWMSDAMFGVSLGYFLTDLLMILWHFPSLGGKEYLLHHGLSMYAISLALLSGKGHVYILMVLITEATTPFVNLRWYLDLAGRKDSKLYLYNGVALFAGWLVARVILFVYFFAHVYLHFDQVRTVFPLGFYSMMAVPPAMSAMNLLWFRKICKGMVKAMSSANRTNEGCAGEDDSPEFVEPPAAAAAAGTFEQRPELGACKEVYSEEGGAAEERTGVAMAGADVEQVAVEDEEEAHGVRMIALLMECAAAMSVGNLAGANGALLELSQMASPYAASCGERLVAYFARAMAARLVGSWVGVVAPMAPPPSCGAINAAFRALYNVAPFARLAYLACNQAILEAFHGKRLVHIVDLDVVPGGALQWLSLLPALAARPGGPPVIRVTGFGMSASVLHDTGNQLAGLARKLCMFFEFYAVAKRPGDADAVADMPGRRPGEAVAVHWLRHAMYDAAGDDGASMRLVRWLEPARFVSALHHYSAVFDAMGASRPDGEDASRHLAEHGVLGREIANVLAVGGPARSSGREGPGSWREVLARHGFAHAGGGGGGRAQLVAAACPGGLGYTVAGDHDGTVRLGWKGTPLYAPQEMKNGLSWIVASKTSGNKMSYGS

SEQ ID NO: 17742 - protein, 593 aa, Oryza sativa
  Clone ID: TF_OSC20530j.C1.p3.fg
MANPEDFFWEALLKENEAPSPPPVFFDLPATPLSNSDGTDPSSLDNQLLSYVSRMLMEDEMGSSAAITNLQCVNRGSTEEANNMLPGSEVVRVFSKGMGEASKLLPRNNSFRTLETVDQVSSDGHCRGRKKKNHDRDEQQLEEELGRTSKLAALTIAGTQEAGARELLDELMLHAHETCIKDMEKLRIDMDNEAEKKINKKDKKGSSSKVVDLRLLLIQCAQAMATDNQQSAGELLKKIKQHALATGDAMQRVAHYFAKGLEARLAGSGKHLYQNHVRMSLVEYLKVYKLYMAACCFKKVALMFAAMTIMQAVQGKKRLHIVDYGIRCGLHWPDLFRRLGSREDGPPEVRITIVDIPQPGFRPFQRIEAAGHCLSSCANEFRVPFRFQAVVAAKWETVGAEDLHIEPDEVLVVNDLWSFSALMDESIFCDGPNPRDVALRNISKMQPDVFIQGIINGGYGASFLSRFRGALLYYSALFDMLDATTPRDSGLRLALEQNVLGPYALNAIACEGADLVERPEKYKQWQARNHRAGMQQLKLRPDIVDTIRDEVNKYHHKDFLLGEDGQWLLQGWMGRILFAHSAWVRQSQDTSSG

SEQ ID NO: 17743 - protein, 207 aa, Oryza sativa
  Clone ID: TF_OSC20530j.C1.p3.gp
MLLIQCAQAMATDNQQSAGELLKKIKQHALATGDAMQRVAHYFAKGLEARLAGRGKHLYQNQMRMSLVEYLKVYKLYMAACCFTKVALMFAAMTIMQAVQGKKRLHIVDYGPRCGLHWPDLLRRLGSREDGPPEVRITIVDIPQPAFRPFQRIEEAGHCLSSCANEFRVPFRFQAVVAAKWETVGAEDLHIEPDEVLVVNDLWSFSA

SEQ ID NO: 17744 - protein, 619 aa, Oryza sativa
  Clone ID: TF_OSC416737j.C1.p10.fg
MEPGAPWRDPRQGYLYGVGSAVQMPMQQRSDAAAAGGVLKRSLGDMERWQQHQHQQRQIAMQQQLYLRTVRQRTAAASAAVSPLTSADIAAVLGGPPSQPLVLSGSSMGGAFGSPSSTLSSITTASRAVAMPLMQPQLQRQQQVTYMASSPQVQAFGTARALPPAPATSDLSILQELEKQLLGDDDEVEAAMSGTGSAVTGSEWEEQLNSITAAPSPPLTAATTPNNNNNAVGMTRSPSNSSTSTASSSASCSPPTSATTSRQLLSEAAAAIADGHNETAATHLTALKRAANSRGDVEQRLVAMMVAALSSRIGQTASVPDICGGETRAGSQLLHDISPCFRLALHAANVAIVDAVGDHRAIHLVDFDVSAPQHADLIRCLAARRLPGTSLKVTAVTDPASPFTQSVTATLHLQKLAERAGIDYRFKMVSCRAGEIEASKLGCEAGEALAVNLAFALSHVPDESVSPANPRDEILRRVRALGPQVVALVEQELNSNTAPLTTRFTDACAHYGAILESLDATIPRESAERARAEAALGGRAANAVAREGADRLERCEVFGKWRSRFGMAGFRPVALGPGIADQVLARQGPVAAGFAVKAENGVLRLGWMGRVVTVASAWR

SEQ ID NO: 17745 - protein, 411 aa, Oryza sativa
  Clone ID: TF_OSC405105j.C1.p1.fg
MLRSLHSSSSSDTDNNSGGCKNNGGGGGEAAAAVEGGGDQRAVAAAAPSTRDLLLACADLLQRGDLPAARRAAEIVLAAAASPRGDAADRLAYHFARALALRIAPFLRFAHLTANQAILEAVDGARRVHILDLDAVHGVQWPPLLQAIAERADPALGPPEVRVTGAGADRDTLLRTGNRLRAFARSIHLPFHFTPLLLSCATTAPHHVAGTSTGAAAAASTAAAATGLEFHPDETLAVNCVMFLHNLAGHDELAAFLKWVKAMSPAVVTIAEREAGGGGGGGDHIDDLPRRVGVAMDHYSAVFEALEATVPPGSRERLAVEQEVLGREIEAAVGPSGGRWWRGIERWGGAARAAGFAARPLSAFAVSQARLLLRLHYPSEGYLVQEARGACFLGWQTRPLLSVSAWQPSSS

SEQ ID NO: 17746 - protein, 532 aa, Oryza sativa
  Clone ID: TF_OSC400032j.C1.p10.fg
MGMSPEPCNSISDCSQQQSHHLTLTQQQDSTIICTNQELDYYYRFYDVDEAAFDGNEVELVSRFSKVTRMDHMISSPYQPTWSPAQAAVDVVGSSETSRVRKKRFWDVLESCKQKVEAMEAMDTPATATFRVGAGDGGGGGGGGAGGGGGGADGMRLVQLLVACAEAVACRDRAQAAALLRELQAGAPVHGTAFQRVASCFVQGLADRLPLAHPPALGPASMAFCIPPSSCAGRDGARGEALALAYELCPYLRFAHFVANACMLEAFEGESNVHVVDLGMTLGLDRGHQWRGLLDGLAARASGKPARVRVTGVGARMDTMRAIGRELEAYAEGLGMYLEFRGINRGLESLHIDDLGVDADEAVAINSVLELHSVVKESRGALNSVLQTIRKLSPRAFVLVEQDAGHNGPFFLGRFMEALHYYAALFDALDAALPRYDARRARVEQFHFGAEIRNVVGCEGAARVERHERADQWRRRMSRAGFQSVPIKMAAKAREWLDENAGGGGYTVAEEKGCLVLGWKGKPVIAASCWKC

SEQ ID NO: 17747 - protein, 493 aa, Oryza sativa
  Clone ID: TF_OSC29408j.C1.p10.gm
YASDTQLFRYGPEPYNPENSFYNQQASPMPYMVTADGHSPSSADNSCSDVAKDSPLVSNVSQQNSQSISDNQSSELEVEFDEDDIRMKLQELEHALLDDSDDILYEISQAGSINDEWADPMKNVILPNSPKESESSISCAGSNNGEPRTPKQLLFDCAMALSDYNVDEAQAIITDLRQMVSIQGDPSQRIAAYLVEGLAARIVASGKGIYKALSCKEPPTLYQLSAMQILFEICPCFRFGFMAANYAILEACKGEDRVHIIDFDINQGSQYITLIQFLKNNANKPRHLRITGVDDPETVQRTVGGLKVIGQRLEKLAEDCGISFEFRAVGANIGDVTPAMLDCCPGEALVVNFAFQLHHLPDESVSIMNERDQLLRMVKGLQPKLVTLVEQDANTNTAPFQTRFREVYDYYAALFDSLDATLPRESPDRMNVERQCLAREIVNILACEGPDRVKSGIRSLLKSYCDRYKFEEDHGGLHFGWGEKTLIVSSAWQ

SEQ ID NO: 17748 - protein, 472 aa, Oryza sativa
  Clone ID: TF_OSC10722j.C1.p5.fg
MVLDSNELHQHDAPDVDVSINCDDRIFGQESVNLAAIQEELLEEDSLSDLLLAGAEAVEAGDSILASVAFSRLDDFLSGIPENGAASSFDRLAYHFDQGLRSRMSSASTGCYQPEPLPSGNMLVHQIIQELSPFVKFAHFTTNQAILDAIIGDMDVHVVDLNIGEGIQWSSLMSDLARCGGKSFRLTAITTYADCHASTHDTVVRLLSEFADSLELPFQYNSICVHNEDELHAFFEDCKGSVIVSCDTTSMYYKSLSTLQSLLLVCVKKLQPKLVVTIEEDLVRIGRGVSPSSASFVEFFFEALHHFTTVFESMASCFIGSSYEPCLRLVEMELLGPRIQDFVVKYGSVRVEANASEVLEGFMACELSACNIAQARMLVGLFNRVFGVVFKKISLLMVYYISLGKNDLREPNKVIWSSLAAGCGSHGIVVLAFYAADKLLEFKPKGIETYIHPAVERAHFHKEDRMWQEYEN

SEQ ID NO: 17749 - protein, 810 aa, Oryza sativa
  Clone ID: TF_OSC1192j.C1.p3.fg
MMHGLWVQDQGVVDHLAQLVPLLHECASHVTEGSFEKADFSFKKIRMLTIADGPLQRLSTIIVDSLAHRLLSSIQGLPGALIDPSDYFEKSTLRAARHNFFKLNPYLSTGFVTINWAIMEAMEDEKSLLSKKAESLGVSFHFISVIGRLETLDFSNLRSTFQIKFGVAVAISCALQMHRLLLVDDNLSSTSIAQLQKMANFTQPKQMASSVCSPASTLNYLQTPSPRTPKLLARLLSAIRALKPNIMLIMEQDADHNTLLFRDRFNEVLNYYAALFDCFHAVAAANPGRTDERLRVDRMILREEIKNILLRLCCTDRGMFQDDMLSSATSSPASSVYSPSPSPSNGSWVQELSHDQQSVRLIGLLYQCAAEVSAGSFDRANLCLEHITQLASLDAPHALQRLAAVFADALARKLLNLILGLSRALLSSANSADAHLVPVARRHMFDVLPFLKLAYLTTNHAILEAMEGERFVHVVDFSGPAANPVQWIALFHAFRGRREGPPHLRITAVHDSKEFLANMAAVLSKEAEAFDIAFQFNAVEAKLDEMDFDALRHDLGVRSGEALAVSVVLQLHRLLAVDDGRRHAAAGCLTPVQIIARSSPRSFGELLERELNTRLQLSPDASVVSSLSPHSPAAATAAHPTTSTPKLGSFLSAVRSLSPKIMVMTEQEANHNGGAFQERFDEALNYYASLFDCLQRSAAAAAERARVERVLLGEEIRGVVACEGAERVERHERARQWAARMEAAGMERVGLSYSGAMEARKLLQSCGWAGPYEVRHDAGGHGFFFCWHKRPLYAVTAWRPAASRRGHTRS

SEQ ID NO: 17750 - protein, 492 aa, Oryza sativa
  Clone ID: TF_OSC403597j.C1.p9.gm
MFQDDMLSSATSSPASSVYSPSPSPSNGSWVQELSHDQQSVRLIGLLYQCAAEVSAGSFDRANLCLEHITQLASLDAPHALQRLAAVFADALARKLLNLILGLSRALLSSANSADAHLVPVARRHMFDVLPFLKLAYLTTNHAILEAMEGERFVHVVDFSGPAANPVQWIALFHAFRGRREGPPHLRITAVHDSKEFLANMAAVLSKEAEAFDIAFQFNAVEAKLDEMDFDALRHDLGVRSGEALAVSVVLQLHRLLAVDDGRRHAAAGCLTPVQIIARSSPRSFGELLERELNTRLQLSPDASVVSSLSPHSPAAATAAHPTTSTPKLGSFLSAVRSLSPKIMVMTEQEANHNGGAFQERFDEALNYYASLFDCLQRSAAAAAERARVERVLLGEEIRGVVACEGAERVERHERARQWAARMEAAGMERVGLSYSGAMEARKLLQSCGWAGPYEVRHDAGGHGFFFCWHKRPLYAVTAWRPAASRRGHTRS

SEQ ID NO: 17751 - protein, 219 aa, Oryza sativa
  unsure (1)..(219): unsure at all Xaa locations
  Clone ID: TF_OSC410945j.C1.p12.gp
KLTAFMSTASHHPLELHLTQDNLSQFAAELRIPFEFNAVSLDAFNPAELISSSGDEVVAVSLPVGCSARAPPLPAILRLVKQLCPKVVVAIDHGGDRADLPFSQHFLNCFQSCVFLLDSLDAAGIDADSACKIERFLIQPRVEDAVIGRHKAQKAIAWRSVFAATGFKPVQLSNLAEAQADCLLKRVQVRGFHVEKRGAALTLYWQRGELVSISSWRCX

SEQ ID NO: 17752 - protein, 124 aa, Oryza sativa
  Clone ID: TF_OSC16170j.C1.p1.gm
NSGSSVDQTEHRAPAAPPPRRRRWEQIITCSSLRSFNELLTGELNTRLQLSPDASVLSSLSLHSPAAVMAAHPASTSTLNYYATLFDGLQQSTTAPAERVLLGMEIRSVVACEGAERVERHEWA

SEQ ID NO: 17753 - protein, 551 aa, Oryza sativa
  Clone ID: TF_OSC413654j.C1.p5.fg
MAVEIPRLALGGGGGGAGGERLPAAGEDSAPAATNAGKRPVVGLGFGSSLAAMAAAAAAGIQPDAFALGGPAEYPAGDGERDVLMVSFLRSIAAFLADGTCQMQVNDGLSCVVDLAGGDADGGGVGEGRSAQRLASAFAEALALRFILPCDGVCRSLHLTRAPPPPAVSAARQGFRAMCPFVRLAAAAANLSIAEVMEAERAVVHVVDLGGGVDANQWVELVRLVAARPGGPPGLLRLTVVNESEDFLSAVAAYVAAEAQRLDLSLQFHPVLSSIEELSATATGSIGSRLVVIPGQPLAVVANLQIHRLLAFPDYVDGVASRRPAAEQSGSSQHTMTTATKTKADALLRAIRDLNPKLVVLTENEADHNVAELGARVWNALNYYAALFDALEASSTPPAAVPPHERACVERWVLGEEIKDIVVREGTGRRERHETLGRWAERMVAAGFSPVTAARALASTETLAQQMVAAGGGGAGAGVLRAAHGGGCFPVICWCDVPVFSVSTWTARRVLVPAPPLWPPAAAGGAGPSGSGYGGDGPSTASSSAAMWWVG

SEQ ID NO: 17754 - protein, 249 aa, Oryza sativa
  Clone ID: TF_OSC406886j.C1.p1.fg
MQGLQWPGLFHILGSRPGGPPRVRLTGLGASMEALEATGKRLSDFADTLGLPFEFCPVADKAGNLDPEKLGVTRREAVAVHWLRHSLYDVTGSDSNTLWLIQRLAPKVVTMVEQDLSHSGSFLARFVEAIHYYSALFDSLDASYSEDSPNRHVVEQQLLSREIRNVLAVGGPARTGDVKFGSWREKLAQSGFRVSSLAGSAAAQAALLLGMFPSDGYTLIEENGALKLGWKDLCLLTASAWRPIQASGR

SEQ ID NO: 17755 - protein, 478 aa, Oryza sativa
  Clone ID: TF_OSC401949j.C1.p29.fg
METMSYPCSLLIPFSTQFEEISSSSLLLWSPQAEENPHENANMYEFDADHSHDQIHQDHQFLDMMVIQESANEFDGNHSHDQIHQDHEFLETMVIQESANEFDGDHSHDQIHQDHEFLEMMAIQESANDLLQLQDDFSVPNADPLAASFEFDERLAVAGHENGNVVATQEESAGDLLLAGAMAVDAGDAVHASAIMSRLDDLLADIAGRRSCEATSPVDHLAYYFARGLKLRISGAATPASSPPPPAANWSSPAYRMLQELTPFVKFAHFTANQAILEATADDLDVHVVDFNVGEGVQWSSLMSDLAAAGRHRCSTSRTLKLLLLGTITILQPKLVILIEDELSRISKNPPSPSLAAPPPFPEFFSDAVAHFTAVMESTASCLVSYDDEAWLSLRRVGEEVVGPRVEDAVGRYGSLAGGAQMMEGLRAREVSGFSVAQGKMLAGLFGGGFGVVHQEKGRLALCWKSRPLISVSLWCPK

SEQ ID NO: 17756 - protein, 237 aa, Oryza sativa
  unsure (1)..(237): unsure at all Xaa locations
  Clone ID: TF_OSC9377j.C1.p3.np
KSMLWATNSRXFHCLENTLEARLAGTGSQMYQSLVAKRTSTVDFLKAYKLFTAACCVKKVSVIFXSSNKTIYNAVAGKRKLHIVDYGLSYGFQWPALFFLLGTREGGPPEVRMTGIDVPQPGFRPADQIEETGRRLSIARARQFGVPFKFRAIAAKXETVRREDLHLDREEEEVLVVNCLHGLNNLQDESVVMESPRDVVLNNNRDMRPHVFVQCVVNGAYGAPFRLHRRGEVAIHR

SEQ ID NO: 17757 - protein, 460 aa, Oryza sativa
  Clone ID: TF_OSC1192j.C1.p1.fg
MEKATRCLARATGLAAAAAAGDGPRKRLAVAMVDCLARRLLRPVQAITDALIDPSVYLDRRSVRAARRGFFELSPFPKVAFVVGNRAIVEAVENESLVHVVGMSGPFTQPCQWIQLLHELRRRPEGPPRVVRLTVVHDDGELLAKMEELVSDEAEELGMEFQFHGVVGQLEDLDFSNLRNVLEIKSGEALVVSCTLQLHRLLAADDDAMYSSRSAHLNQMASIAQLQHMAVNSCPSSSGGGSVQYKDDDPYRSPATPLTFVSPPVSTPHFQTPAALASFLSAVRALSPKILVVAEQDADHNGVSFRKRFCEALHHYAAVFDSLDAAAATTSAASRLWSPDERAQVERVVVGEEIKGVLLRDGAHRREWHDRLRQWAARMEMAGFTGVPLSYAAIKKGNDMVRRCGLRRCENKECGGCLLLCWSSRPLYSISAWRPAASRGSGSGSERSEYVHVGAEPDDR

SEQ ID NO: 17758 - protein, 738 aa, Oryza sativa
  Clone ID: TF_OSC402543j.C1.p3.fg
MGSSAADSFPACGDDAIRDVYGIGGGGEEDDPSLFLYLSDLAPVSPSAYLDLPPSPPPPTTTATTMVKEGEEAPEDLVLPFISRMLMEEDIDDKFFYDYPDNPALLQAQQPFLEILSDPSSNSRSSNSDDPRLSPTSSSDTSAAINSYDAAATATAVAAAAVPVPQYESIELDPAAFFAAANSDLMSSAFLKGMEEANKFLPTENKLIIDLEASSENNYLRGLEEAKRFLPSDDKLQVGFAAAAAPVVSVKKEAVDVVVATASGGGGRGRKNPYDDEELELEGGRSSKQTAVQGDDVAARAMFDKVMMPSHENCTEMMEKLRIAMKEEAAKNEASAGGKGGNGKVKGGRRGGRDVVDLRTLLIHCAQAVATDDRRSATELLKQIKQHAKPTGDATQRLAHCFAEGLQARIAGTGSLVHQSLVAKRTSAVDILQAYQLYMAAICFKKVSFIFSNQTIYNASLGKKKIHIVDYGIQYGFQWPCFLRRISQREGGPPEVRMTGIDLPQPGFRPTERIEETGHRLSKYAQEFGVPFKYNAIAAVKMESVRKEDLNIDPDEVLIVNCQYQFKNLMDESVVIDSPRDIVLSNIRKMQPHVFIHAIVNGSFSAPFFVTRFREALFFYSALFDVLDATTPRESEQRLLIEQNIFGRAALNVIACEGIDRVERPETYKQWQVRNQRAGFKQLPLNPEIVQVVRNKVKDCYHKDFVIDIDHQWLLQGWKGRILYAISTWTPNDALSYF

SEQ ID NO: 17759 - protein, 802 aa, Oryza sativa
  unsure (1)..(802): unsure at all Xaa locations
  Clone ID: TF_OSC900311j.C1.p8.np
RDAGVGGARRARPLPRRRPHRPLNPLLRLAAAMGSSAADSFPLVEMMQSETCTAGGGGRTIRPSSSTSPTSPPSPPPPTSTSPLAAAAATATTMVKEGEEAPEDLVLPFISRMLMEEDIDDKFFYDYPDNPALLQAQQPFLEILSDPSSNSRSSNSDDPRLRYNFKRPPRISKNFKRPPRISKTLVVLGEXPTSRARXPLFPANFYDPGFSPTSSSYTSVAINSYDAAATATAVAAAAVPVPQYESIELDPAAFFAAANSDLMTPFLKGMEEANKFLPTENKLIIDLEASSENNYQGSRGGQEVPAQRRQASVDVVVATASDVVVATASGGGGRGRKNPYDDEELELEGGRSSKQTAVQGDDVAARAMFDKVMMPSHENCTEMMEKLRIAMKEEAAKNEASAGGKGGGKVKGGRRGGRDVVDLRTLLIHCAQAVATDDRRSATELLKQIKQHAKPTGDATQRLAHCFAEGLQARIAGTGSLVHQSLVAKRTSAVDILQAYQLYMAAICFKKVSFIFSNQTIYNASLGKKKIHIVDYGIQYGFQWPCFLRRISQREGGPPEVRMTGIDLPQPGFRPTERIEETGHRLSKYAQEFGVPFKYNAIAAVKMESVRKEDLNIDPDEVLIVNCQYQFKNLMDESVVIDSPRDIVLSNIRKMQPHVFIHAIVNGSFSAPFFVTRFREALFFYSALFDVLDATTPRESEQRLLIEQNIFGRAALNVIACEGIDRVERPETYKQWQVRNQRAGFKQLPLNPEIVQVVRNKVKDCYHKDFVIDIDHQWLLQGWKGRILYAISTWTPNDALSY

SEQ ID NO: 17760 - protein, 711 aa, Oryza sativa
  Clone ID: TF_OSC400235j.C1.p17.fg
MRAAPFSADGNGAAELAGSIAALLWPEDKGGGGGGGGGSLLVEPRSVLDCRGSPSPPNSTSTLSSSHGSGAADSISTGVAAVSESSAAAAEATRWAAPGEHGGGGGGELPPIPGALDVGFVAEESWDAMLGDAAAAAGQEQTFLNWIMAAPGDMEPQAPGLSQQQLLANAAGFGFPLQHHPGGVSSPAALASDLSSSGGRSLTSSSGSNSKATSAFGLLSPEAALQPPPATTAPFHNGADMKPPLLGLPSPTLLLNQHQPTPASTLFMPFPSFSDHQQQPLLQPPPKRHHSVPDNLFLLHNQPQPPPPAPAQCLPFPTLHSAVPFQLQPSMQHPRNAMKSTAAAAAAQQQHLLDELAAAAKATEVGNSIGAREILARLNQQLPPIGKPFLRSASYLKDALLLALADGHHAATRLTSPLDVALKLTAYKSFSDLSPVLQFANFTVTQALLDEIASTTASCIRVIDFDLGVGGQWASFLQELAHRCGSGGVSLPMLKLTAFVSAASHHPLELHLTQDNLSQFAADLGIPFEFNAINLDAFDPMELIAPTADEVVAVSLPVGCSARTPLPAMLQLVKQLAPKIVVAIDYGSDRSDLPFSQHFLNCLQSCLCLLESLDAAGTDADAVSKIERFLIQPRVEDAVLGRRRADKAIAWRTVLTSAGFAPQPLSNLAEAQADCLLKRVQVRGFHVEKRGAGLALYWQRGELVSVSAWRC

SEQ ID NO: 17761 - protein, 1363 aa, Oryza sativa
  Clone ID: TF_OSC101500j.C1.p28.fg
MVIELPFDNQYTTTETEQPHDGSSCSSQQQLSLYNYSPSDPQLFSQPTTGSRTYLSGAVTIPGICNDKSNLGQQQFQIDAALSLGYQRIRSSDALCYISRVLMEDVDERVDLHQGEAALQAAEKPFYDILGQVYPPSLNRLALHSANEPDTPDESSSRNNYHNRYHSSHSSFNMLQPLPTPLSPYSYGRSLFLPNQHLVSTAWTSTFGIPGFQIRRGAEEAKRFVPIIDKLVIDLDTDRGLSISKMTTKAKVGDKKRYAIFELTDQRHSPYTTDLDILEGRNSKRYAITYCEIIRNDMFDRVLLCYGVENFAEASNLRKIMTKQARKNSLNGQTRGSAQRKLRGMKQLKKDVVDLRNLLIHCAQAVAADDRISASELVKKIRQHSSPDGDSNQRLAFYLVDGLEARLAGIGSQVYRKLMASRTSAESLLKAYSLYLSACPFERASFAYANQTILDASKGQQPRKVHIVHFGICTGFQWPSLIQRLANEEGGPPKLRITGIDMPQPGFHPCEIIEETGKRLADYANLFKVPFQYQGIASRWETVQIEDLNIDKDEVLIVNCMFRMKNLGDEMVSMNSARDRVLKIMRMMNPRVFILGIVNGSYSSPFFITRFKEVLFHYSSLFDMIDANVPRDNEARKMIEGGLFGQEALNIIACEGAERTERPESYKQWQARCLKAGFKQLPVDPATLKEIINMKKGIYHEDFVADEDGAWLLQGWKGRVIYAISTWKPNESYLDQCLPEFGGYPCQKYDLHSRILMEEDIDEKISIKKGQDALQATEKPFYDILGKAYPSSSKETAINGDSQADYPDNGSSSYHEQACSGSFVSDLLGSQDAHSITTDWSSEFDRLALQFRRGVEEAKRFIPNIEKLVDDPEKNGLYACKQTTETTEQKGKHENKIRNHPHDPHVEHIELMEARNSKHMAISTSETIRDEMFDSILLCNRQLPGEVANLRGMMAKEASDNPKKFQSKGYGKGQRKPHSSKKKQKEAIDLSVLLIQCAQAIASNNHPFASELLRKIRHHALPDGDGSQRLANCFADGLEARLAGTGSQMYEKLMAKQTSTRDMLKAYHLYFVACPFEMVTYYFSNKTIIDALEGKTTLHIVDFGILFGFQWPCLIQRLAKREGGPPKLRITGVDVPQPGFRPHERIEETGKRLAEYANMFNVPFQYHGIASRWETICIEDLSIDKDEVLIINCMSRMRKLGDETENIDSARDRVLHMMKRMNPQVFILGVVNGLYSSPFFLTRFREVLFHYSSLFDMLDNNVPRNHEARILVEKDLFGNDALNAVACEGAERIERPESYKQWQMRILRAGFKQRPVNQAILNRSVHYKEFYHEDFVIDEDSGWLLQGWKGRIIQALSTWKVET

SEQ ID NO: 17762 - protein, 235 aa, Oryza sativa
  Clone ID: TF_OSC416395j.C1.p2.gp
KERKEEQRRKQRDEEGLHLLTLLLQCAESVNADNLDEAHRALLEIAELATPFGTSTQRVAAYFAEAMSARLVSSCLGLYAPLPNPSPAAARLHGRVAAAFQVFNGISPFVKFSHFTANQAIQEAFEREERVHIIDLDIMQGLQWPGLFHILASRPGGPPRVRLTGLGASMEALEATGKRLSDFADTLGLPFEFCPVADKAGNLDPEKLGVTRREAVAVHWLRHSLYDVTGSDSNT

SEQ ID NO: 17763 - protein, 363 aa, Oryza sativa
  Clone ID: TF_OSC272j.C1.p1.gm
PPPKRHHSVPDNLFLLHNQPQPPPPAPAQCLPFPTLHSAVPFQLQPSMQHPRNAMKSTAAAAAAQQQHLLDELAAAAKATEVGNSIGAREILARLNQQLPPIGKPFLRSASYLKDALLLALADGHHAATRLTSPLDVALKLTAYKSFSDLSPVLQFANFTVTQALLDEIASTTASCIRVIDFDLGVGGQWASFLQELAHRCGSGGVSLPMLKLTAFVSAASHHPLELHLTQDNLSQFAADLGIPFEFNAINLDAFDPMELIAPTADEVVAVSLPVGCSARTPLPAMLQLVKQLAPKIVVAIDYGSDRSDLPFSQHFLNCLQSCLCLLESLDAAGTDADAVRFAPQPLSNLAEAQADCLLKRVQ

SEQ ID NO: 17764 - protein, 188 aa, Oryza sativa
  Clone ID: TF_OSC295j.C1.p4.gm
MQFLDHHQYLYSSSSSNLPLQQPLLSHHHRFLEANEGCAGEDDSPEFVEPPAAAAAAGTFEQRPELGACKEVYSEEGGAAEERTGVAMAGADVEQVAVEDEEEAHGVRMIALLMECAAAMSVGNLAGANGALLELSQMASPYAASCGERLVAYFARAMAARLVGSWVGVVAPMAPPPSCGAINAAFRA

SEQ ID NO: 17765 - protein, 332 aa, Oryza sativa
  Clone ID: TF_OSC20531j.C1.p1.gp
MEMLNMAFLKGREEANKLVPTNNTLFAGFDGASLLKTEPAVDEPTLMFGRSGGSGRGRKNRHGEEDDLEAETGRSSKLMVPPQEATAAASEMFDEIMFNWYEVIMKGMEELRVAMDSEAEKKARNGGGAGRRAARAKAAVVDLHTLLIHCAQAVATSDRRSATELLKQIKQNSSARGDATQRLACCFAEGLEARLAGTGSQVYKSLVAKCTSTVDFLKAYKLFAAACCIKKVSFIFSNKTILDAVAGKRKLHIVDYGLSYGFQWPGLFKCLSEREGGPPEVRITGIDFPQPGFRPADQIEETGRRLSNCARQFGVPFRFQAIAAKWETVRRE

SEQ ID NO: 17766 - protein, 164 aa, Oryza sativa
  Clone ID: TF_OSC406886j.C1.p3.gp
VSSCLGLYAPLPSPSPAGARVHGRVAAAFQVFNGISPFVKFSHFTANQAIQEAFEREERVHIIDLDIMQGLQWPGLFHILGSRPGGPPRVRLTGLGASMEALEATGKRLSDFADTLGLPFEFCPVADKAGNLDPEKLGVTRREAVAVHWLRHSLYDVTGSDSNT

SEQ ID NO: 17767 - protein, 210 aa, Oryza sativa
  Clone ID: TF_OSC1273j.C1.p1.gm
NQQALQFRRGFQEASKFLPDESKLVIDVDKLYSGDEGSRFLGEVRQEKKLVKVKTETSDVESAGHRGKKHFYGDDLDAEEGRCSKHSAQGIDTDHLVRDLMDKVLLCNGETCSKGVKELREALQHDVAKHSGGGHGKGSSHGKGRGKKQPKKEVVDLETLLIHCAQSVATDDRRSATELLKQIRQHAHANGDGDQRLAHCFANGLEARLA

SEQ ID NO: 17768 - protein, 172 aa, Oryza sativa
  Clone ID: TF_OSC400419j.C1.p1.fg
MSPAVVTIAEREAGGGGGGGDHIDDLPRRVGVAMDHYSAVFEALEATVPPGSRERLAVEQEVLGREIEAAVGALRRPVVARHRAVGRRRPRRGVRGAAAQRVRRVAGAAAAPAALPVGGLPRAGGARRLLPRVADAPAALRLSVAAVVVVAGDEDDDGDGGGDHGLGFAKLD

SEQ ID NO: 17769 - protein, 380 aa, Oryza sativa
  Clone ID: TF_OSC400011j.C1.p18.fg
MAGDYAAAAGSLSDAREIFAKMPTTRTGIGRVLTHFADALAERLFPAFPQSAPPPPPPRGEQRELFRGFYEAGPYLKFAHLAANQAILEAFEGCNSVHVIDFALTDGIQWPSLIQALAVRPGGPPFLRITGIGPHAAGNRDELRDVGLRLAEFARSCSVPFAFRGIAADQLDGLRPWMFQVAPGEAVAINSVLQLHRLLVDQDAAAAASFPAPIDGVLDWVASMNPRVFTAISRHGGGDGAGNPLAEAYLQGEIADIVSREGSSRVERHEQMPRWVERLRRGGMTQLPLGATGLWQAAMQLREFSGAGFGVQENGGFLTLTWHSQRLYSASAWRATAGKKMTMMASGAADAMEESQNSNTNGGGGGSSGGGHGALNQIMQ

SEQ ID NO: 17770 - protein, 524 aa, Oryza sativa
  Clone ID: TF_OSC401739j.C1.p20.fg
MPYYNNSVPSGGNGRFYITQNHQDAHYASSDDGSQKIGSSPQAFEAPYCTLESSSANGAHPAHSSASSHSISPISGSPLSHHDSHSDHTYNSPPSASCVTEITDLQIKLRELENAILGPELDIAYDSPESALQPNIMATPENWRQLLGINTGDLKQVIIACGKAVAENDVRLTELLISELGQMVSVSGDPLQRLGAYMLEGLVARLSSSGSKIYKSLKCKEPTSSELMSYMHLLYEICPFFKFGYMSANGAIAEAIKGENFVHIIDFQIAQGSQWMTLIQALAARPGGPPFLRITGIDDSNSAYARGGGLDIVGMRLYKVAQSFGLPFEFNAVPAASHEVYLEHLDIRVGEVIVVNFAYQLHHTPDESVSTENHRDRILRMVKSLSPRLVTLVEQESNTNTRPFFPRYLETLDYYTAMFESIDVALPRDDKRRMSAEQHCVARDIVNLIACEGAERVERHEVFGKWKARLTMAGFRPYPLSSVVNSTIKTLLHTYNSFYRLEERDGVLYLGWKNRVLVVSSAWC

SEQ ID NO: 17771 - protein, 482 aa, Oryza sativa
  Clone ID: TF_OSC401887j.C1.p6.fg
MPLHPAAAASPTPPWMVRELRSDERGLCLIHLLLNCAAAAAAGRLDAANAALEHIASLAAPDGDAMQRVAAAFAEALARRALRAWPGLCRALLLPRASPTPAEVAAARRHFLDLCPFLRLAGAAANQSILEAMESEKIVHVIDLGGADATQWLELLHLLAARPEGPPHLRLTSVHEHKELLTQTAMALTKEAERLDVPFQFNPVVSRLDALDVESLRVKTGEALAICSSLQLHCLLASDDDAAAVAGGDKERRSPESGLSPSTSRADAFLGALWGLSPKVMVVAEQEASHNAAGLTERFVEALNYYAALFDCLEVGAARGSVERARVERWLLGEEIKNIVACDGGERRERHERLEPVGAAAGGRRLRPRPAQLLRAAPGAAGGAGPRLRRLQEFNFGRSNFNVSEEAAKIELTLSEIPRNRQPVAWRFQIPPNFCQSWELQPQKRPCFAFHGNRIAAACSHCGFYLFFMFFILVLQISYLDI

SEQ ID NO: 17772 - protein, 620 aa, Oryza sativa
  Clone ID: TF_OSC410211j.C1.p1.fg
MACRIEVWPPSATAGRSCLFISRSGGGGGEQPGRLYNLLPEEILLTEIWNSDNNGKINSLLIVRKCIIPQRLQHINKIQKVAPENMSMQASNRPYRYPDNSQIPYYSRSSMHVGQNGTYHVQQNHEDLYASSDDGSQNGNSKAQGLQAQYCTLDSSSGNFVYPAHSSTSSHISGSPISQQDSHSEHTSGSPASASCVTEVPGLRFTTIEEIENAMFGPEPDTVSSDCSLLTDSAFYQDNWREHLGINTGDLKQVIAACGKAVDENSWYRDLLISELRNMVSISGEPMQRLGAYMLEGLVARLSSTGHALYKSLKCKEPTSFELMSYMHLLYEICPFFKFGYMSANGAIAEAVKGENFVHIIDFQIAQGSQWATMIQALAARPGGPPYLRITGIDDSNSAHARGGGLDIVGRRLFNIAQSCGLPFEFNAVPAASHEVMLEHLDIRSGEVIVVNFAYQLHHTPDESVGIENHRDRILRMVKGLSPRVVTLVEQEANTNTAPFFNRYLETLDYYTAMFEAIDVACPRDDKKRISTEQHCVARDIVNLIACEGAERVERHEPFGKWRARLSMAGFRPYPLSALVNNTIKKLLDSYHSYYKLEERDGALYLGWKNRKLVVSSAWR

SEQ ID NO: 17773 - protein, 487 aa, Oryza sativa
  Clone ID: TF_OSC422725j.C1.p1.fg
MVRKRPASDMDLPPPRRHVTGDLSDVTAAAAGAPTLSASAQLPALPTQLPAFHHTDMDLAAPAPPAPQQVAAGEGGPPSTAWVDGIIRDIIASSGAAVSVAQLIHNVREIIRPCNPDLASILELRLRSLLNSDPAPPPPPPSHPALLPPDATAPPPPPTSVAALPPPPPAQPDKRRREPQCQEQEPNQPQSPKPPTAEETAAAAAAAAAAAAAAAKERKEEQRRKQRDEEGLHLLTLLLQCAESVNADNLDEAHRALLEIAELATPFGTSTQRVAAYFAEAMSARLVSSCLGLYAPLPSPSPAGARVHGRVAAAFQVFNGISPFVKFSHFTANQAIQEAFEREERVHIIDLDIMQGLQWPGLFHILASRPGGPPRVRLTGLGASMEALEATGKRLSDFADTLGLPFEFCPVADKAGNLDPEKLGVTRREAVAVHWLRHSLYDVTGSDSNTLWLIQRYYTFLLSSLVNSGPPGIMATLHPILLIDIVT

SEQ ID NO: 17774 - protein, 420 aa, Oryza sativa
  Clone ID: TF_OSC401762j.C1.p34.fg
MNLKLSLAIDGGGGGDAAAAVAKKSKVVGGGAVVVDGVGSSAICGGDRGSRVRDRMVKKAEEFDHENGMAATSSDGGGRGGAGMDLASPFYQFAHFTANQTIVEAFESGGRRRLHVVDFDVSYGFQWPSLIQSLSDAAAAATSSSSHDDDDNGGGCGDGPVSLRITGFGASADELRETEARLRRFAAGCPNLRFEFEGILNNGSNTRHDCTRIDDDATVVVNLVFPASSREACAATRMAYINSLNPSMVFLIEKHDGGGGLTGGDNTTTGRSASLLPRFAANLRYFAAVFDSLHECLPADSAERLAIERDHLGREIADAVASLDHQHRRRHGGGGGGGDHAAASWNWKAAMEGAGLDGVKLSSRTVSQAKLLLKMKSGCGGGGFRVVEGDGGMAMSLAWRDMALATATLWRRRRRRRRCR

SEQ ID NO: 17775 - protein, 506 aa, Oryza sativa
  Clone ID: TF_OSC20523j.C1.p1.fg
MAAAPKPEELVVAIEQPFSPSLFLDLPPTPHHDDDPNNVNDDLLLPFISRILMEDDIDDKFFYQFPDHPALLQAQQSYAQILHAPATSSSSDDTTINNNTTNSTSVPDTLAMPDHDADTQSAPDDMEMLYMAFLKGREEATKFLPTNNTLFSGFKAEPVLDIQPTFTFGPSGGGRGRKNRHAEEDDLETETSRSSKLMAPEHDDAAAADEIFDEIILNGYQMIIKGIDELRVAMGSQSQADKNGRRASRAKTAVVDLHTLLIHCAQAVATGDWRSATELLKQIKQNSSARGDATQRMACCFAEGLEARLAGTGSQMYQSLVAKRTSTVDFLKAYKLFTAACCIKKVSVIFSNKTIYNAVAGRRKLHIVDYGLSYGFQWPALFFLLGAREGGPPEVRMTGIDVPQPGFRPADQIEETGRRLSICARQFGVPFKFRAIAAKWETVRREDLHLDPEEEEEEVLVVNCLHGLNTLQDESVVVDSPSPRDVVLDNIRDMRPHVFVQCVVNG

SEQ ID NO: 17776 - protein, 214 aa, Oryza sativa
  Clone ID: TF_OSC20530j.C1.p7.gp
SKVVDLRLLLIQCAQAMATDNQQSAGELLKKIKQHALATGDAMQRVAHYFAKGLEARLAGSGKHLYQNHVRMSLVEYLKVYKLYMAACCFKKVALMFAAMTIMQAVQGKKRLHIVDYGIRCGLHWPDLFRRLGSREDGPPEVRITIVDIPQPGFRPFQRIEAAGHCLSSCANEFRVPFRFQAVVAAKWETVGAEDLHIEPDEVLVVNDLWSFSA

SEQ ID NO: 17777 - protein, 414 aa, Oryza sativa
  Clone ID: TF_OSC416456j.C1.p5.fg
MDMEHELRGGGVGAAAHGHGSICFSGGPVLVDGRRIQQLLLHCAAALESNDVTLAQQAMWVLNNIASSQGDPSQRLTSWLLRALVARACRLCAAAPAGAAVEFLERGRAPPWGRAMSVTELADYVDLTPWHRFGFTASNAAILRAVAGASAVHWPTLIDVLSKRPGGAPAIRITVPSVRPAVPPLLAVSSSELGARLAIFAKSKGVQLEFNVVESATTTSPKKTSTTLCQELASVLSDPPSLGLRDGEAVVVNCQSWLRHVAPDTRDLFLDTVRALNPCLLTVTDEDADLGSPSLASRMAGCFDFHWILLDALDMSAPKDSPRRLEQEAAVGRKIESVIGEEDGAERSEPGARLAERMSRKGFAGVVFDEEAAAEVRRLLSEHATGWGVKREDDMLVLTWKGHAAVFTGAWTPN

SEQ ID NO: 17778 - protein, 202 aa, Oryza sativa
  Clone ID: TF_OSC422742j.C1.p1.fg
TLGLPFEFCPVADKAGNLDPEKLGVTRREAVAVHWLRHSLYDVTGSDSNTLWLIQRLAPKVVTMVEQDLSHSGSFLARFVEAIHYYSALFDSLDASYSEDSPERHVVEQQLLSREIRNVLAVGGPARTGDVKFGSWREKLAQSGFRVSSLAGSAAAQAALLLGMFPSDGYTLIEENGALKLGWKDLCLLTASAWRPIQASGR

SEQ ID NO: 17779 - protein, 125 aa, Oryza sativa
  Clone ID: TF_OSC401329j.C1.p97.gp
VIEQEADHNKTGFLDRFTEALFYYSAVFDSLDAASASGGAGNAMAEAYLQREICDIVCGEGAARRERHEPLSRWRDRLTRAGLSAVPLGSNALRQARMLVGLFSGEGHSVEEADGCLTLGWHGRP

SEQ ID NO: 17780 - protein, 709 aa, Oryza sativa
  Clone ID: TF_OSC410945j.C1.p6.fg
MRAALFGAERSGVVDHGGGDKEELFWPAGKGGLVVVEPRSVLDCTRSPSPPYSTSTLSSSLGGGSADSTGVAAVSESSTAAAGATKWGAPGEHGGGGKEEWGGGCELPPIPGALDVGLVGGEGWDATATLGNAAGPDQSFLNWIIGAAGDLEQPGPPLPVLQQPLIDNAGFGIPAVDTMGFSLDHPLSGVASDLSSSGAHTATGGGGKASLGFGLFSPEATSLEQPPPSMLFHEGIDTKPPLLGAQPQFLLNHYQPQPPNPAAALFMPLPPFPEHNHQSPHLQPPLKRHHAIPDDLYLARNQQQSSAVAPGLAYSPPLHGPAPFQLHPSPPPIRGAMKSTAAEAAQQQLLDELAAAAKATEAGNSVGAREILARLNQQLPQLGKPFLRSASYLKEALLLALADSHHGSSGVTSPLDVALKLAAYKSFSDLSPVLQFTNFTATQALLDEIGGMATSCIHVIDFDLGVGGQWASFLQELAHRRGAGGMALPLLKLTAFMSTASHHPLELHLTQDNLSQFAAELRIPFEFNAVSLDAFNPAELISSSGDEVVAVSLPVGCSARAPPLPAILRLVKQLCPKVVVAIDHGGDRADLPFSQHFLNCFQSCVFLLDSLDAAGIDADSACKIERFLIQPRVEDAVIGRHKAQKAIAWRSVFAATGFKPVQLSNLAEAQADCLLKRVQVRGFHVEKRGAALTLYWQRGELVSISSWRC

SEQ ID NO: 17781 - protein, 134 aa, Oryza sativa
  unsure (1)..(134): unsure at all Xaa locations
  Clone ID: TF_OSC16404j.C1.p6.gp
VNGTYNAPFFVTRFKEALFYYSSLFDMLETTASRVDENRLLIERDLFGREALNVVACEGTERVERPETYKQWQVRNIRAGFKQLPLNQETVKKARYKVKKSYHRDFLVDEDNKWMLQGWKGRIIFALSAWEPNX

SEQ ID NO: 17782 - protein, 593 aa, Oryza sativa
  Clone ID: TF_OSC416395j.C1.p2.fg
MVRKRPASDMDLPPPRRHVTGDLSDVTAAAAPSSASAQLPALPTQLPAFHHTDMDLAAPAPPPPQQQVAAGEGGPPSTAWVDGIIRDIIASSGAAVSVAQLIHNVREIIRPCNPDLASILELRLRSLLTSDPAPPPPPPPSHPALLPPDATAPPPPPTSVAALPPPPPPQPDKRRREPQCQEQEPNQPQSPKPPTAEETAAAAAAAKERKEEQRRKQRDEEGLHLLTLLLQCAESVNADNLDEAHRALLEIAELATPFGTSTQRVAAYFAEAMSARLVSSCLGLYAPLPNPSPAAARLHGRVAAAFQVFNGISPFVKFSHFTANQAIQEAFEREERVHIIDLDIMQGLQWPGLFHILASRPGGPPRVRLTGLGASMEALEATGKRLSDFADTLGLPFEFCPVADKAGNLDPEKLGVTRREAVAVHWLRHSLYDVTGSDSNTLWLIQRLAPKVVTMVEQDLSHSGSFLARFVEAIHYYSALFDSLDASYSEDSPERHVVEQQLLSREIRNVLAVGGPARTGDVKFGSWREKLAQSGFRVSSLAGSAAAQAVLLLGMFPSDGYTLIEENGALKLGWKDLCLLTASAWRPIQASGR

SEQ ID NO: 17783 - protein, 549 aa, Oryza sativa
  Clone ID: TF_OSC403595j.C1.p11.fg
MAGIAALANCQSDERSSSCGAALLEFMGPAAPPSEAAAAADDVVLPYISRILMEEDIDDDMFFCLYPDHPALLEAQQPFAQILSSSSSIAGEVNSAPMEDSAALMMQGSGNGRGRKGSKHGGDELEAEVGRASKLMATPEEEEDDDDGVGEMLEKMMLNGDEDEAFHGETNAPRVPAEKKCGKAARRRRRQAKGEVVDLRELLMSCAQAVASGNRRSAGELLEQIKRHSSPTGDATERLAHYFADGLEARLAGAASLERRLVASAEERASAMELLEAYQVFMAACCFKWVAFTFANMAILRAAEGRNRLHIVDYGGQYHGLQWPSLLQRLAEREGGPPEFRAVAAARWETVTAEDVVGVDPDDEAAVVVNDVLSLGTLMDESGVFDDPSPRDTVLGSIRDMRPAVFVQAVVNGAHGAPFFPTRFREALFFFSALFDMLGATTPEEGSHLRVVLERDVLRRAAVGVIAGEGAERVERPETYRRWQARNRRAGLRQAAVEGDVVEAVRRRVRRRHHEEFVIEEDAGWLLQGWKGRILYAHSAWVVAEDGAH

SEQ ID NO: 17784 - protein, 138 aa, Oryza sativa
  unsure (1)..(138): unsure at all Xaa locations
  Clone ID: TF_OSC422742j.C1.p1.gp
EQDLSHSGSFLARFVEAIHYYSALFDSLDASYSEDSPERHVVEQQLLSREIRNVLAVGGPARTGDVKFGSWREKLAQSGFRVSSLAGSAAAQAALLLGMFPSDGYTLIEENGALKLGWKDLCLLTASAWRPIQASGRX

SEQ ID NO: 17785 - protein, 1045 aa, Oryza sativa
  unsure (1)..(1045): unsure at all Xaa locations
  Clone ID: TF_OSC20530j.C1.p1.np
HEICMKGVKQLSLKSKSSSSKKARGRRTVIHTEPVDLHNLLLHCAQAVATDDRRSAHELLRQIKQHSSAWGDAGQRLAHCFAQGLEARLAGTGSQVYQSLMSQRTSVVDFLKAYRLYMEACCCKKVAFVFSNKTIYAVAGRRKLHIVDYGLSYGFQWPGLLRELAARRGGPPEVRITGIDLPQPGFRPDQHIEETGRRLSRYADELGVPFKFHGIAATKKESVRREELGEAEEDEVVVVISLCHFRNVMDESLQEDSSRSPRDEVLGNIRRMRPDVFIHGIMNGAYGATYFLTRFREALYYYAAQFDLLDATVGRESHERMLVERDIFGRAALNVIACEGAERVERPEMYKQWQARNQRAGLRQLPLNPQVVRLVLDKVRDKYHKDFVVDEDQRWLLHRWKGRVLYALSTWVAQHXLLGELILKNILSILFSQKYSGYNFFGTNINSXYDEQEQRLPPLNDYQQDFFWEALLKENEAPSPSPVFFDSPQHPSPTVMAVQIPRHCWTTNFSPTSLVCSWDEMGSSAAVTNLQCVNRGSTEEANNMLPGSEVVRAFLKGMEEASKLLPRNNSFRMLETVDQVSSHGHCRGGKKKNHDRDEQQLEEELGRSRLAAMTNAGTEEAGARELLDELMLHSHETCIKDMEKLRIDMDNEADKTIKKKGKKGSSSKVVDLRMLLIQCAQAMATDNQQSAGELLKKIKQHALATGDAMQRVAHYFAKGLEARLAGRGKHLYQNQMRMSLVEYLKVYKLYMAACCFTKVALMFAAMTIMQAVQGKKRLHIVDYGPRCGLHWPDLLRRLGSREDGPPEVRITIVDIPQPAFRPFQRIEEAGHCLSSCANEFRVPFRFQAVVAAKWETVGAEDLHIEPDEVLVVNDLWSFSALMDESIFCDGPNPRDVALRNISKMQPDVFIQGIINGGYGASFLSRFRGALLYYSALFDMLDATTPRESGLRLALEQNVLGPYALNAIACEGADLVERPEKYRQWQARNHRAGMQQLKLRPDIVDTIREEVNKYHHKDFLLGEDGQWLLQGWMGRVLFAHSAWVPQ

SEQ ID NO: 17786 - protein, 944 aa, Oryza sativa
  Clone ID: TF_OSC400622j.C1.p58.fg
MPFGGSAREGHAGTLLQHHLIHGVGLAAAGKLVSSSSAAAAAAGAGGFWEPRSVLDHRHSPSPSPPTSASTLSSPLADVAALAGANAKNVSVSPPPPGWGTGGGGGGGEEVVAAKEEWVHQLTPLDMGLGAGEGWDAAGNVLSDAAAAATSGMAPDNTFLRWIIGGGEDASAAMAGVMDPPVLELDHGGGGGGAAPAAFGPFAPPPAMEDTKPVVPFAAGHPPPNFLLQHHHHHPQPHAAFFGAHHPSFDAAPPPSKRHHPMAAAPAPKLPPFPAGGFVPALKPKAEAANDEAAAAVEQLAEAAKLAEAGDAFGAREILARLNYRLPAAPTAGTPLLRSAFYFKEALRLTLSPTGDAPAPSASTPYDVVVKLGAYKAFSEVSPVLQFAHLTCVQAVLDELGGAGCIHVLDFDIGMGEQWASLMQELAQLRPAAALKVTALVSPASHHPLELQLIHENLSGFAAELGVFFHFTVFNIDTLDPAELLANATAGDAVAVHLPVGPAHAAATPAVLRLVKRLGAKVVVSVDRGCDRSDLPFAAHLFHSFHSAVYLLESIDAVGTDPDTASKIERYLIHPAIEQCVVASHRAASAMDKAPPPPWRAAFAAAGFAPVQATTFAESQAESLLSKLGSASASACADAECHVAMVLYCPLIKERERKRWNVHLVIVLVELNTPQAEKNQREVGGYGGEKNKILSEYNLLPLPVLEMQRKGGNHGVKRPCFTEMAAKHLRVRTGTSRTAAATLDGYTTLTWDSAPEWPWHRMHKPDRLRWAHWRVTGEPQCAAGAVAIGQASGHTGVRDTAGANWQETCIVVTEMDVKLADKFRKKWYHSSKLQKRRCTVGLIKQDLKVQNQGGESEASRHKGLQISFRQVQISLRKPNRKCKHSGQTVKLINENCYYLSTKRNNLKIKEVNYICYIYAEELHPLKVMFRNTQAKICQIDVQKS

SEQ ID NO: 17787 - protein, 544 aa, Oryza sativa
  Clone ID: TF_OSC400135j.C1.p1.fg
MADTPTSRMIHPFSNIPSQNLKQFQYSDNPQHPCHPYRAPSDTHVVPHHYGLKSHSPDAGYESQATPNKYTLDSSEGAGCMRHDSPSSQSFTTRSGSPLSQEDSHSDSTDGSPVGASCVTEDPNDLKQKLKDLEAVMLGPDSEIVNSLENSVANQLSLEPEKWVRMMGIPRGNLKELLIACARAVEEKNSFAIDMMIPELRKIVSVSGEPLERLGAYMVEGLVARLASSGISIYKALKCKEPKSSDLLSYMHFLYEACPYFKFGYMSANGAIAEAVKGEDRIHIIDFHISQGAQWISLLQALAARPGGPPTVRITGIDDSVSAYARGGGLELVGRRLSHIASLCKVPFEFHPLAISGSKVEAAHLGVIPGEALAVNFTLELHHIPDESVSTANHRDRLLRMVKSLSPKVLTLVEMESNTNTAPFPQRFAETLDYYTAIFESIDLTLPRDDRERINMEQHCLAREIVNLIACEGEERAERYEPFGKWKARLTMAGFRPSPLSSLVNATIRTLLQSYSDNYKLAERDGALYLGWKSRPLVVSSAWH

SEQ ID NO: 17788 - protein, 750 aa, Oryza sativa
  Clone ID: TF_OSC401488j.C1.p12.fg
MSASQNLHRLPEFCVIPATACSREPGLPRIVIRSNMGSDDNKRFDDFHVITNGPGSDAYSNEESINLDSYIAPSTSFCSKIYNPQLYVEKGNGTTDWCQTSGGDYPEKSSINSDITLSYIDKILMQEDIDDRGNEDTALQAMEEPFYELLGEKYPAFPQQQPLCVCDHLQNLSANTDKSNGHACNTWSVTRMTNISSSMNSNGNFQGFQFPWSLSSITRETEQFTHHSNRMVVGLKVDGLSISEKPSQDNCSLQIDAHYMRKHPLFEVHDRKSYPCIEDLDLLEGRSNKQYAIYYDEPIRDEMFDNVLLCSDHKPLDEGVSLSRAMTNNSSKSSQIGQGKTSARRKTTGKRIQKRDVVDLRTLLINCAQAVSVSNHSLASDILKIIRHHASPTGDDSQRLALCLAYCLDVRLTGTGSQIYHKFITKRRNVKDILKVHIIDFGICFGFQWPSLFEELAKIEDGPPKLRITGIELPESGFRPYARSNNIGLRLADYAKTFNIPFEYQHISSNKWEALSPEDFNIEKDEVLIVNCIYRIKDLGDETISINSARSRVLNTIRMMKPKVFVQGVLNGSYGVPFFLTRFKEVMYHYNSLFDMLDKNIPRDNETRMIIERDIYQYIMLNVIACEGPERIERPESYKKWKVRNLKAGLVQLPLNPAIVRETQDMSSDKASIRLCLVCYGNIYDSYHVSGDTREVSCDTYQVSDDFYHVSGDTREISCDTYQVLDDFYHVSGDTYEISDDTYRISGDSY

SEQ ID NO: 17789 - protein, 493 aa, Oryza sativa
  Clone ID: TF_OSC410358j.C1.p2.fg
MQDSLGLMQFLDHHQYLYSSSSSNLPLQQPLLSHHHRFLEANEGCAGEDDSPEFVEPPAAAAAAGTFEQRPELGACKEVYSEEGGAAEERTGVAMAGADVEQVAVEDEEEAHGVRMIALLMECAAAMSVGNLAGANGALLELSQMASPYAASCGERLVAYFARAMAARLVGSWVGVVAPMAPPPSCGAINAAFRALYNVAPFARLAYLACNQAILEAFHGKRLVHIVDLDVVPGGALQWLSLLPALAARPGGPPVIRVTGFGMSASVLHDTGNQLAGLARKLCMFFEFYAVAKRPGDADAVADMPGRRPGEAVAVHWLRHAMYDAAGDDGASMRLVRWLEPAAVTLVEQERAHGGGGGHGRFLDRFVSALHHYSAVFDAMGASRPDGEDASRHLAEHGVLGREIANVLAVGGPARSSGREGPGSWREVLARHGFAHAGGGGGGRAQLVAAACPGGLGYTVAGDHDGTVRLGWKGTPLYAVSAWTWCSPPHARA

SEQ ID NO: 17790 - protein, 235 aa, Oryza sativa
  Clone ID: TF_OSC422725j.C1.p1.gp
KERKEEQRRKQRDEEGLHLLTLLLQCAESVNADNLDEAHRALLEIAELATPFGTSTQRVAAYFAEAMSARLVSSCLGLYAPLPSPSPAGARVHGRVAAAFQVFNGISPFVKFSHFTANQAIQEAFEREERVHIIDLDIMQGLQWPGLFHILASRPGGPPRVRLTGLGASMEALEATGKRLSDFADTLGLPFEFCPVADKAGNLDPEKLGVTRREAVAVHWLRHSLYDVTGSDSNT

SEQ ID NO: 17791 - protein, 986 aa, Oryza sativa
  Clone ID: TF_OSC16404j.C1.p7.gm
MESELGALSHVRQAAGAPAEAAASEATTSSPTIGIIHQILNLNRDNHFHPLRTQQENEPITKSAPPAAAHIAVSPMGLPVMEHLGSSSIVRGRGKNKRIWTYFEDEELIKALFEIALDPSWKSEGGFKNGYCQVLENVLAKKLPSSGLTAVPHIESRVRHFRTKFGAIEVMLTKSGFSWDDNRKMIQCEKQQYDDHCRKNNEAKGLYGVAFPHYDTLAAIYGKDIATGEGAEGLGEAVANMEKEIVQDIQDEEDEEDEERVSRETPRRSIDSAAARRSIDSAAARRSIDSATPRRSIDSTASSSKKRKKDSNKLKNTLSSDPFMDVFANVQGDLRDVTKHVGAMVASMQREAEIQEKAMAEEDPLQKIQNEAILECQKIGLTGTEVVNAAAAFVKVPAQMSMLLALPESLRREYVLKILAEDLSESADDAVLAYINQFLLEDEEDESCPGTITSVEDSALLAVEKPFVDILTASQEACQENSWIDSCCDFTGNGGLLDTFTTTHAACQPAPCEFEKEKGECAVHKGRKNPHDDCLLFEEESRRSKQLAVSEEETVREMFDKVLLCNGECELRAPLPAEARNCGVYVKGSGNKRGRKKGKSGASAEDDAVDLTTLLIHCAQAAAIDDHRNSNELLKQIRQRSSAYGDAGQRLAHCFANALEARLAGTGSNIYRSLAAKRTSVYDILNAFKLYVTACPFKKISNFFSIEAILNASKGMTRLHIVDYGIQYGFQWPIFFQRISKRPGGPPSVRITGVDLPQPGFRPAQLIEATGRRLHDYARMFNVPFEYHAIAAKWDTIRVEDLKIDKDKDELLVVNCLFRMRNMMDEMVTDDSPRMQVLKTIRKMNPNLFIHGVVNGTYNAPFFVTRFKEALFYYSSLFDMLETTASRVDENRLLIERDLFGREALNVVACEGTERVERPETYKQWQVRNIRAGFKQLPLNQETVKKARYKVKKSYHRDFLVDEDNKWMLQGWKGRIIFALSAWEPN

SEQ ID NO: 17792 - protein, 1143 aa, Oryza sativa
  Clone ID: TF_OSC400939j.C1.p12.gm
MESELGALSHVRQAAGAPAEAAASEATTSSPTIGIIHQILNLNRDNHFHPLRTQQENEPITKSAPPAAAHIAVSPMGLPDRAPPQLLLHIARVAIAAPSPCARRRRLLLTLCASPAQPPRPARVPAPPHRPACRRRRPLTPRASPTPPSCAPPPPPSSDVDLDRKNSGNKGEAVKQGAGAINHIGLPSLLSSINHLAVMEHLGSSSIVRGRGKNKRIWTYFEDEELIKALFEIALDPSWKSEGGFKNGYCQVLENVLAKKLPSSGLTAVPHIESRKNNEAKGLYGVAFPHYDTLAAIYGKDIATGEGAEGLGEAVANMEKEIVQDIQDEEDEEDEERVSRETPRRSIDSAAARRSIDSAAARRSIDSATPRRSIDSTASSSKKRKKDSNKLKNTLSSDPFMDVFANVQGDLRDVTKHVGAMVASMQREAEIQEKAMAEEDPLQKIQNEAILECQKIGLTGTEVVNAAAAFVKVPAQMSMLLALPESLRREYVLKILAGWILFEDSRVMLDSGSYDDVDYGDLFSIPNPPAPHLLNFPLQFFPSNGFISSADDSHRSPAGMFGSTPSPTSTTTELENSEDLSESADDAVLAYINQFLLEDEEDESCPGTITSVEDSALLAVEKPFVDILTASQEACQENSWIDSCCDFTGNGGLLDTFTTTHAACQPAPCEFEKEKGECAVHKGRKNPHDDCLLFEEESRRSKQLAVSEEETVREMFDKVLLCNGECELRAPLPAEARNCGVYVKGSGNKRGRKKGKSGASAEDDAVDLTTLLIHCAQAAAIDDHRNSNELLKQIRQRSSAYGDAGQRLAHCFANALEARLAGTGSNIYRSLAAKRTSVYDILNAFKLYVTACPFKKISNFFSIEAILNASKGMTRLHIVDYGIQYGFQWPIFFQRISKRPGGPPSVRITGVDLPQPGFRPAQLIEATGRRLHDYARMFNVPFEYHAIAAKWDTIRVEDLKIDKDKDELLVVNCLFRMRNMMDEMVTDDSPRMQVLKTIRKMNPNLFIHGVVNGTYNAPFFVTRFKEALFYYSSLFDMLETTASRVDENRLLIERDLFGREALNVVACEGTERVERPETYKQWQVRNIRAGFKQLPLNQETVKKARYKVKKSYHRDFLVDEDNKWMLQGWKGRIIFALSAWEPN

SEQ ID NO: 17793 - protein, 95 aa, Oryza sativa
  unsure (1)..(95): unsure at all Xaa locations
  Clone ID: TF_OSC101577j.C1.p27.gp
IERDLFGREALNVIACEGSDRVERPETYKQWQVRNLRAGFVQSPLNQDIVLKAKDKVKDIYHKDFVIDEDSEWLLQGWKGRIIYAISTWKPNNNX

SEQ ID NO: 17794 - protein, 715 aa, Oryza sativa
  Clone ID: TF_OSC410945j.C1.p7.fg
MRAALFGAERSGVVDLGGIGGGNRGLFWPAGKGGLVVVEPRSVLDCTRSPSPRNSTSTLSSSQGGGGADSTGVAAVSESSAAAAEATKWGAPGEHGGGGGGGGGGGKEDWSSGCELPPIPGTLDVGLVGGEGWDTMLGNAAAAAAGQDQSFLNWIIGAAGDLEQPGPPLLDNAGFGIPAVDPLGFSLDHSLSGVASDLSSSGAHTATGGAGGGKASLGFGLFSPEATSLEQPPPPMLFHEGIDTKPPLLGAQPPGLLNHYHHQPPNPAATLFMPHPSFPEHNHQSPLLQPPPKRHHSMPDDIYLARNQLPPAAAAAQGLPFSPLHASVPFQLQPSPPPIRGAMKTTAAEAAQQQLLDELAAAAKATEAGNSVGAREILARLNQQLPPLGKPFLRSASYLREALLLALADSHHGVSSVTTPLDVALKLAAYKSFSDLSPVLQFANFTATQALLDEIGGTATSCIHVIDFDLGVGGQWASFLQELAHRRAAGGVTLPLLKLTAFVSTASHHPLELHLTQDNLSQFAADLGIPFEFNAVSLDAFNPGELISSTGDEVVAVSLPVGCSARAPPLPAILRLVKQLSPKIVVAIDHGADRADLSFSQHFLNCFQSCVFLLDSLDAAGIDADSACKIERFLIQPRVHDMVLGRHKVHKAIAWRSVFAAAGFKPVPPSNLAEAQADCLLKRVQVRGFHVEKCGAALTLYWQRGELVSISSWRC

SEQ ID NO: 17795 - protein, 560 aa, Oryza sativa
  Clone ID: TF_OSC17536j.C1.p2.fg
MVAQAATAAATTTAAATTAAVPMTNFQLFGSMVPVPVASMATATAPAAVAAADNGGHGSSSASQNASGSGEGQGGSMSLSLQLRPLGSTPTAAVAVSVPPMAAAPMMAGPAAAAPAPAPPLATMAVAQNASLAAVASALAAHRRNQATHRSAALHGHLRRCAEALAASRPADADAELASIARMASSDGDAVQRVAAAFAEAMARVVIRPWRGVSAALFPSDAGAAGDALTAWEAEFARQSFLNLCPLLHLAAVAVNEIILETTRNDKFIHIVDLGGIHHAHWVELLQGLATRRAAVRPCLRLTIVHEHKHFLGQAAQVLAAESDRHGVPLDLHIVESSVEALKLDALGVRSDHAVVIVSTLQLHRLVGAGILSTTAPPSPAAAAAASMITSPLPPANMSSKVDRLLRGFHLLSPRAIILTENEANHFVPSFTDRFASALPYYEQLFAAMEEAGAATVERKAAERYLLREEIKDVIACDHDGPRWARHETLGRWVVRMGAAGFALAPAITVVTAAGRVRAVAARLPGGGDERRYGVTEGGGWLILNREEKPMFCVSAWRRQ

SEQ ID NO: 17796 - protein, 617 aa, Oryza sativa
  Clone ID: TF_OSC34032j.C1.p48.np
MLAGCSFSSSRHQMSTAQRFDILPCGFSKRGSRGDGAAPRVAGDARSGATTCSFRTHPAPPVTQSVSWGAKPEPGGNGNGAHRAVKRAHDEDAVEEYGPIVRAKRTRMGGDGDEVWFHQSIAGTMQATAAGEGEEAEEEKVFLVPSAAAFPHGMAAAGPSLAAAKKEEYSKSPSDSSSSSGTDGGSSAMMPPPQPPEFDARNGVPAPGQAEREALELVRALTACADSLSAGNHEAANYYLARLGEMASPAGPTPMHRVAAYFTEALALRVVRMWPHMFDIGPPRELTDDAFGGGDDDAMALRILNAITPIPRFLHFTLNERLLREFEGHERVHVIDFDIKQGLQWPGLLQSLAARAVPPAHVRITGVGESRQELQETGARLARVAAALGLAFEFHAVVDRLEDVRLWMLHVKRGECVAVNCVLAMHRLLRDDAALTDFLGLARSTGATILLLGEHEGGGLNSGRWEARFARALRYYAAAFDAVDAAGLPEASPARAKAEEMFAREIRNAVAFEGPERFERHESFAGWRRRMEDGGGFKNAGIGEREAMQGRMIARMFGPDKYTVQAHGGGGSGGGEALTLRWLDQPLYTVTAWTPAGDGAGGSTVSASTTASHSQQS

SEQ ID NO: 17797 - protein, 275 aa, Oryza sativa
  Clone ID: TF_OSC400032j.C1.p8.fg
MEMDKFSSSYQPSWPPAQATVDVVGSVETPARRAFQRVASFFVQELLDRRASAGAGPCEHGVLHPAVVVREAYAEGLGMYLEFRGINRGLESLHIDDLGVDADEAVAINSVLELHSVVKESRGALNSVLQTIRKLSPRAFVLVEQDAGHNAPFFLGRFMEALHYYAALFDALDAALPRYDARRARVEQFHFGAEIRNVVGCEGAARVERHERADQWRRRMSRAGFQSVPIKMAAKAREWLDENAGGDGYTVADEKVCLVLGWKGKPVIAASCWKC

SEQ ID NO: 17798 - protein, 333 aa, Oryza sativa
  unsure (1)..(333): unsure at all Xaa locations
  Clone ID: TF_OSC272j.C1.p1.gp
QQLPPIGKPFLRSASYLKDALLLALADGHHAATRLTSPLDVALKLTAYKSFSDLSPVLQFANFTVTQALLDEIASTTASCIRVIDFDLGVGGQWASFLQELAHRCGSGGVSLPMLKLTAFVSAASHHPLELHLTQDNLSQFAADLGIPFEFNAINLDAFDPMELIAPTADEVVAVSLPVGCSARTPLPAMLQLVKQLAPKIVVAIDYGSDRSDLPFSQHFLNCLQSCLCLLESLDAAGTDADAVSKIERFLIQPRVEDAVLGRRRADKAIAWRTVLTSAGFAPQPLSNLAEAQADCLLKRVQVRGFHVEKRGAGLALYWQRGELVSVSAWRCX

SEQ ID NO: 17799 - protein, 163 aa, Oryza sativa
  unsure (1)..(163): unsure at all Xaa locations
  Clone ID: TF_OSC401887j.C1.p14.gp
SPESGLSPSTSRADAFLGALWGLSPKVMVVAEQEASHNAAGLTERFVEALNYYAALFDCLEVGAARGSVERARVERWLLGEEIKNIVACDGGERRERHERLEXRWARRLEGAGFGRVPLSYYALLQARRVAQGLGCDGFKVREEKGNFFLCWQDRALFSVSAW

SEQ ID NO: 17800 - protein, 423 aa, Oryza sativa
  Clone ID: TF_OSC400659j.C1.p9.fg
MLGSSPARDRGGGDDAEASEQPQPQPQPPLSPRAGGGEARGLVLACADLVHRGDLDGARRVAEAVLAAADPRGEAGDRLAHHFARALLALRGGGKGGHGGGGGGVVPSSAAYLAYIKIAPFLRFAHLTANQAILEAAAADAGGAHRRVLHIVDLDAAHGVQWPPLLQAIADRADPAVGPPPEVRLTGAGTDRDVLLRTGDRLRAFSSSLNLPFRFHPLILPCTAELAADPTAALELHPDETLAVNCVLFLHKLGGDGELAAFLRWVKSMNPAVVTIAEREGVLGGDVDDDNVPDELPRRVAAAMDYYSSVFDALEATVPPASADRLAVEQEILSREIDAAVAAPGAGGGGRARDFDAWASAARAAGLAPRPLSAFAASQARLLLRLHYPSEGYKADDDGGRGACFLRWQQRPLMSVSSWQPQP

SEQ ID NO: 17801 - protein, 603 aa, Oryza sativa
  Clone ID: TF_OSC900388j.C1.p10.fg
MDTLFRLVSLHHHHHHQHAASPSPPDQPHKSYPSSRGSTSSPSSHHTHNHTYYHHSHSHYNNNSNTNYYYQGGGGGGGGYYYAEEQQPAAYLEECGNGHQFYMDEDFSSSSSSRQFHSGTGAPSSAPVPPPPSATTSSAGGHGLFEAADFSFPQVDISLDFGGSPAVPSSSGAGAGAGAAPSSSGRWAAQLLMECARAVAGRDSQRVQQLMWMLNELASPYGDVDQKLASYFLQGLFARLTTSGPRTLRTLATASDRNASFDSTRRTALKFQELSPWTPFGHVAANGAILESFLEAAAAGAAASSSSSSSSSTPPTRLHILDLSNTFCTQWPTLLEALATRSSDDTPHLSITTVVPTAAPSAAAQRVMREIGQRLEKFARLMGVPFSFRAVHHSGDLADLDLAALDLREGGATAALAVNCVNALRGVARGRDAFVASLRRLEPRVVTVVEEEADLAAPEADASSEADTDAAFVKVFGEGLRFFSAYMDSLEESFPKTSNERLSLERAVGRAIVDLVSCPASQSAERRETAASWARRMRSAGFSPAAFSEDVADDVRSLLRRYKEGWSMRDAGGATDDAAGAAAAGAFLAWKEQPVVWASAWKP

SEQ ID NO: 17802 - protein, 100 aa, Oryza sativa
  Clone ID: TF_OSC401583j.C1.p68.gp
DINKCCFAQFPDYQLPLFLQKRAGSDMHLPSLHAENDSDPPAPEYCIDAGSIGNFARFINHSCEPNLFVQCVLSSHNDVKLAKVTLFAADTILPLQVSLF

SEQ ID NO: 17803 - protein, 400 aa, Oryza sativa
  Clone ID: TF_OSC21512j.C1.p1.fg
MTFEALRRRHLQLDEIQETSKRADLKAGAIMMASNIRANVGKRVGLVPGVEIGDIFYFRMELCIIGLHAPSMGGIDYMSAKFGSDEDSVAICIVAAGGYENVDDDTDTLVYSGSGGNSRNSEERHDQKLERGNLALERSLHRKNEIRVVRGFRDPFCLTGKIYIYDGLYKIQESWKERTKSGINCFKYKLLREPGQPDGAALWKMTQGWIDNPASRGRVILPDLSSAAEALPVCLVNEVDHEKGPGHFTYASQVKYLRPLSSMKPLQGCGCQSVCLPGDPNCACGQHNGGDLPYSSSGLLACRKPIIYECGDACHCTTNCRNRVTQKGVRFHFEVFRTANRGWGLRCWDPIRAGAFICEYTGEVIDELKVNLDDSEDDYIFQTVCPGEKTLKFNFGPELI

SEQ ID NO: 17804 - protein, 381 aa, Oryza sativa
  Clone ID: TF_OSC401607j.C1.p14.fg
MESNQHKASDPQDSMVHLDLDEDKIMVTSALPCPSMSVGKSVMRKRGRPSRHARGTSLSSVTPEDNPREAVDDILMTFGGLHRRIMQLIDVKMASKQLVFQALNLMRKVGYHVNKDKRVGEVPGVKIGDIFYSRIEMLLVGLHSNINRGIEFMSGAFINKEDKIATCIVSSGMYENGDDDPYTLVYNGQGKVHHKLEREIARVCVVNNIDSEDAPNNFTYSTKLDNGNHMVSANKMCVCKCTSSCLGEDNCSCLKTNGSYLPYNSSGILVCRKTMIYECNDSCACTINCSNRVVQRGSYLHFEVFKTMDRGWGLRSWDPIPAGAFVCEYVGVVIDKDSLVEEDEYIFEVTRPEHNLKWNYLPELIGEPSFYDMNDTFKKLC

SEQ ID NO: 17805 - protein, 536 aa, Oryza sativa
  Clone ID: TF_OSC401896j.C1.p25.fg
MATPGLDDDSLQQLRSRATQLLLKENWTEYIAVCSLIIEAFDAAAACKDRRVLCSTLAHRADARARLGDAPGALADCDAALAADPAHPGALLSKGAVLRGLGRYSRAAECFRAALAVSGTDEVREMVEQCKRLDAQARSGAVDLSEWVLAGFSGKCPDLAEHVGAVEVRRSAHGGRGVFAVKNIEAGANLVISKAVAIGRGVIPDAADSGEKMVVWKDLVDKVLDAAEKCPRTASLIYTLSTGEEPEDELPIPDMAHFKQETEELDDGTAMAPKASLDVDKILKVLDVNCLTEDAAPSANLLGSNGVVNCGVGLWILPAFINHSCHPNARRTHVGDHAIVHASRDIKAGEEITFAYFDVLTPASKRREAARAWGLECQCDRCRFEASDAIVGQELTKLENELVNGRGGDMGALVVRLEERMRKSMVKERRKAFLRASFWSAYSALFDSDKLVRKWGRRVPGEAAVAESVAGAIGGNESVLRAMLRGADNGNGCGNRLEVEDKVVRIGRATYGRVVKRQAMRALFRLTLDADSNKSL

SEQ ID NO: 17806 - protein, 409 aa, Oryza sativa
  Clone ID: TF_OSC9931j.C1.p1.fg
MAGPPGPAPGTSSSSSSLPSRRRRRPPPRLGRRRGGDDQQPPHPPKASSEALPCAASPPARCRGGDHQPPHPPEAALEALRGAASPPARRRGGDLHPSHPPEAASEALRGAASPPERRRGGDRQPSHPTEAASEAPSGSASPPARRRGGDQQPPPAVAVAVTSEGGVGPRRSFRISLRHRVRVVPWVKPPVARKPKDPAKPPRPSIEALAAEWAKEKAASGAPEEECVLPFLQKDAPKKLDIVKVLGLDGFGYMDTVILSLKSYRKNIPITVGNFVIVMQSCIRLVLKKVMDAVLDMMQVQQMEAFRRLPLPHTFQEFNIDPIKKEELDNGTEPPPYKIKIIPTGLYWLAALGLVTAQMSALTNHFADRKRLRSLSGILLQTQYCGWGSRALEAIEKDDFVIEFVGEEQ

SEQ ID NO: 17807 - protein, 393 aa, Oryza sativa
  Clone ID: TF_OSC8416j.C1.p1.fg
PKKRAIQPCSKVNTGEGSSVIDVASSTMGEVKMSLKCSVDPKFRMPSLEAVFKMVEDKYLHSYKILPPEFSIGSLMNEICQCVVQLGSDHIAEHNTESDVAGNGRCSQNEPMTGSIPFVKPIACEDGGNRKCKSAGESFIVEDSENSSVAKQQTHLALANLKPIHDVTDISKGEERVRISVANEFASEKCPPSFYYIRGNLVFQNAYVNISVARIGDEDCCADCFGNCLSAPIPCACTRETGGEYVYTPEGLVRTPFLDECVSMNRFPEKCHKFFCKSSCPLERSRNEASPEPCRGHLARKFIKECWSKCGCNMQCGNRVVQRGITCNLQVFFTGEGKGWGLRTLDELPKGAFVCEYVGEVLTSTELHERTLQNMNNGRHTYPVLLDADWGSE

SEQ ID NO: 17808 - protein, 375 aa, Oryza sativa
  Clone ID: TF_OSC900167j.C1.p2.fg
MASWEEQLRDELAARDLAVASVPGKGRGLFAARSFFPGEVVISQEPYASTPNKISVGSNCDNCFASRNLRKCSVCRVAWYCGSACQREEWKLHQLECRAIAALTEDRKKMLTPTIRLMVRLVLRRKLQDDKMANLVQLILPSFELDLKEITHTFSKFACNAHTICDPELRPLGTGLYPVLSIINHSCVPNAVLIFEGRTAYVRALQPISKNEEDSEEDALLEGYRCNDQKCDGFLLPNAVDNSEVGSMYKTIEELERKLYHPLSITLLHTRETLLKIYMELQDWQTALMYCRLTIPVYERIYPPFHPMIGLQFYTCGKLEWLLEYTEDALMSLTRAADILRITHGTKSEFMKELLGKLEEVRAEASFRLSAGDEQ

SEQ ID NO: 17809 - protein, 562 aa, Oryza sativa
  Clone ID: TF_OSC400525j.C1.p32.gm
MAEEAKNLETARADRSVWLMKCPTVVSRAWQEAATAAASSSSSSDAAAGANSNSNANPNPVVAKFKMEMAQTGNGNTPKSYSLNMFKDFVPMCVFSESNQATPGAVGELAELVLPWLPPQDLAAAASASRALRAAASSVSAGRAADAAHGLEPHPIPFDNLVDGKPYAYFLYTPFSLTPSSASASPRRAQPWGRTWARPPGPTWPRSDLGGFPSSGCACAQGACGGARGCPCADPEAEAVGLGSEAGMGSLRECGDGCACGPSCGNRRTQLGVTVRLRVVRHREKGWGLHAAEVLRRGQFVCEYAGELLTTEEARRRQGLYDELASVAQPPGSSKRRGAVERPASGAGLQAEEASSAGPGAPCGACKFLRRRCVPGCVFAPHFSGCGGSGVGAGVGGRGRERGAAEFAAVHRVFGASNVAKLLSRVPAALRREAARTVCYEAQARIADPVYGSVGTILALQHQLSVLESQLFNLRVALASAHPDTPPQHFVVLQPAHSAASTLNQVVVNYDDLPHAVDFMDAEPAALRGLESLQLSQPLQREEDEGHRDMNLFSDSVGQRQL

SEQ ID NO: 17810 - protein, 103 aa, Oryza sativa
  unsure (1)..(103): unsure at all Xaa locations
  Clone ID: TF_OSC400536j.C1.p9.gp
MEDGSSIIDPTKFPERWREWGDASVVYPDRVPHFPLFAGARYRLDVSQRRNVACYISHSCSPNVFLQYVIRGNEDESYPHMMVFAMETIPPMRDLSIDYGLDX

SEQ ID NO: 17811 - protein, 531 aa, Oryza sativa
  Clone ID: TF_OSC900282j.C1.p4.fg
MAVSVFNTRRRTSLVSAFIDRTRMFISTPLPQVRDKVSRTKPPKPHGGGGERRRKKQPQEAAARAGGGMGGSSASPCDLDRDFAPQIAQLLATPPLQPAQEYYNGLIQSRKHDGIRVNFSSKHGKGVCANKEFAEGDLILKDQILVGAQHSLNKIDCAVCSYCFRFIGSIEFQIGRRLYWQSVGSSSDCTNRRHCHESDVGSSASSSGATKENSSTLPEEVLGSLITGDMSLPFTDHFSLPQVVPCRGCEEERYCSQSCADSDWETYHSLLCTGSKTEPSQRSALQKFIEHANGSNDIFLVAAKAITFTLLRYKKLKTQPEFQNNTDESNFSLLMEAWKPLSMGYKKRWWDSVALPEDVDSCDEDTFRQQIRDLALTIIIFCVSQSLQLLKDAIFDSDGLVVASPVEDYFIHIDDLPDDEKCNISQEEAEKVTRPFLDALGEDYAAPCEGTAFFPLQSCMNHSCCPNAKAYKRDEDTDGNAVIIALEPIKKDDEITISYIDEDVSYEERQAELADYGFICTCPRCQEEKPN

SEQ ID NO: 17812 - protein, 463 aa, Oryza sativa
  Clone ID: TF_OSC406486j.C1.p10.fg
MGGSSASPCDLDREFAPQIAQLLATPPLQPAQEYYNGLIQSRKHDGIRVNFSSKHGKGVCANKEFAEGDLILKDQILVGAQHSLNKIDCAVCSYCFRFIGSIEFQIGRRLYWQSVGSSSDCTNRRHCHESDLGSSASSSGATKENSSTLPEEVLGSLITGDMSLPFTDHFSLPQVVPCRGCEEERYCSQSCADSDWETYHSLLCTGSKTEPSQRSALQKFIEHANGSNDIFLVAAKAITFTLLRYKKLKTQPEFQNNTDESNFSLLMEAWKPLSMGYKKRWWDSVALPEDVDSCDEDTFRQQIRDLALTIIIFCVSQSLQLLKDAIFDSDGLVVPSPVEDYFIHIDDLPDDEKCNISQEEAEKVTRPFLDALGEDYAAPCEGTAFFPLQSCMNHSCCPNAKAYKRDEDTDGNAVIIALEPIKKDDEITISYIDEDVSYEERQAELADYGFICTCPRCQEEKPN

SEQ ID NO: 17813 - protein, 768 aa, Oryza sativa
  Clone ID: TF_OSC401001j.C1.p46.fg
MALQLMMDNYLLCSAMKGRLSVYSDSQLILVKMNRESNFMPTPDQDVLEVKPLRTLAPMFPAPLGIDVLNRLTAPPLVFVAPAGQFPGGFGSLNIPAVRSFAAFGGQDASGGKTAGGGDQDASGGKTAAGGDQDAGRGETAAFGGQETVRGEFVANGTPNVGASATGPIDATPISACKSTQPSVISLDDDDNDDDEPYGGNQTSASGRKIKRPSHLKGYNVSDGLGTDSSNGTKKRPKTSNRKAATDNEISLMPPSSDPREVVEVLLMTFEALRRRHLQLDETQETSKRADLKAGAIMLASNLRANIGKRIGAVPGVEVGDIFYFRMELCIIGLHAPSMGGIDYMNKFGDEDDSVAICIVAAGVYENDDDDTDTLVYSGSGGISRNSEEKQDQKLERGNLALERSLSRKNVIRVVRGYKDPACLTGKVYIYDGLYKIHESWKERTKTGINCFKYKLQREPGQPDAVAIWKMCQRWVENPAARGKVLHPDLSSGAENLPVCLINDVNSEKGPGHFNYITQVKYLKPLRSMKPFQGCRCTSVCLPGDTSCDCAQHNGGDLPYSSSGLLVCRKLMVYECGESCRCSINCRNRVAQKGVRIHLEVFRTTNRGWGLRSWDPIRAGSFICEYVGEVVDDTKVNLDGEDDYLFRTVCPGEKTLKWNYGPELIGEHSINISADTFEPLPIKISAMKMGNVARFMNHSCNPNTFWQPVQFDHGEDGYPHIMFFALKHIPPMTELTYDYGDIGCESRGVGSRAKNCLCGSSNCRGFFS

SEQ ID NO: 17814 - protein, 506 aa, Oryza sativa
  unsure (1)..(506): unsure at all Xaa locations
  Clone ID: TF_OSC401179j.C1.p22.np
SPFLGSTAISFSSAFFAFPSIGLASCGTKCASASAARSTTSPHVGSDKSNPCILNLIPPSSAARLRAWAAGARQGXRPPRPGRACRRGPAFEEYVKEWKAKKAALGVPAGRCELPFLTGTPKAVECRLCSKIIHPGEEIKCSVSRCGELFHLTCAAEDTTNFIAESFKCPQHGCMVCKQKMFFWRCGRCTVAAHTKCAPWPVIHLKDDQGSAICWRHPSDWLLQNEVYPFTLKIDEVFCRLPVPYVNEDFKIDSTIRDSAAVCKPPHFTFIRRNVYLIKKKRPDSRAEAGCTNCSADSTCKDDCECRGLYMSCSKNCHCSDMCTNKPFRKDKKIKAVKTKRCGWGAISLEPLEKGDFIIEYVGEVINDATCEQRLWDMKRRGDKNFYMCEISKDFTIDATFKGNTSRFLNHSCDPNCKLEKWQVDGETQVDGETRVGVFASRSIQVGEHLTYDYRFVHFGEKVKCYCGAQNCQGYLGNQIKNPTQRALAIAALENEWLESLKIQQD

SEQ ID NO: 17815 - protein, 421 aa, Oryza sativa
  Clone ID: TF_OSC22139j.C1.p1.fg
MLRSHSKARALPLDGTVEHLGCGQGVVIGAARQGEDQVGFLQELRSMPTTESMTVRTVRRKLRSAMAWGISEKASGLRSLSWTGWLRSPTTASSSACRPRREDVLVHEIAGELRRLGDHAPHLLHVVVVAGPPPAHHHARDDVAGDTHQRGVDVDVLGVGGTPAERADEARHLLAADMAEPEEERMEPPPPPPYIHIETNDFLHRRHKRQKEEDIAVCECQYNLLDPDSACGDRCLNVLTSTECTPGYCLCGVYCKNQRFQKSQYAATRLVKTEGRGWGLLADENIMVTEFTLILWSANVVKYIQAGQFVMEYCGEVISWKEAKRRSQAYENQGLTDAYIIYLNADESIDATKKGSLARFINHSCQPNCETRKWNVLGEVRVGIFAKQDIPIGTELSYDYNFEWFGGAMEATYLWEDDDDR

SEQ ID NO: 17816 - protein, 1153 aa, Oryza sativa
  Clone ID: TF_OSC401762j.C1.p10.fg
MLRSHSKARALPLDGTVEHLGCGQGVVIGAARQGEDQVGFLQELRSMPTTESMTVRTVRRKLRSAMAWGISEKASGLRSLSWTGWLRSPTTASSSACRPRREDVLVHEIAGELRRLGDHAPHLLHVVVVAGPPPAHHHARDDVAGDTHQRGVDVDVLGVGGTPAERADEARHLLAADMAEPEEERMEPPPPPPYIHIETNDFLHRRHKRQKEEDIAVCECQYNLLDPDSACGDRCLNVLTSTECTPGYCLCGVYCKNQRFQKSQYAATRLVKTEGRGWGLLADENIMVTEFTLILWSANVVKYIQAGQFVMEYCGEVISWKEAKRRSQAYENQGLTDAYIIYLNADESIDATKKGSLARFINHSCQPNCETRKWNVLGEVRVGIFAKQDIPIGTELSYDYNFEWFGGAMVRCLCGAGSCSGFLGAKSRGFQEATYLWEDDDDRFSVENVPLYDSADDEPTSIPKDILIKDEPNTQDGNNNTIQNTGIPIIASSSEFTPMNVEPSIASSNEFTPMNVEPLNVSSNELTPMTIEPLNAIPMGVDFTQNGSIEYGAQCAEDALQNSTRGVANLQNQSAPRDNNHTELVAVKRRPTLRGGKAKRGMRKQLNVVGICDRLASEVAREEILYCEEMKNEAAAEIDSLYDEIRPAIEEHERDSQDSVATSLAEKWIEASCCKYKADFDLFPLFRISRVMGKSEHGNLLVSLSDGLPHYSLAAAVGLAIGVAGLCKALHSSLVIPPVSQKKLLSNSDRLYYTGGLKNLGNNCFLNVILQALASCDGFVSSLDNLLGSEDVLPEEKSEKMPLIFALSSLIKVENKVLVPVTLVVSGITEQWWSGGIVTYCNTVNTLSLDFENFYCLPLSPVATINGDIINGCSLVDCLEHFTALEHLDNYRCDHCWHNVAAKYLSLKSEVDEEKINKLHTCVDYGTCSCRHIFTPEEMTCSISSQATKQLAITHFPKILCIHLLRASVGLDGEFVKRGGHISFPLLLDLSPFAGGALIPGQGPKPSAMNKQRHGQQTLHLWRQLNAEMPVNMFPAATDGDSSSHHCGDESINTLGRSFYVGNRDADSRFLSSSSLTDKLYGLSSVVEHYGVCGGGHYAAYRRVTPNSDSNEPVQSLASFRKEWLYVSDDHVSHVSECEVLAAEATLLFYERL

SEQ ID NO: 17817 - protein, 699 aa, Oryza sativa
  Clone ID: TF_OSC900423j.C1.p11.fg
MADDQSVGRRRIYYDPIVNEALICSESDDDVPEPEEEKHVFTEGEDQLIWWKERSEVLFEKYEKQSQSSYKTDLQLFLDKTMDVALDSFDNLFCRRCLVFDCRLHGCSQNLVFPSEKQPYGHELDENKRPCGDQCYLRRREVYQDTCNDDRNACTTYNMDSRSSSLKVSATILSESEDSNRDEDNIKSTSIVETSRSKITNSEYADKSVTPPPGDASETENVSPDMPLRTLGRRKISKHASKSNDHSPDKRQKIYSSPFPFAMSVLNKQSVPEIGETCPDSIESAVDQLPSLDDPNKKISTKDMCAGSTTNTTENTLRDNNNNLFISNKEHSISHWSALERDLYLKGIEIFGKNSCLIARNLLSGLKTCMEVASYMYNNGAAMAKRPLSGKSILGDFAEAEQGYMEQDLVARTRICRRKGRARKLKYTWKSAGHPTVRKRIGDGKQWYTQYNPCGCQQMCGKDCACVENGTCCEKYCGCSKSCKNRFRGCHCAKSQCRSRQCPCFAASRECDPDVCRNCWVSCGDGSLGEPLARGDGYQCGNMKLLLKQQQRILLGKSDVAGWGAFIKNPVNRNDYLGEYTGELISHREADKRGKIYDRANSSFLFDLNEQYVLDAYRKGDKLKFANHSSNPNCYAKVMLVAGDHRVGIYAKDRIEASEELFYDYRYGPDQAPAWARRPEGSKKDEASVSHHRAHKVAR

SEQ ID NO: 17818 - protein, 2139 aa, Oryza sativa
  Clone ID: TF_OSC403850j.C1.p3.fg
MEEPDGEARGREDHAAVGRLGGEEGAVGGGGLALLAVPEIGGELGDGGKVCGGQERRLPTEEDGVRDNGGGSAAELVESAVNVSTPFEGRGQIGGEKESSMQEGSMNMAGEKHGSYHVESAEPSNLQTCHAPNGGVSNKTLFAPFSEVFSSDNSHMRYLLDKATEGSICEHGDLADSKDDLGGATDVKTNTEDLQMVCTKPHCDSEGLSDLHNDSERWPQVVDGVGFTIKGNNELKQVDLIPKIEAEVSRSVEDDSIPSFSGGIDDSLRKAGCACETLNDMGMSHMANGDLWCNVLYAPLSEGCQSKDARHIAVMGNKVTQGSQCGQGDLACDGIVLRGGVDVEKSLDDLQMCSKEPQCDNKGFPYLTEFGVQQPSYGMNVICSKTDPNHQLEKDELLTNTRGEFSSSIHEDSVPSISVSSVDFTFDGNAGQIGKTSEHRAIMEKVSHGSQRGGVLSCESRSLKESHADENQSSTLEVKTCEEGLQTGQVEPCHSIVALSDSGKYGTDILPRGGDGLRSMTGANHELVKDDFHPKSDVVVSCPVDEASIPSNYNSPIDVLLYKEDGLVGEISENRIGVEKLAHDLLGEVMLSFDSRPQTEASGDENQHFWMDVPKGSTASVCEVENTGTRRSCDPCAEIEFPLQQSREKHVISESPPERDLTSSSHNLPCENEPCYSGRETPAFCLGHQDSAGLGLESSDCLVQELNTCTSTDDKACSVDFVENGNGSHNQKEVPVIFFRRRNPVRAASSRNSNFEKCDQINKSGNSTRKSKKVDSVSSLLKSTMIKFPNKTTKGRSGINRPLNSSAWGSLQKLMDGFNQNCGPSTSRSHQTCLGKEISNRGSSEKKQLSIRKIRTSRCSKYKNTSLSDIGYLAGELNGQPTCSVRIDTNVSSDALFNSPNGAHKAAQCVEGNHTLKLTSSLTDTQQFGLENVTQETCPGYIHGECGTSTSERSLNNIVGFSPDSVLDIASVTCESNTSATLDVIVHENPSCPGGLIGGGLRASALSTSHCENHHASSLMDLEQQVKTVRENDMGEEDVIPSHAMMYNDIGEGKQTLAKSNTMRKGRNVGKQECRKKDGKKGKNINKNRSSTKISSSEASKLVSFSNDSPSLDPSELLLHTRPPKFGSCSKVVTSAIHDVGMHGYDNMRPFGIDNDDEGSAFDNVKSLRRKKKDSHGGKKGKVRDPHGKGRSKKKNIADNTYGDLIPAAELVFKNSSAVSVELPAVVACKTDGASVPPAPAWVCCDDCEKWRCIPTELADKISKENLRWTCKENEDKTFANCSIPQEKTDDEINAELGLSDASADEANGDGSNSKASGEPNFALLRSNLFLHRNRRTQSIDEFQRRTYAKLGKFHTGKKGYGLQLKEDVSEGRFLIEYVGEGNMLCLNVDYVGFTFVVLDITAYESRQRYYASKGQKHFYFMALNGGEVIDACTKGNLGRFINHSCSPNCRTEKLYSYFESIKLLFPCEQWMVNGEVCIGIFAMRNIKKGEELTFDYNYVRVSGAAPQKCFCGTAKCRGYIGGDISGADMITQDDAEAGTFEPMAVQEDAEEVLGANGLSSHGTHLDIVDHEASTKTEDSNDCPSVNPPELESEQQTSGTLFDTSEPENSLEALSPQDDEDVVRTPVHVSRTVESTSRQFPEYGTRSSEILQRAPCTLDGPKVPSTTNGIPPSSDLGSHWVPGFHANKKTNVKHHLILNPSSAPIDSEHILGGLHMTVNDRYLTCTVEGRLNSLLDVNGGISKRKDATNGYLKLLLVTAAEGDNAGGTSKSVRDLSLILDALLKTRSNSVLLDIINKNGLQMLHNILKQNKSDFHRIPIIRKLVKVLEFLASKGILTSEHINGGPRCAGTESFRESMLGLLRHNDMQVQQIARNFRDRWIQWAPRNISRNEPTEYSRASISAHDIHVISTAGGSFPTSANTMDWKSIRRKRKSRWDYQPDDHYKMGGLKIQKVCPVQSEFRTGSVGNKLHGNWGTNSSHNDVPVVGSSADGADDEAPPGFESQQESRPGQACLESGVSPGLYLESILEPQKLKEGHVAKTGKSHLVCLSSPFHHCRPIQEGVLVLPLRCLSMNTTVWDIVAGLQIETGEYIGIGEMGREQNFHTIIKDGDFLTIIKDFESCLLPPTSQEQGDPGPRGRE

SEQ ID NO: 17819 - protein, 826 aa, Oryza sativa
  Clone ID: TF_OSC401237j.C1.p16.fg
MKRKSVNERPRNYHVNEKGIYIFFEEILSSTNQIYMFLNLFVHCEQGSAVSTSQLRTGMAKPNGKEKTGDTGLSMAPPKISKDRFDAAIRAMADIGILKETAAPVLNNLLNLFDYNWVHIEADNYLALADAIFCDSDPKEGQKRQANETNLDADQSNKKLKTKKRSQNPTSKMHGNDNREFVEAPPQQGRGTLSARTVNGKKVTRAHLELPSSQLLIKEPHTCPSIAKNTTIVENNSAVLCHGQDLQTFEVPVATTCPQVVAPSTRKDARRTSGARHDQKHEGVSGAHERNRAVACSNQEIVSSKDSPSNIEVVLSNYGAGKLSFTYNSSLANRSDFHLPDIKLICKKMEARCLRKYKSLEPNFSFKNLIKDTCQCIVESSGPRHEGIIQTVPALDILSKPSVPQILQSNQANSAFMPPNNVMSLGGTSSSCTVAGVSQNSSNMPVVPHQLHIGANRPPHDVNDITKGEERLRIPIINEYGNGILPPPFHYIPHNITLQEAYVNISLARIGDDNCCSDCFRDCLAQSLPCACAAETGGEFAYTTDGLLKGAFLDSCISMIREPLKHPHFYCKICPNERMKIEVNSDSSNTEMNPGPCKGHLTRKFIKECWRKCGCTRNCGNRVVQRGITRHLQVFLTPEKKGWGLRSTEKLPRGAFVCEYVGEILTNIELYDRTIQKTGKAKHTYPLLLDADWGTEGVLKDEEALCLDATFYGNVARFINHRCFDANIIGIPVEIETPDHHYYHLAFFTTRIIEPFEELTWDYGIDFDDVDHPVKAFKCHCGSEFCRDKTRNEWFYAAALVWFINEIALADKSLYTATGSKSRARV

SEQ ID NO: 17820 - protein, 841 aa, Oryza sativa
  Clone ID: TF_OSC401000j.C1.p1.fg
MGIPEVVVPPRAAGPRRYKGLVPWRFQPGFVRPPPVKPPAAAAAVAGGGVAGTPGGKGRGLGASGEGVGSSGGRGDPQSRRCTRSASAKGSGDARSVEEGGPRVAGDDGGSGKSGVAAEGSGFEGLRNGRGGGVGTAAAEDCGLEKSNPDGIVGDADVHLESGSDARDGECVSEGLKKPCVNNSNGSSAADCAPKVKKGNDSGNGGADECNAAAKSSNLACPGNNGDETNRKGRKVVLPWRFQVGFKRSFSKAFCSDSESSGPSGTQFYRAQDSSTPCTPATRSSVRCYASAHSGVRVSAMRDFSVKGEKETSTPYKKSKTGMDGPSQGMPKNGVVLARENIMGSLQNFRLIYRDLLDEEEEKSTEAVIRPDLQAYRIFRERFITDCDEKKYIGNVPGIKVGDIFHLRVELCVVGLHRPHRVGVDHIKQEDGTCIAVSIVSYAQSSDIKNNLDVLVYSGAMTAIANQKIEGTNLALKKSMDTNTPVRVIHGFVTHLNGNCQRKKIPTYIYGGLYIVEKYWREKEGNDRYVYMFRLRRMAGQKHIDIQDILNSGQAESYGGIIIKDISRGLEKIPVSVVNSISDEYPMPYRYIAHLQYPRNYQPAPPAGCGCVGGCSDSKRCACAVKNGGEIPFNDKGRILEAKPLVYECGPSCKCPPTCHNRVGQHGLRFRLQVFKTKLMGWGVRTLDFIPSGSFVCEYIGEVLEDEEAQKRSTDEYLFAIGHNYYDEALWEGLSRSIPSLQKGPDKDEEAGFAVDASKMGNFAKFINHSCTPNLYAQNVLYDHDDKSVPHIMFFACEDIPPRQELSYHYNYTIDQVHDANGNIKKKKCLCGSIECDGWLY

SEQ ID NO: 17821 - protein, 506 aa, Oryza sativa
  Clone ID: TF_OSC409873j.C1.p16.gm
MAGTRQTTSVPMDNAAVVDAKPLRTLTPMFPAALGLHTFTAKENSSSIVCITPFGPYAGGTEQAMPASIPPMFASPAAPADPNQRQPYAVHLNGAAPANGTANNTGVIPDLQIAVAGTVESAKRKRGRPKRVQDSSVPSAHLVPSAPGGNITAVQTPPSATTDESGKKKRGRPKRVQDVPVLSTPSAPQTPSAVTLPEDGKRKRGRPKRVPDGALIPLSHSDDPRESVDNVLMMFDALRRRLMQLDEVKQGAKQQHNLKAGSIMMSAELRANKNKRIGEVPGVEVGDMFYFRIEMCLVGLNSQSMSGIDYMSAKFGNEEDPVAISIVSAGVYENTEDDPDVLVYTGQGMSGKDDQKLERGNLALERSLHRGEVIDRNSIIGEDDYIFETPSSEQNLRWNYAPELLGEPSLSDSILYDHGDEGYPHIAFFAIKHIPPMTELTYDYGQSQDPAALYLGGKLTWHMGAGRTFLGAMNFARGPLAVFCLGGKGPPCKICKGGKGPRCKKN

SEQ ID NO: 17822 - protein, 663 aa, Oryza sativa
  Clone ID: TF_OSC422929j.C1.p3.fg
MENSEDEAESDKLPLDLEPLRSLAPKFPTILGYDVETQSTDPLLVYATPSIPCSSSEQPQEAPASFSLPLPKSPVPIKATPISAAFPTPQHEDESSDQDYKPFCKNKKPAMPKRAKRPQQAEKSNDANIKRRSIRRNLDNEFNLCSSSSDNPKESVEGILMMFDSLRRRVLQLDEKEDASRRADLKAGTLMMQNNLRINNHKMIGHVPGVEVGDIFFFRIEMCIVGLHAPAMGGIDYISSKNKDETLAVCIISSGGYENDDDDTDILVYTGQGGNSRHKEKHDQKLERGNLALMNSKSKKNQIRVVRSAQDPFCNSGKIYIYDGLYRIEDTWTDTAKNGFNVFKYKLRRDPGQPDGISLWKMTEKWKANPATREKAILLDLSSKVEHLPVCLVNDVDDEKGPSHFNYVAGVKYLRPLRKTKPLQCCKCPSVCLPGDPNCSCAQQNGGDLPYSATGLLAKHTPMVYECSSNCQCSHNCRNRITQKGIKLNFEVFWTGDRGWGLRSWDPIRAGTFICEYAGEVIDETKMDIDVEEDKYTFRASCPGNKALSWNLGEELLEEKSTAVITKNFKKLPIIIRANNEGNVARFLNHSCSPNLLWQAVQYDHGDDSYPHIMFFAMEHIPPMTELTYDYGTRGAPPGFEGKPFKACKLKSCLCGSKHCRGY

SEQ ID NO: 17823 - protein, 739 aa, Oryza sativa
  Clone ID: TF_OSC401693j.C1.p9.gm
MEMDTSPSSSAPSSPAASSDSIDLNFLPFLKREPKSEPASPERGPLPLAAAAPPPPPPPPPPPPPPQVQAATVATPVPATPDLSAAAVMTPLQSLPPNPEEETLLAEYYRLATLYLSSAGAAGVIVPAAAPEASAGAVAQPGSGSGAKKRRPRSSELVRVSSLSVQDQIYFRDLVRRARITFESLRGILLRDDERAEVLGLTGVPGFGAVDRRRVRADLRAAALMGDRDLWLNRDRRIVGPIPGISVGDAFFFRMELCVLGLHGQVQAGIDFVTAGQSSSGEPIATSIIVSGGYEDDDDRGDVLVYTGHGGRDPNLHKHCVDQKLEGGNLALERSMAYGIEIRVIRAVKSKRSPVGKVYFYDGLYKVVDYWLDRGKSGFGVYKYKMLRIEGQESMGSVNFRLAEQLKVNALTFRPTGYLGFDISMGREIMPVALYNDVDDDRDPLLFEYLARPIFPSSAVQGKFAEGGGGCECTENCSIGCYCAQRNGGEFAYDKLGALLRGKPLVYECGPYCRCPPSCPNRVSQKGLRNRLEVFRSRETGWGVRSLDLIKAGTFICEFSGIVLTHQQSEIMAANGDCLVRPSRFPPRWLDWGDVSDVYPEYVAPNNPAVPDLKFSIDVSRARNVACYFSHSCSPNVFVQFVLFDHYNAAYPHLMIFAMENIPPLRELSIDYGMIDEWGTAIQSKVVTPRMLAWQGYDVAQSFSVSRSIMPGRITEACIWDDVSSLPMRKAKSQLIVIH

SEQ ID NO: 17824 - protein, 594 aa, Oryza sativa
  Clone ID: TF_OSC416986j.C1.p5.fg
MASPPPPPRLLTPKPDPDAPLPPLPYPDPNLVQSMLFSAQSPQAQPQAPPPHIQPPASASAEAPSGDEKNKKKKKRARASQEMVRITNLSIADHLHYRSLVRRARLTFEALRAIYQRQDLATAGGIRNRFDLRASSKMLSKGLWMHRDIRTVGSIPGLLVGDSFFYRAELCVLGLHTAPQAGIGYIPASIVDQGHPVATSIVSSGGYLDDEDSGDVLVYSGSGGRLRNRLDHSADQTLQRGNLALHYSCHYGIEVRVIRGHACDHSPSSKVYVYDGLYRVVTSTFGPGKSGRDVCKFKLVRIPGQDDLGSKAWHTAAELKDALDSKIRPPKYISLDIAKGKEPFRVPLYNKLDDDRSPLFYDYIACPDFPTTQQLLKRQTQRGCHCAELCGSRCSCERKNRGADGPVYTSDGILLRGRPLVYECGPLCGCPMTCPNRVTQQGMKHRLEVFRSKETGWGVRTLDLIQPGAFICEYAGDVLSLDSHSGDAPLPPMEDGSSIIDPTKFPERWREWGDASVVYPDRVPHFPLFAGARYRLDVSQRRNVACYISHSCSPNVFLQYVIRGNEDESYPHMMVFAMETIPPMRDLSIDYGLD

SEQ ID NO: 17825 - protein, 459 aa, Oryza sativa
  Clone ID: TF_OSC401218j.C1.p25.fg
MGGSSASPCDLDREFAPQIAQLLATPPLQPAQEYYNGLIQSRKHDGIRVNFSSKHGKGVCANKEFAEGDLILKDQILVGAQHSLNKIDCAVCSYCFRFIGSIEFQIGRRLYWQSVGSSSDCTNRRHCHESDLGSSASSSGATKENSSTLPEEVLGSLITGDMSLPFTDHFSLPQVVPCRGCEEERYCSQSCADSDWETYHSLLCTGSKTEPSQRSALQKFIEHANGSNDIFLVAAKAITFTLLRYKKLKTQPEFQNNTDESNFSLLMEAWKPLSMGYKKRWWDSVALPEDVDSCDEDTFRQQIRDLALTIIIFCVSQSLQLLKDASGLVVPSPVEDYFIHIDDLPDDEKCNISQEEAEKVTRPFLDALGEDYAAPCEGTAFFPLQSCMNHSCCPNAKAYKRDEDTDGNAVIIALEPIKKDDEITISYIDEDVSYEERQAELADYGFICTCPRCQEEKPN

SEQ ID NO: 17826 - protein, 684 aa, Oryza sativa
  Clone ID: TF_OSC900416j.C1.p2.fg
MEMDTSPSSSAPSSPAASSDSIDLNFLPFLKREPKSEPASPERGPLPLPAAAPPPPPPPPPPPPPPQVQAATVATPVPATPDLSAAAVMTPLQSLPPNPEEETLLAEYYRLATLYLSSAGAAGVIVPAAAPEASAGAVAQPGSGSGAKKRRPRSSELVRVSSLSVQDQIYFRDLVRRARITFESLRGILLRDDERAEVLGLTGVPGFGAVDRRRVRADLRAAALMGDRDLWLNRDRRIVGPIPGISVGDAFFFRMELCVLGLHGQVQAGIDFVTAGQSSSGEPIATSIIVSGGYEDDDDRGDVLVYTGHGGRDPNLHKHCVDQKLEGGNLALERSMAYGIEIRVIRAVKSKRSPVGKVYFYDGLYKVVDYWLDRGKSGFGVYKYKMLRIEGQESMGSVNFRLAEQLKVNALTFRPTGYLGFDISMGREIMPVALYNDVDDDRDPLLFEYLARPIFPSSAVQGKFAEGGGGCECTENCSIGCYCAQRNGGEFAYDKLGALLRGKPLVYECGPYCRCPPSCPNRVSQKGLRNRLEVFRSRETGWGVRSLDLIKAGTFICEFSGIVLTHQQSEIMAANGDCLVRPSRFPPRWLDWGDVSDVYPEYVAPNNPAVPDLKFSIDVSRARNVACYFSHSCSPNVFVQFVLFDHYNAAYPHLMIFAMENIPPLRELSIDYGMIDEWVGKLTM

SEQ ID NO: 17827 - protein, 126 aa, Oryza sativa
  unsure (1)..(126): unsure at all Xaa locations
  Clone ID: TF_OSC9932j.C1.p1.np
ASNIXKRREYFIYFVRNIIDDETCEERLEDMRRRGDKNFYMCKVKKDFVIDATFKGNDCRFFNHSCEPNCQLQKWLVNGKTRLGVFASKAIEVGEPLTYDYRYLHYGPEIECFCGAQNCQGNMSVN

SEQ ID NO: 17828 - protein, 523 aa, Oryza sativa
  Clone ID: TF_OSC401276j.C1.p12.fg
MAGPPGPAPGTSSSSSSLPSRRRRRPPPRLGRRRGGDDQQPPHPPKASSEALPCAASPPARCRGGDHQPPHPPEAALEALRGAASPPARRRGGDLHPSHPPEAASEALRGAASPPERRRGGDRQPSHPTEAASEAPSGSASPPARRRGGDQQPPPAVAVAVTSEGGVGPRRSFRISLRHRVRVVPWVKPPVARKPKDPAKPPRPSIEALAAEWAKEKAASGAPEEECVLPFLQKDAPKKLDIVKVLGLDGFGYMDTVILSLKSYRKNIPITVGNFVIVMQSCIRLVLKKVMDAVLDMMQVQQMEAFRRLPLPHTFQEFNIDPIKKEELDNGTEPPPYKIKIIPTGLYWLAALGLVTAQMSALTNHFADRKRLRSLSGILLQTQYCGWGSRALEAIEKDDFVIEFVGEVIDDETCEERLEDMRRRGDKNFYMCKVKKDFVIDATFKGNDCRFFNHSCEPNCQLQKWQVNGKTRLGVFASKAIEVGEPLTYDYRFEQHYGPEIECFCGAQNCQGNMSTPYILNFE

SEQ ID NO: 17829 - protein, 1158 aa, Oryza sativa
  Clone ID: TF_OSC421726j.C1.p17.fg
MQPELVPEWKTWKQEVMKQFFSSHPVGNAGNFEQHNCYDDPGMDQQARIKHSKLEVRRGEAHFSQEDDANLNTLSEDPNKSNLPSISIIHEAVGPLESRDQNKTAAFPSTSGVQDTGEPNSALHNVRHELDSFKSSRQCSAYIEAKGRQCGRWANDGDIYCCVHQSMHFADHSSREDKSLTVETPLCGGMTNLGRKCKHRAQHGFIFCKKHRFQTNPDAMSSDSLLSSSEGRKWEESQKSVEKMSSSNATCSVGSEQANNFQVAVHMKVTPTMAVETTSDKVNVSENADLCYPMSTSMENSNLDASICIGIRSHDNIAECQDYAVRHTLYCERHIPKFLKRARNGKSRLISKDVFINLLKCCTSRKEKLCLHQACEFLYWFLRNNLSHQRPGLGSDHMPQILAEVSKNPDVGEFLLKLISSEREKLSHVWGFGTDSSNQMHSENQDGSVMVLREDGTHPSPGLKCKICSQEFSDDQGLGLHWTEVHKKEVRWLFRGYSCAVCMDSFTNRRVLERHVQEKHGAQYLQYSTLLRCISCNSNFLNTDLLWQHIVSDHSRDFSLLDHVPRRPRGQSIKRTERASDELLYDNHNLGKDDGLQKFTCRLCGMMFDLLPDLGHHHQVAHTNSGTVSDIPSGREKYQFNRGRHYYSAFKKSLRPSGSLKKRTSSGVEKHFKAQSLDLSMDTSHIVESETTTLGRLLDFQCSDVALTLFSKIQKTRPHPSNLDILSIARSVCCKTSLRAALKAKYGILPDNIFVKAAKLCSDVGIQIDWHQEEFFCPKGCKSRSSSNSLLPLQPTQVDFVMSPPIGDEIWGMDEYHYVLDSEHFGWNLKNEMVIVCEDVSFGREKVPVVCAIDVDAKEFPYMKPGEILQSENSLPWQGFHYVTKRLMDSSLVDSENTMVGCACSHAHCSPEECDHVSLFDSIYENLVDLHGVPMRGRFAYDENSKVILQEGYPIYECNSSCTCDASCQNKVLQRGLLVKLEVFRTENKGWAVRAAEPIPQGTFVCEYIGEVLKMKDDGAIRHVERLEIYWNFSGAFHKLIRKLLDLREAKSGSSYLFEITSQIDRERVQTTGTTAYVIDATRYGNVSRFINHSCSPNLSTRLVSVESKDCQLAHIGLFANQDILMGEELAYDYGQKLLPGDGCPCHCGAKNCRGRVY

SEQ ID NO: 17830 - protein, 696 aa, Oryza sativa
  Clone ID: TF_OSC401583j.C1.p35.fg
MEVSPVPKPPLEAALALRRSVRCLNRTRRPTYVEQEEPKESAGRRRGGKRKREEEKKEPVAQHAMKPVRMGDAASERKPSSEGKPMPAIAAEPVSCAGFARPAAEDDVLGNGKSAKLRVKETLRAFTSHYLHLVQERMLSDNALVEFQEEQKRAQAVLQEGQKRPSKRPDLKAITKMQESNAVLYPEKIIGELPGVDVGDQFYSRAEMVVLGIHSHWLNGIDYMGMKYQGKEEYANLTFPLATCIVMSGIYEDDLDKADEIIYTGQGGNDLLGNHRQIGSQQLQRGNLALKNSKDNGNPIRVIRGHISKNSYTGKVYTYDGLYKVVDDWVQNGVQGHVVFKYKLKRLEGQPSLTTSEIDYYVWSCFVYSVPFLVTLISCCMTCALLLSRLVCDDISGGQENLPIPATNLVDDPPVPPTGFVYSKSLKIPKGIKIPSYCNGCDCEGDCANNKNCSCAQRNGSDLPYVSHKNIGRLVEPKAIVFECGANCSCNNNCVNRTSQKGLQYRLEVFKTASKGWGVRTWDTILPGAPICEYTGVLRRTEEVDGLLQNNYIFDIDCLQTMKGLDGREKRAGSDMHLPSLHAENDSDPPAPEYCIDAGSIGNFARFINHSCEPNLFVQCVLSSHNDVKLAKVTLFAADTILPLQELSYDYGYVLDSVVGPDGNIVSCLASVVHRTAGSDFIRSAPVCIYLEYEPL

SEQ ID NO: 17831 - protein, 1292 aa, Oryza sativa
  Clone ID: TF_OSC400435j.C1.p7.fg
MSGLDLREMLSSAARRHTWRRSGWGAEWGGGDDARSAALPARCPPPPPPRRPAAAGGRGDEGSGGVRGRGEEGTSRGGSGARREDAAGTGRNAVAVVAGGSATSGAERVAARAEDGRRSMDGPTLELSEMMLHAAQPWRSRCTQRDVRPGAVPPRPVAADGRGEGTSTVRGRVLEGTTRGGGRGGGMEREREVVAPARNAVAVAGDLATHGGERVAGPLVAKEKRNGGGELGTKRGLEKRAPLPPPKRRVVSAKRQFPPDFGRDSAVPLGRGRGRGGGVRPSDGAPARAVLGEKVASAGNGDSMANVHHHAVMDTVLMKSSHASDENLVAFKVGSPENGAEGAARGKGAHNGELLGKREVLAQAVNLLPMRRTVSATHRFTAGCGRDAAAPLARREEGKVGSGLEVMPVDVGGGVSKEVMATDGSKHSVNQCTANIVGAVGVLDGTVQYQELEEGEVADEAYCDVESQKVVGCDSFDDSAGERHEGVVPVTFAVTEVLTSHAYDEMMQIKALQEGGSDAAQETEHDLPMGGKCETILPDASPKCSFGGPSNEIVHGKRVLGSHGMKGEVPSLAIEDHGGIAQIDQELEDVEMTTGEYRVQDAQIATHVIPHESTTGRHEGGLCASAAAEDVKVMNKYKGTLPKGAAKSSMNIATGVFGDGIMRSKILSTARKVVKPPVRASHKPPLNTLHRPFSTNSASFGHKKLKVKRPDQSKDIPMKIASTSGLAGKDNLIDEKALSLEDDDILKALVVHDGKLEVYLNVPSCVQLHRQHGSGNADDRSKIRMLCRRFQFICRALLHAVEQGSLKIRRVDLAADKIIRKLPGFTKPGPTVGNVNGVEVGDEFMYRVELALVGLHRPYQGGIDTTDYNGVLVAISIVCSGGYPDELSSSGELIYTGSGGKPAGKKKDEDQKLERGNLALKNCIETKTPVRVIHGFKGQNREDNSHSRAKQILTFTYDGLYLVVDCWTEGLKGSRIFKYKLQRIPGQPELPLHIAKGLRRSLSRPGLCIADISQGKEMDPICVINDVSNVHPTSFQYISRIKYPSWLTKRHPQHHGCDCSDGCIDSTKCFCAVKNGGKIPFNSNGAIVHDKPLIFECGPSCRCHSSCHNRVSQKGMKIHLEVFRTANKGWGVRSLRSISSGSFICEYVGILLTDKEADKRTNDEYLFDISHNCDDEDCSKGRPSTISSLNSSGGCSQTMEDVCFTIDASEYGNIGRFINHSCSPNLYAQNVLWDHDDQRVPHIMFFAAENIPPLQELTYDYNYKIGEVRDLNGRVKVKDCHCGSPQCCGRLY

SEQ ID NO: 17832 - protein, 678 aa, Oryza sativa
  Clone ID: TF_OSC1067j.C1.p1.fg
MDASALSNPRLQAMLEEEKRKAMANEFVAKLTDVCWDKCITGSIGSSFSNSEASCLSNCAKRFLELKMLTMQRPQEAPASFSLPLPKSPVPIKATPISAAFPTPQHEDESSDQDYKPFCRQKKPTLPKRAKRPQQAEKSNDANIKRRSIRRSLDNEFNLCSSSSDNPKESVEGILMMFDSLRRRVLQLDEKEDASRRADLKAGTLMMQNNLRINNHKMIGHVPGVEVGDIFFFRIEMCIIGLHAPAMGGIDYISSKNKDETLAVCIISSGGYENDDDDTDILVYTGQGGNSRHKEKHDQKLERGNLALMNSKIKKNQIRVVRSAQDPFCNSGKIYIYDGLYRIEDTWTDTAKNGFNVFKYKLRRDPGQPDGISLWKMTEKWKANPATREKAILLDLSSKVEHLPVCLVNDVDDEKGPSHFNYVAGVKYLRPLRKTKPLQCCKCPSVCLPGDPNCSCAQQNGGDLPYSATGLLAKHTPMVYECSSNCQCSHNCRNRITQKGIKLNFEVFWTGDRGWGLRSWDPIRAGTFICEYAGEVIDETKMDIDVEEDKYTFCASCPGDKALSWNLGAELLEEKSTAVTTKNFKKLPIIIRANNEGNVARFLNHSCSPNLLWQAVQYDHGDDSYPHIMFFAMEHIPPMTELTYDYGTRGAPPGFEGKPFKACKLKSCLCGSKHCRGY

SEQ ID NO: 17833 - protein, 335 aa, Oryza sativa
  Clone ID: TF_OSC900159j.C1.p20.fg
MVVDYWKEGPEGSMVYKYKLQRIPGQPELALHIIKATRKSKVREGVCVPDISQGRERIPIPAINTIDDTQPTAFKYTTEVIYPHSYAKEPLKGCDCTNGCSDSNRCACAVKNGGEIPFNSNGAIVEAKPLVYECGPSCRCPPTCHNRVSQHGIKIPLEIFKTGNKGWGVRSLSSISSGSFVCEYAGEVLQENGDEHVETDEYLFDIGHHYHDEVWEDPKFEGILGLESSTSKTTEDTEGSKTTEDTEGSTIDASKCSNVGRFINHSCSPNLYAQNVLWDHDDMKKPHIMFFATENIPPLQELTYDYNYGKVEDKNGKEKVKPCFCGSPDCSRRLY

SEQ ID NO: 17834 - protein, 1015 aa, Oryza sativa
  Clone ID: TF_OSC400961j.C1.p13.fg
MEPGQLPMVARRCIRHQQSTSRLMSVAWSAMRPALRPMSLVRPTPFTAPSVSTCPVAMACCAASTAVWNPNEPPLLDLTVDCRRAAHHVVPTAVGVGRRRSRGGAGGRGCRRWASEGGAWKLVLSPQPMFCEEGSSESGYVLCVIDSLKKKITSDRFVYIQKRVEENSIKLSPITLHSHNLSKNRQTSTSNSTDLVSNLLTKRKEDALCAVNSRESSPDESEGANCQDECSSTVIVGGNLSARNSVRPIRLPEVATLPPYTTWIFLDRNQRMQEDQSVLGRRRIYYDTNCGEALICSDSEDEAVEDEEEKKEFKDSEDCIIRMTIQECGMSDAVLETLARDIERAPDDIKARYEILQGEKPEGSSKKVSELNVKMEDVYGDKDLDAALDSFDNLFCRRCLVFDCKLHGCSQDLVFPTEKQAPLCSSDEGTPCGIHCYKLVSKPDAIMEIDSHLLVDVEEPTSDNLKDQIGSNKKKLGSSGQKTKSQQSESSSTARVSSESSESEVQLLSNKSPQHSPGLSKNKLGAKGGIKKSTNRRIAERILMSVKKGQQEMSPDSNSIVNGCHWPRDMKLRSDTRSGIKDSVVSSQCNSPSTRSFRKKGTLQMENNSSFVDAQSDSMEDTNNEHSATDGCDSSRKEECVDESICRQEAHGRSWKVIEQGLLLKGLEIFGKNSCLIARNLLGGMKTCTDVFQYMNYIENSSASGALSGVDSLVKGYMKGNELRTRSRFVRRRGRVRRLKYTWKTAGYHFIRKRITERKDQPCRQYTPCGCQSACGKQCPCLTNGTCCEKYCGCPKMCKNRFRGCHCAKSQCRSRQCPCFAADRECDPDVCRNCWVGCGDGTLGVPNQRGDNYECRNMKLLLKQQQRVLLGRSDVSGWGAFLKNSVGKHEYLGEYTGELISHKEADKRGKIYDRENSSFLFNLNNEYVLDAYRMGDKLKFANHSPDPNCYAKVIMVAGDHRVGIFAKERISAGEELFYDYRYEPDRAPAWARKPEGPGAKDDAQPSTGRAKKLAH

SEQ ID NO: 17835 - protein, 1193 aa, Oryza sativa
  Clone ID: TF_OSC417639j.C1.p16.fg
MPHSRSDSGSGSRGADPCRGRKRGRLLMLEEEEEEEESGMEGCSAPACGDVRGDFVGWCSDRHQVASCSGDQTQSASMFAAMQENACSIDSKGVVCPQSGLGYSAGQNGTHGGGGSMLHQNLEGCMYMNQLGQMCGPYPPEQLYDGLSTGFLHRDLAIYAVFGGKMANPVSLGSLKQFLSQWSSDSVVATRDESVENKKMAPVNKLILPDNLSSEESCWMFEDAEGRRHGPHSLAELSYWHHSSYLHDLSMIYHVDSKFGPFTLVSLIDWWSGGTEHSESSANDSGSLNALMDDVVEDISHQLHAGIMKSARKVFIDEIFSSVLPEMIACRKTEKQMAAKRKSQAAKTDNVSNKNALVLKGKGDGTSTRPKSLNSYNNKVPEDPSVAVQSTAMQYEFADILSAVWETIYNKSMKSIWDEVLYDPVMDYCDAWLKRKNESNLLSTVVPGASDNQKMQDTDEMSPKAICDSDAPESDMDFPPGFGPNQESAEHSHSACVEYVTEKTDGRSGSSITLFSGPLGRVQERIRTPVHAPEPSSPPGISVHETPSPAEMPRDEISDMAEMARDEISDMAVDTIPCPADMAASGTSTVPEVTTDKLIIPYVEHQSPSASHASIFEKLDAHEEAELDDSFDEVPPGTEAGLASLVIMEKNKYQPSKSVDSVLDIYRYTSWAFFRQILHESVMKEWASLFSGALSNCFDSWYARKNIVAKTMDDTLRPKEYTYYRKRKLRKNCEASSSEKPMDEQLSRPLRDLVECKVNMKNIHRSSKAGISQRVSVVEKPSKKRAKPSHNDNINLNIQQDLKLLSDKVPKRNRSSHPTSKPLVSSKVPTEDRTTSAMPAKKRKQKNLATESNLKTKAVILSPESHGCEAPTEKRTTAIMPVNKRKKNLSGESKLKAKPLTSPESYVCEAPIDNRTTSTMPAKKRKQKNLSNESNLKKKPLVLCPESYGCARASVSGWEWRDWARNATPSERAQVRGYRVRSILSAPENNVLKSSQVKGSSARTNRVKLRNLLAAAEGTDLLKIMQSKSRKKRLRFQRSKIHEWGLVALESIDAEDFVIEYVGELIRRQVSDIREDQYEKSGIGSSYLFRLDDDYVVDATKRGGLARFINHSCDVPRINELGSKVYKSGGNCNWVLPQYVCVMRACRLYWAEVHCRNVLGFTDRMVRWTNSGYPEEGQQHYYIDWIEDIEFTR

SEQ ID NO: 17836 - protein, 336 aa, Oryza sativa
  Clone ID: TF_OSC401117j.C1.p6.fg
MADICLDKASRTRTNYYESRSKDADEIDTGAVKVSEDFIVSDIAIHPRHAKQMRPHQLEGFSFLVKNLVGDKPGGCILAHAPGSGKTFMLISFIQSFLANVFNALYSEPVIQGRVLNRKGWIYVGEQGDVRKNYIWCKLGTWKREFQWWQVEDIPLYDFYSVKADKRVEQLEVLKYWEAQMSILFLGYKQFSRIICGDGDGNIAAACWDRLLMVPNLLILDEGHTPRNRETDVLASLKRHHAKWSCLTYNESGSNIRYQSLKGVHDSAFTESVEDTLLNDDNFTRKAHVIRSLRELTKDVLHYYKGDILDELSGLVDFSVFLKLSNKLKEIVHCWN

SEQ ID NO: 17837 - protein, 920 aa, Oryza sativa
  Clone ID: TF_OSC18752j.C1.p1.fg
MAWTWRPEDLFLETLKDSLARQRAWRHRGIAWRWPGMRGQSGRGVATGRGGTTWRLDDDIARDYAVGDVGLEGVEDMQLVVLRVAKGGDGGGAAAEAEEAEEAHPADYTAGTQHCLGAFEVVAVTPALTDTRNVDAVLARLPSITEGHSHLQKRARERYAALSAGDKEARLQKMREYYQRKKSIDPVPTHVILPDEKQLKVLNPCKFVLNVLTKRARGKRWVFSLNVTGTNTDNEKSYELDTTYYCKGIYNPRWRTTSGAGTGAVAEGSSARGRRAVSVTGSSPVVVANSVSSQRNPKARFRTCTGVKQTSQASVCFFINTWASQRRGQGWKEKNQVREPCPQATTSPNVSPSSVARRKATEERRKTRPSARDGKLMDWRRLYQLEALERAVRGNTLAFLETGSGKTLIAVMLLRAYAHRVRRPDSRRFAVFLVPTVVLVGQQARVVEQHTDLVVKQFCGEMGVDFWDAATWRSQLEDGEVLVMTPQILLDNLRHSFFRLQDIALLIFDECHHARGNTPYACIFKEFYHPQLNSSASDPLPRIFGMSASLIYSKDLNPHNYSKQISEIENLMNSKVYTVDSESALSEYIPFASTKIVDFDDSNISSELHANILSCLNRLNKKAAEVQSYEENSLSFWGETLDKNVEGFIRNYSEEVHRELSCFLKNGHIGEKFPADSQDGILTPKVHCLIRTLLQYRHMQDLRCIVFVERVITSIVLEHLLSSIHQMSGWNVKHMAGSRPGLLSQSRKNHTEIVESFRKGKVHIIIATQILEEGLDVPSCNLVIRFDPSATNQRGDVEAQTNAEKFLASGQIMREESLRLGSISCQPLENTLYFNPLPRFDIDKASGTCTLHLPKSSPVQTVNVEGEGSILKETVCLKACQELHAIGALTDSLLPELDVPCDEEPDIGKLDAWWVRLYLK

SEQ ID NO: 17838 - protein, 788 aa, Oryza sativa
  Clone ID: TF_OSC900120j.C1.p3.fg
MGGPLTAAGGRGDGGAKAVEPLRPPPPPDPKTMARWYQLEALERAVRGNTLAFLETGSGKTLIAVMLLRAYAHRVRRPDSRRFAVFLVPTVVLVGQQARVVEQHTDLVVKQFCGEMGVDFWDAATWRSQLEDGEVLVMTPQILLDNLRHSFFRLQDIALLIFDECHHARGNTPYACIFKEFYHPQLNSSASDPLPRIFGMSASLIYSKDLNPHNYSKQISEIENLMNSKVYTVDSESALSEYIPFASTKIVDFDDSNISSELHANILSCLNRLNKKAAEVQSYEENSLSFWGETLDKNVEGFIRNYSEEVHRELSCFLKNGHIGEKFPADSQDGILTPKVHCLIRTLLQYRHMQDLRCIVFVERVITSIVLEHLLSSIHQMSGWNVKHMAGSRPGLLSQSRKNHTEIVESFRKGKVHIIIATQILEEGLDVPSCNLVIRFDPSATNQRGDVEAQTNAEKFLASGQIMREESLRLGSISCQPLENTLYFNPLPRFDIDKASGTCTLHLPKSSPVQTVNVEGEGSILKETVCLKACQELHAIGALTDSLLPELDVPCDEEPDIGGQDNASVTMKYVGIIHLNQEQVIIARRFQTTILSFLIGDDHLEVSNGIKYFHEMQVPIGVVYLLLPLVSGRIDWCSMKFSSSPIYEANNKHMTHCHSCKDIDLLQTKDGPFCRHGLTLTFENQPLLAGSKHVKVRNFLHNCYSKKEKEPGDRYSVELPPELCRIIMSPVSANNLHIFSYVPSIMFRIQCMLLSVKLKVQLGPTVQQFDVPVLKVDFLINSFLFMNY

SEQ ID NO: 17839 - protein, 1004 aa, Oryza sativa
  Clone ID: TF_OSC401693j.C1.p16.fg
MAAAGRDPPATPSSRMYYCRQRKASSEVNANVFVPGGQNGISFPASNRAHDWGYGGVREEWEASYARKLQLINFLSSLHQRTANSLITTRMDANMDTPLEQKQKDSSAIIVLDSDDEDEAERCEQLASENNKQQAPSGPTSPCTTWIVSSAKDQVNGTLHVDGVQSTQIVPYGQNAPLINQSPLQTSWQPSIQYERVILQRRPEEQRVQDLVAASHAEKIAETQVFLTLPTLPNERKRRKSEPTTLVDGDGGTNLGKGKRKNHQNQAAVDSILDLQQTVVPLQQNDVPSQSYRTMIEEEKPVKESDGLEDLWKDFSLAAECTKLDTNEDMSNEKDVDDENEMDDDCNHDIRIHEDLGHVCRICGMIVRKAETIIDYQWKKKNLLWGIFSLLKYFLKWESVFITNYIDIDTALEYIASRTRTNYYESRSKDADDIDTGAVKVSEDFIVSDIAIHPRHAKQMRPHQLEGFSFLVKNLVGDKPGGCILAHAPGSGKTFMLISFIQSFLAKYPSARPLVVLPKGILGTWKREFQRWQVEDIPLYDFYSVKADKRTEQLEVLKSWEARMSILFLGYKQFSRIICGDGDGNIAAACRDRLLMVPNLLILDEGHTPRNRETDVLASLKRVQTPRKVVLSGTLFQNHVSEVFNILDLVRPKFLKMESSRPIARRIMSQVAISGIRSLKGVHDSAFTESVEDTLLNDDNFTRKSHVIRSLRELTKDVLHYYKGDILDELPGLVDFSVFLKLSTKQKEIVHKIEAYEKFKRSAVGTALYIHPCLSEISEGDAADRATNLTDATVDSLIESIIIKDGVKAKFFFNILSLANSAGEKLLAFSQYILPMKFLERLLVKRLGWHVGKEIFMISGDTSADDREVAMDQFNNSADAKVLFGSIKACGEGISLVGASRVIILDVHLNPSVTRQAIGRAFRPGQQKKVFVYRLVAADSPEVKFHETAFKKEVIPKLWFEWSELCTTEDFKLNQVDIDDSEDELLEANAIRQDIKALYRRVWQ

SEQ ID NO: 17840 - protein, 1457 aa, Oryza sativa
  Clone ID: TF_OSC23980j.C1.p3.fg
MDPRRPPSRGGAAANGGGLSYSTLFNLEPLLNFKVPLPEDLDRYRRSSPNGSMSSQGQGSLSDQYNGINDASHGLHRKRKRNLDGASDDDEVDAYSNQITEEHYRTMLSEHVQKYRRSKFKEDVFSSDPPQVIVPQKHKNGSARVTKYRSDTRNVAMLGGVEATAEYNGTKSTNAYGGFNKVVASLDSSYLDMGDNVSYKIPEGYDKLALSLNLPVFSDIRVEETFLNGTLDLRTLAAMLSTDQKFETTNRGGLAEPQPQYESLQERVKVQKFSLQVTEDPFAIPEGAAGRIRRFIISESGSLHVHYVKVLEKGDTYEIIERSLPKKQIIRKDPSEIAREESEKTIKLWHAIAVKGIPRHHRNFMALLKKRQVDAKRFSENCQREVKFKVSRSLKLMRSAAIRTRRLARDMLIFWKRVDKEQYELRKREEKEAAEALKREEELREAKRQQQRLNFLLSQTELYSHFMQNKAGESAPSDEASVPEEDEEDPEEAELKREALRAAQHAVSQQKRMTNAFDSETGRLRQSSDSGIPTDDLASMEPNKIDLLHPSTMPEKSSVQTPELFKGALKEYQLKGLQWLVNCYEQGLNGILADEMGLGKTVQAMAFLAHLAEDKNIWGPFLVVAPASVVNNWAEEILVNEEKLLRRVKWQYMVLDEAQAIKSSSSQRWKTLLSFNCRNRLLLTGTPIQNNMAELWALLHFIMPTLFDSHEQFNEWFSKGIEGHAEHGGALNEHQLSRLHAILKPFMLRRVKIDVIAEMTKKKEEIVPCRLSSRQQVFYQAIKNKISLNELLDGSRGNLNDKKLLSLMNIVMQLRKVCNHPELFERNEGSSYFYFADIPNSLLSPAFGELQDVHYAGKRNPIMFEIPKLVYKGIVSNMEMPVRGCGFLYGSFNRMFNIFSPSYIHQSAFPEAISPNNTVLLSGAFGFTRLINLSPVEASFLATCSLFNRLAFSAVRWNKKYTDELVDVFLDSESTDLESTHNDLTTVRAVVRLLLSPTKAESSFLRTKIETGPSDSPYEALVLSHHERLVSNIRLLRSTYAFIPPARAPPINVWCADRNFAYKLTDEMHDPLAKKLVLGFARTSEFNGPREPTSPHSLIEELHTDLPFPEPMLQLPYRIFGSSPPMSNFDPAKMLTDSGKLQTLDILLRRLRAENHRVLLFAQMTKMLDILEDYMNFRKFKYFRLDGSSAISDRRDMVRDFQNRNDIFVFLLSTRAGGLGINLTAADTVIFYEIDWNPTQDQQAMDRTHRLGQTKEVTVYRLICKDTIEEKILQRAKQKNAVQELVMKGKHVQDDHLMRQEDVVSLLIDDTQISHKLKEISMQAKDRLKKRRTKGIKVDKEGDLMLEDLDDQTSGAAEHDNTSSKKKKSSQKKLPKLQDNGSVDKNAEAEGGEVEDEDSIAAPRPKRSKRLMKNLNEDKEPEQEPTTDGDNPAEAAENNISPDDNDTEEAKDRTPSA

SEQ ID NO: 17841 - protein, 225 aa, Oryza sativa
  Clone ID: TF_OSC420110j.C1.p1.np
FSVFKLMDYEPVLKCLKKLPGVAVQDIPYKTRNVIKNLPKFFAESASDKEVDGLLMKLPQHLRDALLPFQLEGVKFGLRRHGRCLIADEMGLGKTLQAIAIACCYKDEGPVLIVCPAVLRYTWAEELERWDPSFLPKDIHLVFGHQDSLERLGACPKAVVISYQMLSRLRKSMMNRRWALMIIDESHNIRCTKKKHEKNETQAVLELAPNVSRIVLLSGTPSLSR

SEQ ID NO: 17842 - protein, 1870 aa, Oryza sativa
  Clone ID: TF_OSC400505j.C1.p62.fg
MDPPARSRRCTLLTRALLLAVAALALRLIYAAFLAGMALYPPLPAAAVLGSKTYLHSAVATPDAWRTRDWRKAVDYHATLLAPHLADGILSPTSRAVCLGAVQEALAMRELGVSTAVAVARKRSPPLAVAGNDRRLPFQDSSVDFVFAARALDSSKRPADLAAESARILKPDGHLVVLTTSAADAFSLRALQALLPSLRLLRSRQIKGPDDSTLRELVFQKIQDSTDDPVNKCTIGDHKLQLLTHAEPLIQEEPRKPWITLKRNIKNIKYLPTLADISFKRNYVYVDVGARSYGSSIGSWFRKHYPKQNHTFQVFAIEADPAFHSEYAAKKAVTLLPYAAWVKNETLNFEINADPGKEDEAKANGRGMGRIRPMAGKKMSGEVRSVPAFDFAEWLKRTVSEQDYVVMKMDVEGTEFDLIPRLFDTGAICLIDELFLECHYNRWQKCCPDRAEAFEMAKGVSCFYWSIQFPNFKDHLCFRNCSNASSTRHFSYRSLLIRTEKPVTTRNHAYAEVVVFVLDQNPMFFLFLRFFYPAIQRGPNCWSSANSTVMRQAFEVFYDGSWHGVNCIRIRNGNLFVKFIYSGSTVEHNVDGDCLRLRSRRATCSDCSNVLKPGVDVCVQSSHTPEASSQGGTNASVLLRHDARLITIKKNHQEDKCLCLFVVILYKNQCPGNAEKVITDRRAEVVTINDIFLLQKLQPEVHEGSMKWSFSKDRLSLNKGRLISARFSSEITHLIVLSILRGMEFNIKLVEGQIVYQIIKGDQAQWNLDSMAIPPGFGNTMEIISFQLRDEALRPTITNIPITHVKKNNITEDMRFTVKSEMDSELDRALDVEILYEHVDLRRSKRLKTQPDRFTSYDTPRFLSGYKKKEASSSPTKHVRGAVHCDSPVDDSKKEVESCCVEIPGNVTQKQTGVHSPMVDEKSNSPEGQHKNTTKRTTCSLVKEKASSPEGQHEKTTKRTTCALPVKEKASSPEGQHKNTIKRTTCSLPVKEEPSSVEIEEKSSKEQSAPEFHIPRTPAQNKEKHNRPPFSCKPKLFTSSGTLGVNCEPAFCQKVGGKRKRHMCEREYKQMIDQCIGNIESEMERDSMFNFDANMMNYVQHSYREEDFTWPPSADNQEVEEDELEELWKEMDYSLTTLALLEQKQVMAQSRINMLVDNFDGLRLDCLTLTDDYRCYYQKKEKFAESGSVNESTDYFGKVGGIPCHHECILDEELGLACRLCNVVCTEAKDIFPEMFNGNDYKDRPGCSNICLDDDILDPSLLANLAPELSELKNSGSVWSAISDLDPKLLPHQRKALDFLWKNLAGSIQVEGMDNSNVSTGGCVIAHTPGSGKTLLLISFLVSYMKAHPRSRPLVLTPKAAIHTWKREFEKWGISLPLHVFHHANRSGKPLGAMDSKLRSLLNNFHRPTWTNMRLMDSLDKLFKWHAHPSVLLMTYSSFLGMTKQDSKVRNRYREFIAEVLMNNPGLLILDEGHNPRSNKSKLRKLLMKVKTEFRILLSGTAFQNNFEEYFNTLCLARPRFIGDIMSELVPERKRETVGRRAKHQEAVARRAFVEKVGQKIESDNKHIRSDGISLLNKLTRGFIDSFEGAKLINLPGIHVYTVFMKPTDIQEEMLAKVTMPKLGSSRFPLEVELLITIGSIHPWLIKTTKAVSTFFSPAEVKKVERYKRDFAAGCKAKFVIDLLHKSSFRGERVLIFCHNVSPITFLVKLIEMVFGWRLGEEVLVLQGDQELPVRSDVMDKFNGDSAGKRKVLIASTTACAEGISLTGASRLVMLDSEWNHSKTRQAIARAFRRGQERTVYVYLLVASGTWEEEKYNSNRRKAWMSKMVFLGRYVDDSSQNRVTDIDDEVLKELADEDHTGTFHMIVKQD

SEQ ID NO: 17843 - protein, 801 aa, Oryza sativa
  Clone ID: TF_OSC400938j.C1.p6.fg
MPRRGASSASTSRGRRRPREEEEEEDEEEVVGDVASDDSADSDFVADTEEEEAADDEYDYASDGKDGAGPAAAAAAAPAAVAPPPPQPKRLQGGRKKGAGGHGKLPLPWEEWEEANEKWLDEREAAAKGEEPPDPEVPPAVAAGVPTAEPAPEVLLPLLRFQKEWLAWALAQEASPSRGGILADEMGMGKTIQGISLVITARRLRPPAPPPRRRAASSSQGQPKRWVGCTLVVCPVVAVIQWAQEIERHTAKDSVRVLVYHGGRRGAQKYDFNKYDFVITTYSTIEADYRKHIMPPKTRCCYCDKLFYPNKLKVHLRYYCGPDAQRTEKQAKQESRKWGSKKGTSKRRVQKKKNDSDGEDFEERDGGSGSQSRGQSPLHSVRWERIILDEAHFIKDRRCNTAKAIFALESEYKWALSGTPLQNRVGELYSLIRFLQIFPYSNYFCKDCNCEILDTLLKKQCDCGHSSVRHFCWWNKVTLRRDSFDKNEMEFYEALYTQSRTQFDSYVDAGTLMNNYAHIFDLLTRLRQAVDHPYLVAFSKTAELSDRSKNEGNENMESQCVPLTVDLTTRSSGEKVTPNLKGGKRSGILSRLQNLADFKTSTKIDALFLAYMFLLIELHNDVNGDVNDENTLVNLREEIRNMVEHDGSAKGIVFSQFTSFLDLIEFSLQKSGIKCVQLNGKMNIVEKGKAIDTFTNDPDCRIFLMSLKAGGVALNLTVASHVFLMDPWWNPAVESQAQDRIHRIGQFKPIRSMRFVIKDTVEERILQLQEKKRLVFEGTVGDSPEAMSKLTEADLKFLFQN

SEQ ID NO: 17844 - protein, 1148 aa, Oryza sativa
  Clone ID: TF_OSC420824j.C1.p3.fg
MSGSGNSLDTVALIVGGGSDSSGIVGRKRRRCDLIRERWCCLCPVWCKEAQEVVVPGRGRNGARQRDGGGCALGTTEVLGRICNSSVEKAEERETVIPAISNTEKMGEKQQKSIPRDRKRKGELDPAADYVKDLWDAFYVTAESTHLDTSEVNNKKQLDNCNHDIHVYEDLGHVCHECGLVVRKADSLFHYQWKKASRKRTNVNEVCLKKVGSDAISLSEDFIFSDIAIHPRHAKNIRPHQLEGFKFLVNNLVTDEPGGCILVHAPGSGEIFMLISFIQGFMARHFTARPLVVLPEGILGTWKREFQQWQVEDIPLYDFDSIKADNRVEQLEVLKSWSSKRSILFVGSKHFTQIVCDDRDENAVAECRDTLLMVPSLLILDEGHTPSIDETDMLQSARKVQTPCKVVMSGTLFHNHVKEVFNTLDLVRPGFLKTETFWPIVTRMMGQLEISSARSITEISESMEDTLLNDDNFTRKVNVIRSLGELTKDVLHYCKGEDLNEFPVLLDFSVFLELSPKQKDILCKLEEDHGMLKTSAVGAALYVHPCLSEISEANDVDRDDRVDSLVNSINLGDGVKARFFLNILALANSAGEKLVAFSQYTLPMKFLERLLVKEMGWHVGKEIFVINGDTSMEDGQLAMDQFNGSADAKVLFGSIKAFGEGISLVGASRIVILDVHLNPSVTRQAIGSTFRPGQKKKVFVYRLVAADSPEEKAHETAFNKEVIPKLWFQWSGRCTTEDFKLNQVCIDGSRDELLETDVIRQDIKALYQSIDMGLVSEATVCFNNVSSSGLSVHDTGGNVIGQGDQDSEKNRYLSIASETMLVHFVHVFSFVCVPVNTTCSLSICREILWFLIGTREVPFSSVKFGISSWMGKITLIRIFRILYDEKGQIALLASKGSIKDKQEACKSWRYPSIHPWLTEAVVLAVTAATPPHLLAVAGPLPLPSLCSAVPFALLYYFGKGRKVVHTLKNWLQQVSVENKICGWGYNTTEVLGRICNCSVEKAEERETIILASGNMEKMEEKHQKSDQDFHFSDSTMAIPRERKQKGEVDPAADCLKDRWGAFYVAVESTQLDTSEVNNKKQLNNYNHDIHVYEDLGRVCHECGSGEIFMLISFIQGFMTRHSTARPLGTWKREFQQWQVEHCSGFIYL

SEQ ID NO: 17845 - protein, 1122 aa, Oryza sativa
  Clone ID: TF_OSC404928j.C1.p12.fg
MAKPVKYDEEEEEVSSSGEEEEEQSDGAGSGSGEEEDEEEEEAPAAAAGEAAGGEEEEVDEEEIEAVTTGAGADEEEEESGAAAAAPGEGDEESQSTEDDEAVVGEDDDADEAEGGAVVGKREKARLKEMQKLKKQKIQEILDTQNAAVDADMNNKGKGRLKYLLQQTEIFAHFAKGNQSKEKKPRGRGRHASKMTEEEEDEEYLKEEEDALAGSGGTRLLSQPSCIKGKMRDYQLAGLNWLIRLYENGINGILADEMGLGKTLQTISLLGYLHEFRGITGPHMVVAPKSTLGNWIKEIQRFCPILRAVKFLGNPEERNHIRENLLQPGKFDVCVTSFEMAIKEKTTLKRFSWRYIIIDEAHRIKNENSLLSKTMRIYNTNYRLLITGTPLQNNLHELWSLLNFLLPEIFSSAETFDEWFQISGENDQQEVVQQLHKVLRPFLLRRLKSDVEKGLPPKKETILKVGMSQMQKQYYRALLQKDLEVINAGGERKRLLNIAMQLRKCCNHPYLFQGAEPGPPYTTGEHLVENAGKMVLLDKLLPKLKDRDSRVLIFSQMTRLLDILEDYLMYRGYQYCRIDGNTGGEDRDASIEAFNKPGSEKFVFLLSTRAGGLGINLATADVVVLYDSDWNPQADLQAQDRAHRIGQKKEVQVFRFCTEYTIEEKVIERAYKKLALDALVIQQGRLAEQKTVNKDDLLQMVRFGAEMVFSSKDSTITDEDIDRIIAKGEETTAELDAKMKKFTEDAIKFKMDDTAELYDFDDDKFGSLLNSIYILDFLKEENKLDFKKLVSDNWIEPPRRERKRNYSESEYFKQALRQGAPAKPREPRIPRMPHLHDFQFFNNQRLNELYEKEVRYLMQANQKKDTIDGEDEDQLEPLTAEEQEEKEQLLEEGFATWTRRDFNTFIRACEKYGRNDIRSIAAEMEGKTEEEVQRYAKVFKERYKELSDYDRIIKNIERGEARISRKDEIMRAIGKKLDRYKNPWLELKIQYGQNKGKFYNEECDRFMLCMVHKLGYGNWDELKAAFRMSPLFRFDWFVKSRTTQELARRCDTLIRLVEKENQEYDEQERQARKDKRMAKNMTPTKRSALRVSEGETTPSNSFKRRRQSLMDDYVGSGRRKRG

SEQ ID NO: 17846 - protein, 958 aa, Oryza sativa
  Clone ID: TF_OSC900293j.C1.p26.fg
MYYRRQRKASSEANANVFMPGGPNDISFPASNRDHDWGYGGVGKEWEASYARKLQLMNFLSSLHQRTANPLVTTRMDANMDTPLEQKQKDSSAIIVLDSDDEDGYTEGCEQLTSENNKQQAPSGLTSPYTTWIVSSAKDQVNGTLHVDGVQSTQIVPYYGQNAPLINQFPLQTSWQPSIQYERVILQKRPEEQRVQDLVAASHAEKIAETQVLLTLPTLPNERKRRKTEPTTLVDVDGGTNLGKRKRKNHQNQAAVDSNLDLQQNDVPSQSYRTMIEEEKPVKESDGLEDLWKDFSLAAECTKLDTNEDMSNEKDVDDENEMDDDCNHDIRIHEDLGHVCRICGMIVRKAETIIDYQWKKASRTRTNYYESRSKDADEIDTGAVKVSEDFIVSDIAIHPRHAKQMRPHQLEGFSFLVKNLVGDKPGGCILAHAPGSGKTFMLISFIQSFLAKYPSARPLVVLPKGILGTWKREFQRWQVEDIPLYDFYSVKADKRVEQLEVLKSWEAQMSILFLGYKQFSRIICGDGDGNIAAACRDRLLMVPNLLILDEGHTPRNRETDVLASLKRVQTPRKVVLSGTLFQNHVSEVFNILDLVRPKFLKMESSRPIARRIMSQVAISGIRSLKGVHDSAFTESVEDTLLNDDNFTRKAHVIRSLRELTKDVLHYYKGDILDELPGLVDFSVFLKLSTKQKEIVHKIEAYEKFKRSAVGTALYIHPCLSEISEGDAADRASNLTDATVDSLIESIIIKDGVKAKFFFNILSLANSAGEKLLAFSQYILPMKFLERLLVKRLGWHVGKEIFMISGDTSADDREVAMDQFNNSADAKVLFGSIKACGEGISLVGASRVIILDVHLNPSVTRQAIGRAFRPGQQKKVFVYRLVAADSPEVKFHETAFKKEVIPKLWFEWSELCTTEDFKLNQVDIDDSEDELLEANAIRQDIKALYRRSAISFSRCACAS

SEQ ID NO: 17847 - protein, 1152 aa, Oryza sativa
  Clone ID: TF_OSC409799j.C1.p8.fg
MGKPGKYGDGDDDDSEEEQLSPSSSAGEEEEEEVEEEEGEEQQEEQGEEEEGFSGDEEEQEVEGEADGEQVEEEEEEESSVGEEEAEAEGEEEEEEVEEEQGAGEEEEEEVDEEEIEAVTTGAGGDDDDEEVGDDGGAEEESQSTEDDEVAAGKDGGGEDGDKLEDATGNAEIGKRERAKLREMQKLKKHKIQEILDAQNKAIDADMNNKGKGRLKYLLQQTEIFAHFAKGNQSTEKKSRGRGRHASKMTEEEEDEEYLKEEEDALDGAGGTRLVSQPSCIKGKMRDYQLAGLNWLIRLYENGINGILADEMGLGKTLQTISLLGYLHEFRGITGPHMVVAPKSTLGNWMKEIQRFCPVLRAIKFLGNPEERNHIRENLLVPGKFDVCVTSFEMAIKEKTALKRFSWRYIIIDEAHRIKNENSLLSKTMRIYNTNYRLLITGTPLQNNLHELWSLLNFLLPEIFSSAETFDDWFQISGENDQHEVVQQLHKVLRPFLLRRLKSDVEKGLPPKKETILKVGMSEMQKQYYRALLQKDLEVVNAGGERKRLLNIAMQLRKCCNHPYLFQGAEPGPPYTTGDHLIENAGKMVLLDKLLPKLKERDSRVLIFSQMTRLLDILEDYLMYKGYQYCRIDGNTGGEDRDASIEAFNKPGSEKFVFLLSTRAGGLGINLATADVVILYDSDWNPQVDLQAQDRAHRIGQKKEVQVFRFCTEYTIEEKVIERAYKKLALDALVIQQGRLAEQKAVNKDELLQMVRFGAEMVFSSKDSTITDEDIDRIIAKGEEATAQLDAKMKKFTEDAIKFKMDDTAELYDFDDDKDENKLDFKKLVTDNWIEPTSRRERKRNYSESDYFKQALRQGAPAKPREPRIPRMPHLHDFQFFNTQRLNELYEKEVKYLVQANQKKDTVGEGDDEDQLEPLTVEEQEEKEQLLEEGFSTWTRRDFNTFIRACEKYGRNDIKNISSEMEGKTEEEVQRYAKVFQERYKELNDYDRVIKNIEKGEARIYRKDEIMKAIGKKLDRYKNPWLELKIQYGQNKGKLYNEECDRFMLCMVHKLGYGNWDELKAAFRMSPLFRFDWFVKSRTTQELARRCETLIRLVEKENQEYDERERLARKDKKNMSPAKRSSSRSLDTPPQSSSKRRRQSYTEANAGS

SEQ ID NO: 17848 - protein, 1282 aa, Oryza sativa
  Clone ID: TF_OSC400996j.C1.p76.fg
MEEAAAAAADFDGGFGGAGEDNLSMPLGDFMAFLDNEDWKEQQHEWRWAINGHQAVGIGEGQTGSSLVMNGQALQTKTQNDKYFGTEGNQGLEMPVDSTSSENAFQNHEEIFENKENWSNYSHTDPSHSQMDVMVELNNGGESFDHSEDTSYRLLSNDFLENSRNGNPEMHLPMDALNHAKTVDEEIVPPYEDYTNGLYYDSGCDMFAEQSGLSEVKCEGTGPMLGNSEQEGNHFTSVPMFDHSAVIPDIPYTELNIGDVPGSMQNGNGSCLTVQGEYLQGEYQEYPQPDYGSFDMANEIVLHDLPQNNQSYELEQLPQNICESSSMQVGSPDQYCDDTSLSDYYMDDVSSIESMSSEQNRSEDICFRSESSTDSSPVPSSRNSTTEDADKYFGDAPKHLQNSMFPVSTQHQHSFMNSSDPMHPTFHKKYDIPRNGSSSILGNSSRNCFSLDSNRDSDLCILEGSRSLASGHVLPPQGLQHNFQQSVCANPNLPRFGGRYRPHEERMTLRLALQPLLDAPLASSLLDISQPKSEANPPDGVLAVPLLRHQKIALSWMVQKERNGSSCSGGILADDQGLGKTVSTISLILTERSPVPSSAVKQEPCEAVTLDDDDEDDDAEPHLKKPALAHLADTCKPEATSSTIKTENPIANVKARPAAGTLVVCPTSVLRQWADELRNKVTSKANLTFLVYHGSNRTKDPNDLTKYDVVLTTYSIVSMEVPKQSSPDSDDEEKGKPDRYGAPVGSSGSKKRKTSSSKKNKSGSTPESKLPEKPLAKVAWFRVILDEAQSIKNYRTQVARACWGLRAKRRWCLSGTPIQNAVEDLYSYFRFLRYDPYAEYKKFCFMIKTPISRNPITGYKKLQVVLKTVMLRRTKATMLDGKPIISLPPKTVSLKTVDFTSEERAFYNTLEAESREQFKEYAAAGTVKQNYVNILLMLLRLRQACDHPHLVRGHESTSSWMSSLEMAKKLPVERQQSLLVCLQSCSAICALCNDAPEDAVVTICGHVFCNQCILEQLTGDDSVCPVSNCRVRLNSTSLFSRGTLECALSRSTCEFLSDDSCEDMVQGKQPRFDSSYASSKVRAALDILLSLPKLDLTHMSDDKNKIVHPDKINGNSTPSEYAGTKITEKAIVFSQWTRMLDLVEVHLKSSHLSYRRLDGTMSVAARDRAVKDFNTNPEVSVMIMSLKAASLGLNMVAACHVLLLDLWWNPTTEDQAVDRAHRIGQTRPVTVSRLTIKDTVEDRILALQEKKREMVASAFGEDKSGAHQTRLTVEDLNYLFMV

SEQ ID NO: 17849 - protein, 698 aa, Oryza sativa
  Clone ID: TF_OSC407487j.C1.p21.fg
MAPPQMYERRLLAAASLLLSADAQGQPPHAAAQLGVGVTAELKPHQVDGVAWLIRRYQLGVNVLLVVLCPLSVTDGWLSEFNKFCPSLRVIQYVGDKLHRRDLRRMMFQDVQKSSSSSHSTELPFDVMMTTYDIALMDQEFLSQIPWHYVVIDEAQRLKNPSSVLYNVLEQRFIMPRRLLLTGTPIQNNLSELWALMHFCMPSIFGTLDQFLSTFKQSGDSLTGGETNKTDKQFKILKHVIQLRKASSHPYLFSGIEPEPYVEGEHLVQASGKLVMLDLILKKLHEVGHRVLLFAQMTQTLDILQDFLELRQYTYERLDGSVRAEERFAAIKSFSSQPTKGVVRDDNQSGAFVFMISTRAGGVGLNLIGADTVIFYEQDWNPQADKQALQRAHRIGQLNNVIMRRAERKLKLSHSVIGEEDATYGKGKYVENEASDMRSIIFGLHLFDTSDTTAETMNDDTASETIKEETMLKLKSMSEKVVLMRSHEPSEKDERAFEINPNMTDNSGAVVTRVSDSVNVDPDFNEAAYLSWLEKFKESSHSKENTRAELERQRIAPEEKFLKREAIKKKVEEKRLAKWESLGYQTLKIKDPDILPNQNIPDSGSVQLVYGDCTNPSVVCPAKPAIIFRYYFPRVKYVTFYERELLHPRIVEGNVVLIIQEPGDMEECSMLWPISQHAFQMLIIVLLNLMISTWQIFT

SEQ ID NO: 17850 - protein, 345 aa, Oryza sativa
  Clone ID: TF_OSC22947j.C1.p9.fg
AYAAAGTLKQNYANILLMLLRLRQACDHPLLVKGHQSEYKGDGSIEMAKQLPKEMIINLLAKLEVGEFCSVCSDVPEDAVVTMCGHVFCYQCIYERITTDENMCPSPNCGNTLSTDSVFSSGALRICMSGVSSSHASGSSSLDDESSSISQTSYISSKIQAAIDILNSIINTYALTDSDTVESNPSRVAPVKAIVFSQWTGMLDLLELSLNSNLIQYRRLDGTMSLNSRDKAVKDFNTDPEVRVMIMSLKAGNLGLNMVAACHVILLDLWWNPYAEDQAIDRAHRIGQTRPVTVSRLTIKDTVEDRILALQEEKRAMVSSAFGEDKSGGHATRLTVDDLKYLFRF

SEQ ID NO: 17851 - protein, 811 aa, Oryza sativa
  Clone ID: TF_OSC415522j.C1.p1.fg
MSEVRSVPGMKVEASPAAAAAATVDSPTSVLEDDEKISECKNGDVLDTTEAIKQEEDHLDVLIEEKVDGFVDASSSLNVEPAANNSDLSPLTVPVKEEGQLLEPVKEEKADDFVDAVPSLPIDLEAKNGDASLITDAMKEEEEKLHDARVKAEEEEVARKREEAARLAFDPNARFNKLDELLSQTQLYSEFLLEKMETIADVEGVQTHAEEEPVEEKKNGRGRKRKATSAPKYNDKKAKKAVAVMLTRSHEDCSPEDCTLTEEERWEKEQARLVPLMTGGKLKSYQIKGVKWLISLWQNGLNGILADQMGLGKTIQTIGFLAHLKGKGLDGPYLIIAPLSTLSNWVNEISRFVPSMTGLIYHGDKAARAEIRRKFMPKTTGPDFPLIVTSYEMAMSDAKHLAHYKWKYVIVDEGHRLKNSKCLLLRELKRLPMDNKLLLTGTPLQNNLAELWSLLNFILPDIFSSHQEFESWFDFSAKGGEEEQEDSEEKRKVDVVSKLHAILRPFLLRRMKEDVEHMLPRKKEIIIYANMTDHQKQIQNHLVEQTFDQYLHEKSEIGLYPPVEKLLEQCGKFQLLNRLLSLLLARKHKVLIFSQWTKVLDIIEYYLETKGLQVCRIDGSVKLEERRRQIAEFNDLNSSMNIFILSTRAGGLGINLTSADTCILYDSDWNPQMDLQAMDRCHRIGQTRPVHVYRLATSHSVEGRIIKKAFGKLRLEHVVIGKGQFEQDRAKPNALDEAELLALLRDEQGDEDRMIQTDISDEDLLKVMDRSDLTGPPANADAAPLVPLKGPGWEVVVPTKSGGGMLTSLTS

SEQ ID NO: 17852 - protein, 219 aa, Oryza sativa
  Clone ID: TF_OSC408712j.C1.p1.np
NLIMLIFKSLDIKCCMLFINELLGGTMLPCANKQSLQEYAAAGTVKQNYVNILLMLLRLRQACDHPHLVRGHESTSSWMSSLEMAKKLPVERQQSLLVCLQSCSAICALCNDAPEDAVVTICGHVFCNQCILEQLTGDDSVCPVSNCRVRLNSTSLFSRGTLECALSRSTCEFLSDDSCEDMVQGKQPRFDSSYASSKVRAALDILLSLPKLDLTHMGD

SEQ ID NO: 17853 - protein, 693 aa, Oryza sativa
  Clone ID: TF_OSC422293j.C1.p4.fg
MAPVRGERAVLPARAACGLRAAAGTPAPVWVPVGGRAVPWAAAAAVDVGCCSPLCSLPCPSSCQLLKLPVGGDVAGDGAVDVAAQGLNLYLRRTCRIFRRLRLRLRPGCCQLRCRQSGCPRCCCSGLSRCSPALFCCGELGVLLTPSARGDRTPRPSVGHGAPPGGCCVERGKGKGKEEQPVLLLLLAKSSTELGRGWNKRCLVYRKVAAFLRGLLQADVIHNAMIICPVTVIETWRKELNIVGVLVIKVFRYDRRTDCIALKSIATEFYALMNFCCPNLLGESGQFHENFSMPIERARYRGASAQLIKESIEASERLKKLVSPFVLRRTKEMLKNSASKLGTKHELTVWLKISAAQEYLYTNLIMSNVLGDEPGTPLAASQVARSICNHPVMVIGSDFEQRGESEEKKDALTDIIRKGLLARALSTIVDPSKMIRMDGKTPQKQRPMLIQVIKGEKATAVTKENQSRREITKPTRRVLSMPPEGFGVSKTLIELLAIHGGAFDPSLDESEIRQVRGHESVVGVSNHLHLFSQRESDPVTNEKHKYTAGPSRKRSELSMPVDAEILKSIRSTFIEIPIQQLYKISGTPHQISKAENLVKEFLQEMDSMVEEEISVPMEKVGLVIGSGGATIKKYKNLHPRSESGTTGRFVIRGSQNQAIRWGWKAFYSDLHVCLGDVAFYSRYCRNVLRQILR

SEQ ID NO: 17854 - protein, 677 aa, Oryza sativa
  Clone ID: TF_OSC25681j.C1.p1.fg
MRRGYEEIDDDEWSNHSFKPSRVLKRPSRGAQPDSQPPPPIDSFRYNPRPSSSSAAAAATATVVLSDDDDDFELGEEERLRRAGKSTRVLNRPQRQHSPPGRALPPRESFRYNPKPAKAAAAVSVSDDDDDGFDLEDDDFDIPSSRTSRPRRTAGRRLATAVADLSEEDDDLELADDDFDHPDPRPTRPRRATARRFVIKDDDDSDGDVGASEVDGVEAEEDDGVNWSELENEDDEDGDYGETKVEVEEGDVVGKALRKCARISADLRQELYGSSTRNCESYAEIDDSSVRIVTQVWSFDSMDVSEQDDVDAACTSEESEFEPILKPYQLVGVNFLLLLHRKNIGGAILADEMGLGKTVQAVTYLTLLRHLYNDPGPHLIVCPASVLENWERELKKWCPSFSIIMFHGAGRTAYSKELSSLGKAGYPPPFNVLLVCYSLFERRSAQQKDDRKALKRWRWSCVLMDEAHVLKDKGSFRWRNLMAVAQHARQRLMLTGTPLQNDLHELWSLLEFMMPDIFATGDIDLKKLLNAEDHELISRIKSILGPFILRRLKSDVMQQLVPKIQHVNFVTMDSEQFQAYNYAIDEYRGACQARSAKSTSNFSNNVVGLIPKRQISNYFMQFRKIANHPLLIRRIYSDKDVDRIAKLLYPKGAFGFECSLERATQELRKYNDFAIHQ

SEQ ID NO: 17855 - protein, 1037 aa, Oryza sativa
  Clone ID: TF_OSC900282j.C1.p6.fg
MDIIDLCSDSEEYFSPYSDTEDNLDFDDPNDGVNQVVLHNTAFGNNSSELLVGLDDDNWLNNTHALSSHRPAENRSDIIESSSGVNTDCQNSAWQYRTLPHTFMSSSYKSRPLSLTGGNNVESTHPTVKPNTVHYNGIGFPSPAIASGYKPYVSYGQGVSIDDDDDDVYEVLHQPFPFSHSSLGDKKIEEESTWKYNGFQTSSAYGIEMPTSARSTGGVSAYGGLNSHRIFPPSVPYNNSVNNFGVNGLGTQSHLNIEKRLFGRDERVVYDEALKQISQETTEENLPEGVMSVSLLKHQRIALAWMVSRENSSHCSGGILADDQERVEQSKFMSADVGSMKSVANLDEDDEVVIVMDKKQLKGESVNMLQDSTLFPSSEAASDAADLKPWASLPGSAVDRMVNAVKVEPKKKARVRPSSSSTLRSANRSTAGTLVVCPASVLRQWASELAAKVTESSKLSVLVYHGGSRTKDPTELTKYDVVVTTYTIVANEVPKQNSDEDMEEKNSETYGLCPAFSIGNKRKKDSEPKKKKKPKNSDADLDGGPLARVRWFRVVLDEAQTIKNHNTQVARACCGLRAKRRWCLSGTPIQNTIDDLYSYFRFLKYEPYSVYGSFRSMIKYQISRDATRGYKKLQAVLKIVLLRRTKETLIDGEPIIKLPPKTIQLSKIDFSKEERTFYMMLEEGSREKFKEYASAGTIRENYANILVLLLRLRQACDHPLLLKGKEKDLIDTGSVEVAKKLPKETVINLLGQLEGDYAICSRCSDPPEDVVVATCGHVFCYQCVHKSLKSDENVCPSPSCGKKLSAQSVFSPGVLRFCIADKLESGATTSSSVEADGSPSICESSYISSKIRATTDILNSIVNTPALTWSDTMESSPSEVAPSKAIVFSQWTGLLDLLELSLDSSRIKFRRLDGAMSLNLREAAVREFNTDPEVRVMLMSLKAGNLGLNMVAACHVIMIDPWWNPYAEDQAVDRAHRIGQTRPVTVSRLTIKDTVEDRILALQEKKRKMVQSAFGEDKPGGSATRLTIDDLQYLFGI

SEQ ID NO: 17856 - protein, 4245 aa, Oryza sativa
  Clone ID: TF_OSC4701j.C1.p12.fg
MASSQQVELEAAKLLQKLIQESKDEPAKLATKLYVICQHMKLSGKEQSLPYQVISRAMETVVSQHGIDMDALRSSRIPLAGGPQAGDSSGAMPKDKEIIGSQPPMVGTDASQSSAHAGLWNFPSGSADMARHSASISGRVPAGPNRSDVAGADIHQGSMSQKSGRSSGMESPASLQIEDTRSMNSHDSLKSDEKTSKKSSSKRKRVDPKAAGDLHSEDNSKSDAMSTGQNIRKGKQPGKAGTQGQLSRTVEHDPSHTLQVGNAQVPPLPSGAPFFRAHQEGPSASSARTIDKTKPSNPFTMAQISNFAEGLASGNIPAELQKSILGGANLLNASFGWNQNAQGPVMKNTQGSVPNLMRPGVNVEGKVNLGSQGTFNSMSASQMDYPTVPPYVSSSFGGGPQYLDKGKDLTSGNTGSELNSSKAGAQLGIMHMHFDTQMRYNFQGSPMQERHGIVRAPQRAGSSQMSQTSPSIPFKEQQLKQLRAQCLVFLAFRNNLQPRKVHLEIALGVGPPASEGGSAGQRGSESRMADGSGKENGNSQENPAIFGRQSDISRLQSTSTGSVADVDSASKDPEIVKKKIKIAEHEKSFEAENIQQTVPIQGTDSEMHSQETISPMPSGQLHYFQGDTRKTTPEIYKADAENLNRNLGWVGGQGPSPLGGNRHTSMEVGLLAKDEVSKEPFAVLRPHHMPVDGSNHNLSGKDQTPETAGNEIDNGSHMGEMIFERSADEGDEDLSEQDDLPLSPPKYTMTDKWILDHQKRRYEENKRKALELQKAHRRISASYEKLKENVSSSEDLSAKTKSVIELKKLQLLQLQRRVRSEFLQDFFKPNTTDLDRIKSVKKHRHGRRVKQLEKIEQKMKEERQKRIRERQKEFFADIEAHREKLEDSFKVKRERLKGFNRYVKEFHKRKERIHREKLDRIQREKINLLKNNDVEGYLRMVQDAKSDRVKQLLRETEKYLQKLGAKLQGSKSMDGRVSYASDSTANDIEDESYQPQHYLESNEKYYQLAHRYQMNGLRWLVSLYNNNLNGILADEMGLGKTVQVISLLCYLMETKNDRGPFLVVVPSSVLPGWESELNFWAPSINKIAYAGPPEERRKLFKEMIVHQKFNVLLTTYEYLMNKHDRPKLSKIQWHYIIIDEGHRIKNASCKLNADLKHYRSSHRLLLTGTPLQNNLEELWALLNFLLPNIFNSSEDFSQWFNKPFESNGDSSTEEVENELPEKIERLVRCWPSAYQKLLIKRVEENLGGIGAVKIEGYLPRHYLPSILRLCGKLEMLDRLLPKLKATGHRVLLFSTMTRLLDVMEDYLVWKKYKYLRLDGHTSGQERGALIDKFNNPNSQAFIFLLSIRAGGVGVNLQAADTVIIFDTDWNPQVDLQAQARAHRIGQKKEVLVLRLETVQTVEEQVRASAEHKLGVANQSITAGFFDNNTSAEDRREYLESLLRGGKKEEAAPVLDDDALNDLLARSEDEIDIFESIDKQRREEEMIYESSNIKSVKVVRRKGELGGLDTQHYGRGKRAREVRSYEDQWTEEEFEKLCQVDSPDSPQPGGISRDADVPKVVKLEVPPESSKEPEQAKKEPASSVGDSPPAKRRRGRPRRSDASLSPVTAPPNTGKQEAGTIIDGSSSAPTTTIHSVAPDVTIDSTALSATGNPDVGTEIKGTTPDGTIKPVICTDNKGTASIAVLEGSNAKEVGIPAHSVHEPVSSSAPHPPTPATSRGRKTQAGETPRRRGRKPKSLAASAGDVILSPVVAVGSGEAYASSVVSSYPQGNVSSSHANAMAGLQKDTIIYKPAALLPEGVKGTLTPSGGDKDEMVKTPLAEDIYAGTVTTSGNANSQLPMIAHNENAGLVQGGTDQNLSVATPTIPVVSEGSTKISEVVVADKPAEKQGARRRRKKTSGTGSEDTGVSTRQRAASRRLYGIGTADIAGTDMSTGEKIGIVKEIDGSCQDTSKGLPNIISPSYEKSGYDSQPSTPIAVPINEAALPSGFSEAHATHSELHPARESISSVGHEKLAGAHLEAPPSVSFQAPVQHETRKDYVGVHSEVATTHPETITTHSSVNPVIDHKLANVQFESHASLHTSGKDITTMPSEVDSGAPSKAPGRRRKGSAREPRTRSNSATAASERRARLAGSKQPDDIKMAEMSGNPSTAVCSSTQQQEDNTLKAAHATGSVGEEQNNAENRVREVSMPAGILEAKLELTKQTDQAGHNSEQEQEMVSAAKSASANDEEHKVHEVHQIIADHNALPSSAQYTLQDKIDSSADAGLVPCDKIASVVIAVDDQDPSNASDKDAPASTEDDGNGLQSECVHVDLVLAKQDNTKVEDTQKSNQPAEQGESLEMTGSKFRSETRLEKTEETVDKSGGDNLPTIEKNDDSPIERSSPSADKIAQVAYGGEAGTETTTVEAVSAMNSDGLQDVRNALSTHGLSTNDITVASEEHRDPESHLSGEVSMSGGSSELKLESLNQSESACQSGEVTLEDTHATLDIQIPALIESEEKKSPGGDVHGSEEQHMHEVLHNTVDGSISPSNREQDKLQVHIDTNTDVDIPSSDKDHSTDIVLAGCQAPCDASGKDKLSTCDASGKDMAAPTDDDLNCLQSEDTVIPVADAKDETMLVKAIQNDEMSMGSSHGLPATIQSTDSDRLAEEGESAEITGSKFSCGMEQEKMEEPLDKSVTDNQTSSQINDGSNNMDSQKVDSSLQAADGGDLLVSRGTSVETTTAINTDASDESISVSTQSVKEASTVEIGASTNDIAPACELRKDFESHVSGCVSKPVGLSELRLEELSQTKSVSQSIVANAEETSTRSDIETPAMDASESKSPESDVHELSERVEFMGPTPSANEKSNELHSQELVKMISAAETASTEGHREKDTCEVDHKIDCTIFSPIGDQDTRNRIDGDTDCGVPSCQRNAAFDSENEVSAEINLTGSQAPCDAPNKATPAPTEDDHNGQESEDTVIGAEQGTVEVEAMQIDGISKSYSSDSHATLQSSDSNQLVNSDSKFESSKKHDKTDETSNESRGDNPTHSCTNDDSHDKNLVGCSPSEDLNEDNSAQLADGDDLVGSKDTTAAHASGLKELTSGNYVASSSSHVVQDVTSISKMESVQAGSEEIYHGYSDETIHSARIKPVVGTEITENASVASAPVITIQPDIETEAGVTASLTVLEGSIAEEVDTQVESGHDLVTSTAPLSPAPLPGESHACTDVSCPVAVEVSETKLESANHTASQLGAACTETPNALLNTLIPALPESEETKLSGSDTDGKTIMAELASSSDEHDKVHEVGNETGDDNKLPSSVAEDAVQGEIDGSADMDSQIIAGSSEAEINNSTVATIADSQIPFDPSDKDTLAEDGNGLQREGTTVDVTGSKEDDMEAEEKQMDDSHLPAALQSTESSQPTEHAAPTQDDGNGLQCEGTTVDVSGSKEDIMEVEEKLIDDISGSPSSHLPVALKSTESNQPAEHAVPAEDDGDGLQSEGTAVDVVDSKKDDMEVEEKQIDISRGSSSFLPGALESAELNQPAEHTAPTEDHGNCLQSEGTAVDVPCSKEDNMEVEDQFDGISRGPSSFSPDTLESAELNQAAEHAAPTEDDGNGPQSEGTSVDVAGSKEDNIEVEEKIDDISRGSSSHLPDVLQSTPNQRAEQECLDNSDDVNTSVVSSHAPLSGPKFTCVKELEKADETLETSDAQVADEVCLQTNDGAHNMASGSCSTLEDKNEDSSAQIADCEDLLLRKGTTVDDLDGCVEGHSGLSTHSNDEVRNLVEIVKGMNDTTAGSEVHVDPESHVSDEVSMPVAPSELKVELKNQSEPACQFGAVIVEESNVSLGIQTPALAESEEMTSGGFMHGKEVCASEQTNIGAAAEPASTKDDHDMHEVDKEIVHCTISSPIGDQENLQGNIDGKMDVGLAACQTESDFVSGNDHSRETDLAGSQAPYDASDKEDTAADLIGPKQATLEIEKMQIDGIPEGPSSVPAVLQLTDSNQPAEQERLENSDSKFASTKDQGRVDGTSNLSGGDNAKCSLTNDDSQTVNLVGYSPSEDSNDDDSVQAADSDGVLGNKEGTDDVISAACTDDVSMLKTESIDRHGSDEVDHSTAPSAAIKQESGTEVTCDASVPVSESSISKEIGTSPECDDDQVATAAPHPPTPLSDATDVSADVQIPAGISEAKLEQPNETTSPSGAATEENNTVVSTQIPTLAESEDRTPADTAIQGTEVDSAEPASVSDDENKVTAADDSALPSTGPEDTADDKIDSSADASEK

SEQ ID NO: 17857 - protein, 912 aa, Oryza sativa
  Clone ID: TF_OSC400299j.C1.p7.fg
MPSTSKCNRISRVADEEEEEEIVAVSSDADESESESEVGSGAEEEDDDYVGESSDSAGGSGSGSGDGDGDEEGGRSDIGDGEGEGGGRRVRSACRGVRANDRERKSQNVDALVRGNLVVRRQPLIPRILSVSDAAAIARKPFKPPCQNGYSENNEQLARRLSARKRFVPWGSVQPFAVTNILPQSPAVSSDDSVENEESLPPGIEPLILWQPEGRDKENSNFSAIKVDHLLVRYLRPHQREGVQFMFDCVSGLLNDDGISGCILADDMGLGKTLQSITLLYTLLCQGFDAKPMVKRAVVVTPTSLVSNWESEIIKWLKGRVQLLALCESTRADVLSGIESFLKPLSRLQVLIVSYETFRMHSSKFERPGSCDLLICDEAHRLKNDQTLTNKALAALPCKRRILLSGTPMQNDLEEFFSMVNFTNPGVLGDATYFRRYYEAPIICGREPTASAEEKNLGSERSAELSAKVNLFILRRTNALLSNHLPPKIVEVVCCKLTALQTALYNHFIHSKNVKRLISEGTKQSKVLAYITALKKLCNHPKLIYDTIKSNNSGGSGFDDCLRFFPPELFSGRSGFVTLDLFAQLCRERRYPYIRLDGATSINKRQKLVNQFNDPSRDEFVFLLSSKAGGCGLNLVGGNRLILFDPDWNPANDKQVYQRQMSKEGLQKVIQQEQADGKMQGSSLSTEDLRDLFTFHEQIRSEIHENLKCNRCNKDGCMVLDGSKFDSAATEHEASNSGENSYIDIGGFGAISGCVQKMNSSNQQIGSPSEEDLGSWGHHSDPSTVPDTILQCSSGDEVSFVFTNQIDGKLVPVESMARAATHRTHEVTVNAEKEVGKINSSNVPGTERQSLLGKNLKMMGFNLKNSSMKFPTKSRRMLPNCLQGMNKTSTSSDHQQTKKLHVISDASDDDFV

SEQ ID NO: 17858 - protein, 1274 aa, Oryza sativa
  Clone ID: TF_OSC400376j.C1.p26.fg
MGGDEEEVAGDVRRKLGGYLRAVVSVSSDVGVEALAPLSPCSLFACGGVSLAPIPDGGGATPRSKGRACGGGGVVRQLRALVSSRCVEVEGRVLRAVARRGREGGGGDGEVEARAVVLFDVYLPVSVWSGWQFPRSRAAAAAAVFKHVSCNWDARNALLAFNWTSPDNPHCDDQYIWTCTDCHVLGCEVHQIPSVLNNDKSFDLHEIFKTLPSVMVEKRMQITRITPDEAASGVGIWSVPDDVLYKVLVRLKPRDLIRVAAACHHLRNLSASIMPCMKLKLFPHQEAAVEWMLRREQNLQVLEHPLYKGLCTMDGFPYYINVTSGEISTGSAPTVHDFCGGMFCDEPGLGKTVTALSLILKTHGTLAVPPPGMNVMWCMHKPDKKYGYYELSASNSSNGNIFLSGSKKLRKDVIREDTCSSESLNNGGSVVSTRSSRKRGRLVNPDLNMIAAHPSGKSPMSAPTGAHSTPATHVLKITKNLKHVRKNLMEAYSDGSVGNKRKRDATSELSETWVQCDACRKWRRLLDGTALDSSTAWFCSMNPDSARQKCSIPEESWDLKRKITYLPGFHKKGTPPGNEQNASFFTNILKEHAALIDSETMKALLWLAKLSPKKHIEMEAVGLTRPVLDARANIGKGARPYYKIFQAFGLVRKVEKGITRWYYPSMLDDLAFDSAALGIALEKPLDLIQRHVSSDTLNVYVWGDHKKPSAHNLAWDYDIVITTFSRLSAEWGPKKRSVLKQIHWFRVILDEGHTLGSSLALTNKLQMAVSLVASNRWILTGTPTPNTPTSQVAHLHPMLKFLHEEVYGQNYQSWDTGIHRPFEAQMEDGRSRLLQLLQRTMISARKQDLKNIPPCIKKITFLDFSEGHAKSYNELAVTIRRNILMADWNDPSHVESLLNPKQWKFRTTTIKNVRLSCCVAGHIKVAEAGQDIQETMDALMQLGLDPSSGEYQSIRYALLNGASCFRCRDWCRLPVVTPCRHLLCLDCVALDSEKCTLPGCGNHYEMQTPETRARPENPNPKWPVPKDLIELQPSYKQDDWDPDWQSTTSSKVAYLVNKLRSLKAENIKHGYSRNMANGACLSSQSSCQDHNNVEGRLPHTMPDKVIIFSQFLEHIHVIEQQLTIGGITYAGMYSPMPLGSKRSSLTKFKDDPACMALVMDGTAALGLDLSFVSYVFLMEPIWDRSMEEQVISRAHRMGATRPIFVETLAMRGTIEEQMLKLLQDSNACRQMVNKGTSSTDNEGARPHRSLHDFAESSYLAQLSFVKGSDAAEKL

SEQ ID NO: 17859 - protein, 877 aa, Oryza sativa
  Clone ID: TF_OSC410323j.C1.p1.fg
MAASVEAAAAAVVAPPASVGGDEVVVGGGGGGASEQARTLIGALNLLSRNLPLPPAVLHAVSSIYHGGDAWEGEGEEGGEEEVAAAAAAVGDGCGESGEGEEDRADASPGADEGCSFKAPYCHCDDWGVTLIQELEDAVLKNQGPYMSYSELTALKEDRFNTSIQHRLTELEGLPSTRGEDLQMKCLLELYGLKLLDLQKKVRTDISAEYWLHKKCAHPDRQLFDWGMMRIRYPFTMYGIGDSFSMDADDINRKKRFSEDSLFGIWEQQRISRLEEEEKNQAEIRKRKFFSEILNAAREYQLQVPASYKRKKQRNDGVLAWHVRARQRINRMEKSRLQVLKAGDQEAYLRMVEESKNERLKLLLGKTNELLEGIGKAVQRQKDAEHVSRPDGSELPKGSESDDCSQISGLKVESPDEESPSDVDADHHSSADHSKFNAGHRLDSTVHSIEEKVTEQPSALEGGELRPYQLEGLQWMLSLFNNNLNGILADEMGLGKTIQTIALIAYLLEKKEVTGPHLIIAPKAVLPNWSNEFKTWAPSIGTILYDGRPDDRKALREKNFGQRQFNVLLTHYDLILKDLKFLKKNFEEWFNAPFACEVSLNDEEQLLIIHRLHQVLRPFLLRRKKDEVEKYLPVKTQVILKCDMSAWQKAYYEQVTSNGRVSLGSGLKSKALQNLSMQLRKCCNHPYLFVEHYNMYQRQEIVRSSGKFELLDRLLPKLQRAGHRVLLFSQMTKLLDILEVYLQMYQFKYMRLDGSTKTEERGRLLADFNKKDSEYFLFLLSTRAGGLGLNLQTADTVIIFDSDWNPQMDQQAEDRAHRIGQKNEVRVFVLVSVGSIEEEILDRAKQKMGIDAKVIQAGLFNTTSTGWAVQHNLHRLD

SEQ ID NO: 17860 - protein, 63 aa, Oryza sativa
  Clone ID: TF_OSC422293j.C1.p3.gm
MKRATENKYLANLKTDIVEKALKYDRKEKMKEKEGIKWLWTLHLKKLGGALCDEMGMGKTRQP

SEQ ID NO: 17861 - protein, 1445 aa, Oryza sativa
  Clone ID: TF_OSC400007j.C1.p4.fg
MDRAARLARRGGGVTVAEYRMVRGRRRGGDAGPVVVIDVEDDGEDAADDSAGGGGGAAAAVKRRVVVPGAVATRTRSRRMAMAQQAPVTPPAAAEEAPSRRRKRKGAASAEAGGGGPSKRRVRSSGSAGGRGARKRKEAEADEEEAEAEAEEEAEAEAGTPARGESMEVSQVDGGGSSGRADDASHNGNGESRVCNADGIDQASEERPSVAGGDLIEEEHYGNGEASVAGGDRIEEHCGNVEASVANSNRDGGEIIAGEGTEDRGNTELSVVDPVNEELASDEDDYDDEMLEEKLVGDVIRAYSNGADLDTNGVDWEAEDEMEFADLDTNVVDWEAEDEMEFDDDNDNDADDDGDNFGGDADEGDKSVQMHDFSKVETQDLVSHNVNVSEVRPHEDEEAIKDEMESKGKGSLSFNEGSSYIEILDSDEEVKVVNDTGNALRRKPLVPAKLPIVPSCVAWRTRSSWGMKEERISYNTYFEVLSDEPKEDDDDTEVELDDEEDDENDDDCNSASCDEEDEEEEEEREEEEEEAQRRKQKKGIDSSDDEMIDDAVDCGIDWEEDYPEVDFTRPLTFQKDGSEAPVGSEAFTEQQKRSRFTWELERRKKLKLGMMTNHRLYERDLESDSNSSDSSQNRKNGCQGSGDHRTGRKRKNPLSKSGKKSSRMLKRQSLMKLLMDKMCSNDDGKSTPFDQKPQIEYSFKDLHPLVFSFGDDDPSPTDRSEQDAALDMLWADLDFTLESENIGTYYDDEGQEDSLLDHALAPITPCSRGKHEFIIDEQIGIRCKYCSLVNLEIRFILPLLASNFAEKPAWRNSSCLKTALMCPDLYEQTGTGDGQSQDFHINGTVWDLIPGVITDMYQHQREAFEFMWTNLVGDIRLNEIKHGAKPDVVGGCVICHAPGTGKTRLAIVFIQTYMKVFPDCRPVIIAPRGMLFAWEQEFKKWNVNVPFHIMNTTDYSGKEDRDICRLIKKEHRTEKLTRLVKLFSWNRGHGVLGISYGLYMKLTSEKVGCTGENKVRTILLENPGLLVLDEGHTPRNERSVIWKTLGKVKTEKRIILSGTPFQNNFLELYNILCLVRPRFGEMFLTKTRVGRRHCVSKKQRDKFSDKYEKGVWASLTSNVTDDNAEKVRSILKPFVHIHNGTILRTLPGLRECVIVLKPLPLQKSIIRKVENVGSGNNFEHEYVISLASTHPSLVNAINMTEEEASLIDKPMLERLRSNPYEGVKTRFVMEVVRLCEALKEKVLIFSQFIQPLELIKEHLRKIFKWREGKEILQMDGKILPRYRQNSIEVFNNPDSDARVLLASTRACCEGISLTGASRVVLLDVVWNPAVGRQAISRAFRIGQKKFVYTYNLITYGTGEGDKYDRQAEKDHLSKLVFSTEDEFSNVRNMLSKAEMEHCSKLISEDKVLEEMTSHDQLKGMFLKIHYPPTESNIVFTYNQIAPELS

SEQ ID NO: 17862 - protein, 791 aa, Oryza sativa
  Clone ID: TF_OSC400679j.C1.p1.fg
MGGNSVTMAEELKGAAVPMSLDGRQGGGSISAGVCVDGMGACLSACGIQVLKFWCIRLVIFYSFIGSKCCSEVQFAFCYILFLQALEAPRGEPRRTKTHWDHLLGEMAWLAKEFDAERKWKLSMAKRIAQRANKGVVDQATKDERKQKVFYKNQLELEERKKKALDKQLDFLLGQTERYSTMLAENLVDVRLQNQENDSLQTNQRSQQELAQENINASSPTDVDNVEIDDDYNSSLGEEPKDDEHTIDEDEAQITEAERNEELAALQAEADLPLDDILKLYTKNKVQAFSVSRESSPDGRDVFSDSDSKDLIKDPLNQANGCNDESDHTSSDEGISSEEADDYQSYSEFVKKNTVKCNGNISSVDAKLTELSVRSLVSTEMTEGTWTLGELGPSGGAEVGWMQAVGGGATISRDLGGAEFGCWPWCNEQQGPRRGCARAAVQRAAERRADDEDYVANDEGKDDEATLSEEEELAKKEDCDPLDEVKLLQKESEIPLEELLARYQKDGYADDDTTELENSPALSVEDVNANMPVDDESADTVEVNRDLSADTMKLTRDQSAETVKVNNDQSAEIVEGNNDTFEDHESAGMLGPEHVSGSVLQLETSEPIVQENTAKEGDVTDTKAMANGDNSDVIADAAAAARSAQPTGNTFSTTNVRTKFPFLLKHSLREYQHIGLDWLVAMYEKRLNGILADEMGLGKTIMTISLLAHLACEKGIWGPHLIVVPTSVMLNWETEFLKWCPAFKILTYFGSAKERKQKRQGWMKPNYFHSHQEFKDWFCNPISGMVEGQDK

SEQ ID NO: 17863 - protein, 1006 aa, Oryza sativa
  Clone ID: TF_OSC400288j.C1.p5.fg
MGKERGREEQVATVRAVLGDGTPEMDIIRALHMAGDDPTRAINILLDFPHGPPPPPPPSPSPSPSPPAGKPTKPHPESTPPTKTPARSKPAAAAAEKPRPSVAPESTNGGGGGEHWWLVGSVEMAGLSTCKGRRVASGDAVTFSFPNSPVAAAAGGKSRSGRPALVSCSSEIMRFSTPRHGEVGRIPNEWARCLLPLLKEGKIKIDGVCKSAPEVLSIMDTVLLSVSVYINSSMFHGQKQSTPKAARAATEDSTFHPLPALFKLTGLSPFKKAAFTPEDLYSRKRPLETKSSAPATKLTTEKLRLSSDGNEDDHAERIVSDSELDDIIGISDSSALEERDPPDALQCDLRPYQKQAFYWMMQLEKGSSSQDAATTLHPCWEAYKLEDKYGLVILFEPFLYYNDFLKLTLGRLYCIHFRRELVLYLNVFSGDATTEFPSTLQLARGGILADAMGLGKTIMTIALLLADSSKGCITTQHSTHICEEASGLGELPVQPHDDVKKLAIPFSFSKLRKPKTPLIAGGNLIVCPMTLLGQWKAEIEAHATPGSVSIYVHYGQNRPKEANLIGQSDIVLTTYGVLSSEFSNENSTESGGLYSIHWFRVVLDEAHMIKSPKSLISLAAAALTADRRWCLTGTPIQNNLEDIYSLFRFLRVEPWRNWSLPILILPPANIEVKYCDLSETEKDFYDALFRRSKSFNVGSRGDTQEFADLNKLAKRFLHGGNGAVNGDSSLPSRAYIEEVVQELQKGEGECPICLEAFEDAVLTPCAHRLCRECLLSSWRSASAGLCPVCRKSMSKQDLITAPTDNRFQIDVEKNWVESSKISFLLQELEVLRTSGAKSIIFSQWTAFLDLLQIPLSRATENFVVPNHGYYENSCISTRHNFSFARLDGTLNLQQREKVIKEFSEDKSILVLLMSLKAGGVGINLTAASNAFVMDPWWNPAVEEQAIMRIHRIGQTKSVSIKRFIVKGTVEERMEAVQARKQRMISGALTDQEVRSARIEELKMLFS

SEQ ID NO: 17864 - protein, 821 aa, Oryza sativa
  Clone ID: TF_OSC400606j.C1.p2.fg
MASTSRRGGGEDNDDEPYLLGFIVANAVGLQYYQGGRAITRRESVGLVREPHNPHDANAIRVDNARGEKIGHIGRRAAAALAPLLDAGHVAAAHGIVPKPASKRLYSLPCQVHLFARPPHAALVAAALAASGIDLIHVDHPEFALSESAIVQEQQTKRSRGDVDRLFSHVGKGGRARIAPMEAPRDVVVSELFEHQKAALGWLVHREESCDLPPFWEEDNDGGFKNVLTNQKTNERPPPLKGGIFADDMGLGKTLTLLSLIGRSKARNVGGKKARGAKRRKVEEAVEEESRTTLVVCPPSVFSSWVTQLEEHTKTGSLKVYLYHGERTKEKKELLKYDIVITTYSTLGQELEQEGSPVKEIEWFRVILDEAHVIKNSAARQTKAVIALNAERRWVVTGTPIQNSSFDLYPLMAFLRFQPFSIKSYWQSLIQLPLERKNNGIGLARLQSLLGAISLRRTKETESGSKSLVSIPPKTVLACYIELSAEEREYYDQMELEGKNKLREFGDRDSILRNYSTVLYFILRLRQLCNDIALCPLDLKSWLPGSGSSLEDVSKNPELLKKLASLVDDGDDFECPICLAPPAKTVITSCTHIYCQTCIMKILKSSSSRCPICRRSLCKEDLFIAPEIKHPDEDSSVNLDRPLSSKVQALLKLLRRSQSEDPLSKSVIFSQFRKMLILLEGPLKAAGFNILRLDGSMTAKKRSEVIRQFGCVGPDSPTVLLASLKAAGAGVNLTAASTVYLFDPWWNPGVEEQAMDRVHRIGQTKEVKVVRLIVKDSIEERMLELQERKKKLISGAFGRKKGGKEHKEIRVEELQMMMGMK

SEQ ID NO: 17865 - protein, 856 aa, Oryza sativa
  Clone ID: TF_OSC401643j.C1.p6.fg
MSLHSLKETLQSSSFSQPQSESQPRSPPPLLARRPPKTSLSQQLLRLDASSSSSSFSVSPPPPPRTSPTSDAAADDAPPLPEEEDEVPCIRPRASLPPAASLDSRGPYEPLALSPPGERPVVQVPSSINCRLLVHQRDGVRFLYNLYRNNHGGVLGDDMGLGKTIQTIAFLSAVIGKDNDHGDQLVEGRKIAPILILCPTSVIRNWENEFAEWARCSVAVYHGPNRDLVLQKVETQRLEIVITSFDTFRIHGKILCGISWDLVVVDEAHRLKNEKSKLYTACLEITTRKRFGLTGTIMQNKIMELFNLFDWIVPGCLGDREHFRVYYDEPLKHGQRFSAPERFVQVADKRKKHLVSVLSKFLLRRTKEETIGHLMLGKEDNIVFCRMSDVQKRVYRRMLQQPDVQILINKDLPCSCGSPLTQVECCKRTEPHGIIWSYLHRDNPEGCSLCPFCLVLPCLGKLQQISNHLELIKPNLKDEIEKQKKDAELAAAVFDTDIELVGGGAKSENFMGLSDAEHCGKMRALERLLSLWTLQGDKILLFSYSVRMLDILEKFLIRKGYCFSRFDGTTPMNARQLLIDEFNRCPSKQVFLISTRAGNLGVNLVSANRVVIFDPSWNPAQDLQAQDRSFRFGQRRHVTVFRLLGAGSLEELIYSRQIYKQQLSNIAVSGKIEKRYFEGVQDDKKFQGELFGICNLFRDLSDKLFTSEIIEMHGEHGKGNTAETIGIREIVDTNIFGTQDQMKSSMTAIHNENKNLYHCGIVYAHRNEDVVNTRTNEASNCAEDKTVPRHLEELQSKKNETMHTIKAKSYSLVQKKKEFSRIASFMGMNDLEFSKWLLSVSPLQRHEVLDRYRNAK

SEQ ID NO: 17866 - protein, 2329 aa, Oryza sativa
  Clone ID: TF_OSC18580j.C1.p1.fg
ERRHEKKTDDGETNSSRSLSLSDNNDEKKKDKFSSGDEKEDHEKQLKQIRLDMEALRDDKTQMEVILDEKIDEVRKISSKVNDLEVQLRREKDECHRMTSKMKKFIKAHARFLKAQEEVKRSQARFERLGDLLASDILKRGANEEGSSVNEDLNERSPNTAATKKRSIPYSTSEEAKAVKKRRERDSDTMTRSDKYRSDVTDFDKTSKGTEATKSLYLKKKLWEDEKSKYFVNLQVKGSPVRHVLPSTGMAAHAIDDLNEAIELEDRHESIDALLENDADDKTRSPAIPLQPPPVVQNAYEQSGFEHISFDIPFGLSIYCAKFPLTQLAGSTQATRFAAARQIGEIAKSHPQELNVLLKKDICIIIILRRKRVSPYLRSKNWDTRVAAAHAIGAIAENVKHTSVKDLFASAEAEKHASGLSGIGDVGSTLRHADTTATSELAFGSFDINRVLEFGSPLLASGGQEYDIANDNGKNPAERLARQKQNLRRRLGLDVCEQFMDFNDVIKDEDLLAQKNYWGANMQNNGFYSFNTGQNIQHLVASMVPSAIALEHSVGMALSSICDDLITPLTFFQDTVDAITDEDNLEYSENGRWPFQQFVDQLIHDMFDPIWEVRHGTIMALREILTHQGACAGVYFPDLNSPFADLDDKNNLDSLKRAHGIDLNEDIDSGQLEPVLKRQKKEESNPEVMDIQLDKEPSNGDYSKTEASLSTEPTVSSGEPNLAHAKVESPFQVDGSANPSKVDPYCTPPHETLNSMPKLSSTHLPENSKFIKLMKLANYSAVKNWEFLQDCAIRFLCVLSLDRFGDYVSDQVVAPVRETCAQALGAVLKYMHPTLVCHTLNILLQMQRRQEWEVRHGSLLGIKYLVAVRQEMLKDLLNYVLHACKAGLEDPDDDVRAVAAEALIPAAASLVRLNDQMLHSIVMLLWDILLDLDDLSPSTSSVMNLLAEIYSQPEMVPKMLGTTAIGGDNEFDLNSVTLVAGEEKMGSNDNPYVLAALTPRLWPFMRHSITSVRRSAVRTLERLLEVGNTRNSAKLWLASILGDALQVVFQNLLLESNDEIIRSSERAWKLLLQCPTEDLESAASSYFSNWVQLATTPYGTALDSAKMFLPVALPRGSRSRAAAKIKSARLEHENTRMISFGSTGENTSQEKHSEASLSVSKIIVGSDSDKSVTHTRVLTSMALGLFASKLPEGSWQVVLGPLASDLMSLSGVQRQVASMVIVSWFKDLRKSDPAAVGTLLAFLSSLKGWMLDLLACSDPSFPTKDSPLPYAELARTYRKMRNEANNLFQSIESCALLKEYTSNLNFEADMLSVDDAINFTSKLLLPSEPDFSLDSDKIVLNNIESAKQGLLSTSGYLKCVQNNLHVTVSSLVASAVVWMAGLPSKLNPVILPLMAAVKREQEEILQDKAADALAELIFSCVGRKPGPNDKLTKNLCTLTCTDASETPQAAVINSIQVIEDQNLLSIGKRFSNHKSRGQMTSGGESKSEGFISRRGSELAFKHLCEKFGASLFEKLPKLWDCLTEFLKPVKTGDDLMKEDPSIAQLGRSCEDKEPQSLINNIQVVRSVTPHLAEPLRPQLLSLLPCILGCVRHPHVAVRLAAARCITSMAKSLTANVMVIVIENVIPMLSDSSSVCARQGAGMLLSLLVQGLAVELVPYAPFLVVPLLRCMSDPDGSVRQTVTHSFAALVPLLPLAKGSLLPDGLSERLSSSAEDAQFLEQLLDNSQIDDYKLSIDLSVELRRYQQEGINWLAFLRRFKLHGILCDDMGLGKTLQASAIVAADIAESRARNDEQDPKSLIICPSTLVAHWEYEIEKYIDSSIMKPLQYIGSSQDRIILRSQFDKFNVIITSYDIIRKDIDFLENVFWNYCVLDEGHIIKNSRSKITSAVKQLKAQHRLILSGTPIQNNVLELWSLFDFLMPGFLGTEKQFQATYGKPLLAAKDPKCSAKDAEAGILAMEALHKQVMPFLLRRTKDEVLSDLPEKIIQDRYCNLSLLQLKLYDKFSNSNAKQEISTIVKENELDQSTSQPKATRHVFQALQYLLKLCSHPLLVTGESPPDYLVDLLKEIGMGTGDELHDLHHSPKLVALQEILQECGIGSEISSPDASAAIGQHRVLIFAQHKALLDIIEKDLFQSHMRSVTYLRLDGSVEPEKRFEIVKAFNSDPTIDVLLLTTHVGGLGLNLTSADTLVFMEHDWNPMKDLQAMDRAHRLGQRKVVNVHRLIMRGTLEEKVMSLQRFKVSVANAVINAENASLKTMNTDQLLDLFASTPASRKASVLPSSSGGDQSKDSKGKSGGKGLKSILNGLDELWDQSQYADEYDLNQFLAKLNG

SEQ ID NO: 17867 - protein, 2482 aa, Oryza sativa
  Clone ID: TF_OSC400740j.C1.p2.fg
MLGPPRRGPAYKTKLCALWQRGNCNRDTCSFAHGHGDIRRPPSSRGAFTHHPDSADMLTQLLPEDSMTFFINSSLGISTICVDDNACAVPEGELGEEIIEPVISEAGLIGGFHLGGGIPLEESPGVIVPFMIEGHLLEKEILAIHDLLAGRECERRHEKKTDDGETNSSRSLSLSDNNDEKKKDKFSSGDEKEDHEKQLKQIRLDMEALRDDKTQMEVILDEKIDEVRKISSKVNDLEVQLRREKDECHRMTSKMKKFIKAHARFLKAQEEVKRSQARFERLGDLLASDILKRGANEEGSSVNEDLNERSPNTAATKKRSIPYSTSEEAKAVKKRRERDSDTMTRSDKYRSDVTDFDKTSKGTEATKSLYLKKKLWEDEKSKYFVNLQVKGSPVRHVLPSTGMAAHAIDDLNEAIELEDRHESIDALLENDADDKTRSPAIPLQPPPVVQNAYEQSGFEHISFDIPFGLSIYCAKFPLTQLAGSTQATRFAAARQIGEIAKSHPQELNVLLKKDICIIIILRRKRVSPYLRSKNWDTRVAAAHAIGAIAENVKHTSVKDLFASAEAEKHASGLSGIGDVGSTLRHADTTATSELAFGSFDINRVLEFGSPLLASGGQEYDIANDNGKNPAERLARQKQNLRRRLGLDVCEQFMDFNDVIKDEDLLAQKNYWGANMQNNGFYSFNTGQNIQHLVASMVPSAIALEHSVGMALSSICDDLITPLTFFQDTVDAITDEDNLEYSENGRWPFQQFVDQLIHDMFDPIWEVRHGTIMALREILTHQGACAGVYFPDLNSPFADLDDKNNLDSLKRAHGIDLNEDIDSGQLEPVLKRQKKEESNPEVMDIQLDKEPSNGDYSKTEASLSTEPTVSSGEPNLAHAKVESPFQVDGSANPSKVDPYCTPPHETLNSMPKLSSTHLPENSKFIKLMKLANYSAVKNWEFLQDCAIRFLCVLSLDRFGDYVSDQVVAPVRETCAQALGAVLKYMHPTLVCHTLNILLQMQRRQEWEVRHGSLLGIKYLVAVRQEMLKDLLNYVLHACKAGLEDPDDDVRAVAAEALIPAAASLVRLNDQMLHSIVMLLWDILLDLDDLSPSTSSVMNLLAEIYSQPEMVPKMLGTTAIGGDNEFDLNSVTLVAGEEKMGSNDNPYVLAALTPRLWPFMRHSITSVRRSAVRTLERLLEVGNTRNSAKLWLASILGDALQVVFQNLLLESNDEIIRSSERAWKLLLQCPTEDLESAASSYFSNWVQLATTPYGTALDSAKMFLPVALPRGSRSRAAAKIKSARLEHENTRMISFGSTGENTSQEKHSEASLSVSKIIVGSDSDKSVTHTRVLTSMALGLFASKLPEGSWQVVLGPLASDLMSLSGVQRQVASMVIVSWFKDLRKSDPAAVGTLLAFLSSLKGWMLDLLACSDPSFPTKDSPLPYAELARTYRKMRNEANNLFQSIESCALLKEYTSNLNFEADMLSVDDAINFTSKLLLPSEPDFSLDSDKIVLNNIESAKQGLLSTSGYLKCVQNNLHVTVSSLVASAVVWMAGLPSKLNPVILPLMAAVKREQEEILQDKAADALAELIFSCVGRKPGPNDKLTKNLCTLTCTDASETPQAAVINSIQVIEDQNLLSIGKRFSNHKSRGQMTSGGESKSEGFISRRGSELAFKHLCEKFGASLFEKLPKLWDCLTEFLKPVKTGDDLMKEDPSIAQLGRSCEDKEPQSLINNIQVVRSVTPHLAEPLRPQLLSLLPCILGCVRHPHVAVRLAAARCITSMAKSLTANVMVIVIENVIPMLSDSSSVCARQGAGMLLSLLVQGLAVELVPYAPFLVVPLLRCMSDPDGSVRQTVTHSFAALVPLLPLAKGSLLPDGLSERLSSSAEDAQFLEQLLDNSQIDDYKLSIDLSVELRRYQQEGINWLAFLRRFKLHGILCDDMGLGKTLQASAIVAADIAESRARNDEQDPKSLIICPSTLVAHWEYEIEKYIDSSIMKPLQYIGSSQDRIILRSQFDKFNVIITSYDIIRKDIDFLENVFWNYCVLDEGHIIKNSRSKITSAVKQLKAQHRLILSGTPIQNNVLELWSLFDFLMPGFLGTEKQFQATYGKPLLAAKDPKCSAKDAEAGILAMEALHKQVMPFLLRRTKDEVLSDLPEKIIQDRYCNLSLLQLKLYDKFSNSNAKQEISTIVKENELDQSTSQPKATRHVFQALQYLLKLCSHPLLVTGESPPDYLVDLLKEIGMGTGDELHDLHHSPKLVALQEILQECGIGSEISSPDASAAIGQHRVLIFAQHKALLDIIEKDLFQSHMRSVTYLRLDGSVEPEKRFEIVKAFNSDPTIDVLLLTTHVGGLGLNLTSADTLVFMEHDWNPMKDLQAMDRAHRLGQRKVVNVHRLIMRGTLEEKVMSLQRFKVSVANAVINAENASLKTMNTDQLLDLFASTPASRKASVLPSSSGGDQSKDSKGKSGGKGLKSILNGLDELWDQSQYADEYDLNQFLAKLNG

SEQ ID NO: 17868 - protein, 1342 aa, Oryza sativa
  Clone ID: TF_OSC401858j.C1.p30.fg
MAMARSILLLLLLAAAASASADAPFLVAHKKVSLSRPKPGVERLAVSLDLYNQGSATAYDVSINDDTWPKEAFELVSGEMSKTLERLDPGVTASHAFVLETKVQGRFQGSPAVITYRVPTKAALQEAYSTPILALDVLAERPPEKKFEWAKVTSSMEDDDDDQRLLHSLGVTSADIHDIERRIISQATTDPADSSGPTINGGHQPDDALAKLHHKLRSVQIEIDAVASTIKGAKLKQPSGNKPHEHKGKDQPDHHGAGHLQQALAADRLTSLRKAKAQIQKEILQSHPSPSASNRKDKMLAMLVQDEPRHKKPPVGPKNIVKRPMKTVTYDDDNNFDAVLDGASAGFMETEREELIRKGLLTPFHKLKGFEKRVELPEPSHRQDDSAGQTEEAMEASRIARVAQSLKQIAQNRPATKLLDSESLPKLDAPAAPFQRLGKPLKRPVSPSSDEQEKKRPRNKTKRPLPGKKWRKANSIKESSLDDNDVGEAAVSVSDDDEDQVTEGSDELTDVTLEGGLRIPGTLYTQLFDYQKVGVQWLWELHCQRAGGIIGDEMGLGKTVQVLSFLGSLHNSGLYKPSIVVCPVTLLQQWRREASRWYPKFKVEILHDSANSSSKKSKRSSDSDSEASWDSDQEEAVTCSKPAKKWDDLISRVVSSGSGLLLTTYEQLRILGEKLLDIEWGYAVLDEGHRIRNPNAEITLVCKQLQTVHRIIMTGAPIQNKLSELWSLFDFVFPGKLGVLPVFEAEFSVPITVGGYANATPLQVSTAYRCAVVLRDLVMPYLLRRMKADVNAQLPKKTEHVLFCSLTTEQRATYRAFLASSEVEQIFDGNRNSLYGIDVLRKICNHPDLLEREHAAQNPDYGNPERSGKMKVVEQVLKVWKEQGHRVLLFTQTQQMLDIMENFLTACEYQYRRMDGLTPAKQRMALIDEFNNTDEIFIFILTTKVGGLGTNLTGANRIIIYDPDWNPSTDMQARERAWRIGQTRDVTVYRLITRGTIEEKVYHRQIYKHFLTNKVLKDPQQRRFFKARDMKDLFTLQDDDNNGSTETSNIFSQLSEDVNIGVPSDKQQDQLYAASATPTTSGTEPSSSRHGQGKEDHCPDQADEECNILKSLFDAQGIHSAINHDAIMNANDDQKLRLEAEATQVAQRAAEALRQSRMLRSHESFSVPTWTGRAGAAGAPSSVRRKFGSTLNTQLVNSSQPSETSNGRGQSLQVGALNGKALSSAELLARIRGTREGAASDALEHQLNLGSASNHTSSSSGNGRASSSSTRSMIVQPEVLIRQLCTFIQQHGGSASSTSITEHFKNRILSKDMLLFKNLLKEIATLQRGANGATWVLKPDYQ

SEQ ID NO: 17869 - protein, 1667 aa, Oryza sativa
  Clone ID: TF_OSC8410j.C1.p2.fg
MASPPPFDICGDLDDDPTPPAPTPLAAPTPNGLNDRLLRLTRTHQRGPSQNPNPNPNPNPKPPPPPPPQEPEPAKVKLAGRRRLCKLSTAGDESAGDDDSIRDILDDLTTRLDSLSVDRPTARPRPHVSPLPCALHADPDPSQSQLNDGTKPSSSFVDCDDDDDDAGGAYGGFGVKEEVTRKVFKASSSFGGRGNDDKMKAKGAYAFDTVSRKTTTESKASKFFGDYDDEDDIDQDAENGKENHADDVGWEKTEDFKMEPTGTGVTRKPYNLPGRIFNMLYPHQREGLRWLWVLHCRGTGGILGDDMGLGKTMQVSAFLAGLFHSRLIKRVLVVAPKTLLTHWTKELSVVSLKDKIRDYSGPNANARNYELKYAFKEGGILLTTYDIVRNNFKMIKGNFTNDFDDEEETLWNYVILDEGHIIKNPKTQRAQSLFEIPCAHRIVISGTPIQNNLKVQSKELRERIKPYFLRRMKNEVFLDSGTGEDKKLAKKNELIIWLKLTSCQRQLYEAFLNSELVHSSMQGSPLAAITILKKICDHPLLLTKKAAEGVLEGMDAMLNNQEMGMVEKMAMNLADMAHDDDDVELQVGQDVSCKLSFMMSLLQNLVSEGHNVLIFSQTRKMLNIIQEAIILEGYKFLRIDGTTKISERERIVKDFQEGPGAPIFLLTTQVGGLGLTLTKAARVIVVDPAWNPSTDNQSVDRAYRIGQMKDVIVYRLMTSGTIEEKIYKLQVFKGALFRTATEHKEQTRYFSKRDIQELFSLPEQGFDVSLTQKQLQEEHGQQLVMDDSLRKHIQFLEQQGIAGVSHHSLLFSKTAILPTLNDNDGLDSSRRAMPMAKHYYKGASSDYVANGAAYAMKPKEFIARTYSPNSTSTESPEEIKAKINRLSQTLANTVLVAKLPDRGDKIRRQINELDEKLTVIESSPEPLERKGPTEARTLKDWESLKAKEEEAGGRARGEGRKGSELNSTPFRLNSTSSTLVVFKVPSTFTTGRGALAAAAANGRFVPMAPTSQPQPQQEVEVEVDEDEELVNMVVEAGVGAIKMKMKIPRRVLGSLYPHQRDGLAWLWALHCTATGGILADDMGLGKTIQEGGILLTSYHIVRNNYMLLRGNGNGNNVDNNEEEPLWDYVILDEGHIVKNTKTQRAQSLFQIPSAHRIVLTGTPIQNKLKMSWFELRYEKPILCGNDKNATDQEKQMASNAAKRRLYEAFLNKDPVRSQTGALKGSSLEASTILRKICDHPLLLTKRDTDDFLEEMGAMLNNRDMCMVERILEDNLYADKRLQIVQGASCKIAFILPLLRNLVEEGHYVLIFSQTRVMLNLIQDAVSIEGHKFLRIDGTTKISERKKILKDFQEGLDSPILLLTSHVGGLGNTLTKADRVIVVDPAWNPSIDNQSVDRAYRIGQTKDVIVYRLVTCGTIEEKIYKQQIFKGGLFRTATECKEQPQFYNQDLYLQNEQEYSSLPPHGFDASLTQHKMQVENGQQLVMDESLKKHIQFLEQQGIAGVNRHGVLFCKTETTATLGDDGAINRKVRDIMVRRCYAPWEHICRDVEKKSLIDQVKEMSKKMDGLGDTMGRIVALEEEYAAELIGMLHENRWERSHLEKIRMQIDDLHEEHMAKFDEMLERIKRMELADEGELIAKFGEMVERMRQRCDMDRLSLPLLSSTLVA

SEQ ID NO: 17870 - protein, 1438 aa, Oryza sativa
  Clone ID: TF_OSC102263j.C1.p2.fg
MPRRKGKGKGVEDEVEVYEPASPPERVLIILDSSEDDLDLQEVRRSLMITGRGRARAAERVGEEAPRGSGRRAAPVVASRRRRRRSRSRSRSPRAARPRAESSRRPTARRARARARSPSLEIIDVDSGSDRGVVRVKEEPRSGSDSDYNGARGRARARARAPVAATAAKKKKRKRGKEAPSRAQESREVVRVKEEPNSDGNGAGGRARARSPVAAAAKQRKRGGREAPSRAQESRVPVQIKEEPYSGSDSDGNVAGGRAVVPAADAKQGKRGKKTPSRGKGRRVVVRETSTPAAPSNGAPSVGRGKGRGPGRGRQRSKGAVRGRATPVNRVSTGVGSRTRSRLAEQGRAFAQEEEEQVEEREEEEEEEEQGRAFAQVKEEQVEEQEEDEEEGEEEMEMEVEVEVRSDDNDHGNGGIRGEGGGTDDVAEIEEEELGTDEDETSDDSDENFSDEEGDEEELEEEEEEEEEEDDDDDDEEEEEPGDAPDQPGEAGEESPPRSRIMAMPLMGKRMFEGFSFLQQVDTSTGRDIRARTRSNFKRKKLLDKKLLKRGTFAKPYCIDVSSSGSEEDVPQPEQSAYGGDCADDDGGSDGNEEHRAVKRRKLNRRQSAHSDSEEDTTFVCDVKEGSGSRRVQEGAPRRQVKKEGSNKKKDGSTPQCVRNNGPKVGRQTNGLNGQGGVSFKRNVKIAQRRKRRQATADQEKYGHLLDPMFNEIESNQYEPVPEEQIDRRLPLVFAFGDDDKLEEKSKHDKLQDEDELWKEFDFALESINVCSHNCEEGEKEDEQEIPADKAASCIQGKHELIIDEQIGLRCKHCNFVDLEIRFVLPSMVKSCTERDMRKDHELDLFFDDILTSAGYEGPRDFGGKKTGLVWDLVPGVREDMFPHQQEGFEFMWRKLAGGTSIEQLRNNANTIEGGCVISHAPGTGKTRLAITFVQSYFAFFPECCPVIIAPRGMLATWEQEFRKWKVKVPFHVLNSKEINWKEDRTIKQLAIMDENLAQSLARNKLDHKFRRKLKLASWRKGSSIIGVSYTLFRKLANQSSMDGNMVRNLLLEMPDLLVLDEGHTPRNKKSLIWKVLEEVRTKKRIILSGTPFQNSFLELSNVLYLIRPKFARHFASKSFKKIGLEDYWTSLTLNNITEKKIDEIRQILDPIVHIHNGDILQKSLPGLRESVVILNPLPHQKEIITAMENTVTMGTLDAEYKISLASIHPFLVTCAKLSEKETSSVDVSLLKSLRPNPCVGVKTKFVLEIVRLCEAMKERVLVFSQYLEPLSLIMDQLSKMFNWTEGEEILLMSGNVLVQNREALMEAFNDMKSNAKVMLASTKACCEGITLIGASRVVLLDVVWNPSVGRQAIGRAYRIGQEKIVYTYNLITEGTKEKDKYDRQAKKDHMSKLLFSKEPHAAGFNLSQEVIFNDKILEAMTSHRELKDMFVKILHSH

SEQ ID NO: 17871 - protein, 948 aa, Oryza sativa
  Clone ID: TF_OSC400255j.C1.p28.fg
MDYEPVLKCLKKLPGVAVQDIPYKTRNVIKNLPKFFAESCASDKEVDGLLMKLPQHLRDALLPFQLEGVKFGLRRHGRCLIADEMGLGKTLQHFSLLSKILQCTNVEIISNYLFQLLQSPCVSILHLISLMIAAMIYDIFCVHHLNGFKIPEIYLTVCFLLGDNRPFDIYHQINMLWPHLLGSNKFDFANKYCLLHTVQGCNGRTYQDFSKGARLTELNVLLSQTLMIRRLKEHLLNELPPKRRQIIWLKLNASDIKTAISCIKGVNTSDEIPTIASPDNSNDSEEVNMEEGFKISKIGLSAPYKHCAHFLVFPFHLPTADGCKKSPRNLTTQEIGIVKIPGFSEWFLNHFIMKEPADNGSLDSQSNCQKTIIFAHHLKVLDGVQVFVTEQRIKYVRIDGSTSPRERKDAVDSFRLNPEVMVAIIGITAGGVGLDFSSAQNVVFVELPKSASELLQNTLDESHWLHLNQSLFRVSSLMNGKKDAIREIEVLPWSVTIDKIFLLSKVDQVYHLEESSKSEGKSQLGFLPLENHNADCGHGPGENVESDDMSIENFPGLNDMNFESDFFSIRTIPLHFEDDSLHTVMQNCPSPTAHEEIAFDSSSISQASVICPSMSSAKSVKVSQHTGRIHLYICVPGHDSRPRPLFENFLPEEVESPLCSDNTMKTSNRLLKRDPAFCNTFKAFVKEWLALRPIEQKRLLGKPLQLPLSLELCYLKDTNNHSTKGLLKGGSKRRVTPWCDISNPLPENAEWRKVVLHNGTSREREYTQGWTVHDEPLCKLCQGPCNGRLAKSPEYFEDLFCGLPCFEVFRSRTSGRFARQALFEIEHGICSKCKLDCHELVKNIRPLCKKKREEYIRNVAPNIASRLKLLDKLVHEPNEGNAWHADHIVPVYKGGGHLCTAKGAKRLTKKAKELLKNTVNNQQKDEASEAAEEDDKSLLVVVPGSAYS

SEQ ID NO: 17872 - protein, 464 aa, Oryza sativa
  Clone ID: TF_OSC414036j.C1.p1.gm
MQCDGGAYMRCADAHRCKSAPIDSTNPPVLSPAVLVDSNQNSEADREVAAPPSCSPPVAVSEEVKIPPPPSLPSAWSAPCSTTPAGADDIVHFFSPYGTVVDHQITQKDENKLSEGSGFWCAKTRHDSLAQVLKEGGVLLITYDLVRLYNEELNGMSSKSSKMRRACPSWDYVILDEGHVLKNPNTKNAAALKSLSRGQTVVLTGTPEFRKMVRPYFLRRTKESIESLLPNKADLVIWLKLTPYQVCIAVEAGDDVEFVPVEIGGTTRQSRAGALPRAGRGKKIGDSPSPPPPWPLAFTSASAPASAGLPLSRTGSVAPLRHGFGSAVVTAPPAEDEDFATAADLQFEPPLKVVKYPDPILRARNKRINTFDDNLRSLTDEMFDVMYKTDGIGLSAPQVGVNVQLMRPDNVKIDAQDVTGAKIKVKLSGLSARVFQHEFDHLQGILFFDRMSLDVLESVREGLK

SEQ ID NO: 17873 - protein, 667 aa, Oryza sativa
  Clone ID: TF_OSC10297j.C1.p4.fg
MAGLGGGWGGGYDDDDDWGLSAEQLDQLERDAYRKLAERKASSSAASTATSPLPSAAYSPVKNSHHHPASRVSQESCFGKVESLSPSRLSQPNASGNAVNNSQGNMSKVSVHLFLHSTGVIAAKFQYHQKLVDAVHKIPKASWNGKERVWMFPHSSLSVAEEVLSTVPGIAVEVQKLDPLVKRALTASLYAGDLRDLYGKIPTDVESKLMPFQREGVRFALQHGARTLIADEMGLGKTLQAIAVASCLHDAWPVLVISPSSLRLHWASVVLPQTGGSNKAGYRLVYSNTKGDFNLDGVFNVISYDVVPKIKDMLLDLDFKIVIADESHFLKNAQAKRTMHSLPVLQKAKYVVLLSGTPALSRPIELFTQLQALYPTVYKNVNEYGNRYCKGGFFGLYQGASNHEELHNLMKATVMIRRLKKDVLSQLPVKRRQQLETVKIKIQSCDSQETMDSLKFAQKNLINKIYNDSAEAKIPAVLDYLGTIIEAECKFLIFAHHQSMLEAIHQHLLKKKVKCIRIDGQTPVPVRQTLVTDFQNKDDIKAAVLSIKAGGVGLTLTAASTVIFAELSWTPGDLIQAEDRAHRIGQVSSVNIYYLLANDTVDDIIWDVVQGKLENLGQMLDGQEKTLDVSQSDTRPSPSKQKTLDAYLKRCSNSTEADQPKLKNPRF

SEQ ID NO: 17874 - protein, 1432 aa, Oryza sativa
  Clone ID: TF_OSC401803j.C1.p22.fg
MDENRKLSDDMSKKMEPIHSNGEAGEDKTIIIEPESDANKLEVETDARHGICEAHKAHEYGTMENDLHEEASTTDDDSENDSYEYLLRESDNEQTSESDAGEGDNEAPLTDEEVETLITEFLDAESKAAQAQESLEKESLEKIESEVRLELSESLQGNELESAVSTEMKQYKKEWESELDDLETHIAVLLEQLDAAGVELPSLYKSIESQVPNVCETEAWKNRAHWAGYQVPEEANKSIRKADEYLQSCRPVRRKHGRLLEEGASGFLAGKIPVGDDGSAQCHEKSWNAFNELTKSKEYAESSFGSSNWASVYLASTPQEAAALGLQFPGVDEVEEIAEVEGAVSDIKGVDEIELSEVQRRKYRKVPEEDDAKMTKRLQRHLKERRTRHLHKENIGLASSSNGCFSVELAKRTREDDVEFDNKRSKTVIIESDDDMQTDSKPDSAPSENADEIIDLDIFPSQSPKLGDKVRPKPFKCTICTEMLNVPEVHRHPVLDVIICGSCRFLVIEKNRLEDPVSGGYCTWCVKSEQLQSCSSCKLLFCRNCLSKNFGEEGLSEARVAGWQCCCCLPSQLEHLISDCDKALGGVESSDPENDFAELSVLESNGPFSKHKMKKRIRRIMDDEELGEETKLKIAMEKARQEHLKSMQEQSASKLKSNNIGISLEAPSEVSEYVGDGHIVNLAREEDEAPVRIPSSISAKLKPHQYRITITLVMISVQLYLYCYRKLKYIMIFQVSGIRFMWENVIQSVKKVKSGDKGFGCILAHNMGLGKTFQVITFLYTVMRCIQLGLRTALIVTPVNVLHNWKKEFIKWCPAELKPLRVYMLEDVPRCRANIQYLLKKWRIKGGVLLIGYSSFRNLSLGRSARDKTVANEITNALQMWVLIQSIYICHNQCGPDILVCDEAHIIKNRRADTTQALKQMVDFVREGYLGSSHEFRNRFQNPIENGQHTNSTSDDVKIMNQRSHILYEQLKGFVQRMDMNVVKNDLPEKKVFVVTVKLSQLQRKLYRRFLDVNGFSSSAASEKSFQRSGFFAKYQTLALIWNHPGLLQMAKQKGNLRQEDVESFLMDESSSDDNIENYLPNGEKLRSRNDQLSKKSSDVVNEESNWWENLLDENAYKEADYSGKMVLLLDILSSCSELGDKALVFSQSLSTLDLVEFYLSKLQVNGKEGKYWKQGKDWYRIDGSTPSSERQNLVERYGQTKPVYAYRLMAHATMEEKIYKRQVTKEGLAARVVDRQQVSRTISKEEMLHLFEFGDEELLEQSGSTMNGHSKVGTEKPPTPNSSETTEHLPLDRLMVNLLHDHSRWIASYHEHETLLQENEEERLTKEEQDMAWLSYNKLLEVAPRKATHDAERKPSTVPTESSLIQPPKATSRSRQPQQPKITSNNQKKCNNLSHLLTLRSQGTKPGCSTSCKECGQDISWETLNRDGRSR

SEQ ID NO: 17875 - protein, 1132 aa, Oryza sativa
  Clone ID: TF_OSC20491j.C1.p1.fg
MHGDWPESPSQEVLYADEIAAVRAVLGAGLPEARVVAAISRCGGNAERAINALLDDATAGVEDKPEPKKGKGAKTAAPPVKAERDAGGAAPKPPPPPVKVEVLDDEPLGSQESNGCSARVKKEREDELLVKAPPPMPDRVKEEDGVAAKRGAATANAAGISLVPRPKKRSRVHDEADTIDLTATHPVPYLNPRPIRAVPPPEAMEMLESRRVRARPPPPSSDLRMVVAPPDAEFGEFPEERDWFLVGRSYVTGLSTNRGRRRLDAGELVHFSFPSLERTYGGIKVSNKKAAALAEIVRFSTNRAGEIGKLSTEWTKCLVPLVSSSKVKIQGKIVFPTVELRLMQEILLYVSFYIHRSVFTASGNNSSWDLLAPANVDYSTNPLYRLFRLLKLRAFTKADITPEELAAGKRPRNLRGDDNDEDEPMAIVGLENRRTAGQTFPEQGTDEQAISEAALNKIVGTAETYDLEEAEPPSTLVSVLKPYQKEALFWMSQLEKGIDGDQAKKTLHPCWSAYKIVDKRAPAVYVNVFTGEATTQFQSVTQSARGGILADAMGLGKTVMTIALILSNPRGELEQDKRGTRDRDTKAQTSRSSVRGGTLIICPMALLGQWKDELEAHSTPGALSVFVYYGGDRTTDLRFMAQHSVVLTTYGVLQSAHKNDGSSIFHRIDWYRVVLDEAHTIKSPRTKAARAAYELTSHCRWCLTGTPLQNNLEDLFSLLCFLHVEPWGDASWWNKLIQRPYENGDERGLKLVRAILRPLMLRRTKETKDKMGNPILVLPPANIEIVECEQSEDERDFYEALFRRSKVQFDKFVAQGSVLNNYANILELLLRLRQCCDHPFLVISRADTQKYTDLDELAQRFLDGVQRDSARRSAPPSQAYVEEVVEEIRQGATTECPICLESASDDPVLTPCAHRMCRECLLSSWRTPSGGPCPLCRSPITKSELITLPSQCRFQVDPENNWKDSCKVIKLIKILEGLQEKREKSIVFSQFTSFFDLLEVPFNQKGIKFLRFDGKLSQKHREKVLKEFSESKDKLVLLMSLKAGGVGLNLTAASNVFLMDPWWNPAVEEQAIMRIHRIGQKRAVQVRRFIVKDTVEERMQKVQACKQRMISGALTDDEVRSARIEQLKMLFT

SEQ ID NO: 17876 - protein, 178 aa, Oryza sativa
  Clone ID: TF_OSC900422j.C1.p8.fg
MESEEARKVCFSKRRADLFKMASELSVHFNADVAAVVFSPAGNRAYSIGDPSVMDRFLSSLPAPAPPAETEPEPEVDWSVMEELSRLCGQLQAMVDAHKARLEKAEEKLRESGAAAWMMDLEAEVGRMAPEDVLALVTKLAVLRDGVAERAHEMLREALLAVAAPTPTTPTTPPPAGF

SEQ ID NO: 17877 - protein, 406 aa, Oryza sativa
  Clone ID: TF_OSC400773j.C1.p106.fg
MAGRKETVIKMAKELSVLCDVPVALVCAVGGAVEVWESEEGVLDRYRALPPEVRATRAHTHRGYLERELRARRAKLAKVREEGAFKSWGRDALSGIITAEEAPALLESIDAAIAAATARQEALALLDGGGLHLQHVPASASDAVAPVVGGHGVQVQYIGGSGGGGGSQQEMTPAADGDGARNADQYDDILPWDGNTFEAHNAHVMLPACGFQCTGDYRVDMDGYVWGAPDDANAYHGWPDEAMWCTDESCSCNAATATAVPAMYHPPTLDTVHGSFLAAPAQPLAFSTGADFINAPNDFLTVGVGGSFINVGDYSAQSLADEFHHLSDATNQLDQTHYPPFGGTGGAEPGDTQSHSWGDYYLAQSSANECQLLGVDGGDIHLDQTHCLGGAGGAEPGDTKSHNWGG

SEQ ID NO: 17878 - protein, 180 aa, Oryza sativa
  Clone ID: TF_OSC102221j.C1.p1.np
MARKKMKLLRIVIDVKRRVTFRKHLKGLMKKVSEFATLLMVYGEVEVQATKVWPSVWEATRVLEHFKAMPQLGRYKKMIDLEGILNKQIDKLKEKLHKLGREADESETKLLLIEAINGRHPSLDGLTIEQIISLGRMANSRLKIVNDRLKKLRASNTYTSVIPWSPPPPPPRRPASPPPP

SEQ ID NO: 17879 - protein, 166 aa, Oryza sativa
  Clone ID: TF_OSC401885j.C1.p19.np
MARKKMKLLRIVIDVKRRVTFRKHLKGLMKKVSEFATLLMVYGEVEVQATKVWPSVWEATRVLEHFKAMPQLGRYKKMIDLEGILNKQIDKLKEKLHKLGREADESETKLLLIEAINGRHPSLDGLTIEQIISLGRMANSRLKIVNDRLKKLREPSSLAMVLCFPL

SEQ ID NO: 17880 - protein, 209 aa, Oryza sativa
  Clone ID: TF_OSC102221j.C1.p3.gm
MARKKMKLLRIVIDVKRRVTFRKHLKGLMKKVSEFATLFLMVYGEVEVQATKVWPSVWEATRVLEHFKAMPQLGRYKKMIDLEGILNKQIDKLKEKLHKLGREADESETKLLLIEAINGRHPSLDGLTIEQIISLGRMANSRLKIVNDRLKKLREQGLIPASVSLSSTEVPIQREGWLMDVARGTGSMGYNQFEGSSVSGTAGSNGDMA

SEQ ID NO: 17881 - protein, 209 aa, Oryza sativa
  Clone ID: TF_OSC401885j.C1.p22.fg
MARKKVKLQGIVIDVKQRVTFMKSLKGLTKKVSEFATLFLMVYGEVEVQATKVWPSVWEATRVLEHFKAMPHLVRYKKMTDLEDILNEQVNKLKEQLHKVGRDADESETKLLLIEAINGHRPSLEGLTIEQITSLGWMANAHLKIVNDRLKKLREEGLIPASVSLSSTEVPIQREGWLVDVARGIGSIGYNRFGGSSGSGTAGSNGDMA

SEQ ID NO: 17882 - protein, 188 aa, Oryza sativa
  Clone ID: TF_OSC6754j.C1.p1.fg
MARKKVKLQGIVIDVKQRVTFMKSLKGLTKKVSEFATLFLMVYGEVEVQATKVWPSVWEATRVLEHFKAMPHLVRYKKMTDLEDILNEQVNKLKEQLHKVGRDADESETKLLLIEAINGHRPSLEGLTIEQITSLGWMANAHLKIVNDRLKKLREEGLIPASVSLSSTEVPIQREGLLVDVARGIGSM

SEQ ID NO: 17883 - protein, 209 aa, Oryza sativa
  Clone ID: TF_OSC401885j.C1.p21.fg
MACKKVKLQRIVIDVKQRVTFMKSLKGLTKKVSEFATLFLMVYGEVEVQATKVWPSVWEATRVLEHFKAMPHLVRSKKMTDLEGILNEQVDKLKEQLHKVGRDADESETKLLLIEAINGHRPSLEGLTIEQITSLGWMANAHLKIVNDRLKKLREEGLIPASVSLSSTEVPIQREGLLVDVARGIGSMGYNRFGGSSGSGTARSNGDMA

SEQ ID NO: 17884 - protein, 111 aa, Oryza sativa
  Clone ID: TF_OSC401465j.C1.p6.gm
MARNKVKLQRIINDAKRRATFKKRLKGLMKKASELATLCNVDTCLMVYGEGEAQATVVWPSESEVMRVLERFKTLPQLDKYKKMTDLEGFIQERINKFQEQLDKVRRDADE

SEQ ID NO: 17885 - protein, 268 aa, Oryza sativa
  Clone ID: TF_OSC900168j.C1.p3.gm
MARNKVKLQRIINDAKRRATFKKRLKGLMKKASELATLCNVDTCLMVYGEGEAQATVVWPSESEVMRVLERFKTLPQLDKYKKMTDLEGFIQERINKFQEQLDKVRRDADESETKLLLIEALEGRRPGLEGITIEQLTSLGWLVDARLNIVNDQLQKLHEQGLLPASISLPTMGVLPYTTAGYTVAQEAPIQRGGWLMGVVRGIGSLGYSLFRGSGRSNTAGPSGDMVQPFNIGAGSSLANQGGCRNNQQEEVVTSVRSGKLNVVAFP

SEQ ID NO: 17886 - protein, 241 aa, Oryza sativa
  Clone ID: TF_OSC30381j.C1.p2.fg
MGRPRGGTSKGKQKIEMCCIDGKEKRQVTFSKRRRGLFKKASEISTLSGASIAIVSFSKAGNVFAFGSPSVDAVLRRHVVAGPSTSTSHAHAGGDVFADDGGDNPEVLNALKRATDEAAAEVAAEDARQSGVEGKITEAMAAGRRRFWWDAANVEALGEAELPVFERALHKLRGAVAQGGNNPIQERWDRIPAQGSPGGSYGWEDLSPTGKLYNQPPFAYRLPVMQSIVSDQLGVVCAMLL

SEQ ID NO: 17887 - protein, 483 aa, Oryza sativa
  Clone ID: TF_OSC400964j.C1.p2.fg
MVRTPTIIPLRPNYSPPGDGAAFRREPATYSRFPPAAARNECDLTFGQERKREGMKGKPPISRKIIYNHRDFVSMGERFVALCFIFTMSPCIDATLFVRVVLDFVRREETRRDEMPRTKLVLKLIENEKKRKATFKNRRDGLKQKVSQFATLCGVEALLICVAPAVAGGEVTTWPPDRAAVLDLIARLRATPPEKIRQLHNTQSQLRDDLDKQQRLLLKVQKCGADDVLTPWHCSLYDLSLDGLNALHDTLSETLDRAHRRIAALGGGHGHVHDDAASSSEFSVPAPAPHAVALPDNAFDFPFAPSNTGPVVGAHYFYPLHDTLPLPLPLPQQVPGQHPPCIAYQMPPPPCLAYQMPPPPPPSLAAAPFDQCMSATGFMDSNPYATHIMHGGSTAAGLLDDHGQIFSAGAGYDDDDILGHGFGFAAGTGYDLDPRMATADVWPMNTLNNIPNDGGIGFQLQNDLKWMLPGGSNGSNLQGGFQI

SEQ ID NO: 17888 - protein, 194 aa, Oryza sativa
  Clone ID: TF_OSC400481j.C1.p33.fg
MVHPLGRTSMGRQRIEIRRIDNKERRQVTFTKRRGGLFKKASELALLTGASVAVVVFSPAKHVYAFGHPSVDAVLRSYASVPGEAAAVAPVPVHGGSGGEDVDLLGLRLAADDTGAQVAAEHARMRDVAARIVQAKAGRRFWWEADVDALGEAELLEFFTALKKLRDNVGRHANALLAPQPPPLPLQQKQRRRR

SEQ ID NO: 17889 - protein, 240 aa, Oryza sativa
  Clone ID: TF_OSC401478j.C1.p9.fg
MARNRIILKKVAKDSTRRLTFKKRRRGLIKKAGELASLCGIGVCVVVYGEGEVKPEVWPSAPEARAILSRFNSAPNIDRFKRVTNQEQYLRKRIAKARERTSKADDVNRERDATIMLYEAATDKRPVADLNVQELTNLGLVINERINHLKERIERLGGAALMAPPPSTQPTEASSSLPPLVPYANGAGMEGNKRMKVSTHQKGWFINMSTMTGDAGTSADVEGNTGVGTSARGDMMHLSN

SEQ ID NO: 17890 - protein, 479 aa, Oryza sativa
  Clone ID: TF_OSC400964j.C1.p68.fg
MSRRKTSIALIANPQTRATTYKKRKAGLIKKAGELATLCDIPVAVVCAGPDGGAPTVWVSPEGGDAIERYRALPAEKRARHTHVAYLQEELDKERAKLARLRQKGRPGELDPPDAVLDGMSQDELQQLLASIDATLLATAKRREALGLLPGADDDADGGGRRRDADVAGTNSVGVHGYQHQEVHAPATCDPFHPYNAGVTLMQPGYNNAQYMGGHGAVDMSGYQLQMQMPGNGSNNHSRLAWGGFQPCNATFVQPVYGNLQCWYNNVVDGNGEPCDAIVPSAGDPYMDIAGNDVYGNQMQPAPAANGGWHDPGTWGYDGGEPCKAIVPSFGDPYMGIGVYGNQMQPAPAPAANGCWHNPAGTWGNDGEPCNAIVPSAGHPYIDIECDIDGNYIDTTVFDYQTTSTSDNFMDAPVQFIATGSDESIVTNVAGCDETEFSIDDLLQCSDASQHSSGLEELHYLSDLADGFDFGCNFDVLLD

SEQ ID NO: 17891 - protein, 215 aa, Oryza sativa
  Clone ID: TF_OSC19523j.C1.p1.hg
NRVGCQRQKPKGSQSSERSLRHTSWGVVGGSLKSWSSSSRLDGLGGAMQIAYGYGRGPKRKAEEEREGREGRGGRGERRASEQLWLRPNPTAPPPPLLAFFGESPFADSQIPLRFTTFALSAAPPIGIKKKRAASLAAPPPPPPPCRPQPLVWLVGSSAIEDGAGEDADEADREPHEPPGHLLQAPQRPAKKAFELSVLCDAEVALIVFSPRGKL

SEQ ID NO: 17892 - protein, 140 aa, Oryza sativa
  Clone ID: TF_OSC404997j.C1.p3.fg
MEGGGRRRKRGKVELRRIEDRTSRQVRFSKRRSGLFKKAYELSVLCDAQVALLVFSPAGRLYEFASSTSSIDTIFGRYWDLLDTTIDLNIEARESRVDCNIQVWIRRQIVHGGLAPLLVGDAAPPFRGVGVGSSPSPLYL

SEQ ID NO: 17893 - protein, 189 aa, Oryza sativa
  Clone ID: TF_OSC401367j.C1.p24.fg
MAVGEVLTERRRETLTTDLVLIPICRQEPKISSIVPEEAAAGEYLAIISASYVTNRNWTVLPVQTKQVSDLQQQEAKLCKQSYIRVTCITYSETDLSCGPSSMTELTAAAAPAGSGSSAAVAAGSSEKMGRGKIEIKRIENTTNRQVTFCKRRNGLLKKAYELSVLCDAEVALIVFSSRGRLYEYANNR

SEQ ID NO: 17894 - protein, 164 aa, Oryza sativa
  Clone ID: TF_OSC900058j.C1.p28.fg
MGRGKIVIRRIDNSTSRQVTFSKRRNGLLKKAKELSILCDAEVGLVVFSSTGRLYEFSSTNWAWCTAHAEEYIPTPITGELQQTPLKGAEYAHNICAQSDSTESSELEVGKSCKPRMGQRGQIAAVATLVLTPVTPLLSFSRFHEPHTSSASEGIRAGHPQVCK

SEQ ID NO: 17895 - protein, 385 aa, Oryza sativa
  Clone ID: TF_OSC422528j.C1.p3.fg
MGRVKLKIKKLENSSGRHVTYSKRRSGILKKAKELSILCDIPLILLMFSPNDKPTICVGDHSSIEDVITKYAQQTPQERAKRKLESLEALKKTFKKLDHDVNIQDFLGSGGQTVEMLIKSIVWQELSSHLGALQCQMADVEKRLSYWSDPEKVENIDHIRAMEQSLKESLNRIRIHKENFAKQHLMSLQCAAAQFQNDMKLPLGLTGDPNTSSWFHGGGGAEAQQPMMLPEDPSLLHQRDIGCSASTSLQSYPGYFSMGKQSTDNAGGGEQHHHAAVQQQPEFSQADCLTSLQLGAQFPYPSAFDNAGLLSDRLFDNAAAAAAAMDFGGHYDLPRPGDEASFQNWASAACGATMYDHQQQQQQQQQPAQIMTESLTPISSLQQQL

SEQ ID NO: 17896 - protein, 417 aa, Oryza sativa
  Clone ID: TF_OSC900368j.C1.p16.fg
MDAVRPLQPADREWPPNPTKPPRLSLATSICQPRYINRTKPYPPPSPRLADRSTDDGRNIAVDRAESPAAAMGRVKLQIKRIENIPNRQVTFSKRRNGLIKKAYELSVLCDIDIALLMFSPSGRLSHFSGRRRIEDVLTRYINLPESDRGGYVNFFDGKVSQRDFNLNLALFLVFVLNLGALADPGAVRRRLTPTLRMFEPDPARSASMEDVEASEKFIAGILSRVEERKRYLLCSMGSFDVTASTSAMQHLYLPQQHQHGDITDNGFGSDEVASWVSEGMPPTTSSVASIFAGTSDSMMSFRDQAVYDTMRQDACVDQTVVPEMGMCHVDQQNQSDDWQAYTSAEFLNALIPPTPFPLDDEDTMGPMLASSPLLMPGIHDQQPPVEDMATAGCSQAPANDGNGLYAAEDIAPVNVG

SEQ ID NO: 17897 - protein, 100 aa, Oryza sativa
  Clone ID: TF_OSC20924j.C1.p1.fg
MHIYKEQEAEPSTGLMMPEPAPAASPGSGSSEGSSIEDTADRQVTFCKRCNGLLKKAYELSMLCDAEVALIVFSSRGRLYEYSNNRYCIPLPLFSSRNLN

SEQ ID NO: 17898 - protein, 82 aa, Oryza sativa
  Clone ID: TF_OSC21205j.C1.p5.gm
MAGGGGGGGRGEGEGRAATGKRERIAIRRIDNLAARQVTFSKRRRGLFKKAEELSILCDAEVGLVVFSATGKLFQFASTRIR

SEQ ID NO: 17899 - protein, 79 aa, Oryza sativa
  Clone ID: TF_OSC21276j.C1.p6.gm
MAGGGGGGGRGEGEGRAATGKRERIAIRRIDNLAARQVTFSKRRRGLFKKAEELSILCDAEVGLVVFSATGKLFQFAST

SEQ ID NO: 17900 - protein, 210 aa, Oryza sativa
  Clone ID: TF_OSC101029j.C1.p5.gm
MVKCRARTTRKKIEIKRGDKKVRDACFSKRHTTIFNKANELAILCGVMVAVVFVSPNANGGIFSFGYPSVSSVANRFLANAPNNTSVSALIITALHIEGSSHPSGTALQPLPVLGEEKPWLEISLPAPRRRWPSHGYTLPPAPGLAWRVAASALPRGPSAVAPALRHAKHKDSPVRARLVAGGVADGKRRDPFSASRFHMPDRTGLWPIS

SEQ ID NO: 17901 - protein, 275 aa, Oryza sativa
  Clone ID: TF_OSC900022j.C1.p4.gm
MVKCRARTTRKKIEIKRGDKKVRDACFSKRHTTIFNKANELAILCGVMVAVVFVSPNANGGIFSFGYPSVSSVANRFLANAPNNTSVSSSTQSGRDVEIRELEREERELKEHLQASTDQNKLLREAIAARDGGQLMLLLQSDCSELGPKGLVSALIITALHIEGSSHPSGTALQPLPVLGEEKPWLEISLPAPRRRWPSHGYTLPPAPGLAWRVAASALPRGPSAVAPALRHAKHKDSPVRARLVAGGVADGKRRDPFSASRFHMPDRTGLWPIS

SEQ ID NO: 17902 - protein, 138 aa, Oryza sativa
  Clone ID: TF_OSC900028j.C1.p26.fg
MVKCRARTTRKKIEIKRGDKKVRDACFSKRHTTIFNKANELAILCGVMVAVVFVSPNANGGIFSFGYPSVSSVANRFLANAPNNTSVSSSTQSGRDVEIRELEREERELKEHLQASPSIAGWLARSSSKIDLWLYLTR

SEQ ID NO: 17903 - protein, 82 aa, Oryza sativa
  Clone ID: TF_OSC422477j.C1.p6.fg
MGRGKVQVRRIENEVSRQVTFSKRRPGLLKKAHEIAVLCDVDVAAIVFSAKGNLFHYASSHTTNLTGALDGARDENGADTDG

SEQ ID NO: 17904 - protein, 324 aa, Oryza sativa
  Clone ID: TF_OSC400773j.C1.p108.fg
MPRAKTPMGLIPFPKKRAATFARRKETVMKMAKELSVLCDAQVAVVVGNPGGGAAEKAAWESEEGRAKLAKVREEGAFKPWDDALDGIAEEETRKLHKYLSDKIEAARARMEAMGLQLGDVDDNGVNGDDGGGLDLQQHVPPSASDAKEFESVPVVHGGQYIGSSSGGGGGDIQMQTTPAADGISFAEHFLVAPRAQPLAFSTAGADFINAPNNFLTTGVSVSDYSVQSSGYGIGNQIDNAKQLLYQMQMQYPVGGTGGAEPSNTQTQSPDLRSFSNVVGDYSYTAAQSSANRLDQMHHPVGGRGSTGGAAADPSDTQSKNRGS

SEQ ID NO: 17905 - protein, 78 aa, Oryza sativa
  Clone ID: TF_OSC32476j.C1.p2.gm
HLHQAAGRGVKKASELALLAGASIAVVVFSETNLAYAFGDPSVDAVLLSYGPVPGEDAEPAPVHSGGLGKDVDLEMLR

SEQ ID NO: 17906 - protein, 238 aa, Oryza sativa
  Clone ID: TF_OSC420031j.C1.p3.fg
MTKRKIEIKRIKNEEARQVCFSKRRPSVFKKASELYTVCGAEVAMLVKSPAGKFFSFGAPSVGFVLSRFHATTTSRKHSSMGVTIQHDNSATIKLHELNQQHIELQNQLQAQNEKMKALQEVAKKESGGKVMGWLNSKVEDICQEDLEEFKMVLESLKYLTRGIINQLFQNYAMFSNMMRVQHCVTALPNQQFLPSSEDVKPMIHHVPSSSYGWNTSIDSKPNSSDAHVVGARRYFPK

SEQ ID NO: 17907 - protein, 337 aa, Oryza sativa
  Clone ID: TF_OSC413657j.C1.p13.fg
MGRVKLPIKRIENTTNRQVTFSKRRNGLIKKAYELSVLCDIDVALLMFSPSGRLSHFSGRRGVEDVILRYMNLSEHDRGEAIQNREEIQQEIYSSQQQLQITEDRLRMFEPDPAAFGTSSEVDGCEKYLMELLTRVVERKNNLLSSHMAPFDATTAAMQGADGTQMYVSQADGLATFGGDAAMWGPDGGADPGHPMFSASDPLIYLRDHDVYDANSQVAGLHGGDPCAAGGAAAAAAAVGCVDDDVAGGHAAAADAWRQAYTCTELLSTLIPTTPFPLMPHCLGPEDQYLSMEHGMVAAAQEPVEASTASCSYVPSDENSGTPVMAYDSNPPPANIA

SEQ ID NO: 17908 - protein, 203 aa, Oryza sativa
  Clone ID: TF_OSC20977j.C1.p1.fg
VGQPRGERRKVQEEEKHQGQYIDGLSPQLPPLHLISSFPNHSLLLEHTPLFLIIISSLIREELANMHIYKEQEAEPSTGLMMPEPAPVASPGSGGSGGSGSVGAEKIGSRGKIEIKRIENTTNRQVTFCKRRSGLLKKAYELSVLCDAEVALVVFSSRGRLYEYSNNRGKKWCTRVMHTLIIHDSFASSSSIGGCPITSALGP

SEQ ID NO: 17909 - protein, 99 aa, Oryza sativa
  Clone ID: TF_OSC401316j.C1.p12.fg
MGRGKIVIRRIDNSTSRQVTFSKRRNGIFKKAKELAILCDAEVGLVIFSSTGRLYEYASTSMKSVIDRYGRAKEEQQHVANPNSELKEFCSVFIYITEN

SEQ ID NO: 17910 - protein, 407 aa, Oryza sativa
  Clone ID: TF_OSC400773j.C1.p107.fg
MARRKIPIGLIAHRQKRAATYAKRKESLRKKAEELSTLCGVRVAFVCAGPVVPGGGGGAAGKEEVWESEEGVLAEYRALPPEARAQHAHRVYLEEEVGKERAKLARVRQDGAFPSWDAALDGITADEARALLESIDAARAAANARREALGLPDDGNGVDDDGGLDLQQQQEHVPPGGSDAVVVPVGHGVLQYTGSGGGNQMQTTPAADGINCADLYGAVPWDDTFQPQVMRTGDHFVPMDGYLWQAPGNGWPDLATGCTNESCSCNAAAAAAAMPAMYPPTLDTVHGSFLAAPAQPIPIAFSTSTDFIDAPNDFLTMGLCGGFTNVGDYSAAQPQSSADGGFQLGDTFAAEPGDTQSQNWGSFINVVSDDSAQCNCNAAIHLDQMYYLFGGTGGGEPSDTQSRHWGS

SEQ ID NO: 17911 - protein, 218 aa, Oryza sativa
  Clone ID: TF_OSC401113j.C1.p5.fg
MVKGKGRAGRKKVEIKRIEKKDARDVCFSKRRQTLFNKAGELSLLCNANIAAVVISPAGRGFSFAHPSVDDVADRLASMAMGIPNNHSLGGGYHDSGEVTNIAQQQKIEYVELQKSLEKSEKKKRVQEAMEKERAGHLMQSLTSEVNLLGQDELEELHNKLSALPYTSIAKFYQVLQDAKGTRMPLPQPHIEIACQSQFLFEEQAVTPANADFPGSST

SEQ ID NO: 17912 - protein, 285 aa, Oryza sativa
  Clone ID: TF_OSC401196j.C1.p47.gm
MRRIEDTTRRQVTFSKRRKGLLKKASELSVLCDAEVALLVFSPRGRFFHFASAPSYATIPPSSFFPTTAWLPPCCHQGGPAPCRRWATGCSNAGDGGCSGAGDDGDGDGSARTPAVEGRWAVGRGGGAAGNEARTPAVEVWLAEHGKGGGAAGDGASTPTDTDDGGIVSGGRGGRRRGGQRRQDAGGGGVVGGRWGGRRHSKRRRQDIRGGGVVVNDGEDGGAAGDGVRMSAVEAWWADEGKGGGAAGDGAKMPAMEAWWGAEPGRRRWSRGGRMTGRAAPGRRR

SEQ ID NO: 17913 - protein, 306 aa, Oryza sativa
  Clone ID: TF_OSC401478j.C1.p10.fg
MARKKIVLDRIANDATRRATFKKRRRGLLKKASELATLCDVDACLVVYGEGDAEPEVWPSTEVAMNVLRQFRALPEMEQCKKMMNQEDFLRLRIGKLKEQLRKMDRDNHERETLILLHDALQGRLGTYESLSVEQLTSVDCLASARLKVITDRLVEIRAPNEDGQVLVPPPPPPPPALPAPPPPPAPMLPLAPPPTHVTPAMPLSSMPPPAFHGMNHHHHQNHFINHGGNDQNAWLMNVARNGGDLGALVYSAFASSSSSNTGGAGTSAAGAAAPGPDMMDLANPDMPGFGCPWDDDSAGPSFPPM

SEQ ID NO: 17914 - protein, 208 aa, Oryza sativa
  Clone ID: TF_OSC401721j.C1.p14.fg
MAMQVAAPSRRRPSLGRQKIEIRRIESEEARQVCFSKRRAGFFKKASELSILCSADVAAVVFSPAGKAYSFGHPSVECLLERFLPDSSSGAAARVRRGANNNGGGGMVGELNRQYGELRAMVEAHKARRERADEKIEMERAAGRWLPMDADVRRMSPEELMAFGTGLMAVQAAVSARADQMLRDALLIGRRPPTTTTAGFGFFHMPHY

SEQ ID NO: 17915 - protein, 208 aa, Oryza sativa
  Clone ID: TF_OSC900422j.C1.p13.fg
MVTAAAARRRPSLGRQKIEIRRIESEEARQVCFSKRRAGFFKKASELSILCSADVAAVVFSPAGKAYSFGHPSVEFLLDRFLSSSLPATAGKEEGSSVSVVAELNRQYGELRAMVDAHKARRERAEKTMEKQRQRQPAAWMDPEAEVGRMAPEELMALGTKLVAVQGGVAARADQMLRDALLLGRRPNTTTTTTTRAPPGFFHLHPHF

SEQ ID NO: 17916 - protein, 604 aa, Oryza sativa
  Clone ID: TF_OSC18908j.C1.p2.fg
MPRRARRTGAAYVDDERERDITFFKRRNGLFKCASDLSILTGASVAVVIEDQNRSKFHAVGTPTVQAVVDAALSSDVEEAAAEARPVADEQLMERIAPLERELAWLKGEAAEKDETTKASKARFKMAQKKEENEEEGDTKKKKLFFSKADKLSSDEMNELLAEMLEIKKELNVRLPPLRRRGGKRPIQGSSVPPPPPPPPPPPQPEQQLQLPQWPNLSGPHNQLLPVAPPPFVADQPPPPPPPAAGGSLWIPELPPPPVEGSPWAGLLPLRPPRFAGMEPSFLESQQAPPPAQVSTQLAPLPLIREEAPLLQEPFLFADQAPVLAPLPAPLQMPVAETHLPLQAPLLQEPFLFSDHAPTLAPLPSPLQMPVAETHLPLQVQAPFMQEPFLFSDQAPVLAPPPTPLQMPVEAHMPLEAPWIQEPFLMPDQAPVHAPPPTPLLMPVGADHFPLEAPLFQESLIMADQKSVHALPPPPLQMPLEAHLPPAAQEYNQDLAVQQQPQEYENYDYMFENVGLSQAQPVAAGAGDAGFAAIGNDDNPFGYQQLVASPLYDGQIYFGSGVDNMGVPPAGDFGGVPEAALPEVEHASSSGWGNNITGDAGAWF

SEQ ID NO: 17917 - protein, 77 aa, Oryza sativa
  Clone ID: TF_OSC900209j.C1.p10.fg
MVRGKTVISRIENTTSRQVTFSKRRSGLFKKAKELAILCDAQVGVLVFSSTGRLYDYSNSSNSRNLTYDQLLGDTVC

SEQ ID NO: 17918 - protein, 450 aa, Oryza sativa
  Clone ID: TF_OSC419793j.C1.p3.gm
MTLMSAMTWLPRKIDARKHGNGSYQRTTQPRGGRSSPRSCDPEGGDGERRRRWTATNGAAEDGTNRLHGDDGAPMACVFAEVAAGLLLTAAMPTVDTARSGDHGVDDGWLLEAWQRPKASALTLAKPREATAQGGHGGQWAVLRRTMEAASGEEEDGGGSGYERRIVLAIARQKVNLQRLANYTIRRAMFKKRQKSLMKKASELSTLYGVDACVVMYAEGEAQPMMVWPSVPEARRVIERFRALPQKDQYENTTNLEGFLKQRIANLQEKVDKAKHENDELETKLLLLNSLDCCLPSLVGLTVKQITSLNSMVEERLKKLRGNGLLATPVPTSSKKKIIWDVRYNLKARYVTDDSAKNGPPSRQSTAIPSFAAPQASSATTLLLHSIPLAALSTMNPSRHQLYRLRPLLGATPDHPSLRHATNSFVVSHRTLAIAPPDPITTETLPSPST

SEQ ID NO: 17919 - protein, 380 aa, Oryza sativa
  Clone ID: TF_OSC102307j.C1.p3.fg
MESQICQFGTFLEVNNQHSATPKGKTIPVKCTDCLPGVASRSLTVIPLEVPHDVLLSAREAKTQYNSTFEHNLSETNFVTGTYNGAHHANVKDVPPDIYETEFRHQFPRIETSFSIIGAHFLSSMVRRGRRKGVRYIEEDRDRSLTLSKRRDGLFKLANDLSLLTDASVAICLHDSNKAQFFGAPSVKPVVDAFVSEAEPFADEQLKAKLTSMQSELVQLENEEEEKDKKTEESIQRFKEAQEESLGMGMAKHLFSRLEDLSHDDMRELLDVLLPLQQEFKKRLPPLRRGQQSLPKNLGLGEFPKKPPAEVQACTPVEQPQNDNAVHTPTFSDSFLLELLADVSDDGIATAEPLCSPPIDDQFLADIDWLAELDTIDGNL

SEQ ID NO: 17920 - protein, 482 aa, Oryza sativa
  Clone ID: TF_OSC400618j.C1.p20.fg
MESQICQFGTFLEVNNQHSATPKGKTIPVKCTDCLPGVASRSLTVIPLEVPHDVLLSAREAKTQYNSTFEHNLSETNFVTGTYNGAHHANVKDVPPDIYETEFRHQFPRIETSFSIIGAHFLSSMVRRGRRKGVRYIEEDRDRSLTLSKRRDGLFKLANDLSLLTDASVAICLHDSNKAQFFGAPSVKPVVDAFVSEAEPFADEQLKAKLTSMQSELVQLENEEEEKDKKTEESIQRFKEAQEESLGMGMAKHLFSRLEDLSHDDMRELLDVLLPLQQDFKKRLPPLRRGSKLQIGGSSAWAHQQPSCSRFLASHRPFTPLLPGGTSGVPMIPPPPVPGSPWSQIFPLRPPLFPSPELVPSQQLPPVSPPQNTVAPPPMHAPLVQQPLTNQSSAVPLLTQWQMRFGDQPPAEVQACTPVEQPQNDNAVHTPTFSDSFLLELLADVSDDGIATAEPLCSPPIDDQFLADIDWLAELDTIDGNL

SEQ ID NO: 17921 - protein, 239 aa, Oryza sativa
  Clone ID: TF_OSC900043j.C1.p3.fg
MAAAEAAAEAAAALEGSEPVDLVKHPSGIIPTLQFSLGGYYMFEVLICLIDEKGGRSEIRESEKVEHAYIAACHSVPASMCSHKNIVSTVNLDCKLDLKAIALQARNAEYNPKRFAAVIMRIREPKTTALIFASGKMVCTGAKSEQQSKLAARKYARIIQKLGFAAKFKDFKIQNIVGSCDVKFPIRLEGLAYSHGAFSSYEPELFPGLIYRMKQPKIVLLIFVSGKIVLTGAKVCSVW

SEQ ID NO: 17922 - protein, 241 aa, Oryza sativa
  Clone ID: TF_OSC423203j.C1.p9.fg
MAAAEAAAEAAAALEGSEPVDLVKHPSGIIPTLQFSLGGYYMFEVLICLIDEKGGRSEIRESEKVEHAYIAACHSVPASMCSHKNIVSTVNLDCKLDLKAIALQARNAEYNPKRFAAVIMRIREPKTTALIFASGKMVWYVLGAKSEQQSKLAARKYARIIQKLGFAAKFKDFKIQNIVGSCDVKFPIRLEGLAYSHGAFSSYEPELFPGLIYRMKQPKIVLLIFVSGKIVLTGAKVCSVW

SEQ ID NO: 17923 - protein, 224 aa, Oryza sativa
  Clone ID: TF_OSC400049j.C1.p46.fg
MAAAAVDPMALGLGTSGGGGGGESAVGGDGAEPVDLVEHPSGIVPTLQNIVSTVNLDCRLDLKKIALQARNAEYNPKRFAAVIMRIRDPKTTALIFASGKMVCTGAKSEDHSKLAARKYARIVQKLGFPAKFKDFKIQNIVGSCDVKFPIRLEGLAYSHGAFSSYEPELFPGLIYRMKQPKIVLLIFVSGKIVLTGAKYRKEIYAAFENMFPVLTEYRKTQQRW

SEQ ID NO: 17924 - protein, 259 aa, Oryza sativa
  Clone ID: TF_OSC900102j.C1.p17.fg
MRQRRHGRRGGKAAAGARGAKAASIKIEQTKPRRISQELAQASAMEEVVVGKERKRPRCALVGVGGHDSDVADEPGGVRARRTSTARLSVPTSIAFYDIQDRLGVNRPSKSIEWLICAALVARLLLRPPQRRPAPHPRRPSSGQPSEEQARTRKATVAVSPGKSGEKRRKTRSGCAARKAERIAKLRVWREGWMPRREASTSATSGGQSWIRKPSTPGSGDSCSCSDAKPGKRRWAEKAGEVVAREADGAERGGGGRRR

SEQ ID NO: 17925 - protein, 362 aa, Oryza sativa
  Clone ID: TF_OSC400226j.C1.p13.fg
MAATTTGRVVALGAVAVVVALTFLAGGADADCYDFCFKDCMARENNMVDYCSYACDKTCQPDKPTLYSSSSSSRLAGDMECQLSCALGSCHRLLPDGKGAVEACFGQCYDGCKTTAAARLPRPLRAGHYVLSSPPDDVDHDPDHRYVFSSPHDDVDHDPDQVFASPPDDIDRHVFAAPPDVLAALPVVLLTWHPSHRKKLKKIHEGPHLTRELGHKSDGETVQWLLQQAEPAIVTAMGTGVGADIRRTLPPFPKLRPLQVAPPPPPHVGCRRGVRRCHIGFATMFAAHVAAAMPGLELGHSQDGHIGVLFARSLSQFYHQVGGASATGQLPHPHHHHQHHQQQQEDGEDDRDDGESDEESGQ

SEQ ID NO: 17926 - protein, 278 aa, Oryza sativa
  Clone ID: TF_OSC100867j.C1.p5.gm
FYDLQDRLGFDQPSKAIEWLINAASPAIDTLPSLDPAAFAAIPHAAADAAPTRRRSQQQQQQLSNKSGCSSTSETSKGSDKEVTVASAPAQAASFTELLIAGVAASSAGGGAIGNGADCVGIAHPGKGGAEGASTYGFSAASSFGDAPPIGMVPAPPFNFSAPGADMAAHYSLAQDQLAAPPPPAGGDYNLNFSMSSGFLGANRGTLQSNSPSNMSGHHHHHHQQQLQRLDGSTISFLLGHAAAAAHPAASEGQITSTAALQLWDGFRHSGMKEKSKN

SEQ ID NO: 17927 - protein, 160 aa, Oryza sativa
  unsure (1)..(160): unsure at all Xaa locations
  Clone ID: TF_OSC401000j.C1.p10.np
RARPGEAPEVREVWGPSEDAAGARREGEDPLSVAVDAGGSGGGGGEEDLTRELSHKSDGDTVQWLLQQAEPAIVAATGTGHTGVGADIRRMPGLELGLSXDGHIGVLAAQSLSQFYHQVGGAGATGQLPHPHHHHQHHQQQQEDREDERDDGESDEESGQ

SEQ ID NO: 17928 - protein, 188 aa, Oryza sativa
  Clone ID: TF_OSC401539j.C1.p115.gp
NLASCFNFRSSPFRLTVGERELKLEEDKNQLSKGLDPWTSNPTASASTLHYLLQEKERAQQAHEQLQIYQQQQGFGSFLQHRIRQPASRGPGGGGGGGDGGGSSGESTPVEALATAFGAGRIVRSAAGRKDRHSKVCTARGLRDRRVRLAAHTAIRFYDVQDRLGYDRPSKAVDWLMRNAKAAIDELP

SEQ ID NO: 17929 - protein, 236 aa, Oryza sativa
  Clone ID: TF_OSC401978j.C1.p39.gm
MTTRPDGGGGGGGAPDKQLVPASNANGTALAVRKPPSKDRHSKVDGRGRRIRMPIICAARVFQLTRELGHKSDGQTIEWLLRQAEPSIIAATGTGTTPASFSTSSPSSLRSNSTSNSNDLLLPRAAPFILGKRLRAADDHTTSPAPAPDATAPTQAFWALPARADFGQLWSFAAAPEMMVAAAAAPAMPGEASAARVGNYLPMAQGNLNLLASFSGGPGGAGATAATGRPEEESAR

SEQ ID NO: 17930 - protein, 408 aa, Oryza sativa
  Clone ID: TF_OSC900102j.C1.p14.fg
MDVAGDAGGGRRPNFPLQLLEKKEEQPCSSSAAGGGTGPSSAGGNGNNGSGPGGAGGEMQLRKAAPKRSSTKDRHTKVEGRGRRIRMPALCAARVFQLTRELGHKTDGETIEWLLQQAEPAVIAATGTGTIPANFTSLNISLRSSGSSLSAPAHLRALPSPAAAARFGSRADAWDRVVSLGFPSEGPASSSSSPSPLLLNFHSGSVGLDVQPSPSAAAAAADLSRKRRWEQEMQQQQQQQQQQQQQQQQQYQQQMAGYTQSQMPGTVWMVPSNSTQGGGPSGGGGGGGGGSGESIWTFPQMSSAAAAAAVYRGSVPSGLHFMNFPAPMALLPGQQLGLGPVGGGGGGGGGGEGHMGILAALNAYRTQAATDAAGQQGGGGGGGGSSQQQHGGGGGGGERHQSISTSDS

SEQ ID NO: 17931 - protein, 326 aa, Oryza sativa
  Clone ID: TF_OSC900234j.C1.p8.fg
MGAGWQWPAGGGGMEAAGRGLAAARSNHEQLKMTSNNSTNEELGGGGRKAADKPSGGGGAAAAVASSRHWSASTESRIVRVSRVFGGKDRHSKVRTVKGLRDRRVRLSVPTAIQLYDLQDRLGLSQPSKVVDWLINAAQAEIDKLPPLQFPPHDHDLVAAAASSMAPPPFANGGDGHHGASASSMLEDGDKAAGGGGMKAFMSLSNSLGLLNAATMPATLAAHHHHHHHAAAYYAAAESWGNGGNGGHHHDVSHGVSPSAHNSPFPSLLSLAPGSHHQFVFYSPEGGGFAVKEAAAEQFPVDSLDHSQGQLTLSSARSFLHSGSQG

SEQ ID NO: 17932 - protein, 457 aa, Oryza sativa
  Clone ID: TF_OSC401539j.C1.p92.fg
MSGFTNKDGRQNLASCFNFRSSPFRLTVGERELKLEEDKNQLSKGLDPWTSNPTASASTLHYLLQEKERAQQAHEQLQIYQQQQGFGSFLQHRIRQPASRGPGGGGGGGDGGGSSGESTPVEALATAFGAGRIVRSAAGRKDRHSKVCTARGLRDRRVRLAAHTAIRFYDVQDRLGYDRPSKAVDWLMRNAKAAIDELPDRAEAPPPPAAASTEQPEATEQATSTSYGFGNTTGGTMTSAASAAAGSFLPHSLGADRVSDSVKSLFPSSSTASGAASAGHDEYRGSPPDLLSRTTSNQQPQELCLTLQSNQHQIFSHVSSNHHGMISSAGVPGWPDHSQRMQAWHAPENSTGDGRGGGNGDGYMFAMPSRQGLDQSQLFSHGEPLQSSGRGWASARAWLDPLAVAAIHHQPSTMAAGQVGFGHLVGGAGGGGGFMGFLAPAAQRLEGEEEHGSEVIR

SEQ ID NO: 17933 - protein, 140 aa, Oryza sativa
  Clone ID: TF_OSC2212j.C1.p2.gp
EEEAAELARKHTAAVATSRQWSAQTESRIVRVSRVFGGKDRHSKVKTVKGLRDRRVRLSVPTAIQLYDLQDRLGLNQPSKVVDWLLNAARHEIDKLPPLQFPPQDHLCMGHHHHLPSAMPLMHHHGHHHHADDDKYHVAA

SEQ ID NO: 17934 - protein, 307 aa, Oryza sativa
  Clone ID: TF_OSC401539j.C1.p32.fg
MILGSNQAAAAAAAAAAAEEEAAELARKHTAAVATSRQWSAQTESRIVRVSRVFGGKDRHSKVKTVKGLRDRRVRLSVPTAIQLYDLQDRLGLNQPSKVVDWLLNAARHEIDKLPPLQFPPQDHLCMGHHHHLPSAMPLMHHHGHHHHADDDKYHVAAAAAALAAEKEAAAAGGGGGGGGDDVDGGGGGGAAHIVGRFPAGGYHRFMGLNNPLGMVNSAAGAAMPFHYAGESWNNGSVQDSGAGSPQVAAAAAHHTSPFPSLLSLAPGPHHQLVFYSSEAEQFTVDNLGSQGLSLSSARAFHDQTGS

SEQ ID NO: 17935 - protein, 206 aa, Oryza sativa
  Clone ID: TF_OSC400220j.C1.p52.fg
MASRDAATFQVYRPMAMPTPAALPPSSQQITMPFTAALVDAVLPAPRKAAATQGGKDRHSKVNGRGRRVRMPIVCAARVFQLTRELGLKSDGQTIEWLLRQAEPSILAATGSGTTPAVFSCSSAPSTASSSFLLGKRPRQEDHEAPTFWEALQQQPRPAVSSWGALVSPSQEAQAYASSVAQVHHLNLLSALSGAATRRPAQEESR

SEQ ID NO: 17936 - protein, 337 aa, Oryza sativa
  Clone ID: TF_OSC401583j.C1.p12.fg
MDPKFPPPPPLNKTEPTTTTTNQQHHHDEQQQQHRLQIQVHPQQQEQQDGGGGGGKDQQQQQQMQVVVAAAAGERRMQGLGPKRSSNKDRHTKVDGRGRRIRMPALCAARIFQLTRELGHKSDGETVQWLLQQAEPAIVAATGTGTIPASALASVAPSLPSPNSALSRSHHHHHHMWAAAPPTASAGFAGAGFSGADSGVIGGIMQRMGIPAGIELQGGGAGGLGGGGGGGGGHIGFAPMFASHAAAAAAMPGLELGLSQDGHIGVLAAQSLSQFYHQVYNSRELDGLDHRCRVSALFVIAGRCVDIQVSSHYWYINRSCEEMPVKCSVRENLYHLI

SEQ ID NO: 17937 - protein, 326 aa, Oryza sativa
  Clone ID: TF_OSC401091j.C1.p11.gm
MADASRLLASEIEMIMILVQGGMGMVAASLMIPPYPNNNLHHHHHHCSSNQEPHLPLHPPAFLMSAPSSSSSPSTLDEYDARFFFPGADAYTAGHRQDEETLEAVLRQPVTTTAAAAAAVEGGGGGGGGGAGGSPAAAAAATRRRPFRTDRHSKIRTAQGVRDRRMRLSVGVARDFFALQDKLGFDKASRTVEWLLTQSKHAINRLTLPDSADAAAAPAFAAAPPPADQHSSAMAAAAASAAKEKGEASSSSTTNASSARARNRDHDGSSPVAPMDERGRRGVELDWTAAAAASTEQPMDGLEYYFQYYNHLEEIMSCDPTTTTDE

SEQ ID NO: 17938 - protein, 141 aa, Oryza sativa
  Clone ID: TF_OSC935j.C1.p4.fg
MAAAWRTSRVACVVAGEKDKHSKVVTSRGLRDRCVRLSVPMAIAFYDIQDRLGVDQPSKAIEWHIRAAAAAIDAFLSLDCSLVLPNAAQLLTRWRRRPSSGQPSEEQARTRKATVAASPRKSGKKRRKTRSGCAARSASRS

SEQ ID NO: 17939 - protein, 421 aa, Oryza sativa
  unsure (1)..(421): unsure at all Xaa locations
  Clone ID: TF_OSC411819j.C1.p1.np
PSSPRRRRARSHRRGGRRTAASRNHSRVVAATASRRARRHHSPAAARSAAAATDAPHPHHPFYYSGPAAAAAAAAAAQQQQQTFMGALAITPVVAAQGSSGGGEKKVVAPTTPAAAGAAATTTLAKRPSKDRHTKVDGRGRRIRMPALCAARVFQLTRELGHKSDGETIEWLLQQAEPAIIAATGTGTIPANFSSLNISIRSGAASASSASNPNRASPFPALALHPHHQQHDVSAMLGYHHHLLPPPQQQQESPQDPGGAGAFMRKRYREDLFKETTRQDPSAPKAREQQPTTPQAAAAAAAAAAMWAVAPNTAAPGGAFWMQPMWSFQPMWSFAGGGGGAATVQAPLQFMSTRVNYPGSAGAGMSDTNLGMLAALNAYNRGGAGDQQPQQQGDGPAGPQRRRRRXGDDSGDEDNGGANNN

SEQ ID NO: 17940 - protein, 387 aa, Oryza sativa
  Clone ID: TF_OSC4514j.C1.p3.fg
MDVTGDGGGGGQRPNFPLQLLGKKEEQTCSTSQTAGAGGGGVVGANGSAAAAPPKRTSTKDRHTKVDGRGRRIRMPAICAARVFQLTRELGHKTDGETIEWLLQQAEPAVIAATGTGTIPANFTSLNISLRSSGSSLSIPSHLRLAGLAGPRFGGGARAADAWDRVVGLGFGGAADAPSSATSSSSSPLLLSFHSGSVGLDVSPPSASTSPAAADLSRKRRWEQEMQQQQQYQQQMAGYTQSQIPAGTVWMVPSSNAQAAGGGAPPGGGGESIWTFPQSGSGGGGGAATVYRGVPSGLHFMNFPATPMALLPGGQQLGLAGAGGGGEGHPGILAALNAYRAQAAQPDAGAAAQNGAQGSSQHRQHQHHGGGGGGGDERHESMSASDS

SEQ ID NO: 17941 - protein, 225 aa, Oryza sativa
  Clone ID: TF_OSC401780j.C1.p3.gm
MSRALNSGCGPSSGRASREITTWLHGSLRDTVGRRRRRGRCGDRRRMRAHAARERIHYQQQQMQVVAAVTGNRRMQGLGPKRSSNKDRHTKVDGRGRRIRMPALCAAWIFQLTRELDHKSNSETVQWLLQQVEPAIVTAMGTGVGTDIQGPSLPSPNCALSRSHHHHHHMWAAAAAPPAASAAFAGLSQDGHIGVLSARSLSQFYHQEDGEDDRDDGESDEESGQ

SEQ ID NO: 17942 - protein, 190 aa, Oryza sativa
  Clone ID: TF_OSC412575j.C1.p3.gm
MQVVAAVTGNRRMQGLGPKRSSNKDRHTKVDGRGRRIRMPALCAAWIFQLTRELDHKSNSETVQWLLQQVEPAIVTAMGTGVGTDIQGPSLPSPNCALSRSHHHHHHMWAAAAAPPAASAAFAGLSQDGHIGVLSARSLSQFYHQVGDASAAVVTPAAPWMVAGLSPSKCLGESSIFFTPQSAHDMLFER

SEQ ID NO: 17943 - protein, 165 aa, Oryza sativa
  Clone ID: TF_OSC21368j.C1.p2.fg
MPALCAARIFQLTRELGHKSDGETVQWLLQQAEPAIVTAMGTGVGADIRRTLPPFPKLRPLQVAPPPPPHVGCRRGVRRCHIGFATMFAAHVAAAMPGLELGHSQDGHIGVLFARSLSQFYHQVGGASATGQLPHPHHHHQHHQQQQEDGEDDRDDGESDEESGQ

SEQ ID NO: 17944 - protein, 260 aa, Oryza sativa
  Clone ID: TF_OSC405018j.C1.p5.gm
MAIKDRFTGNPRRLTVLTTSGSGAEDLPSGSCPVEVGFVAAVKDCLWSGVPPLQNEAGVMPCHIHGGAALDKQLVPTASKANGTTLAVRKPPSKDRHSKVDGRGRRVRMPIICAARVFQLTRKLGLKSDGQTIEWLLREAEPSIIGATGTGTTLASSSPRRPLHPRQAPPWADFGQFWSFAAVREMMAATAAPAMLGEAFAATKQQPGRSQPRRRMCSTTGEVTAAASAPRGLLAGAAGARRLSVPAATSPLSPDVLLYG

SEQ ID NO: 17945 - protein, 258 aa, Oryza sativa
  Clone ID: TF_OSC400621j.C1.p28.fg
MQQQLDQQQQQQQHQYDHFFSGHGQFNSETLEAVLCRPPRGAAADPAVPAAAAAAAVLTAARNGGGGHGRARKRPFRTDRHSKIRTAQGVRDRRMRLSLDVARDFFALQDRLGFDKASKTVDWLLTQSKPAIDRLAADPSSSSHRAAGDTRMSSAERGGDHHMVAVGAAGSGKGDADKARGPRGGRSAPMELGCELGRLVPAPVLGEYYYELAEMMSNNTGGEGDDDGDYDDDGDFLDDSGFLCHYRSKKKFSIKDIS

SEQ ID NO: 17946 - protein, 320 aa, Oryza sativa
  Clone ID: TF_OSC419993j.C1.p2.fg
MHPFMDLELEPHGQQLAAAEEDGAGGQGVDAGVPFGVDGAAAAAAARKDRHSKISTAGGMRDRRMRLSLDVARKFFALQDMLGFDKASKTVQWLLNMSKAAIREIMSDDASSVCEEDGSSSLSVDGKQQQHSNPADRGGGAGDHKGAAHGHSDGKKPAKPRRAAANPKPPRRLANAHPVPDKESRAKARERARERTKEKNRMRWVTLASAISVEAATAAAAAGEDKSPTSPSNNLNHSSSTNLVSTELEDGSSSTRHNGVGVSGGRMQEISAASEASDVIMAFANGGAYGDSGSYYLQQQHQQDQWELGGVVYANSRHYC

SEQ ID NO: 17947 - protein, 331 aa, Oryza sativa
  Clone ID: TF_OSC401008j.C1.p9.fg
MSAIPMNSWLVPKPEPVEFFGGMAMVRKPPPRNRDRHTKVEGRGRRIRMPAACAARIFQLTRELGHKSDGETIRWLLQQSEPAIIAATGTGTVPAIATTVDGVLRIPTQSSSSSGPASSAVVDGEESSAKRRRKLQPTRAVAGASPLATAAPAAYYPVIADPLLQGSGGAAISVPSGLAPITATGAPQGLVPVFAVPATGSPAVAGGNRMIPQATAVWMVPQPAGAAGAGNQPTQFWAIQSAPQLVNFAGAQFPTAINVADFQQQQQQQPVSTTIVQNSNSGEHMHFSGADSHEQQRRGRKEGNSGGVVDHPEEDEDDDDDEPVSDSSPEE

SEQ ID NO: 17948 - protein, 445 aa, Oryza sativa
  Clone ID: TF_OSC407741j.C1.p10.fg
MELAGSNNKRGRVRGPNDDDDDAGEPDAKRHHHQLLLPWPQQQQQQHPASRIYRVSRASGGKDRHSKVYTAKGIRDRRVRLSVSTAIQFYDLQDRLGYDQPSKAIEWLIKAAAAAIDKLPSLDTASFPTNPASSAAVAAAAAPPLPHAEREQQQQLTKSGCSSTSETSKGSVLSLSRSESRVKARERARERSSAAAAAASKDAGDDAATPTAPTAAPASSQAASFTELLTGMAAANASPADHKQQQAWQPMTVAAATADYIGFAAAAAPHTQPRKSAAGHHSAMPHTFASPAPHLANITPIAMAPAQHFTLTPAAAEHHAEMTHYSFDHFMPVHAAAAAAAAASTPAGGDYNLNFSMSSGLVGVHSRGTLQSNSQSHLSSHHHHHHQQQQQQQQLQRLSAPLDAPNIPFLFSPAAAPTAADTQFAAALQLWDGFRHADIKEKGKH

SEQ ID NO: 17949 - protein, 221 aa, Oryza sativa
  Clone ID: TF_OSC418457j.C1.p6.fg
MAAAGEKDKHSKVVTSRGLPDRRVRLSVPTAIAFYDIQDRLGVDQPSKAIEWLIRAAAAAIDALPSLDCSFVLPNAAQLLTRRRRRPSSRRPSTEQARTRKATMAASPRKSGEKRRKTRSRCAARRAERIAKLRARREGWMPRREASTSAASGGQSWIRKPSTPRSGGLCSGTGEGEEGGGRSMGEIKEDELKHGGERSGATAGGEGRQGGGAERGGGGRR

SEQ ID NO: 17950 - protein, 211 aa, Oryza sativa
  Clone ID: TF_OSC407361j.C1.p2.fg
MSSRDAAATFHVYQPVQIPTATVAPAAAVSAAPAEAVAQLVPAPSKKAAGAAGGKDRHSKVNGRGRRVRMPIVCAARVFQLTRELGLKSDGQTIEWLLRQAEPSILAATGTGTTPAAFVSSSAPSTSSSHQHTLLGKRQRQESAAADAVSVAGAASAFWAALPAPGRPDAWGFSPLDAQPTYVPMAQAHHHHLNLLAALSGAARRAEEESR

SEQ ID NO: 17951 - protein, 311 aa, Oryza sativa
  Clone ID: TF_OSC400800j.C1.p53.hg
MRVSTVGGEGSGRSEGGIVADERWGGREGKGRRRGEEFHRRWGKGKGRRRGEEIRRRRHTGDGAVREKETGRGMCVWDEDLEGEKERGGPPRRPKLGSKPPKDLGHPTPTDADPTSQNPPTPPPPPPMMASSSDLILYNLVPAQPLNPSAIPNPNPDLSIAAAEPPSSDGATPRRVRPRKSPSSSDRHSKVAGRGRRVRIPAMVAARVFQLTRELGHRTDGETIEWLLRQAEPSIIAATGTGVTPEEAPPAAVAIGSSSVAAAAAAGGHGGAFVHVPYYTALLMQPPNADEPPMASAASASGTTAADENNN

SEQ ID NO: 17952 - protein, 367 aa, Oryza sativa
  Clone ID: TF_OSC400348j.C1.p2.hg
AHQHHPFYYAAAQGGANTMPAPASFMGSLAIVPAAAAPGGGGGQVQAAAAPVASSEKKAVVAAGAGAKRPTKDRHTKVEGRGRRIRMPALCAARVFQLTRELGHKTDGETIEWLLQQAEPAIVAATGTGTIPANFSSLAVSLRSAASHSSSPRAAPFHHLQQQQQHDVAAMLGFHHHHHQLLPPPPPHQHPEPTPQDPGAGEFMRKRYREADDLFKDTSRQDPVDGATGEAEQKARAAAAAAAPPPTAPSAMWAVGPNTTGATAAFWMQPAWAFPHGAGAGAAGNTVQAPLQFMSRSSFPTAMNVTMADNNNSSNNNLGMLAALNAGGGGRSGEHQHQHEGQSPAEMDHQRRANGGGGEAGGAASSQ

SEQ ID NO: 17953 - protein, 573 aa, Oryza sativa
  Clone ID: TF_OSC401369j.C1.p12.fg
METRLWDPARWMDAHWSSNSSGGEEGGGGSGSEAPPPPGHPRRRRRRRRRRRKRGQEEADEQQQQQHDHHRLLQLHHHQGVQQDQEPPPVPVFHLQPASVRQLSGSSAEYALLSPMGDAGGHSHHHQHGFQPQLLSFGGVGHHHHLHQFTAQPQPPAASHTRGRGGGGEIVPATTTPRSRGGGGGGGGEIVAVQGGHIVRSTGRKDRHSKVCTARGPRDRRVRLSAHTAIQFYDVQDRLGYDRPSKAVDWLIKNAKDAIDKLDVLPAWQPTAGGAGAGNAAAPPSSSTHPDSAENSDDQAQAITVAHTAFDFAGGGSGGTSFLPPSLDSDAIADTIKSFFPMGGTAGGEASSSTTAAQSSAMGFQSYTPDLLSRTGSQSQELRLSLQSLPDPMFHHQQHRHGGGGGGGNGTTQQALFSGAANYSFGGGAMWATEQQAQNQRMLPWNVPDPGGGGGAAYLFNVSQQAAHMQAAAAALGGHQSQFFFQRGPLQSSNQPSERGWPETVEADNQMSHHQGGLSPSVSAAIGFAAPGIGFSGFRLPARIQGDEEHNGGGGGNGDKPPPPSSVSSASHH

SEQ ID NO: 17954 - protein, 885 aa, Oryza sativa
  Clone ID: TF_OSC100626j.C1.p2.fg
MEAQADAGGDDLAAMREQCRSLEEAIGFRRETQMGLVASLQRLVPDLVPSLDRSLRIIAAFNDRPFVPTPNPDGGHGKSPAALKPHHRRALPDPARSTRRKTSPGSSPASVAAAPGGLDAVRTMVAVCLLELVPFAEIDAAALARRLQAESSSASEAERTALADLAAELGGSAASAVVLALRRIAEDTGGVQIEEAMIGGKSMTMVWAIDRNKLLKELPESATLPLLQPPPAPQMPPSETDAGSAMIPRTPQQQQPQPDMWPHSMPPIFPRPRGMTMQGMQRVPGVPPGLMPLQRPFMGPAGVITMGGGVGPSPNQQKQKSEEDELKDLELLLNKKTYREKQNTKTGEELLDLIHRPTAKETAVAAKSHTVSPVVVNELAVADLGFEPRGLNVKTIAYKEMGDTRSKSSKIYSMFKTKGGSQLKEYCTNLTKEDCRRQSGSFVACDKVHFRRIIAPHTDTNLGDCSFLDTCRHTKTCKYVHYELDQTPDIPPMMAGALAPPRQIRLQRAEYCSEVELGEAQWINCDIRNFRMDILGQFGVIMADPPWDIHMELPYGTMADDEMRTLNVPALQTDGLIFLWVTGRAMELGRECLELWGYKRVEEIIWVKTNQLQRIIRTGRTGHWLNHSKEHCLVGIKGNPLVNRNIDTDVIVAEVRETSRKPDEMYPMLERISPRTRKLELFARMHNAHAGWLSLGNQLNGVRLVDEGLRARYKAAYPDSEELLEGAHTGSPMRPRGGEGVAVSLPGETHTTVGFPGRIRAPNPMGLSGAIGLHLGPCQLFSKLSPRMTISPAGPGPLRGPDPTGAGAISDPWIVKKARLVKKEVEPIFSDSDAMKNAPKTTTTCPRCQNGEAYYRQMQIRSADEPMSTFYKCCREECQFDWRED

SEQ ID NO: 17955 - protein, 156 aa, Oryza sativa
  Clone ID: TF_OSC26017j.C1.p3.fg
MAFWQARDFLFCGVCGTLLKFDSVRSASCPLCGFKRKAKGRRLPHLSPCKALGCVLLAADAFVLFFYGADIEGKETRYTVTAEDIRRELKLDPYVILETTLKEEDVIVERATVNKECEKCKNPELQYYTKQLRSADEGQTVFYKCANCRHEFNENQ

SEQ ID NO: 17956 - protein, 123 aa, Oryza sativa
  unsure (1)..(123): unsure at all Xaa locations
  Clone ID: TF_OSC645j.C1.p1.np
FNFMDHRSCLFNELCGFLNLVPTIYIRYERRFPWLFICSXHFACCXQDIRRELKLDPYVILETTLKEEDVIVERATVNKVNKECEKCKNPELQYYTKQLRSADEGQTVFYKCANCRHEFNENQ

SEQ ID NO: 17957 - protein, 367 aa, Oryza sativa
  Clone ID: TF_OSC900118j.C1.p24.fg
MERELLETFEAAKKAADAAAGADDSPEADRCLDAMRRLRGLRVTTDVLVSTQVGKRLRYLTKHPHSDIQSMATDLLGYWKKVVIEEGKKNGTTENVGSTNSAARAEKAQPMKVDKSSASGSVKPEKREVNVRGQKPESIKVEKITNNDSKNQQVKVERAPKEATRTPDTKKPSSVPNGPPKLTSLVKCNDPTRDKIRELLADAFSRVHGETSKDDREEVRNILDEVDARDPFRVAVTVESALFERLGRSTGAHKAKYRSIMFNLRADNNTDFRRRVLLGQVRPERLVDISPEEMASDARKLENKQIKEKALFDCERGGAPKATTDQFKCGRCGQRKTTYYQLQTRSADEPMTTFVTCVNCNNHWKFC

SEQ ID NO: 17958 - protein, 373 aa, Oryza sativa
  Clone ID: TF_OSC900397j.C1.p13.fg
MERELLEAFEAARKAADAVGEAAAAAGAGEGESPEAARCVDALRRLRGARVTTAALVSTQIGRRIRYLTKHPHSSIKATASDLLGHWKKVVIEEDKKNGALQNGKSSSTVVKVEKVEPMKVEKASPRATVNNNNMDTRVVNHKGGKVEKFSNAELRTQSIKVEKVQKVVHKVSSVEKPSPVQGGPPRLTSVVKCGDASRDRIRAILGDAFSRVSEETRKDDREEVRNIIEEVKACDPFRIAVMVECALFQKLGNFNGPNKQRYRSLMFNLKDDHNTDFRRRVLLGQVQPERIADLTPTEMASDTRKLENKKIEEKALFECERGGAPKATTDQFKCGRCGQRKTTYYQLQTRSADEPMTTFVTCVNCNNHWKFC

SEQ ID NO: 17959 - protein, 312 aa, Oryza sativa
  Clone ID: TF_OSC900356j.C1.p20.fg
MSDSFCPDCKKHTEVAFDHSAGDTVCTECGLVLEAHSVDETSEWRTFANESSDNDPVRVGGPTNPLLTDGGLSTVIAKPNGAQGEFLSSSLGRWQNRGSNPDRSLILAFRTIANMADRLGLVATIKDRANEIYKKVEDLKSIRGRNQDAILAACLYIACRQEDRPRTVKEICSVANGATKKEIGRAKEFIVKQLEVEMGQSMEMGTIHAGDFLRRFCSTLGMNNQAVKAAQEAVQRSEELDIRRSPISIAAAVIYMITQLSDDKKPLKDISLATGVAEGTIRNSYKDLYPYASRLIPNTYAKEEDLKNLCTP

SEQ ID NO: 17960 - protein, 210 aa, Oryza sativa
  Clone ID: TF_OSC422155j.C1.p6.fg
MASRMGLAGNVRDRGKNVLRKVEEAKVCARGRSRDALYAACLHTACRMEGAPRTLKEFIAATPDAAATKRNLGKFIHAIKRLLGSNDEEAEAGQDQAGSKATNGCGGGGGAGAVVRASNYLLRYGSAVGMSGQEVSAAQRAASRLDESLDVRRNPQSIAAAIIYMAVQRAGGGGGRSKSVREVSAATGVSESTIKDAYKDLCQHAEVLFG

SEQ ID NO: 17961 - protein, 562 aa, Oryza sativa
  Clone ID: TF_OSC400277j.C1.p29.fg
MSQPTQCPYCRASGPARCVTTQPPLSRAVSECSSCARLVLERHLHTHPFFPLLPSLHPLPLVTPDLADAAPSPSPSAASASGDDDDDDDPFLPAGFVSAFSAFSLERHPVLARSASAFSGQLAELERALAVESAASSTPDPAGPMVSVDSLRAYVQIVDVASILRLDRDIADHAFELFKDCSSATCLRNRSVEALATAALVQAIREAQEPRTLQEISTASNLPQKEIGKYIKILGESLKLSQPLNSNSIAVHMPRFCSLLQLNKSAQELAAHIGEVVVNKCFCTRRNPISISAAAIYLACQLEDKRKTQAEICKVTGLTEVTLRKVYKELLENWDDLLPPNYTPATPPEKAFPMTTIYSSRSSSGKDLYQDKQLDSAKLKSSEAAEPDHMVIVKEEEDKKIGPFSRPSAKTETHDLNQAIWTPNVSSTPFSSSPKLDHDKTETSVRGINLNEASCTMDTDRPDMPVKSPFAERWLNESKVIPSPSRQPAPWQLKQGAPSAGSSYHSMPYGLDLLSRGKRNTGDGGDKEGRCFLVKFGSSCHPGVSVSCHVECYTGTKYSVIN

SEQ ID NO: 17962 - protein, 343 aa, Oryza sativa
  Clone ID: TF_OSC422155j.C1.p2.fg
MVLDHATGDAICTGCAFDLGNGANACPEPPRWRAAAGHGDSDGDRSSSSSSVGGDVSPAAADPLLQGGEGVACSVGAPPVQPRVRGAVVPPKQMRAGGAVPPKVRCGVPDTSKALAEGFDAIVGMASRLGLADKVSDRAKEVLRKLEEARACPKGRSRDALYAACLHAACRVEGAPRTLKELIAATSDAAATKRDLGKFINAIKRHLGMEERGQDQAADMKASGGGVGVVVRAGDYLHRYGSAVGMSGQEASAARRAAGRLDSLDVRRNPQSIAAAIVYMAAQGSSGVRKSVRRHGRQRVDHQGRVQGPVPARRPALRLKHTATARRDAALLNLLCVLRVVGY

SEQ ID NO: 17963 - protein, 411 aa, Oryza sativa
  Clone ID: TF_OSC410156j.C1.p3.gm
MPPDLEEARPGPPPPRRPDRSAAGSGGGAREKEGEVERVRGWKGALPLARGRVPTPPPLAGGRAPPLPLLVSRCKARWCVETRRGRDVVRAALRGKAASGGPAQCGVAGNEQCYCPECHRTTVVVVDHATGDTICTECALVLEERYIDETSEWRTFSDAGSGEDRDPNRVGGCSDPFLSHAELGTVVAPAKRQAKDTASPPHVRVDSKSGQDSSLAVAFRAISDMADRLQLVATIRDRAKELFKKMEEAKLCARVRNRDAAYAACLHIACRNEGNPRTLKELASVMRDCQDKKEIGRMERIIRRHLGEEAGTAMEMGVVRAADYMSRFGSRLGMGKPEVREAQRAAQTLEDKLDVRRNPESIAAAIIYMVVQRAGAQTSARDVSKASGVAEATIKEACKELSQHEELLFSS

SEQ ID NO: 17964 - protein, 467 aa, Oryza sativa
  Clone ID: TF_OSC6718j.C1.p1.fg
MYCSHCQDNCPVVKDPDKNYTCCGLCGKVLDDQVYDGEPTFQKGADGQARLAGSILSSIESGNSVSHERTINKGREEIRQIVSSLHVAGGDTIISMAHRYYTLAVDKNFTRGRRTTHVAAACLYIACRQSKKAYLLIDFSDHLQISVFAKFCYLRNIQLSKSSSTPAFSYIVLQNTGRKPSGLCGAALYIAALSHGYDYTKADIVAVVHVCEATLTKRLIEFENTDSGSLTIEEFLAKADEQVLVTKISPKSGEVLCKHKDKAEHFAHGLCEKCYNKFMKLSGGLEGGSDPPAFQRAEKQRLEAAKNAKGTAASKEAALESVCEARESDVENNITTPPKNIIGDKHSTIPSVKVAGDSVATEDPEGEGKNDKADEGPESLSDIDDAEVDGYLHNEEETQYKKIIWEEMNKEYLEEQAAKAALAAELAARGVVVEEGKRKRRRHNEDGKNATPAQTPAEATQNMLKRK

SEQ ID NO: 17965 - protein, 538 aa, Oryza sativa
  Clone ID: TF_OSC900226j.C1.p16.fg
MYCSHCQDNCPVVKDPDKNYTCCGLCGKVLDDQVYDGEPTFQKGADGQARLAGSILSSIESGNSVSHERTINKGREEIRQIVSSLHVAGGDTIISMAHRYYTLAVDKNFTRGRRTTHVAAACLYIACRQSKKAYLLIDFSDHLQISVFAKFCYLRNIQLSKSSSTPAFSYIVLQNTGRKPSGLCGAALYIAALSHGYDYTKADIVAVVHVCEATLTKRLIEFENTDSGSLTIEEFLAKADEQVLVTKISPKSGEVLCKHKDKAEHFAHGLCEKCYNKFMKLSGGLEGGSDPPAFQRAEKQRLEAAKNAKGTAASKEAALESVCEARESDVENNITTPPKNIIGDKHSTIPSVKVAGDSVATEDPEGEGKNDKADEGPESLSDIDDAEVDGYLHNEEETQYKKIIWEEMNKEYLEEQAAKAALAAELAARGVVVEEGKRKRRRHNEDGKNATPAQTPAEATQNMLKRKRLGSKINDEAVNKLYNTKDEDGKADKEMDFNDEYGQDTGDGETFEGGYDYPDYNYDGYGDGAYGDYDGVDF

SEQ ID NO: 17966 - protein, 251 aa, Oryza sativa
  Clone ID: TF_OSC401733j.C1.p22.fg
MGVTCVADKRCKEKWENINKYFKKVKESNKKRPEDSKTCPYYHQLDALYRTKAANAAAAASASPAPATTTVLAPVPLSQTPPHVDHGGSNGNGNGWASANNGGGGSSSGGMQTKASNNGTATAGGLPAVSGSKQVPVAKETAGQRQPQPLAMNHNYGNDRMADDMDSDSMDDDDDDDEFDDDENDDDIGGGKMQVQYETSSHFQRPQLQNQNVVVGRPNASGGGGGGAPTTPAGPPPPAATSGTSFLACVQ

SEQ ID NO: 17967 - protein, 283 aa, Oryza sativa
  Clone ID: TF_OSC900242j.C1.p18.fg
MDPFHHLNSSFSNPYHPLLASPPHHFAPDPLPPPPPPPPPPLLPADPPSLERERLPQWSHAETAAFLAIRADLDHSFLSTKRNKATLGGRLGAPPRPRTSPGPPISASPREEYSVERARALERKKVKGKDPDDDHDGGGDGDEDDEEEADQQVDEEDDGASGDTTRAGSKKRRRKAAAAARRTGSTGGVEGEVEAMLREFMRRQIEMEERWMEAAEAREAERRAREEEWRTAMVALGEERLALVRRWREREDAWRARAEEREERRHQLVAALLAKLGAGDASA

SEQ ID NO: 17968 - protein, 410 aa, Oryza sativa
  Clone ID: TF_OSC401599j.C1.p10.fg
MEGNLPPRGALVHGHGGGVGAFDLEATMQPPPPFHFAQDPHLHHHQGMVPVRGNPMLDLGNVVKTSPSDEEDVDDGHHHGGGGGSGKEASQWHRVKWISGMVKLLVSAVAYIDEDVDMDYGTGSAARRKHAMLKRKGKWRLVSAAMTERGFPVSPQQCEDKFNDLNKRYKRMTEILGRGTACQVVEHPELLEGMRLSGKLKEEARKHLNSKHLHYEEMCSYHNRNKMCLFDDPALQKSLRLALRSGEEHAKKNPFGYDDEDFSDDDDEDEEFDDLEVSAEDHHHGIHGAKRLKHDQEETHFGSNLSEVAVIDMNKMLSEGSGGPTAEKSPSTPGMRDIRLEKRRLKIKAQMLKIEQKHFKWLRFSKEKDRELEKMRLENEKMKLENERLELELKLKEIEMGIKPKKIFSD

SEQ ID NO: 17969 - protein, 547 aa, Oryza sativa
  Clone ID: TF_OSC400601j.C1.p83.fg
MGPRGVVGSAAMLGLEMHLAHPQMHAAAYQQPDPHGGGGGGFQQQVAAVRQQQQQSYSPYSAGASSRVIKAPGHDDGMGNGAGKGGVVQQQQQPGSVGCPWTRMKWTDGMVRLLINVVYSVGDDGDGVAAGGAAGGKASAGAAGHGKAGGSGSHGAHGQAAAQQKKGKWKSVSRAMMESGHMVSPQQCEDKFNDLNKRYKRVVDLLGRGKACKVVENHALLDAMDELTHKAKDEARKLLSSKHLFFREMCAYHNSGAAAAAAAHGPHGAGAAGVEATACFHHPPPASMAAASSAARQAAAAAPSLGMKDSSAGPEDDEDDSEDVPSSNEVDDEDDDDDDDDDEVGPGMKSRRIYGGHRVHHHHHHHNGHHKRRRGDDVSSAGAGDDDDEDGVKRARGAASAAGGGDDEGPSAVQQLQSELAAAVAGGGDPQQVRQWVRRRTVEVEEQQVAHEVRAYHLERQRLKWERFRANKERDMERARLRNDRLRIDGRRMLLLLRQKDLDFDIAEANSSSVDHLTSSAPPPLAALQQQQQPLGSSPSTAGGHPN

SEQ ID NO: 17970 - protein, 329 aa, Oryza sativa
  Clone ID: TF_OSC404645j.C1.p10.fg
MSGGGEVSGRAPRLPRWTRQEILVLIEGKRVVEGRGRGRGRGGGGGAAAEPTKWAAVAEYCRRHGLERGPVQCRKRWSNLAGDYKKIREWERSLSSPSSSSAAAGMGKEVSFWAMRNDARRERRLPGFFDREVYDILEGRGGGNAAAAAAAGKEGEEEKAAVFDSGRAAAGGGGGGGDDGLFSSSEEEEDDDEATPPATTPAAAPAPPPAPAPAVPVLTSEKKSDPPRQDASEQAGTSRAKQPEQIVEDSPAQGAHKRQRSDDASGEAPDLQGQLIEILDRSSRMVAAQLEAQNINCQLDREQRKDQVSSLLGVLGKVADALYRIADKM

SEQ ID NO: 17971 - protein, 432 aa, Oryza sativa
  Clone ID: TF_OSC9116j.C1.p2.fg
MEGNNLPSGSLMRSNSGQMHAPNPGKQGFDHTQMPGNLSMHVNQSTDSDHLSEFQFGELGKVDHHHHHHHRQHAKNGMSDDEEHGVNEDATDSQSGKGKKGAAWQRMKWTDSMVKLLITAVSYTGEDPGADSGAGKRNSAIMQKKGKWKAISKVMGERGCSVSPQQCEDKFNDLNKRYKRLTDILGRGTACKIVENHALLDCMSNLSDKMKDDARKILSSKHLFYEEMCSYHNNNRVSLPEDPALQRSLQLALRCKDEHDLRRGTSGDADEDDQSVDSDSEEENDEENYTLQGDKSALPMHKRLRLMTDQEDVGFGNSSSSHGCSRRSDSHGISLDINKAFPDGTNLALAQKDLATQSADLEEQRLQIEVQAVYLAKQRLKWERFSKNKDRELEQMRLENEKMRLENKRLELEVRHKELELELKQKGSGNHA

SEQ ID NO: 17972 - protein, 483 aa, Oryza sativa
  Clone ID: TF_OSC400355j.C1.p16.fg
MWAPWSVGPLSVGPACQRLYSCASSCTPVSILYGTNKKLKCLGDRFGEMEGSNPPGNMTQGPSYGSLDLHGISKQMHPPNSGNQGFNQPQIPGNFTIPMDRVTEPDNISDGVQLGQHGKIAHHHHHHRHHSKNHGSDEEEHDMNEDAADGKDKKGSPWHRMKWTDSMVKLLITAVSYTGEDPGADLGGGRRNYSMMQKKGKWKAISKVMGERGCHVSPQQCEDKFNDLNKRYKRLTDILGRGTACNVVENHSLLDHMDISEKMKEDARKILNSKHLFYEEMCSYHNNNRISLPEDPALQQSLQLALRCKEDNDFMRHASGDAELDDDQSEDSDYEENEEEHRAVDTNIRGPSMHKRMWHVVDHGDVGFVTSCSNDGSGRSDPYDVLDINKPFPDGCDLALVQKDLALKAAEIQKHRLQIETKAVQLAKQRLKWEMFRKNKDLELEKLALENEQMMLQNKRFELDLRHKELELEIKIKGNANHP

SEQ ID NO: 17973 - protein, 277 aa, Oryza sativa
  Clone ID: TF_OSC400920j.C1.p34.fg
MEPGCGEGGGGGGGRDERVPQWGAQETRELIAARGEMERESAAAAAARRSAKTLWEAVSARLRERGYRRTAEQCKCKWKNLVNRYKGKETSDPENGRQCPFFDELHAVFTERARTMQQQLLESESGPSVKKKLKRPSGDLSSEDSDDEEDGSGDSGDEKPIRSRKRKIADKRQQSQRMAEKSRTSISSIHELLQDFLVQQQRMDIQWHEMMERRSQERIVFEQEWRQSMQKLEQERLMLEHTWMEREEQRRMREEARAEKRDALLTTLLNKVLQEDL

SEQ ID NO: 17974 - protein, 89 aa, Oryza sativa
  Clone ID: TF_OSC900104j.C1.p3.fg
MPLTLLCLAFSPFAWPPSLPPPPQTPDAIAGCKNKAEAGAGRWLRQDTLELLTIRPEMDTVLQEATLNGAIWEEISRICDVFFVGDFVM

SEQ ID NO: 17975 - protein, 353 aa, Oryza sativa
  Clone ID: TF_OSC900025j.C1.p26.fg
MTPQPQLQPPQPQSKEANTVVRAAPPPQEQHDTAASGGGGGASSSRWPKAEVHALIQLRTELETRYQDSGPKGPLWEDISAGMRRLGYSRSSKRCKEKWENINKYFKKVKESNKKRPEDSKTCPYYHQLDALYRTKAANAAAAASASPAPATTTVLAPVPLSQTPPHVDHGGSNGNGNGWASANNGGGGSSSGGMQTKASNNGTATAGGLPVVSVAGGNGNGNGVAATTDNKGSKQVPVAKETAGQRQPQPLAMNHNYGNDRMADDMDSDSMDDDDDDDEFDDDENDDDIGGGKMQVQYETSSHFQRPQLQNQNVVVGRPNASGGGGGGAPTTPAGPPPPAATSGTSFLACVQ

SEQ ID NO: 17976 - protein, 687 aa, Oryza sativa
  Clone ID: TF_OSC900025j.C1.p23.fg
MPPFSAAGGEGAPSPISSRPPPPEQAAAAAAEEQLNGSSLEHDGVLGGEEGDRGGSSAGNRWPRQETLALLKIRSEMDAAFREAALKGPLWEEVSRTQKVIENSEGTSTTPPVVAFNQKGELLVGTPAKRQAVTNPQNTFFGTKRLIGRRFDDPQTQKEMKMVPYKIVKALNGDAWLPPPHGKQYSPSQIGAFVLTKMKETAESYLGKSVSKAVITVPAYFNDAQRQATKDAGRVGGLGGGGEEAIGAVQLRLSFRCLLSCTPSLRSAICVNCVVDSLQFSSHHDVAMDLINSVTGVDEEGRSRQRILSFAAKRYVSAIERNPEDPDAYYNWALVLQESADNVDPDSSSSKDSLLEEACKKYAEATRLCPTLYDAYYNWAIAIADRAKMRGRTKEAEELWKQAIMNYDKAVQLNWNSPQALNNWGLGLQELSAIVPARDKQTIIKTAISKFRSAIQLQFDFHRAIYNLGTVLYGLAEDTMRSAGPDVSPNDLYSQSAIYVAAAHALKPNYSVYRSALRLVRSMLPLPYLKAGYLTAPPADNTIAPHKHWERSEFVLNHEGLQQVDASESPSSKPLGHMGRSKKYIKVAVEDIVSVSACSDLTLPPGAGLCIETIHGPLFLVADTWESLDGWLDAIRLVYTIFARGKSDVLAVYRVNHAGIEVVSPSKTVVPSSINSLFTSFRRTGAE

SEQ ID NO: 17977 - protein, 202 aa, Oryza sativa
  Clone ID: TF_OSC101622j.C1.p1.fg
MDPFHHLNSSFSNPYHPLLASPPHQLAPDPLPPPPPPPPPPLLPADPPSLERERLPQWSHAETAAFLAIRADLDHSFLSTKRNKALWEAASARLHALGFARTPDQCKSKWKNLVTRFKGTEGAAAVAAAGTDQMQGGQGGGAAARGSSSSFPFHDELRRIFDARVERARALERKKVKGKDPDDDHDGGGDGDEDDEEEADHH

SEQ ID NO: 17978 - protein, 711 aa, Oryza sativa
  Clone ID: TF_OSC101782j.C1.p4.fg
MQSGYGGVSEFQQYIMDPGAFAMSAPPQPAQAAAAAAAAAAAAAGGQELGAPFRYQPLHHHALPQHHHHHHPPPQMPPHLAHFGGAGGIPFTQQLLHQAAAAGHHPHLQLFHEQHHHQKHQQQPPPPARWAPQHHHHHHPHHHLGLDVEAAVPESSGAGAGSAASGAAAPPGVPPFLAAAMSFKLGVDGGGGSGATGGTDDALNDGGGAGSGMMLHGGGGGGGGGDDEAATESRLRRWPGDEETSIKEPTWRPLDIDYIHSSSSSKRAPPKDKPATPDSPAPPPPAYYFKNKPDDNAAAASAASAGAVNYKLFSELEAIYKPGSGGPQTGSGSGLTGDDNAMLAPPMADLPDAAAANPPHLNTSETSAGEDAHAVVQPQPQTQQPSGADAARRKRKRRRQEQLSASASFFERLVQRLMEHQESLHRQFLDTMERRERERAARDEAWRRQEADKFAREAAARAQDRASAAARESAIIAYLEKISGETITLPPPAANPAPGADEQDGVGKEVVAYDGEGSLQLSSSRWPKHEVEALIRVRTGLEDRFQEPGLKGPLWEEVSARMAAAGYRRNAKRCKEKWENINKYFRKAKESGKKRPAHAKTCPYFDELDRLYSRSGSGGGGGSSSAGGNGGEEAKGSSELLDAVVKYPDVRCAPPGFPFDGEQNEEGRTKDDGDEAHHDGDGDGDEEDVGVGVGRATDDHDDQVDESHDGH

SEQ ID NO: 17979 - protein, 263 aa, Oryza sativa
  Clone ID: TF_OSC401779j.C1.p45.gm
LVPVPAPRAKAEDAWAAAGGDGSGTTAPSRWPKEEVQALIDLRMEKEEQYNDMGPKGPLWEEIAAGMQRIGYNRSAKRCKEKWENINKYFKKVKESNKRRPEDSKTCPYFHQLDAIYRKKHFAGRGGGGGGVTIAASHSSLAIVTVSEQDNPSQRELEGKSSNDVGNVQLAVPLLVHNAPDKKVEGSEGEPNVTAAAEETDSDEMCGEYTDDGDDDDKMQYKIEFQKPTAGGGGDGNDAPVPATTAAATSSAPTSNTSFLAVQ

SEQ ID NO: 17980 - protein, 150 aa, Oryza sativa
  Clone ID: TF_OSC900232j.C1.p13.fg
MDPFHHLNSSFSNPYHPLLASPPHHFAPDPLPPPPPPPPPPLLPADPPSLERERLPQWSHAETAAFLAIRADLDHSFLSTKRNKALWEAASARLHALGFARTPDQCKSKWKNLVTRFKGTEGAAAVAAAGTDQMQGGQGGEDNERLVKKL

SEQ ID NO: 17981 - protein, 140 aa, Oryza sativa
  Clone ID: TF_OSC101435j.C1.p1.fg
MDPFHHLNSSFSNPYHPLLASPPHHFAPDPLPPPPPPPPPPLLPADPPSLERERLPQWSHAETAAFLAIRADLDHSFLSTKRNKALWEAASARLHALGFARTPDQCKSKWKNLVTRFKGTEGAAAVAAAGTDQMQGGQGG

SEQ ID NO: 17982 - protein, 886 aa, Oryza sativa
  Clone ID: TF_OSC408508j.C1.p6.fg
MAIYYLEREGLTHNMPMHGHFYTPLPLNHWHADTTNAADMTRGPMRMWAPHVSGMNFIFFISKEKVLMRVEMVSSPDVLIIPSPPFPSGNTRGGGGGGGGSSMQQQQPGGGGGGVQQFGAVAPEMSPFSPAGGGGGGRISMAEAASPISSRPPPAQQQFDELGVGGGGGGGGGFDAEALAAAAVGEEGASGGAGGNRWPRQETLALLKIRSDMDAAFRDATLKGPLWEEVSRKLAEEGYRRSAKKCKEKFENVHKYYKRTKESRAGRNDGKTYRFFTQLEALHGTAAGVVAAPSPVTSLAPPPATAVGVSGGVRAPAEPPPAVVMGNVMSFSTSNTEEYSDEEDSDDEGTEDMGGGGGDERGKRKRLSEGGAAAGVGGGGGGGGGSGKMMRFFEGLMKQVMERQEAMQQRFLEAIEKREQDRMIREEAWRRQEMARLAREQEILAQERAMAASRDAAVVSFIQKITGQTIPMPPIIAAPAITVMPPPAPSQQPQPPPPPSHPTPITSVAPAPPPPPPAAAAAAASQPSPQATKSPLPATPQTQSSMDIVMTAAEAHDAGYDGSGGGGGQPSSSRWPKAEVHALIQLRSNLDNRYQEAGPKGPLWEEISAGMRRLGYSRSSKRCKEKWENINKYFKKVKESNKKRPEDSKTCPYFHQLDALYRNKAALNSSSSSAAAAAPALPPPEHAEPAVTVAAPISQTPPPPPPQPVTTTKNGNGTSSTNGANGEGGGGGSGGMQMQASNGSVVAGNKFFTGAAAKKPEDIMKEMMEQRPQQPAAANNAFNRTDGGGGGGGVDSDNMDEDDEDDYDDDDDDDDDDVDGNKMQYEIQFQHQHHHQQPPQHRHQQSVVRPNAAASAAAGGNPPGTAAPATAAAATTTTGSFLAMVQ

SEQ ID NO: 17983 - protein, 608 aa, Oryza sativa
  Clone ID: TF_OSC401782j.C1.p3.fg
MAAAFDLPPVTTPAPAAPSDVLLPTQPQVSGPEEFPAAAVNSNDDDMMMVDDVVVAGGVGGSGSTGNRWPREETLALIRIRSEMDAAFRNATLKAPVWEELSRRLAELGYQRSGKKCKEKFENVDKYYKRTKEGRTGRQDGKSYRFFSQLEALHAAAPPPPPQQRQGMPVEDPQPLAMAWMMLPGAADLGFLSMSSESESDDESDEEEEEEEAVAPGGGGREGLGDDGDGDGEGGSSTRKLMAMFEGMMRQVTEKQDAMQRVFLETLEKWEAERTEREEAWRRKEVARINREREQLSKERAAAASRDAALIAFLQRVGGAGGEPVRLSPSSAGATRHDAAAAGLQLVPVPAPRAKAEDAWAAAGGDGSGTTAPSRWPKEEVQALIDLRMEKEEQYNDMGPKGPLWEEIAAGMQRIGYNRSAKRCKEKWENINKYFKKVKESNKRRPEDSKTCPYFHQLDAIYRKKHFAGRGGGGGGVTIAASHSSLAIVTVSEQDNPSQRELEGKSSNDVGNVQLAVPLLVHNAPDKKVEGSEGEPNVTAAAEETDSDEMCGEYTDDGDDDDKMQYKIEFQKPTAGGGGDGNDAPVPATTAAATSSAPTSNTSFLAVQ

SEQ ID NO: 17984 - protein, 141 aa, Oryza sativa
  Clone ID: TF_OSC101435j.C1.p1.np
LNSSFSNPYHPLLASPPHHFAPDPLPPPPPPPPPPLLPADPPSLERERLPQWSHAETAAFLAIRADLDHSFLSTKRNKALWEAASARLHALGFARTPDQCKSKWKNLVTRFKGTEGAAARGSSSSFPRGSSSSFPFHDELR

SEQ ID NO: 17985 - protein, 81 aa, Oryza sativa
  Clone ID: TF_OSC401779j.C1.p36.gp
AGLQLVPVPAPRAKAEDAWAAAGGDGSGTTAPSRWPKEEVQALIDLRMEKEEQYNDMGPKGPLWEEIAAGMQRIGYNRSAK

SEQ ID NO: 17986 - protein, 385 aa, Oryza sativa
  Clone ID: TF_OSC416839j.C1.p1.fg
MLLSGPSPQQPTPPLLLPESSGEDGGHDSSSRAAASGGGGGPKKRAETWVQDETLCLIALRREMDSHFNTSKSNKHLWEAISARMREQGFDRSPTMCTDKWRNLLKEFKKARSHARGGGGGGVGGGGAGTGGGNCPAKMACYKEIDDLLKRRGKPTGGGGAAVGSGAVKSPTVTSKIDSYLQFDKGFEDASIPFGPVEASGRSLLSVEDRLEPDSHPLALTADAVATNGVNPWNWRDTSTNGGDNQVTFGGRVILVKWGDYTKRIGIDGTADAIKEAIKSAFGLRTRRAFWLEDEDEVVRSLDRDMPVGTYTLHLDTGMTIKLYMFENDEVRTEDKTFYTEEDFRDFLSRRGWTLLREYSGYRIADTLDDLRPGVIYEGMRSLGD

SEQ ID NO: 17987 - protein, 109 aa, Oryza sativa
  Clone ID: TF_OSC4354j.C1.p1.gm
MALFGFIKQLIGYNIIAFCHPSTVFIFGKSLRGYCGDYGYPIPTRHARWSHGSSLNHDRLASVKGDENGSSADNRWLRQDTLELLTIRPEMDTVLQEATLNGAIWEEIS

SEQ ID NO: 17988 - protein, 422 aa, Oryza sativa
  Clone ID: TF_OSC24072j.C1.p1.fg
EEVLQIVKPQHFLPVHGELLFLKEHELLGRSTGIRHTTVIKNGEMLGVSHLRNRRVLSNGFVALGKEDLRLMYSDGDKAFGTSTDLCIDERLRIASDGVIFVSMEIFRPQKELASSQSGLKGKFKITTRCLWLDNGRLLDALYKAAYAALSSCPVNCPLSHMERMVSEILRKMVRKYSGKRPDVIAVATENTTVSFVEDSETKSSGKFGSFSAPRHSSRSSGRSLEESDKSCPENTEGEAKENLPDVLRTTRDDATTSSNGEAFFSSDLHKPKTLEHFWDSFKSPTAVKIARIVNGSAQGSKSKIGKISIVGKDSSDPSSAPVKSSKKNKWKPEEIKSLIQMRGEMNEQFQTVKGRMVLWEEISSSMLSQGISRTPAQCKSLWTSLVQKYEESKKDEESVKTWPYFLDMDRVLSSQGEMATQ

SEQ ID NO: 17989 - protein, 882 aa, Oryza sativa
  Clone ID: TF_OSC900303j.C1.p3.fg
MGALASLSSLSPCGLARRRSASSAASISCCAAPPPPSAKGSQESRTPRRRVRKTEGATKSLEDSVKRKMEQFYEGLDGPPLRVLPIGGLGEIGMNCMLVGNYDRYILIDAGVMFPDFDEFGVQKIIPDTTFIKKWSHKIEAVIITHGHEDHIGALPWVIPALDSSTPIFASSFTMELIKRRLKEFGIFLSSRLKVFRVRKRFQAGPFEVEPLRVTHSIPDCCGLVLRCADGIIFHTGDWKIDESPVDGKIFDRQALEELSKEGVTLMMSDSTNVLSPGRSISESVVAGSLLRHISEAKGRVITTQFASNIHRIGSIKAAADLTGRKLVFVGMSLRTYLDAAFRDGKSPIDPSTLVHLIESRFLLKVKVEDMDAYAPNDLLVVTTGSQAEPRAALNLASFGGSHALKLSKEDVLLYSAKVIPGNESRVMKMLNRLTELGPKIVMGKDAGLHTSGHAYHDELEEVLQIVKPQHFLPVHGELLFLKEHELLGRSTGIRHTTVIKNGEMLGVSHLRNRRVLSNGFVALGKEDLRLMYSDGDKAFGTSTDLCIDERLRIASDGVIFVSMEIFRPQKELASSQSGLKGKFKITTRCLWLDNGRLLDALYKAAYAALSSCPVNCPLSHMERMVSEILRKMVRKYSGKRPDVIAVATENTTVSFVEDSETKSSGKFGSFSAPRHSSRSSGRSLEESDKSCPENTEGEAKENLPDVLRTTRDDATTSSNGEAFFSSDLHKPKTLEHFWDSFKSPTAVKIARIVNGSAQGSKSKIGKISIVGKDSSDPSSAPVKSSKKNKWKPEEIKSLIQMRGEMNEQFQTVKGRMVLWEEISSSMLSQGISRTPAQCKSLWTSLVQKYEESKKDEESVKTWPYFLDMDRVLSSQGEMATQ

SEQ ID NO: 17990 - protein, 154 aa, Oryza sativa
  Clone ID: TF_OSC5909j.C1.p1.fg
MAMLGSSSAVVLELMTMGYQSAAYLGELLRAASPAQAGDEQQELAAEILRCCDRVIAKLNRGGATGATTGKKRKAAESAAAAAVTSPSLPVTPTKRRARGAEAVREVRSGTTTDGFIWRKYGQKEINGCKHPRLYYRCAFRGQGCLATRRVQQS

SEQ ID NO: 17991 - protein, 329 aa, Oryza sativa
  Clone ID: TF_OSC404464j.C1.p5.fg
MAFGQDTIEQLYRELAGGRRLSAKLQALLEGPLDSRGQKEAVDVSRELGRVFMVSLYMLKPCSNSSRRPEGVTRTAPETRTDDSICLHTPARVKRVRLYFKCTFSRERSCAAKKQVQQRDAGEPPMFLVTYLNEHTCQQPQAVPGTPNTAGSSPTTTSRQRQSSSSPPAEMLDLTMNGAGLFSRLLLPHAVGGGGSAAEEEAAIVTCLAAVISGGGAAAAPPPLIWPTSAPEAAFVAFAAGHSASAADESVADEAAAAQIADMDYCFGQYDQSTFGAAAAADHRVLIGDDGDVQRIVAARIADTVCPRYTRDTSAWETAGTSSMRGSID

SEQ ID NO: 17992 - protein, 294 aa, Oryza sativa
  Clone ID: TF_OSC413087j.C1.p3.fg
MVELCGGEGEGQIMLATELAQLRAMARELEAKMDPDRVAARELCRALASSVDRSIRLAASCFPPPEHPPPAAGNAGRDAAFKKRQVMVPGHGGLISGLRDRRSNALTCVSMQEGDGQGEEAGEGDVGAGHGVAGRRPELEEVRPEGHSWRQIPEGCNATKQVQRADGDPLLFDVVYLGDHTCGQAAVAAAAQSAPPEHAGQEQQRQSSLLAAGTEGIHQQVVAEPMAAPFLFTSTAAGGVDDGYFSFISPANSDCQFSSDFSAGSVGVDMDHEARFEDLFSSTLEFFQSEIQNL

SEQ ID NO: 17993 - protein, 484 aa, Oryza sativa
  Clone ID: TF_OSC404471j.C1.p29.gm
MVKRSDNMDSSSECSRGAHKRLLQDSRSYDQENAMKCYYRCTYHQDHGCPASKHVEQHNSEDPPLFRVIYTNEHTCGTSNSASDYMASSMQIQQIADASLRKAQAAERLRKAEVETPRLMHSPPPRCSGGYNMAMKEEKDVIVSSLLTVIRGCHIAESAGGFDKGMSRQRLQGENDGNTTVAVRQAPLLHRHQNLCRCVGTLHRRPRRPVSACSHLTGLCLHRHHLSLRSHHAPAVLDVAGQAYTRWTVAGRNSFSEPTPPPPSRAAGRADLTGQPQPPVAAPPHAVARACCHLLCERGLLPLRHRHGFRGLRTIARAFTSLRAVAPSPPATASVANSDGWMLVVRPDPAVAESDLTRHRATGRHRPSPAEDPATGHLPARSRRGSGGHFYHCHHFQAPVPPLPNVAATPHYHADAADILPARSGRTARIWTVPPSQTPSSPPALAWRDESVIFDLAGHELEEEDYPVVDYESELQTAISTTVR

SEQ ID NO: 17994 - protein, 53 aa, Oryza sativa
  Clone ID: TF_OSC16135j.C1.p1.gm
LYFKCTFSRERSCAAKKQVQQRDAGEPPMFLVTYLNEHTCQQPQAVPGTPNTA

SEQ ID NO: 17995 - protein, 217 aa, Oryza sativa
  Clone ID: TF_OSC29687j.C1.p24.fg
MAAAASSSTTSAAAAPATATTTVAFSFQHPTPTPSHHHHHHGVLGYSPLVLDHHHPTTAAASSHAPSPPTLHHHHGGGLHAAAPPPRSSPPHPWSCEEGDHRGRPQMGNKGEAAAAMGAMGINDAGNNTAAAAAAQHHLGVGAVRMKKVGGGGGGGGKARRKVREPRFCFKTMSDVDVLDDGYKWRKYGQKVVKNTQHPRAFELPFFPCMVCDTFAR

SEQ ID NO: 17996 - protein, 176 aa, Oryza sativa
  Clone ID: TF_OSC5800j.C1.p3.gm
PYLMGDVLRAQATASAEEVAGGVWPCELDDHLIGELLGDDGLFVPAAEHPTLYYSFGAGSSAAAAAAPCNGGGSADHERRPRPAPAVSRDLCSVYSGPTIRDIEKALSSSASPRPPYPSGRRYSSLVEAESKYTSKVRSCGGKMPADGYKWRKYGQKSIKNNPHPRCATRSIIDPI

SEQ ID NO: 17997 - protein, 198 aa, Oryza sativa
  Clone ID: TF_OSC408573j.C1.p16.fg
MAKGNPCPRAYYRCTVAVGCPAAVAKSSSANAATTEMLELLRDFSDYSSFNSDISSELERLAAAVTPRSDAPQVAAVDLNGGSSSSSRLTTTTPPPLLQLGCRQALPFIVPTGRCASLAAVVEEISGRRASPPWMSAAGDAVAVIPSYENHVTEVSTCVKHSSSHTDIDRLRLSITTPFHDYDVITLIDKIINPLFWC

SEQ ID NO: 17998 - protein, 327 aa, Oryza sativa
  Clone ID: TF_OSC900417j.C1.p4.fg
MDAAWRGGVGCSPVCLDLCVGLSPVREPSAARHELLDRPAGCRGGGDSKSMTNDEAKIVEAKVTQMSEENRRLTEVIARLYGGQIPRLGLDGSASPPRPVSPLSGKKRSRESMETANSCDANSNRHQGGDADHAESFAADDGTCRRIKVSRVCRRIDPSDTSLVVKDGYQWRKYGQKVTRDNPSPRAYFRCAFAPSCPVKKKVQRSAEDSSLLVATYEGEHNHPHPSPRAGELPAAAGGAGGSLPCSISINSSGPTITLDLTKNGGAVQVVEAAHPPPPPDLKEVCREVASPEFRTALVEQMASALTSDPKFTGALAAAILQKLPEF

SEQ ID NO: 17999 - protein, 396 aa, Oryza sativa
  Clone ID: TF_OSC401425j.C1.p34.fg
MAKMLPPPSQSVPSRPPSWLYIPPRRRHGTFTSSCAFRLSPSSPSSPPPPVLDFQYIQFMDSWIEQTSLSLDLNVGLPSTARRSSAPAAPIKVLVEENFLSFKKDHEVEALEAELRRASEENKKLTEMLRAVVAKYTELQGQVNDMMSAAAAAAVNAGNHQSSTSEGGSVSPSRKRIRSVDSLDDAAHHRKPSPPFVAAAAAAAYASPDQMECTSAAAAAAAKRVVREDCKPKVSKRFVHADPSDLSLVVKDGYQWRKYGQKVTKDNPCPRAYFRCSFAPACPVKKKVQRSADDNTVLVATYEGEHNHAQPPHHDAGSKTAAAAKHSQHQPPPSAAAAVVRQQQEQAAAAGPSTEVAARKNLAEQMAATLTRDPGFKAALVTALSGRILELSPTKN

SEQ ID NO: 18000 - protein, 307 aa, Oryza sativa
  Clone ID: TF_OSC401918j.C1.p38.fg
MAVDLMGFSPRGGCRPSVETEQLAFQEAAAAGLRSLELLVSSLSAGGEHHHRRRPQEKQSSPPLGEIADQAVSRFRKVISILDRTGHARFRRGPVVGAAAAEAAAAAASASPSSSPVSPPLPPVTTQPAAAVKSLTLDFTNPAKVAAASVTSTSFFSSVTAGGDGSVSKGRSLVSSGKPPLAGGVKRKHPHPPCAAAGDGHGHGAGHAHAHGGCHCSKKRKQRVRRTVRVAAASARVADIPADEYSWRKYGQKPIKGSPYPRGYYRCSTVKGCPARKHVERAADDPATLVVTYEGDHRHSPPPPPLV

SEQ ID NO: 18001 - protein, 320 aa, Oryza sativa
  Clone ID: TF_OSC419986j.C1.p4.fg
MKNSSNKRSLVADQWHPSSVCCDHRAALREIAKGQSLVTQLRAIVLPALHSDERCDLAAQMLEGILDCSRKAVSQLQLLLSSPHDDDDHHHVDDKRRVRKIISSSDDDDHCSSKAAEDDNAKPLRQHKRRRFGDSVSLETPVPHYDGHQWRKYGQKHINNSKHPRSYYRCTYRQEEKCKATKTVQQREDLHHANSYNGDHPIMYTVVYYGQHTCCKGPAALADDHVVVEASQISTDSHCQSPSSSSDLQAAEVHAGNSSQCSNISVTCSPSVVVEDCNKLLDMMPAADELTADVLLFDMTAYAPLDLDINWEMDTNALWV

SEQ ID NO: 18002 - protein, 316 aa, Oryza sativa
  Clone ID: TF_OSC401064j.C1.p110.fg
MAAGEEVMDRSTSAEDGYCSAGTDSPRAESVDEQGAAEESSPRGGQKRELPSPSASPSSPLPPAAKRSRRSVEKRVVSVPIAECGDRPKGAGEGPPPSDSWAWRKYGQKPIKGSPYPRGYYRCSSSKGCPARKQVERSRADPTVLLVTYSFEHNHPWPQPKSSSCHASKSSPRSTAPKPEPVADGQHPEPAENESSASAELEVPEPEPEQESEPVVKQEEEQKEEQKAVVEPAAVTTTVAPAPAVEEEDENFDFGWIDQYHPTWHRSYAPLLPPEEWERELQGDDALFAGLGELPECAVVFGRRRELGLAATAPCS

SEQ ID NO: 18003 - protein, 170 aa, Oryza sativa
  Clone ID: TF_OSC400222j.C1.p67.fg
MTSLDWQSLLQTCLQVPPPVLEQQQPAAAAQADQYSGENDHGDLQAAESSGAGNKEKQVMAKGGAGRPSGTKKKASRPRFAFQTRSDNDILDDGYRWRKYGQKAVKNSKHPRSYYRCTHHTCNVKKQVQRLAKDTSIVVTTYEGVHNHPCEKLMEALTPILKQLQFLSQF

SEQ ID NO: 18004 - protein, 555 aa, Oryza sativa
  Clone ID: TF_OSC401716j.C1.p59.fg
MTTSSSGSVETSANSRLGTFSFASASFTDLLGGNAGAGGGGVSRYKAMTPPSLPLSPPPVSPSSFFNSPIGMNQADFLGSPVLLTSSIFPSPTTGAFASQHFDWRPEVAAAQSADQGGKDEQRNSYSDFSFQTAPASEEAVRTTTFQPPVPPAPLGDEAYRSQQQQQPWGYQQQPAGMDAGANAASFGAAPFQATSSEMAPQVQGGGGYSQPQSQRRSSDDGYNWRKYGQKQVKGSENPRSYYKCTFPNCPTKKKVERSLDGQITEIVYKGTHNHAKPQNTRRNSGSSAAQVLQSGGDMSEHSFGGMSGTAATPENSSASFGDDEIRVGSPRAGNGGGDEFDDDEPDSKRWRKDGDGEGISMAGNRTVREPRVVVQTMSDIDILDDGYRWRKYGQKVVKGNPNPRSYYKCTTAGCPVRKHVERASHDLRAVITTYEGKHNHDVPAARGSAALYRPAPPAAAATSSHPYLPNQPPPMSYQPTGPQPYALRPDGFGGQGPFGGVVGGSSFGGFSGFDDARGSYMSQHQQQQRQNDAMHASRAKEEPGDDMFFQNSLY

SEQ ID NO: 18005 - protein, 283 aa, Oryza sativa
  Clone ID: TF_OSC404471j.C1.p19.fg
MASPRLKREQSFDFEEASAQEAVGSASASYSPPGGGGVFGISPPESSPRDGRKRRKDRPSLVKHTFTPHFDGHLWRKYGQKNIKDSAFPRLYYRCSYREDRQCLASKLVQQENDDDPPLYRVTYTYEHTCNTTPVPTPDVVAEQPPPGAAGDAYLLRFGSSAGGGGGGAHQQQTERERQQQNTARRRPFMMLSFDSSSSHQLHEQPHAFPPDGQLPATAAAASPSSFTAAEALAAPPLTTTMNDGGDLFSTWDALRYGLDYDHGHLGNHVYLPDDCNGGDDNY

SEQ ID NO: 18006 - protein, 329 aa, Oryza sativa
  Clone ID: TF_OSC419986j.C1.p5.fg
MEEAYCMMMVGRERELVAELRHLLFPSPSPTPTTPASHSTTALAGDGECCLPPGLTTTTTVSGGGRRRGRKRVNRDNDNVKLLLQADDDQEAVIADHGDANAKPLPNFTKTRRRKQQATTSTMVTTVPDFDGYQWRKYGQKQIEGALYPRSYYRCTNSTNQGCLAKKTVQRNGGGGAAGYTVAYISEHTCKSIEPSLPPVILDTTVRTTNNHQQPAAAESPAATSSSSSNMVMTSSETGNWSGQHGAYACRQMIAADEEYCCWDTPATTTTTSGSNGGNSTCAEDIELLSRPIRSPMHIAAEGNWMDDLLLVTDGLIVISNSSITHFLT

SEQ ID NO: 18007 - protein, 274 aa, Oryza sativa
  Clone ID: TF_OSC401580j.C1.p5.fg
MAAGADERCRALVSGLLSSIDRSISIARSCCTEAAAAGRLTQQAGAAPESPPSADGSAGSDLGADSRCRANAAGPCKKRKTLPKWSKQVKVRSVQDVGPLDDGFSWRKYGQKDILGAKYPRAYFRCTHRHTQGCHASKQVQRADGDPLLFDVVYHGDHTCAHGVRSAAAAIDGQAAASAEQKHQPTPPQEQNAVSVAFTSMAVVNASTSSPFVSPAMSDCQISYELGGGSMAGVRNVPDVELASKTNSSMGDDMEFMFSLDSDFLDTYKYSSYF

SEQ ID NO: 18008 - protein, 260 aa, Oryza sativa
  Clone ID: TF_OSC415412j.C1.p2.fg
MEGSSSDGSRYGGSGRCALVAELVQMQGMVRQLEAEMGTHGGGGGGGGGGGADGRRSGRAGAARWKTLPKWSKQVKVRSVQDVGPLDDGFSWRKYGQKDILGAKYPRAYFRCTHRHTQGCHASKQVQRADGDPLLFDVVYHGDHTCAHGVRSAAAAIDGQAAASAEQKHQPTPPQEQNAVSVAFTSMAVVNASTSSPFVSPAMSDCQISYELGGGSMAGVRNVPDVELASKTNSSMGDDMEFMFSLDSDFLDTYKYSSYF

SEQ ID NO: 18009 - protein, 348 aa, Oryza sativa
  Clone ID: TF_OSC32142j.C1.p1.fg
RRSVGSDDSDCGKEDLGLSLSLGASSSYDDDQKAVEARPHDVDGAAAAAMIGGDGSRPAPRGYPLLESSKVQGGAAPAAGELAAAGGITSQSVNPANRKTRVSVRVRCQGPTMNDGCQWRKYGQKVAKGNPCPRAYYRCTVAPGCPVRKQVQRCLEDMSILVTTYEGTHNHPLPVGATAMASTTSAAATFMLLSSTTSSSSVSDASAAPSSSYLSPYLLNSASPLLMPGATGGGGGMQHLNLFGNSPSSSSLLAPQAPGSSKYPWSPNHPPLAGAGGNKRPFWSAGGDGDKPAPAALAENVGAVMSDPNKFSAAIAAAINNFMGKDGESSSGKSSSKWGVVESLPPHE

SEQ ID NO: 18010 - protein, 637 aa, Oryza sativa
  Clone ID: TF_OSC400663j.C1.p7.fg
MTWDNRIKEESSLLIALLIRLRHPDIDLDASGEVALGFKTVPHFSCTKRDKGTQDYQKEARSMSSKKKRAAIDLSLEAERRRPEERGGGSDREASDGAAAAAEEDGDVKQREGPKEETGGEEEKVVEVVVDQGEDGSNEEIKYRTQQAEMIEEDKQPAAAANVDDDGGDSDGVGASAEEKHMVTEATGGEGDDGGDSRTPMAQDELSEMQEEMERMKEENRMLRRVVDKTVRDYYELQMKLAAYQQQPAAADEPKETEVFLSLGATAAASAGCGGGFPEAKSKEQAAWRRRSVGSDDSDCGKEDLGLSLSLGASSSYDDDQKAVEARPHDVDGAAAAAMIGGDGSRPAPRGYALLESSKVQGGAAPAAGELAAAGGITSQSVNPANRKTRVSVRVRCQGPTMNDGCQWRKYGQKVAKGNPCPRAYYRCTVAPGCPVRKQVQRCLEDMSILVTTYEGTHNHPLPVGATAMASTTSAAATFMLLSSTTSSSSVSDASAAPSSSYLSPYLLNSASPLLMPGATGGGGGMQHLNLFGNSPSSSSLLAPQAPGSSKYPWSPNHPPLAGAGGNKRPFWSAGGDGDKPAPAALAENVGAVMSDPNKFSAAIAAAINNFMGKDGESSSGKSSSKWGVVESLPPHE

SEQ ID NO: 18011 - protein, 242 aa, Oryza sativa
  Clone ID: TF_OSC4096j.C1.p1.fg
MWMQEGHPTCVNLTPIPHTDGHLWRKYGEKKIKNSSFPRRWCKTVAIYRLYYRCSYRDDRNCMATKVVQQENDADPPLYRVTYIHPHTCNPSPPAPTPAHVFTEPPPAKAEVHHAVLFRFSSTAGGHTANNAVHRQQWQPAAATMAAGAQAQLSMTMSDDEREQPPAAIRSAPPARRLSMFRAVVDGLRQMRSSAPPTPSSSMVVDDGWDTFSSFDLDTCEFSVDDELLCGDHMYFPDSMQQ

SEQ ID NO: 18012 - protein, 319 aa, Oryza sativa
  Clone ID: TF_OSC413014j.C1.p3.fg
MEGVVDGSGAQLVVAELVRVQGLLRQLEAHLSAPCSVELCRGLVAQIVALTDRSIGIATRSFSSASGGGAHFADTAPPMPALTSCTPSPLSDGSDHQPFRTTNAKKRKTTARWTSQVRVSAAGGAEGPADDGHSWRKYGQKDILGAKHPRGYYRCTHRNTQGCTATKQVQRTDDDASLFDVVYHGEHTCRPGAASAAAAKRPHAQTLLQSLSASLTVNTDTNTPLTPENRAPAPPLQQQQQQQSVSASPVASDSYGLGGAGYGDWRCCDGDLQEVVSALATVTSAPDHAAMDAADFMSYCFDFDPAVYGGIVGTPSFFL

SEQ ID NO: 18013 - protein, 361 aa, Oryza sativa
  Clone ID: TF_OSC400271j.C1.p13.fg
MESMEGNGGGRLVVTELSHIKELVRQLEGHLGGSGSPDLCKHLASQIFSVTERSIGMIRSGHFDGHRKRSAAAVAAGDLDSATPSPLSDVSDLPFKATKKRKTSTEKKRHQIRVSSTGGVENPPVDDGHSWRKYGQKEILGAKHPRGYYRCTHRHSQGCMATKQVQRTDEDATVFDVIYHGEHTCVHKAVAAGAGKPETETDTNAAAESRLHDLSSGLTVKIEGLTAPPQQQQGGGGWNAMPPFCLSSPVSGLAPPDQHNPFSAPSTPENRLAAAASSAASPATSDSMAAAPFHQAAAGGGDEAWRDAELQEVVSALVAATTTTATAQPAPATAMVDADLSALDAFEFDPGFTIDITSFFA

SEQ ID NO: 18014 - protein, 225 aa, Oryza sativa
  Clone ID: TF_OSC900348j.C1.p27.fg
MESMEGNGGGRLVVTELSHIKELVRQLEGHLGGSGSPDLCKHLASQIFSVTERSIGMIRSGHFDGHRKRSAAAVAAGDLDSATPSPLSDVSDLPFKATKKRKTSTEKKRHQIRVSSTGGVENPPVDDGHSWRKYGQKEILGAKHPRGYYRCTHRHSQGCMATKQVQRTDEDATVFDVIYHGEHTCVHKAVAAGAGKPETETDTNAAAESRLHDLSSGLTEKWTRS

SEQ ID NO: 18015 - protein, 221 aa, Oryza sativa
  Clone ID: TF_OSC17493j.C1.p2.fg
MAAVGAHAAVYHHPVSGLSAPAGDAAYSMSSYFSHGGSSTSSSASSFSAALAAATTPPLPDPSGSQFDISEFFFDDAPPAAVFNGAPTAALPDGAAANATRSAAEAVPAPAPAAVERPRTERIAFRTKSEIEILDDGYKWRKYGKKSVKNSPNPRNYYRCSTEGCNVKKRVERDKDDPSYVVTTYEGTHNHVSPSTVYYASQDAASGRFFVAGTQPPGSLN

SEQ ID NO: 18016 - protein, 593 aa, Oryza sativa
  Clone ID: TF_OSC401478j.C1.p35.np
MELRPPPPKHHHHRRRRGGGGEDGGEEEEEETGRLSLRGGGFWRRHDGEEEEEKGGGRRGEIKEVDFFLGASGRDVVVASRRHDDGFRGTTHGGGGGGDVNIGLDLLTTTTAGAAAGGAAAGAGEEDTGKNHRKEATTAAVDVELRRVVEENRRLGMLDELNRSYSALYHQYLQVTQQQNHRHPDHHLIMNNNNNRPSLAQTHRTAATTTATTQQFLEPRASSTAQATADADMAASDDEAGRGGGDGDASSPSLSNAAGGGGGGNKMRRVGGQDETAAAAPARENGEQQAAAAAELPCRKPRVSISDGCQWRKYGQKMAKGNPCPRAYYRCTMAIGCPVRKQVQRCAEDKTVLITTYEGNHNHQLPPAATTMANTTSAAAAMLLSGPAASRDGAAAALLGHHHHHHPAAMFHQSFPYASTMATLSASAPFPTITLDLTQTPAGGAGAASLLHALHRPPVIHPGAAAQAMPFAVPPQLAMYLPQQRAAAAGLGGAGAARQPSVMETVTAALAADPNFTTALAAAISSVVAGGAHHQALSTTPRGSAAGAGDGNGNGSSAAAVATGAASPAATAEAPAASGSPPRLATQSCTTSN

SEQ ID NO: 18017 - protein, 540 aa, Oryza sativa
  Clone ID: TF_OSC418607j.C1.p7.fg
MSARPPPPPRPRLALPPRSAAESLFTGAGDASPGPLTLASALFPSDPDGGGGGGGVMTSSSSSAAGATSFTQLLIGNLSAPPPPPPPPQQQQQREAARGGGVARAGPALSVAPPPTAGSVFTVPPGLSPSGLLDSPGLLFSPAMFDAFDVLDMFIPDKILPKRATRIKLDIYFVKTSPEGGFGMSHREALAQVTAQASHSPLRMFDHTEQPSFSAAPTSSEAMQHMNAAVNMTGISDMVMGPTNNENVAFQPAEASQRYQVNAPVDKPADDGYNWRKYGQKVVKGSDCPRSYYKCTHPNCPVKKKVEHAEDGQISEIIYKGKHNHQRPPNKRAKDGSSSAADQNEQSNDTVSGLSGIKRDQEAIYGMSEQLSGLSEGDDMDDGESRPHEADDKESDSKKRNIQISSQRTSAEAKIIVQTTSEVDLLDDGYRWRKYGQKVVKGNPHPRSYYKCTYAGCNVRKHIERASSDPKAVITTYEGKHNHEPPVGRGNNQNAGNAAPSSSAQQNMQNLSSNQASLTMADFNNINQRPIGVLQFKSEE

SEQ ID NO: 18018 - protein, 59 aa, Oryza sativa
  Clone ID: TF_OSC29687j.C1.p31.gm
MEGSYYRCTQDNCRVKKRVERLAEDPRMVITTYEGRHVHSPSRDDDDAARASAEMTFIW

SEQ ID NO: 18019 - protein, 328 aa, Oryza sativa
  Clone ID: TF_OSC458j.C1.p1.fg
MALTMVSLAAIAGKPTAASAQLVAEGRESAARLYALLVGSSALHGPVGLAEQILLCFDRALAKLHGVNLAGAEDDDDAAGNGNGRKRKPGRGRGLTAASAAASSKRMRVSNAGGNGARIERKATMDDKFLWRKYGQKEIKNSKHPRFYYRCSYKDDHGCTATKQVQQSETADDDTASPVYIITYFGEHTCRHGDDAAAMVVDGGEEEDQLSPAQMVISFASSNGGDASVSWPCSGDDAQNNSETSHESSPPEAPAGEEERLRPCTAAGVSDEPIMESTPPAPELLADLKPMDGCLLDGESLFGMDELVYFHELSAALGLLDRDWGAPV

SEQ ID NO: 18020 - protein, 375 aa, Oryza sativa
  Clone ID: TF_OSC404471j.C1.p17.fg
MAFGQDTIEQLYRELAGGRRLSAKLQALLEGPLDSRGQKEAVDVSRELGRVFMVSLYMLKPCSNSSRRPEGVTRTAPETRTDDSICLHTPARVKRVRSEEVLVRNGREEVVTRTEIITPSPYKDGYQWRKYGQKNIQDSNYLRLYFKCTFSRERSCAAKKQVQQRDAGEPPMFLVTYLNEHTCQQPQAVPGTPNTAGSSPTTTSRQRQSSSSPPAEMLDLTMNGAGLFSRLLLPHAVGGGGSAAEEEAAIVTCLAAVISGGGAAAAPPPLIWPTSAPEAAFVASAAGHSPSAADESVADEAAAAQMADMDYCFGQYDQSTFGAAAAADHRVLIGDDGDVQRIVAARIADTVWPRYTRDTSAWETAGTSSMRGSID

SEQ ID NO: 18021 - protein, 219 aa, Oryza sativa
  Clone ID: TF_OSC400426j.C1.p42.fg
MAASLGLCHETSYAYSYPASNTSSSLCFPPLMADHIVDGGGGGGCSFGEFLELGHSVYSLPLPPPPSQPVVVAGGNNDQYGVSSSSSAAATTSRIGFRTRSEVEVLDDGFKWRKYGKKAVKSSPNPRNYYRCSAAGCGVKKRVERDGDDPRYVVTTYDGVHNHATPGCVGGGGHLPYPTSAAPPWSVPAAAASPPPAHAQAWGAPLHAAAAAHSSESSF

SEQ ID NO: 18022 - protein, 411 aa, Oryza sativa
  Clone ID: TF_OSC9240j.C1.p1.fg
MTAAPGSLPLVNSRPVSLSLAASRSSFSSLLSGGAGSSLNLMTPPSSLPPSSPSSYFGGVSSSGFLDSPILLTPSLFPSPTTTGALFSWITTATATAAIAPESQVQGGVKDEQQQYSDFTFLPTASTAPATTMAGATATTSNSFMQDSMLMAPLGGDPYNGEQQQPWSYQEPTMDADTRPAEFTSSAAAGDVAGNGSYSQVAAPAAAGGFRQQSRRSSDDGYNWRKYGQKQMKGSENPRSYYKCTFPGCPTKKKVEQSPDGQVTEIVYKGAHSHPKPPQNGRGRGGSGYALHGGAASDAYSSADALSGTPVATPENSSASFGDDEAVNGVSSSLRVASSVGGGEDLDDDEPDSKRWRRDGGDGEGVSLVAGNRTVREPRVVVQTMSDIDILDDGYRWRKYGQKVVKGNPNP

SEQ ID NO: 18023 - protein, 127 aa, Oryza sativa
  Clone ID: TF_OSC9240j.C1.p1.gp
GGDPYNGEQQQPWSYQEPTMDADTRPAEFTSSAAAGDVAGNGSYSQVAAPAAAGGFRQQSRRSSDDGYNWRKYGQKQMKGSENPRSYYKCTFPGCPTKKKVEQSPDGQVTEIVYKGAHSHPKPPQNG

SEQ ID NO: 18024 - protein, 518 aa, Oryza sativa
  Clone ID: TF_OSC400397j.C1.p35.np
MHELFHDLACSVSKDECFSSGEAFCSLPENICHLSVVLPDSKSVVLTKVQRHLQSLMVVKRSASEYPGSFVPLLKILGLNDLLMKCRFLRALNLSCTTIRELPSSIMKMKHLQFLALNNTKIQSLPAEIGQLQTLQTLELKYCCCLIELPESTMNLTKLRHLDVQKEPGNVHVSMPHGIGQLTDLQTLTVFNTGDDLSHCSIGDLKNLSGLRGHVHITGLQNITASDDAKEANLVGKQFLGALTLEWCWSSQDMEDDSDKEIANQVLHNLQPNTNLQELSIRNYSGNLFPNWIQDSSLSMLVSITIDDCQDCNEIPHLGDLPFLKYLLIHKMDKYTVKYLLKKTTTDDGWNWRKYSEKDLLGSKYKRSWYRCNQKQSTGCVARKIVEPNNDDPNTWLVTYLYEHNHKQEARPCDKPSPSDLHVQLASGNTQWCVLRGFYGGVRQMTVGSNTQLHERDYTGNANHSGIIARQTWIEMLRRGCTAGHSQRRAVTYWIYCDDSSSIKDKLEIVDVDVLYQQ

SEQ ID NO: 18025 - protein, 358 aa, Oryza sativa
  Clone ID: TF_OSC404464j.C1.p3.fg
MQAQSRLAAAASGGSGSGISGSGGISRLGGGAGEEHEAVVRELTRGHELTARLRAEALRALRGQGQAEATATFILGEVSRAFTVCLSIMASASPSASPPQPDETPPADSAVSPPPPRAAREDNVPRKRLLTASPYDDGYQWRKYGQKKINNTNFPRSYYRCSYHRERRCPAQKHVQQRDGDDVPALHVVVYTHEHTCLQGAPAELPDAATNGGAAAAASPDYFPAGGETPSSLRRLRGVGGGGLQPQFVDHRAAMEERERQVLVSSLARVLQGRQCYDDDDDDDTDVASLGAVHARAPAAAAPVAASSSSSGPVDAAGEELDVMDYDMTDALFWGPFGTDSNSYDGNLTSTRCFDLIN

SEQ ID NO: 18026 - protein, 243 aa, Oryza sativa
  Clone ID: TF_OSC135j.C1.p3.gm
GEFELGTRGSSRVDLQACKLPQLPQLVHDHAAATGTNHGVMFSSDHGCLYPLLPGIPFCLDSGCGAAACDDDKPAGFAHLGSAEADTSAAAARVDSEIAAAATATTCHGPNSWWKGTEKGKMKVRRKMREPRFCFQTRSDVDVLDDGYKWRKYGQKVVKNSLHPRLQYFSSEILSTRKKGKPLSYYRCTHNNCRVKKRVERLSEDCRMVITTYEGRHTHTPCSDDATTGAAGDHTASCAFTSF

SEQ ID NO: 18027 - protein, 246 aa, Oryza sativa
  Clone ID: TF_OSC400036j.C1.p6.fg
MSSLYPSLLSLSESPAEYRQVGGGRYAGEDVVDDDDDMAAVADAVSSYLSFDMDDVEYYTPEVGFHSKQHNPPPVAAAPLEAGGGREQSRREAAVNLGKMDRGPAPVSGGAATGGVPRSKNGSKIAFKTRSEVDVLDDGYRWRKYGKKMVKNSPNPRNYYRCSSEGCRVKKRVERARDDARFVVTTYDGVHNHPAPLHLRPQLPPPGGYSIAGAPAVVAPHGRLGLEEAEVIALFRGTTATSLLLP

SEQ ID NO: 18028 - protein, 583 aa, Oryza sativa
  Clone ID: TF_OSC401655j.C1.p1.fg
MEADDSGGGGGRARRSVEVDFFSDEKKNMKKSRVSGGVAAEADDAKGPAAAGLAIKKEDLTINVSRRRLLRSSIARHLFNSRRSNACARPCSLQLLPAGNNARSDRSMVVDDDAASRPDHEEKSRSSNELAAMQAELGRMNEENQRLRGMLTQVTTSYQALQMHLVALMQQRPQMMQPPTQPEPPPPHQDGKAEGAVVPRQFLDLGPSSGAGGEAAEEPSNSSTEAGSPRRSSSTGNKDQERGDSPDAPSTAAAWLPGRAMAPQMGAAGAAGKSHDQQAQDANMRKARVSVRARSEAPIIADGCQWRKYGQKMAKGNPCPRAYYRCTMATGCPVRKQVQRCAEDRSILITTYEGTHNHPLPPAAMAMASTTSAAASMLLSGSMPSADGAAGLMSSNFLARTVLPCSSSMATISASAPFPTVTLDLTHAPPGAPNAVPLNAARPGAPAPQFQVPLPGGGMAPAFAVPPQVLYNQSKFSGLQMSSDSAEAAAAAAAAAQFAQPRPPIGQLPGPLSDTVSAAAAAITADPNFTVALAAAITSIIGGQHAAAAGNSNANNTNTNTTSNTNNTSSNNTTSNNTNSETQ

SEQ ID NO: 18029 - protein, 996 aa, Oryza sativa
  Clone ID: TF_OSC401140j.C1.p23.fg
MTTATLDPPPPPLLIAGSLLDDDRDAGSAASSSPRWLPRARGSTVGSPPRRGGEERGGEAATRRKGNSSCPDDDDDCRNDEDDCRNDDDYRDDDVGATTDGGGDAAALLPMAMMTATTMAPMPVEAAVDGGGELSSAGEGGQRRVNLLPTKILSAYENHLFSQALACREDEWIIEKLAVIAARRSSFVSEESLCSVPAAALVSLAIAHLAFSPMLVYGVLDRLCSVCHLGEMEGDIAMEEWKDSNHRGADYLMTMPMQNFLADAFPPPELLEGEGGFEKHGLSVAVGSPPPTPPPPEDGCSPLPLTPQFGQKFGSGGGGGGSLADRRARGGFSNVARISVPYNQPAADVSSAGAPSPYVTIPPGLSPTTLLESPVFSNAMGQASPTTGKLHMLGGANDSNPIRFESPRIEEGSGAFSFKPLNLASSHYAAEEKTKSLPNNQHQSLPISVKTEATSIQTAQDEAAANQLMQPQFNGGKRSRAAPDNGGDGEGQPAEGDAKADSSSGAAAVAVVAAAAAAVAEDGYSWRKYGQKQVKHSEYPRSYYKCTHASCAVKKKVERSHEGHVTEIIYKGTHNHPKPAASRRPPVHPPPPSPATTTTTPLPPGDAQADHAPDGGGGSTPVGAGQAGAEWHNGGVVGGEGLVDATSSPSVPGELCESTASMQVHEGAAAAQLGESPEGVDVTSAVSDEVDRDDKATHVLPLAAAAADGESDELERKRRKLDSCATMDMSTASRAVREPRVVIQTTSEVDILDDGYRWRKYGQKVVKGNPNPRSYYKCTHPGCLVRKHVERASHDLKSVITTYEGKHNHEVPAARNSGHPAGSASPGGGAGSSSQPHGVGVGGRRPEVPSVQESLMRLGGGCGAAPFPPHFGLHLPPPPPRDPLAPMSNFPYSLGHAPSPALRGLPPPPPPPPSASALAVAGLGGVVEGLKYPMLAPPSVHSLLRHRQGGGMEAVVVPKAEVKQEAMRPAAAVAGAGRGAAVYQQAMSRVSLGNQL

SEQ ID NO: 18030 - protein, 337 aa, Oryza sativa
  Clone ID: TF_OSC101929j.C1.p1.fg
MSGPGGGGHGLYEDHPAAAGFLPFDHDDDVVASFFFGRSAASGGGAGAGAGAGDDDGVGLITPYSSITDYLQGFLQDPVYASSPLGGDAAVKHETVVDHPSQAGGVAAAPATPNSSVLSSSSEAAGGDDLRRCKKGRRPEDEEEEEIDDEGSAVQSCKTNKMKNKKGAKKEREPRVAFMTKSEVDHLEDGYRWRKYGQKAVKNSSYPRSYYRCTAPRCGVKKRVERSEQDPSMVITTYEGQHTHPSPVSYHMHRQQGLMHVSARGVMPGAAGAYQFGAPPPPLLGFDEALAARVRMTMNQQQQQQQLGFVPSIHAAAARPTMPPLHLYTAQQDLFLP

SEQ ID NO: 18031 - protein, 319 aa, Oryza sativa
  Clone ID: TF_OSC23303j.C1.p9.gm
MAMAGAGDWPFAADEAYADSSAIFAELGWANGLAVVDAVGELLPPLDPPGELATPPPPPLDLPETPAGSSADGAASSCSTDDADGGKPAAASTEAASKSLTPGKKRARQPRFAFMTKSEIDHLEDGYRWRKYGQKAVKNSPFPRCTNSKCTVKKRVERSSDDPSVVITTYEGQHSHHTVTFPRAAATAAGFSHIHAMAALAAAPFSAHQQLYSNLQPPPPTMPLAATTPASSSSLLQLPLHCNHELQVVASCGGYPSSSSSPPASVLPVDKGLLDDMVPRAMRHDGRAPPPILSSSSLGKAAVVIAKPSPTSSAPPSSP

SEQ ID NO: 18032 - protein, 317 aa, Oryza sativa
  Clone ID: TF_OSC400495j.C1.p37.gm
MAGAGDWPFAADEAYADSSAIFAELGWANGLAVVDAVGELLPPLDPPGELATPPPPPLDLPETPAGSSADGAASSCSTDDADGGKPAAASTEAASKSLTPGKKRARQPRFAFMTKSEIDHLEDGYRWRKYGQKAVKNSPFPRCTNSKCTVKKRVERSSDDPSVVITTYEGQHSHHTVTFPRAAATAAGFSHIHAMAALAAAPFSAHQQLYSNLQPPPPTMPLAATTPASSSSLLQLPLHCNHELQVVASCGGYPSSSSSPPASVLPVDKGLLDDMVPRAMRHDGRAPPPILSSSSLGKAAVVIAKPSPTSSAPPSSP

SEQ ID NO: 18033 - protein, 399 aa, Oryza sativa
  unsure (1)..(399): unsure at all Xaa locations
  Clone ID: TF_OSC101754j.C1.p8.hg
XQRTARGEAGTEREDRXTQTGPTERQRAXGRSPPEERXXPAGRQEERRRQGGDRTSKGTSXNEEKNPRKEKRXRGTSPXAGEAPGGXQRGGKPRPXXQAKGTAKEARDPQKPKQARGPQRKEEKEREKGRGASKKDRKTRKGKDTTGPSEDNNPXATPRAGTAPPPRKRKSESLXDSPPPPPPPHPHAAPHHMHVMPGAAAAGYADQTECTSGEPCKRIREECKPKISKLYVHADPSDLSLVVKDGYQWRKYGQKVTKDNPCPRAYFRCSFAPACPVKKKVQRSAEDNTILVATYEGEHNHGQPPPPLQSAAQNSDGSGKSAGKPPHAPAAAPPAPVVPHRQHEPVVVNGEQQAAAASEMIRRNLAEQMAMTLTRDPSFKAALVTALSGRILELSPTKD

SEQ ID NO: 18034 - protein, 308 aa, Oryza sativa
  Clone ID: TF_OSC13125j.C1.p4.fg
MKNKGSSCRYLPHSSAPCATDGARCFRCDHRPAIDEIVREQSLVTQLRAVVLPALETKADDGRAEIVAQLFGSILDCSRKVISALNSRYVGESPPDDDEIVDKRRAKRKNSEGKKGDDQVKVKPHEHKRSRRYTNSTSQITAVPHYDGHQWRKYGQKNINNSNHQRSYYRCSYKHEQNCKATKTVQQLDSAGETIMYTVVYYGQHTCKTNMSNAPLHVVETSTTQSISTTCCSDDLGDYSQKMENMHTPELAEVCSDELGSYHAIIGAEHSALGLEDEHMHKLLDTFACGALDLDSWEIDAIVRSGFC

SEQ ID NO: 18035 - protein, 309 aa, Oryza sativa
  Clone ID: TF_OSC400920j.C1.p10.fg
MAVDLMGCYAPRRADDQLAIQEAATAGLRSLEMLVSSLSSSSQAAGAHKASPQQQPFGEIADQAVSKFRKVISILDRTGHARFRRGPVESSAPAAPVAAAPPPPPPPPAPVAAALAPTSSQPQTLTLDFTKPNLTMSAATSVTSTSFFSSVTAGEGSVSKGRSLLSSGKPPLSGHKRKPCAGGHSEATANGGRCHCSKRRKNRVKRTIRVPAISSKIADIPPDEYSWRKYGQKPIKGSPYPRGYYKCSTVRGCPARKHVERATDDPAMLVVTYEGEHRHTPGPLPAPPAAAAVAAMPVSVAVSTGNGHV

SEQ ID NO: 18036 - protein, 421 aa, Oryza sativa
  Clone ID: TF_OSC400542j.C1.p3.fg
MEEANREAVQSCHRVLTLLSSPHSQLVPNKDLAAATGEAVAKFCSVASRLNNGNGLQGHARVRKIKKPLPIFDSNLFLESPALAVAMAAKTPNSSPITSLQLFPRYHQMEGSSSKDPVRIPAQFPKRLLLDNPAVDSDGPSRGPPLQLIQPVSVAPPAGTPHPALPSAHLHFIQQHQSYQRFQLMQQMKMQSEMIKRSGLGEQGGSNGGGKGVNLKFDSSNCTASSSRSFLSSLSMEGSIASLDGSRSSRPFQLVSGSQTSSTPELGLMQRRRCTGREDGSGRCTTGSRCHCAKKRKLRIRRSIKVPAISNKVADIPADEFSWRKYGQKPIKGSPHPRGYYKCSSVRGCPARKHVERSGLQGECGKATDKRSDRQPFVSVLLCPKSKPCKSEMACFLVATSPLGKLELMPDTQGPTAPSTP

SEQ ID NO: 18037 - protein, 727 aa, Oryza sativa
  Clone ID: TF_OSC400075j.C1.p19.fg
MALELSLVSASPPGGLAASPPPPAAIPGKEQQVAGVGILLQISMLVLSFVLGHVLRRHRFYYLPEASASLLIGLVVGGLANISNTETNTRTQSGFSLSPKPFFANFGAIVTFAILGTFIASVVTGVLVYLGGLTFLMYKLPFVECLMFGALISATDPVTVLSIFQELGTDVNLYALVFGESVLNDAMAISLYRTMSLVRSQAAAGENFFMMVFQFLETFVGSLSSGCITAQNILNYFKGTFGIVVLELDLSLLLYPFPKFYMETLFAKHERLCMLSIDHVKLQYLCITIYHLLIACFTVNYFIYYLILCNLDHSVYLFKYAGLDIDKYMLAEGLGLSGIVSILFTGMVMKHYTFSNLSNNSQRFVSAFFHLLSSLAETFVAVNVFSCAYLVNMSRPEHRRIPLKHQKALWFSGLRGAMAFALALQSANELPGGHGKTIFTTTTAIVVLTVLLIGGSTGTMLEALDVIGDENRSIENYDDNNGYIPPTYEEGSSSGGGLRMKLKEFHKSTTSFTALDRNYLTPFFTSQTDEDDDVFEIGHYATPKSGFRQNAILPNGFVKMPCTRDTKHLFCHLRQFSPFLPNFASGLTKIPLRAGSRPVLRNTSSGCAAAAACADQYSAATPDNSSVTFGDDEADNESHSSEGYEPEAKCWKEDADNEGSSGGMGGGAGGKPVRKPRLVVHTLSDIDVNIDILDAGFRWRKYGQKVVKGNPNPRSYYKCTTVGCPVR

SEQ ID NO: 18038 - protein, 565 aa, Oryza sativa
  Clone ID: TF_OSC400934j.C1.p26.np
MGGEPRARAEAAWAAALPAALVALVRDTATYTRMMHRLRMETPRGPTCQLDPCCCCCTAHVIPPPPPVSRTHATRRDAEASVPPPPASAAVSSRSDGTGQMAAGVTLACAAPPPLRAPRASDGGRRRGVVKGGAGTDTCRSPQRLNVRPRERERVRACVRARAKNHEHGQRRREAAVDPAMSGEYQFQDELAPLFARPGGGAGEMQMLPSSWFADYLQAGTPMQMDYDLMCRALELPVGEDVKREVGVVDVVAAGGGGAPPLTPNTTSSMSTSSSEGVGGGGGGGAGAGAGEEESPARCKKEEDENKEEGKGEEDEGHKNKKGSAAKGGKAGKGEKRARQPRFAFMTKSEVDHLEDGYRWRKYGQKAVKNSPYPRSYYRCTTQKCPVKKRVERSYQDPAVVITTYEGKHTHPIPATLRGSTHLLAAHAQAAAAAAAAHQLHHHHGHHGHHGMAPPLPLGSGAAAQFGRSSGIDVLSSFLPRAAAAHHGMTTMGGAAATTTTSHGLNSAISGGGGVSSETTSAVTVAASAQPSSPAALQMQHFMAQDLGLLQDMLLPSFIHGTNQP

SEQ ID NO: 18039 - protein, 434 aa, Oryza sativa
  Clone ID: TF_OSC400940j.C1.p1.gm
GTSRLDPDQGPTSGRTSPSPGWTGLSETKSRAKNHEHGQRRREAAVDPAMSGEYQFQDELAPLFARPGGGAGEMQMLPSSWFADYLQAGTPMQMDYDLMCRALELPVGEDVKREVGVVDVVAAGGGGAPPLTPNTTSSMSTSSSEGVGGGGGGGAGAGAGEEESPARCKKEEDENKEEGKGEEDEGHKNKKGSAAKGGKAGKGEKRARQPRFAFMTKSEVDHLEDGYRWRKYGQKAVKNSPYPRSYYRCTTQKCPVKKRVERSYQDPAVVITTYEGKHTHPIPATLRGSTHLLAAHAQAAAAAAAAHQLHHHHGHHGHHGMAPPLPLGSGAAAQFGRSSGIDVLSSFLPRAAAAHHGMTTMGGAAATTTTSHGLNSAISGEDGVSSETTSAVTVAASAQPSSPAALQMQHFMAQDLGLLQDMLLPSFIHGTNQP

SEQ ID NO: 18040 - protein, 280 aa, Oryza sativa
  Clone ID: TF_OSC464j.C1.p2.fg
MARRLPKSERSPSPPPPPPGDQRDAAIQELSKGSELATQLMAQLELIPERELDGRRDDALANVRSLSMSLSSSLYALRSERREHYYCGSSSSSGGAGPAAVTSVSGAGGERKTKRRRGKHGEELIETVFITTTPENDGFHWRKYGEKNILNSEFRKLYYRCGYSDERKCQAKKYVQQENNKHPPEFRVTLTNEHTCNTVFQDQPSSSSTNSQVLDFTKASISSSLMDSHVGAPILKEEEEEEVPSIDESTRIMSTIMRNYGSYGDYDESSPQPWNGAGWK

SEQ ID NO: 18041 - protein, 623 aa, Oryza sativa
  Clone ID: TF_OSC400127j.C1.p3.fg
MEDWMPPPTPSPRTLMSSFLNEDFVSGSFSNIFSDHESNKPQDQFERNRELVDLSKEVPSQFARPAFQRDASLDHSLVSPTQRSNSHGGLAERRAARAGFSVPKIDTSRGGSSTVIRSPVAIPPGLSPTTLLESPVFLYNAMAQPSPTTGTLPFLMASNAKSTIPSATKMDEDCTFGNDTFSFQPHVGSRRPNFSAAEKGPNACHQNQSLSNIHQRESSLQSSFTAVKDITDEKNIKTKTSDSMFGDNHSSDEQDDETNQNGENSMPPPNHRSGVPLSHTNDPEVNVLENRGSQTCHNSASLWDNAKNDCLQDVQSEVIETRTAACLPVSTNCDTSIMESQDAVDVSSTLSNEEDDRATHGTASIECNGDGDETDSKRRKLDALTAATAAITTTSNIDMGAAASRGVREPRVVVQTTSEVDILDDGYRWRKYGQKVVKGNPNPRSYYKCTHQGCSVRKHVERASHDLKSVITTYEGKHNHEVPAARNSGHGSSGSGNAPSAPQSNGSQRRQEQGQASFSQFGGAAPFSSFVLPPRNQFGPSASNFPFGMVPPGMAIPMPSLGSLAPAKMAGHPSTMQGYQGLMIPEGEMKTEPMSQLGFPAVNQSSSSFQQMMNRPPSFGPQM

SEQ ID NO: 18042 - protein, 210 aa, Oryza sativa
  Clone ID: TF_OSC401607j.C1.p4.fg
MSPVPSPHQSHHLGHGSRKEKRMRKVDTFAPHNDGHQWRKYGEKKINNCNFPRYYYRCTYKDNMNCPATKQIQQKDYSDPPLYSVTYYNEHTCNSAFLPLSPSEFQLQTASGKAVSICFESSGAQEPMTNASSPSSSAARRSTPSENKNQPLPRHSEAYSWGVGVVEQKPSCTELQSCSTECQDAFSAGTIPEETVDAGRFGSIRFFHFL

SEQ ID NO: 18043 - protein, 253 aa, Oryza sativa
  Clone ID: TF_OSC400974j.C1.p8.fg
MADPFPAAARGGEQGGGTAGQLVSTPSRLRTAVASMLNRTGHARFRRAAPVVVQEEEDEAAAAARDAVVRCDGLSASASSSFPSSVTGVTGDGSVSNARAVLPAAGDGDKPPPMQSASDYASDGRLKRSSDDDGERCHCSKKKRKASWRARRRIRVPAISSRNADIPADDYSWRKYGQKPIKGSPYPRGYYKCSTVRGCPARKHVERDPGEPAMLIVTYDGDHRHGEPGHRRPDEAATTTEHRTTDQTTGRLL

SEQ ID NO: 18044 - protein, 507 aa, Oryza sativa
  Clone ID: TF_OSC400426j.C1.p40.fg
MDVVVESPPVRDEKKVDVAAIGGAPPIVFESFAPSTQRDSTIIKKEEKMEAAKAEMGEVREENERLKTMLTRIVSDYKSLHTHFLDVVKVKEQTAAELSGDDDDDEPDDLVSLSLCTRPNAAATRRKGHERTPSSGGGGDDGRLSLGLSCARGGVASDDDDDKQASRRALPPMPVLNLSSDSSGDAAGAGAGEPTQPNKASRSSSGGGDGADDEVLQQQQAKKARVSVRVKCDTPTMNDGCQWRKYGQKISKGNPCPRAYYRCTVAPNCPVRKQVQRCADDMSILITTYEGTHSHPLPPAAAAMASTTSAAAAMLTSGSTNSTMHGSGGVHHHLPFASAVGGGGGVGLLGPTTISTATSCPTVTLDLTAPHSLLHPSSASPYAAAAAGYESSRALPAAWSSGYLAYGGAAAAQPYYAKGVAPSPFGHHFGMMGMAAAAARPAPEQLFGGQTTSPYLQRAIGGGGVAPAAVTDTIAKAITSDPSFQSVLAAAITSYMGRGGGAAAPNK

SEQ ID NO: 18045 - protein, 344 aa, Oryza sativa
  Clone ID: TF_OSC102216j.C1.p15.fg
MVNFLKLSDIQSTDAESVDVGFISSVHKTTRKKGFTTCLLGRNSILFGKTTVVIGEKVEHCCRWSQEEEITGIAGVDSCYGEPGGVLSGRLGVNGEKGSTQFQISYGVSSAFGFRCDFGTGFITHGMGDHHGMPLPPPLQLPCHPKLLQMPFDQEDQPGIHGVMLSSDHCGLYPLPALPLSNSAAAAAATVALGKHSAAAGSMPNIGGAEEVATTVTKAGNESTTCNGSTTWWRGSTMAAAGEKGKMKIRRKMREPRFCFQTRSEVDVLDDGYKWRKYGQKVVKNSLHPRSYFRCTHSNCRVKKRVERLSTDCRMVITTYEGRHTHSPCDDNSSGEHTNCFSSF

SEQ ID NO: 18046 - protein, 375 aa, Oryza sativa
  Clone ID: TF_OSC31206j.C1.p5.fg
MVTPLSVLLAAAAGGGFDRRDRSRVVGGGGGGREGWEMDEVLAQISEGFRLAGELMSELAATQNDPDYLAARCHAIAGAYAAAARVLQGARHGGGGVGAASTSFGGEGYLHHQHRQQRTSSAFRIACQVMALPLCTQVTRGFTHNYEYSTRRESGEKVTVMVAAQRTGNTEQPPDDGYTWRKYGQKDILGSRYPRSYYRCTHKNYYGCEAKKKVQRLDDDPFTYEVTYCGNHTCLTSTTPLLTLPAAAATSVTNSPTAAAVLGQDFVMAPAADQQPPQHQQAQPPLSTSIHLGIGWPMTPASLAGAVGEGSTSTTATAPQVTTMGATAAGGGGAAARDADHYPVADLADVMFNSGGSGSSSIMDGIFSSHDRRDN

SEQ ID NO: 18047 - protein, 332 aa, Oryza sativa
  Clone ID: TF_OSC400044j.C1.p100.np
MGFAKTTTETDIKLFLMGPCGASKQNNSKRGGSRTVARAEASSNDSSQEARRLFGACHVRESANPHARRLFGACHVRESANPHARVPMYMAAAAAGASTPFNFCRHGSHAEYDAVFSGSWMARRPSAAPHGGGASGSGSGSGYGAASYVAPTFGAAFRQQHLDLLDYLSDDQGVPAPPPAAVPSASYVTPAPAMAPAEPVVPDAVAAAGGYPRSVAAAAAAVAGEGRDRTTTDKIAFRTRSDDEILDDGYKWRKYGKKSVKNSPNPRNYYRCSTEGCNVKKRVERDKNDPRYVVTMYEGIHNHVCPGTVYYAAQDAASGRFFVAGISHPDLN

SEQ ID NO: 18048 - protein, 79 aa, Oryza sativa
  unsure (1)..(79): unsure at all Xaa locations
  Clone ID: TF_OSC400426j.C1.p60.gp
RVERDGDDPRYVVTTYDGVHNHATPGCVGGGGHLPYPTSAAPPWSVPAAAASPPPAHAQAWGAPLHAAAAAHSSESSFX

SEQ ID NO: 18049 - protein, 429 aa, Oryza sativa
  Clone ID: TF_OSC400099j.C1.p8.fg
MEEEVEAANRAAVESCHRVLALLSQQQDPALLRSIASETGEACAKFRKVVSLLGNGGGGGGGGGGGGHARGRMAGRSRPSAVLREKGFLESSSGGGQLGMMMSGAATPSTSSAAHLRNRIGGGSGVPPDSLRGLDLVSSSSKGGAHQFDPPKLVQPLSVQFQFGATAHRYPFQQHQHQQKLQAEMFKRSNSGISLKFDSPSATGTMSSAFMSSLSMDGSVASLEGKPPFHLISGPVASDPVNAHHVPKRRCTGRGEDGSGKCATTGRCHCSKRRKLRIKRSIKVPAISNKIADIPPDEYSWRKYGQKPIKGSPHPRGYYKCSSVRGCPARKHVERLRENGGRTCDWIVTGKICSKKGGIRFEDFKGRLTKGSEQLKHRVSLEKDKQDLAFSVHKFTCNDLPLYVAFALLKDQNFLLAEESFSIKAVSTC

SEQ ID NO: 18050 - protein, 336 aa, Oryza sativa
  Clone ID: TF_OSC401122j.C1.p48.fg
MEHFNDWDLQAVVRSCSFPQSEPPRVGVGVPAAPGAGGAPVVVAPPARAPDGPDQMARASASALYDLEYLDLDHKPFLLPGSSSSSSSSRAVARARGEDDGKGRHEVMISFPAAAAASTSGAQPRSPSGRKPGIRTPRPKRRSSKKSQLKKVVYEVPVADGGVSSDLWAWRKYGQKPIKGSPYPRGYYKCSSMKGCMARKMVERSPAKPGMLVVTYMAEHCHPVPTQLNALAGTTRHKSAPTGDDDKPTSPGPAAGRAAAGEGVVKCEDVDGNELSAMAADGGAEDTAAAADDDGELWPEGMGLELDEFLGPMDDDVFEFDHVLEDDGVLGRRLSL

SEQ ID NO: 18051 - protein, 194 aa, Oryza sativa
  Clone ID: TF_OSC15464j.C1.p1.fg
MAASVGLNPEAFFFSNSYSYSSSPFMASYTPEFSAAAIDANLFSGELDFDCSLPAPAQEYPENENTMMRYESEEKMRARVNGRIGFRTRSEVEILDDGFKWRKYGKKAVKNSPNPRNYYRCSTEGCNVKKRVERDREDHRYVITTYDGVHNHASPAAAAAALQYAAAAGDYYSPPLSSAGSPPAAYSAGGSLLF

SEQ ID NO: 18052 - protein, 215 aa, Oryza sativa
  Clone ID: TF_OSC29687j.C1.p32.gm
MALGHHGAARQPPTTMAAAASSSTTSAAAAPATATTTVAFSFQHPTPTPSHHHHHHGVLGYSPLVLDHHHPTTAAASSHAPSPPTLHHHHGGGLHAAAPPPRSSPPHPWSCEEGDHRGRPQMGNKGEAAAAMGAMGINDAGNNTAAAAAAQHHLGVGAVRMKKVGGGGGGGGKARRKVREPRFCFKTMSDVDVLDDGYKWRKYGQKVVKNTQHPR

SEQ ID NO: 18053 - protein, 201 aa, Oryza sativa
  Clone ID: TF_OSC29698j.C1.p1.np
PPPWVVGLNNVDLLHARRCQATTTVAFPFQIPTATLYHHHHNGFIGYSHLVPVFHHGPAAQASWHEPSPPTVRRHNGGGFHAAAHLQRWSPPHPWSCEEGDHRGRPQMGNKGEAAAAMGAMGINDAGNNTSAAAAAQHHLGVGAVRMKKVGGGGGGGGKARRKVREPRFCFKTMSDVDVLDDGYKWRKYGQKVVKNTQHPR

SEQ ID NO: 18054 - protein, 406 aa, Oryza sativa
  Clone ID: TF_OSC401719j.C1.p53.fg
MQESREYWRDGGDVVGEELLREILDETAAVHSNSNSNSNSNSNSKEAEEEDEREYFAAAAADEQLQVEAPCGRRRRESMVNKLISTVYSGPTISDIESALSFTAAGDHQLLADGHNFAASSCSPVVFSPEKTLSKTMENKYTLKMKSCGNNGGLADDGYKWRKYGQKSIKNSPNPRSYYRCTNPRCNAKKQVERAVDEPDTLIVTYEGLHLHYTYSHFLHSTSSSSSSTTTQQQLQPQPQMMTNCKKKPKLHLHPLLHDDPPPPPPPPEMTTMMIMQSFSIQQQQHDDDQLLQPAADDHLMVQAPPDDCYNINGSSSSGLMMSLDDDEQAAGAGGLLEDVVPLLVRRPPPPICNNNNYYYSPATTCTSDNEYGSSASASPSSSVSVSSWTTPMSPCIDMAILSNIF

SEQ ID NO: 18055 - protein, 276 aa, Oryza sativa
  Clone ID: TF_OSC875j.C1.p1.fg
MSHQQALAQVTAEAVHSPYSMINQSDFSLPFSSTTTSVLASQHVNSSANVSSPREIPTLPSHTDNSTIESTEVSHGFQTTALTEDKPADDGYNWRKYGQKAVKGGEYPRSYYKCTHLSCPVKKKVERSSDGQITQILYRGQHNHQRPPKRRSKDGGALLNEADVSPEKEDASTRSEQGSQDYSGKFKASNDGGPSSSRRGDRGEQISGSSDSNSSSVPEEVKVEGRATSDGNANKRHVPAPAQRIIVQTTSEVDLLDDGYRWRKYGQKVVKGNPHP

SEQ ID NO: 18056 - protein, 363 aa, Oryza sativa
  Clone ID: TF_OSC419704j.C1.p3.fg
MAAVESSKKLVAILSKSGDPFRLMAAVAETDEAVSRFGKVVTILSNRVGHARARLGKRRSSPPVDPGCLMDHPLAAAASSPAPSNGRLHFSSSAATASPSPATAAAASSAANVTPAVVDRSLFLETTLLDLNSRGAPAPAASMAAAAKNSSKLAPAPMVNSSSSANHIQFQQPMKSFQFEQTPISDKFHIEMPRGVGGGGGKEVISFSFDNSVCTSSAATSFFTSISSQLISMSDAATNSAAAAAAPTTKKPSSCARKATADDDAGGKCHCPKKKSVSISPPFLGHFCHDLDRVLASDFFAGNPGRRRGYYRCSSKKDCPARKHVERCRSDPAMLLVTYENEHNHAQPLDLSVVQQATANPQT

SEQ ID NO: 18057 - protein, 223 aa, Oryza sativa
  Clone ID: TF_OSC31212j.C1.p2.gm
TQQSSGNSVVVKNLDDGQAWRKYGQKEIQNSKHPKAYFRCTHKYDQLCTAQRQVQRCDDDPASYRVTYIGEHTCRDPATAPIIAAHVIHQVAAGDNDDGCGGLQAGSRLISFVAAPAAPVDAAAAPTTSTITTVTAPGPLLQPLKVEGGVGSSDQEEVLSSLTPGSSAARGGGGGGGVAGPFGPDQGDVTSSLHWSYDAVAGMEFFKNDEVVFDLDDIMGLSF

SEQ ID NO: 18058 - protein, 340 aa, Oryza sativa
  Clone ID: TF_OSC900009j.C1.p3.fg
MSPAPAPAYAQVMEDMEKGKELAAQLQGLLRDSPEAGRFVDQILHTFSRAMRALDKAAVSAAGGEGSEVQSEVTCGGGASAGGKRKAPAADRKANCRRSLGVFEKGIEEIGKIRKTRTQQSSGNSVVVKNLDDGQAWRKYGQKEIQNSKHPKAYFRCTHKYDQLCTAQRQVQRCDDDPASYRVTYIGEHTCRDPATAPIIAAHVIHQVAAGDNDDGCGGLQAGSRLISFVAAPAAPVDAAAAPTTSTITTVTAPGPLLQPLKVEGGVGSSDQEEVLSSLTPGSSAARGGGGGGGVAGPFGPDQGDVTSSLHWSYDAVAGMEFFKNDEVVFDLDDIMGLSF

SEQ ID NO: 18059 - protein, 419 aa, Oryza sativa
  Clone ID: TF_OSC413551j.C1.p2.fg
MSGGGGGGEGFPFHDELASLFAERPPNGAMPGMLQQQQPWSFIDYHHHLMQESAPTTPPLDYEAFAGEFDDDVAPLEEVKRELVVDGVGLFPGGGASAAAAAAAVAGPMTPNSMSVSSTSSEACGVGGGAGGDEESAGKCKKEEEGDGGDDDGKEGSSTTKGDGDGEDKNKKGGKGKGKGEKRPRQPRFAFMTKSEVDHLEDGYRWRKYGQKAVKNSPFPRSYYRCTTQKCPVKKRVERSYQDAAVVITTYEGKHTHPIPATLRGTAHLLGAAAAAHHHGGLQYHHPGHFAAAVGHRLPPQPHDALGGGLLAPPHAQHLHAMQHQMQLAAAAAASGGSLHAAAMQQMPQPDHAGLVAIIASTTGASTTPPPPPATGSAAAATTPLRMQHFMAQDYGLLQDMFIPSPFLHNDDANNNNHR

SEQ ID NO: 18060 - protein, 279 aa, Oryza sativa
  Clone ID: TF_OSC900417j.C1.p3.fg
MEENARLTRALDAILAGHHAHQRALLAPSLSPPPPSATARAPSVSTSCAAREDAAPAVAAAAASTACPSRQQPPTAEPRPKVRTVRVRADAADATDANSMAETVKDGYQWRKYGQKVTRDNPYPRAYFRCAFAPSCPVKKKLQRCAEDRSMLVATYEGEHNHALSTQTTEFVASGCTTSQHAGGSSSSPLPCSISINSSGRTITLDLTNQAGSGSIASCGVEAAAVSGELVTVLSPELRRHLVEEVVQVLKNDAEFVEAVTNAVAARVVDQIPHIPVHL

SEQ ID NO: 18061 - protein, 618 aa, Oryza sativa
  Clone ID: TF_OSC400135j.C1.p2.fg
MADSPNPSSGDHPAGVGGSPEKQPPVDRRVAALAAGAAGAGARYKAMSPARLPISREPCLTIPAGFSPSALLESPVLLTNFKVEPSPTTGTLSMAAIMNKSANPDILPSPRDKTSGSTHEDGGSRDFEFKPHLNSSSQSTASAINDPKKHETSMKNESLNTALSSDDMMIDNIPLCSRESTLAVNISSAPSQLVGMVGLTDSSPAEVGTSELHQMNSSGNAMQESQPESVAEKSAEDGYNWRKYGQKHVKGSENPRSYYKCTHPNCDVKKLLERSLDGQITEVVYKGRHNHPKPQPNRRLSAGAVPPIQGEERYDGVATTDDKSSNVLSILGNAVHTAGMIEPVPGSASDDDNDAGGGRPYPGDDAVEDDDLESKRRKMESAAIDAALMGKPNREPRVVVQTVSEVDILDDGYRWRKYGQKVVKGNPNPRSYYKCTNTGCPVRKHVERASHDPKSVITTYEGKHNHEVPASRNASHEMSTPPMKPVVHPINSNMQGLGGMMRACEPRTFPNQYSQAAESDTISLDLGVGISPNHSDATNQLQSSVSDQMQYQMQPMGSVYSNMGLPAMAMPTMAGNAASNIYGSREEKPSEGFTFKATPMDHSANLCYSTAGNLVMGP

SEQ ID NO: 18062 - protein, 280 aa, Oryza sativa
  Clone ID: TF_OSC404459j.C1.p1.fg
MAMLGSSSAVVLELMTMGYQSAAYLGELLRAASPAQAGDEQQELAAEILRCCDRVIAKLNRGGATGATTGKKRKAAESAAAAAVTSPSLPVTPTKRRARGAEAVREVRSGTTTDGFIWRKYGQKEINGCKHPRLYYRCAFRGQGCLATRRVQQSQSQDDPAAAFVIAYYGEHTCGGDAAAAAACRDGELMPPAVINSGASSFAAAWNMASREPASSLAVERRSCDGDAPSETSQGWSPSFSSEVELDVVGFDLAGADSSASPVWEFLNGSFDWEFVINSL

SEQ ID NO: 18063 - protein, 314 aa, Oryza sativa
  Clone ID: TF_OSC400284j.C1.p48.fg
MAGAEWSPFDGDAAFAEYSSAVLAELGGWAAPGEEGGAGMMVPAALDLPVDVVGAAAREEEEEEEEAPARSGDGAAAAASSSSSGEPAAPDKRPAAAEAAPAAAATATATAKKGQKRARQPRFAFMTKSEIDHLEDGYRWRKYGQKAVKNSPFPRSYYRCTNSKCTVKKRVERSSDDPSVVITTYEGQHCHHTASFQRGVGGAAVAAHIHGAAAVALAEQMSAFVSPPPQPHMLYGLPRLHPPSSETAVSCSMPTTTSLQELNNSEGLQRPGYNNSPQAAVTIAQRPPSPSVPPAVSFDKGLLDDIVPPGVRLG

SEQ ID NO: 18064 - protein, 538 aa, Oryza sativa
  Clone ID: TF_OSC414373j.C1.p24.fg
MERPAPEAAAAAAEPPGAKAEEEEEGPKDVGVKGTGKEKETEKVEAEKEMEGKGKGKESMEVEEGKEKEGKGKAKEKEKETKVKVKEEGGEEKEKGKVEVVEAKRRPAGVGAETPILAVPMVAVPCFLASPAFAGHFSMSHQAALASVTAQAQIQLQSPTTPYSEGLPSPFPITPKAVMPLQRSPSGTEGSVRRSVLEKSASFQSRPHNHVSVNMVGDGFNWRKYGQKQVKSSENSRSYYRCTNSNCLAKKKVEHCPDGRVVEIIYRGTHNHEPPQKTRFVKERVAHITASSGDDETLGLVNNEIIESPSPGCKLEPGAVSEASEQQLFCSSDCEGDAGNKSEDDHPSTEPQPKRRIIETSTPLTPVLRTVREQKIIVQAGKTSDGYRWRKYGQKIVKGNPNPRSYYRCTHDGCPVRKHVEKAPDDDNNIVVTYEGKHNHDQPFRNNSESKDGPVPMIIPAETTSEQPSTMTSTSEQKQPISLLKDGGDEPMKGKTSEIGGEKAVESAQTLISIKTNPDDMKNTLLKDTSAVVPVQNN

SEQ ID NO: 18065 - protein, 183 aa, Oryza sativa
  Clone ID: TF_OSC18795j.C1.p1.fg
MESMEGNGGGRLVVTELSHIKELVRQLEGHLGGSGSPDLCKHLASQIFSVTERSIGMIRSGHFDGHRKRSAAAVAAGDLDSATPSPLSDVSDLPFKATKKRKTSTEKKRHQIRVSSTGGVENPPVDDGHSWRKYGQKEILGAKHPRGYYRCTHRHSQGCMATKQVQRTDEDATVFDVIYHGEH

SEQ ID NO: 18066 - protein, 260 aa, Oryza sativa
  Clone ID: TF_OSC401926j.C1.p17.fg
MTYLEFLQKNQWGQEASVGADGVQVDDVCAGSLGGHATAGVWPGRWREIGGRACAWTAAEGLENGGQESRADGSSRRIILELGDRDDSYPWRKYGQKDILGARFARSYYRCAQMLGCTARKQVQQSDDDPSRLEITYIGLHTCGGDRPSSPAPTNPADGPRCDAATSSHRLLPSALQQKLEEHVPAASDDMMMACTPSWLFIPSPACSQSELLSEGEVPELRVVRQEPYDPVELVEEHKKPSDADEDSLALHNSVVPDFM

SEQ ID NO: 18067 - protein, 631 aa, Oryza sativa
  Clone ID: TF_OSC27462j.C1.p1.fg
MSSFLNEEFSSGPFSDIFCDNGSNKHQDGLGKSKAFIDSSREETAQLAKKFESNLFGANQKSSSNGCLSERMAARTGFGVLKIDTSRVGYSTPIRSPVTIPPGVSPRELLESPVFLPNAIAQPSPTTGKLPFLMHSNVKPSIPKKTEDETRHDRVFFFQPILGSKPPTCPVAEKGFSVNHQNQPSVTDNHQELSLQPISTASNDFTSPTIVKPKTSDSMLDNDDHPSPANDQEENASHKNEEYSSDLIITPAEDGYNWRKYGQMRVRTVERSQDGQITEIVYKGSHNHPLPPSNRRPNVPFSHFNDLRDDHSEKFGSKSGQATATSWENAANGHLQDVGSEVLTKLSASLTTTEHAEKSVMDKQEAVDISSTLSNEEDDRVTHRAPLSLGFDANDDYVEHKRRKMDVYAATSTSTNAIDIGAVASRAIREPRVVVQTTSEVDILDDGYRWRKYGQKVVKGNPNPRSYYKCTHPGCSVRKHVERSSHDLKSVITTYEGKHNHEVPAARNSGHPSSGSAAAPQATNGLLHRRPEPAQGGGGGSLAQFGYGSAGHRPAEQFGAAAAGFSFGMLPRSIATPAPSPAIAVPAMQGYPGLVLPRGEMKVNLLPQSGNAGAAASQQLMGRLPKQHPQM

SEQ ID NO: 18068 - protein, 310 aa, Oryza sativa
  Clone ID: TF_OSC10036j.C1.p3.fg
MNTFTLFRDEVQKASEKVHRHHANDDEAGLFLSLGLSLGSSPDACQCHASKKDEADAGNGGGDGYLALALRCAPAAGEPMVHPKRQRATTNSSSSSSICGEYGGGAAAAAVPAGHDDDDRSCMITAASTANRPGRVVLRTRCSAPTVKDGCQWRKYGQKTAKGNPWPRGYYRCTGAPGCPVKKQVQRCNHDTSVLVTTYDGVHNHPITPYAAALPPSSSSSSSAAVAMLASSSSSSTWSELQRAMPAAQSSWSQRNYPIQADVVAKAIWDPKFQATVAAAVASYVRDREQSARVAGGKGAGELFNLAPPC

SEQ ID NO: 18069 - protein, 386 aa, Oryza sativa
  Clone ID: TF_OSC30380j.C1.p1.fg
MDGDAWWYPGGGGGGGSNNWDLGAVVRFGCGGGRVSPAAALLGEAWEYDDDPFSSFLAPPMTAQQAALPAVWEEGDDGDAAWMAPLPGLQTGGGWGDQAPMVVDELCGALVVAPPPPPKQQEVLQVQQQPPPADNTQPTTYQQGSGGDGESTRAGGSRSARRKYAASAIYIVSVCFSDSCIMWIRSLADDRGVRHACRKKQTRKEVVRVAASGPAPDLWAWRKYGQKPIKGSPYPRGYYRCSSNKNCAARKQVERCRFDPSFLLLTYTGAHSGHDVPLHRNSLAGTTRHKPPPPPPLPSAADKSPATAAEAATASQSPGLSPTTPLRASSMELHGEDDAEAELQVEEDDMAIDDEDDDDVADETISTVPWGTPISDAIIAASYEWR

SEQ ID NO: 18070 - protein, 199 aa, Oryza sativa
  unsure (1)..(199): unsure at all Xaa locations
  Clone ID: TF_OSC30380j.C1.p1.np
YLSLSSKILSSKSAPXLVSPRRRDGRRRMVVRVAASGPAPDLWAWRKYGQKPIKGSPYPRGYYRCSSNKNCAARKQVERCRFDPSFLLLTYTGAHSGHDVPLHRNSLAGTTRHKPPPPPPLPSAADKSPATAAEAATASQSPGLSPTTPLRASSMELHGEDDAEAELQVEEDDMAIDDEDDDDVADETISTFIISXISV

SEQ ID NO: 18071 - protein, 87 aa, Oryza sativa
  Clone ID: TF_OSC8596j.C1.p2.np
NSLSYDGYSWRKYGQKQVKGSEFPRSYYKCTHPTCPVKRKVEMTPDGRIAEIVYNGEHNHPKPHPPRKPTLSTSYNLPDICDDGIGL

SEQ ID NO: 18072 - protein, 304 aa, Oryza sativa
  Clone ID: TF_OSC400222j.C1.p48.fg
MSGGGGREQMKGGEDVAAADCPGSPVSPSPAAAQRSAAGAAASPSGRSRRSAQKRVVTVPLADVTGPRPKGVGEGNTPTDSWAWRKYGQKPIKGSPFPRAYYRCSSSKGCPARKQVERSRNDPDTVIVTYSFEHNHSATVPRAQNRQAAPQKPKAQACSPPEPVVEVEPEETHQYGVTAGPATGGGGGAAAIEVRDEFRWLYDVVSVPATSTSPSDIDAADEMQLYDQPMFFGGAVVGTAALLPDEFGDVGGLGGEGLGEEEALFEGLGELPECAMVFRRRAGDGLEMGGGVKIEQPAESTAMT

SEQ ID NO: 18073 - protein, 323 aa, Oryza sativa
  Clone ID: TF_OSC30411j.C1.p3.fg
MDLMGGYGRVDEQVAIQEAAAAGLRGMEHLILQLSQTGTSERSPAPAQEQQQQVDCREITDMTVSKFKKVISMLNRTGHARFRRGPVVAQSSGPAASEPAPVRSSPSAVSRPMTLDFTKAASGYGKDAGFSVSGISAASSSFLSSVTGDGSVSNGRGGGSSSLMLPPPPATSCGKPPLSSAAAAMSAGAGHKRKCHDHAHSENVAGGKYGSTGGRCHCSKRRKHRVKRTIRVPAISSKVADIPADDFSWRKYGQKPIKGSPFPRGYYKCSTLRGCPARKHVERDPTDPSMLIVTYEGEHRHSPSAAGQDHPPAPPPPLALPLA

SEQ ID NO: 18074 - protein, 333 aa, Oryza sativa
  Clone ID: TF_OSC400188j.C1.p7.fg
MASPDGGVGDGGAEPHEVMDDLLEMREQAAMLHSMLHGTSPSSCAAAASTRQLNQLIDGVMSRLQSSSLSVMSPGGGGGRRGSGGRKKKGAKAVAGPHRRSSSGRRRSKSPFVRMVTTKELEDGRQWRKYGQKHIQDSPNNPRSYYRCTHRPDQGCMATKQVQTSESNSSEFVISYYGEHTCSDPSTIPFVVEAEAPAADYANLISFGSSGGASTSRVDPLRQSRHRLMAEAVDPTPSCSFANCHSPVLSSECASEAAALSSSLPLSAVVGSAVTTPSTSIVGSAPADYDWPSGLAGGDMAGSFPSSPSSLGFMTGSFGNLPGDDDDMFGFDP

SEQ ID NO: 18075 - protein, 379 aa, Oryza sativa
  Clone ID: TF_OSC401122j.C1.p38.fg
MSSGGGGGGGGDRHGPYHQHGHLGRGEGADYVYSSSDMESFFFSQPGGVGIGGGGGGVVGAGGADEIMPYSSITDYLQGLLDPSGLARHLDVACPSSQDTVVKQELSVDVTSHDSQGTGGVAGEGVAQATPNSSASFSSSDGEAEGGKSSRRCKKGQAKAEEEDDKDEEDGENSKKPNKPKKKAEKRQRQPRVAFLTKSEVDHLEDGYRWRKYGQKAVKNSPYPRSYYRCTTPKCGVKKRVERSYQDPSTVITTYEGQHTHHSPASLRGGGGGVGIVGGHHHHHLFMPGVHGLPPSHLMPAGFHPELMGLMHHHPAMAAAAANPSMYFPGVAASAPPPPAVAGGGAMPPNDHPPLQQHHFTDYALLQDLFPSTMPSSNP

SEQ ID NO: 18076 - protein, 372 aa, Oryza sativa
  Clone ID: TF_OSC100778j.C1.p10.fg
MAPNPVGHAPLCCRLVQGNFETFPQQDLVPLTAQEVHSKCITFGRAENLPFIPLATSALVSQHTGSSSVNVTPLQEILTSPSQISNVNTESIGVLQGLPASSIVLDRPTDDGYNWRKYGQKAVKGGEYPKSYYKCTHLNCLVRKNVEHSADGRIVQIIYRGQHTHERPSKRRFKDCGGISDDLDDFSGTTGTSVRSQPDYDDYCRKPIIPSGTMVAPLVKKIEDGDDQLSGSSDNQDEHDDEVRTSDGASGDASANERNVPAPGQKIIVSTTSEIDLLDDGYRWRKYGQKVVKGNPYPRSYYKCTYLGCDVKKQVERSVEEPNAVITTYEGKHIHDVPAARNKSHVVANASLLQNTKSNTYCTEQSYTTITC

SEQ ID NO: 18077 - protein, 185 aa, Oryza sativa
  Clone ID: TF_OSC15307j.C1.p1.fg
SYYKCTSSRCSAKKHVEKSTDDPEMLIVTYEGSHHHGPQPLFPPHIAQPPPPTSVVGFSAASGAGPPPSSPAAAARKRKNYVRAAFSPTTSEDDGDGAGRLRPEWPQDDGTSCDVAELRRRGDAEHAAPRRVATDRSCDDGGGGGSTSASSSVARADAATALSSDSPPTIWSCLDWPWSQETLFL

SEQ ID NO: 18078 - protein, 167 aa, Oryza sativa
  Clone ID: TF_OSC5799j.C1.p1.gm
PYLMGDVLRAQATASAEEVAGGVWPCELDDHLIGELLGDDGLFVPAAEHPTLYYSFGAGSSAAAAAAPCNGGGSADHERRPRPAPAVSRDLCSVYSGPTIRDIEKALSSSASPRPPYPSGRRYSSLYLVEAESKYTSKVRSCGGKMPADGYKWRKYGQKSIKNNPHP

SEQ ID NO: 18079 - protein, 203 aa, Oryza sativa
  Clone ID: TF_OSC5800j.C1.p2.fg
MEEDDGLALMTGANQSLWSYYKCTSSRCSAKKHVEKSTDDPEMLIVTYEGSHHHGPQPLFPPHIAQPPPPTSVVGFSAASGAGPPPSSPAAAARKRKNYVRAAFSPTTSEDDGDGAGRLRPEWPQDDGTSCDVAELRRRGDAEHAAPRRVATDRSCDDGGGGGSTSASSSVARADAATALSSDSPPTIWSCLDWPWSQETLFL

SEQ ID NO: 18080 - protein, 572 aa, Oryza sativa
  Clone ID: TF_OSC401547j.C1.p14.gm
MENNQSGQAQDGMADQRFRSWLTEQLNMQQQNAGCSSNPAPAVMQMPALPSHTDYGGIYPNPTEYDGYNWRMCGQKLVQGGCHQKFYYECSQANCGAEKSVTRSADGQIKKTVWVIRPSVAMPRNEEEDGLQSGSSDSGDDDASEARAADMFLQLQLKIPPRITQLTLMFWVTALSSVRIITEVVEKFKVQNVNIVKNASVEKLQEEQAICADISRYVLHNLERLDCSKKVPSSANFRQFLVAICPDYNMVPQAAFEEKFLSFFHNEKMKLKEKIELTPGGVFLSVTKQYVEFKTFVCITVHFIDNEWKMNRKIISYGYGGYPDGADYYVDPRFKLRYLEQCFTQVSSSGCAKLFVLEVRAKIYELFLQYSCNVDWQTGELLNHRSNDLQMDRHGNDSLHGTDKNDIEQGSNGEFRELTSYIEGELYPQNDQFDILKWWKDNASTYPTLARLARDILAIPGSAVSAEYAFNKTGERAAGVIRPSVAMPMNEEEDELQSGLGDSEEDDANEARVDGDDMVQLKISPLKLQLRLMLRVTAVSNVRIIAEGFLAWEGMFRVSIGFYPELDVEEDL

SEQ ID NO: 18081 - protein, 502 aa, Oryza sativa
  Clone ID: TF_OSC101573j.C1.p8.fg
MEMMVQKQRHEEGEEERGGLCAREIKELDFFSAAGAGAGRRDDDDVLRADGISSSHAGFMVSTALDLLTAVNDGDHHEEKKGQSNIHQSKQMDAAATTVEGELRQAGEENRRLRRRLEELTSSYGALYHQLVQAQQLHTKHQQQAPIAGVQLLDALAAASPASHRRRAAAAVDGDRTADSDGGEGDENVSPSLGSKRPAAAATLTRLTPESGSGGENNGGGEQAPAAEMAPCRKARVSVRARSEAPMISDGCQWRKYGQKMAKGNPCPRAYYRCTMASQCPVRKQVQRCAKDKSILITTYEGTHSHPLPPAAAAMAKTTSAAAAMLLSGPAVSRDALFAAHHHVVAPPPFFHHPYAGSTMATLSASAPFPTITLDLTQPPPTTTTTAAAAMLQLHRPYAFSSLPFSMYGAGGGSHRPPVVLPPPSSVVETMTAAITRDPNFTTAVAAALSSIMAGGGAQARTPPRGGSDAAGDINGGGGADHATAGARAAAAATQPCGTSPT

SEQ ID NO: 18082 - protein, 650 aa, Oryza sativa
  Clone ID: TF_OSC400603j.C1.p12.fg
MSSFLNEEFSSGPFSDIFCDNGSNKHQDGLGKSKAFIDSSREETAQLAKKFESNLFGANQKSSSNGCLSERMAARTGFGVLKIDTSRVGYSTPIRSPVTIPPGVSPRELLESPVFLPNAIAQPSPTTGKLPFLMHSNVKPSIPKKTEDETRHDRVFFFQPILGSKPPTCPVAEKGFSVNHQNQPSVTDNHQELSLQSSSTAAKDFTSATIVKPKTSDSMLDNDDHPSPANDQEENATNKNEEYSSDLIITPAEDGYNWRKYGQKQVKNSEHPRSYYKCTFTNCAVKKVERSQDGQITEIVYKGSHNHPLPPSNRRPNVPFSHFNDLRDDHSEKFGSKSGQATATSWENAANGHLQDVGSEVLTKLSASLTTTEHAEKSVMDKQEAVDISSTLSNEEDDRVTHRAPLSLGFDANDDYVEHKRRKMDVYAATSTSTNAIDIGAVASRAIREPRVVVQTTSEVDILDDGYRWRKYGQKVVKGNPNPRSYYKCTHPGCSVRKHVERSSHDLKSVITTYEGKHNHEVPAARNSGHPSSGSAAAPQATNGLLHRRPEPAQGGGGGSLAQFGYGSAGHRPAEQFGAAAAGFSFGMLPRSIATPAPSPAIAVPAMQGYPGLVLPRGEMKVNLLPQSGNAGAAASQQLMGRLPKQHPQM

SEQ ID NO: 18083 - protein, 358 aa, Oryza sativa
  Clone ID: TF_OSC464j.C1.p1.fg
MALIATGATATATAAPVASPAASSMASELMAQGRESAAVLEALLHGASLPPAHGGAHALAAEILRCCDRALAALRAGGDAESSSADTKRKPATAQPSTRRRRRYIYMYVSSRSCDGARDRAATQQEIFCRATASGGGAAAAAEPARVEKARTSEDGFLWRKYGQKEIKNSKHPRLYYRCSYKDDHGCTATKQVQQSEEDPSLYVITYFGDHTCSCQTAAAAAMDDDDDDENSQHFVINFGPATASRSGSPPLLYDDGDDGDVWRETAATPPSSRQSRCSPEGDGEESGVKMSKEEPVDSCPGPSAVSSPADVVSCSSPAMEPDLLGCLNWDDDFGDSSFVDADEFMNFDEIDLFQIYS

SEQ ID NO: 18084 - protein, 439 aa, Oryza sativa
  Clone ID: TF_OSC400284j.C1.p39.fg
MADRRRSDGGGGMQQQPFTSPGQERVFDGGGVPGQVAAPYGSDFDQSSYMALLAAGAVGVGVGVQPTAAPWAVEEDVAAAPPGISLAPQFSMANYAPPPSYQHPATLVSPPLAAGLHPYPPYLHGVDAPPPQWPPRPAPPPSFSVLDLAAAAAPHEQRHSMQQLLLRAAAFGGGMHAAAAPAPAAAAAIEQPAKDGYNWRKYGQKQLKDAESPRSYYKCTRDGCPVKKIVERSSDGCIKEITYKGRHSHPRPVEPRRGGAASSSSSAMAAGTDHNAGAAADDAAAADEDDPSDDDDTLLHEDDDDGEEGHDRGVDGEVGQRVVRKPKIILQTRSEVDLLDDGYRWRKYGQKVVKGNPRPRSYYKCTADGCNVRKQIERASADPKCVLTTYTGRHNHDPPGRPPAAANLQMPGPAAMRLAGGGTAHQQPSGGAHQMKEET

SEQ ID NO: 18085 - protein, 814 aa, Oryza sativa
  Clone ID: TF_OSC401547j.C1.p17.fg
MADQGFRPFSALMSAPSTAQQHVGSSFSTAVVQVAAAQQSHTDHGNICLADDDGYYWRMTGQSTTQGESSPTILSHYQCAQANCVVQKTVAYTADVETFYRGRHNHLRQSDRLEPMSQVGVLVEASDAAGAAAGPSVPETENGDDQSSGSSDRNEDDAGDVEMDEDAAAGDPNAMQRRKLKSKVWKEFKLVFKDGKLHTAICNHCKLRLVAETRNGTSHLRRHLKICPEKAGTSRVQKKRRSSTSQSQPDLPVSENLENGQENPSQNLENGQENPLEEFMRATVLKLCPFPAMYRASFASFLAGRNPAPNMVPQTTVEDKFISVYEKEKLKLKEKIIATPGGVFLSVNKWYSGSYETGIVCLTVHFIDEEWKINRKTIRCCLSESDGLDLNLFPHWQSEIANYEDDDKMVLKKVVRDWCLEPKLLGVTLEGSVDKKATISLEDDLTTGKNYLVAKCKLLTIPCMVDGLDDLMQYTVGREVRSMWSRYMTNTPERKLKCQEVVSQLQLDRPSFGSKYRYLTFYWCEAALQFIKSFPLSNGSERPSLDDLEATENFCKIARAIYHATKAFYEPYNLTFNSYFHVIWSLRATLQELPRIKNIERVIKVKNMQEKFDNHWKKWYLWLSIAVVLDPRYKLAFIELRFREAFSQDAGTYISEVRAKFYELYIQYSHVNEQSNEILNQGNNGSGTQISAPLHKQRTNYTIAQAALEEFKELFEYLGGGLCPQNDSFDILKWWKDNSAAYPSLAKMARDILAIPGCAVSAESAFNDDSDHRAELFNGKLGPETTEALICAQSWIIKSSGTADADNGNNITLS

SEQ ID NO: 18086 - protein, 552 aa, Oryza sativa
  Clone ID: TF_OSC401772j.C1.p3.fg
MEEELCGNNWDLDAVVRLGCCRRRISPAAVAQQVDPFASFLQQGVAMEVAAEKEVGVEAAWSFPELTVRDGGGGGLGRDADELLKAFCAAFPSSSSSKSSPLPTPPPPPPTQPQPEQQKPVTVQENLPAPTTAPARASQPAAARQVPAGGVPRSKRRKNQQKKVVRHVPADGVSADVWAWRKYGQKPIKGSPYPRGYYRCSSSKGCPARKQVERSRSDPNTFILTYTGEHNHSAPTHRNSLAGTTRNKLPSSSAASAASAQPQPPPPSVVVVGAGGGGAEAAGLSPTTPLRTPSMEEDEEEEEEEELLVEDMEMAGEDELLFLNGGDDNAALDGTPIRGALLFLALPFSVQQPNLSACSSLGMFDWDLNSHHSSLFLHPQLLMVGDDGGIADVASLGDGNAITTEDDGGGADPVRGDGGGGGCSDAVRGGGSGSNVARGGGGCAVAASGGNDCTVVAYVGVGGVSLGGWIWDPSSSLSPGSGIHAGCAIRVELKLLRFNGELRGEVWLSPFLWRRPKGINGSSSGLHAKGDPRLQLSWLCRCSLSIRAFCTV

SEQ ID NO: 18087 - protein, 514 aa, Oryza sativa
  Clone ID: TF_OSC16302j.C1.p3.fg
MPPCVWGSHTPLSLLSPPAAWAGERMEGDQAGGDLTDIVRAGGGAMPGSVVVDLPSTAAEWQLPAEPMLFPPPPSLSSTTDGCGAGGAAGADIFGGGGGDLFSGLVDPFSSDYSSGADFLDAMPDAMAKVGFDTAVGGGCGGGGGGGGGSGGHLLDMSRKPLLPRGMPMAAVGGLAAPRVMPSPLSPRAIRPYPPISAGDMMKLGITAGQAAGCAIDAAVAGMQMSSPRSGGIKRRKNQARKVVCIPAPTAAGGRPSGEVVPSDLWAWRKYGQKPIKGSPYPRGYYRCSSSKGCSARKQVERSRTDPNMLVITYTSEHNHPWPTQRNALAGSTRSHHSKNSGGGGGSGSKGSQNDKSQQQPSVKEEQKDQATTATTTTTSTITTTNSASPVVVKEEEAALAGSSEALELERVMDTTAAGVVDHSELMDHVFSESYKPMIPETGQPDDFFADLAELESDPMSLIFSKEYMEAKPSGGDHAQEKAMAKELDPFDMLDWSTTTNSSAGSSFEQGKRG

SEQ ID NO: 18088 - protein, 259 aa, Oryza sativa
  Clone ID: TF_OSC409885j.C1.p4.np
YTVILRILPYNIEFKRRKNQARKVVCIPAPAAAGGRTSGEVVPSDLWAWRKYGQKPIKGSPYPRGYYRCSSSKGCSARKQVERSRTDPNMLVITYTSEHNHPWPTQRNALAGSTRSHHAKNSSSNSSSSGASSASKTTPPTAVTTTTTTRSHSSRRNPTINPPPPPAATVPVKEEAAMEHSDEHSDLMQQMFSQSYRPMIPEAAAGGHHDDFFADLAELESDPMSLIFSKDGGHAGNERRRATRETFVFFTSADAGQGT

SEQ ID NO: 18089 - protein, 624 aa, Oryza sativa
  Clone ID: TF_OSC18107j.C1.p12.fg
MIKGDSKQLASMYMKEEMIKGERQLGTHEDRLKDEVIKDGDKISDGNFFKSLQNISSTKEEVCSPGPIERSCMDSSLLNMKAQNKGQDDKLESTRAEMGEVREENERLKTLLSRISHDYRSLQTHFYDVLQQGRAKKLPDSPATDIEEPELVSLRLGTSTSKCKKEDKSTTSSEVKGSTEDFLKIKGGLSLGLSDCRVDANNSEKVQPDVMTLSPEGSFEDARDDTAETTEQWPPSKMLKNLRSVGAEAEDDIAPQPQVKKARVSVRARCDAPTMNDGCQWRKYGQKIAKGNPCPRAYYRCTVAAGCPVRKQVQRCADDMSILITTYEGTHNHPLSVSATAMASTTSAAASMLISGSSSTSLAAYPAAAASPALAFDASSKPPLIGGRPFFLPTAAAAAITSTPSYPTITLDLTSPAAAATSSHAAFSLSNRFSHTRYPSTGFTFSGSGPSSAPWPGYLSYGASLSAHPYNAGGGKSSSSFEAALSSINGSRQQGGGGGGGSAPPLYQMQQKAAAAAPPPPSVITDTIAKAITADPSFHTALAAAITSYVGKKGSPPASGGEDSKVGLKWGEHLGLGLTHSSLSTAAAAAASSSSQMFLQPSLGLSGSTTSASTSPVANREQAH

SEQ ID NO: 18090 - protein, 299 aa, Oryza sativa
  Clone ID: TF_OSC400831j.C1.p20.fg
MCDSLFWQSSADQGDLSDVVRASLQLQTAPRHQAASPPYVHLLGGGGGGGEDQLAAVSQHAEQQQQSMVDASAACDLLHALLPPPPVVQVQQQGASRTRTTIEEDTTGDGEELFAGAHYVVPPIKRRKSQTKKVVCIPAGASGGGGGEVVPSDLWAWRKYGQKPIKGSPYPRGYYRCSSSKGCSARKQVERSRADPTMLVVTYTSDHNHPWPTHRNALAGSTRPSSSNSSNIRLQDSTPVHHQSQTGHDRLTTTHLKQEDVIISPSLLQPDHHQLCTIIDTKHHLLFHQDYPHSFGLFD

SEQ ID NO: 18091 - protein, 142 aa, Oryza sativa
  Clone ID: TF_OSC900386j.C1.p14.fg
MNNRGAGGGRGQGDDEEPTPTPPPAPPPETAPSTVGGGGDGVQLVMPEDGYEWKKYGQKFIKNIQKNRSYFRCRDQRCGAKKKVEWHPHDPGLNLRVVYDGAHHHGSPSSAAGEGGTSAAAAANQYDLSTQYFGGAGGPRSQ

SEQ ID NO: 18092 - protein, 265 aa, Oryza sativa
  Clone ID: TF_OSC401716j.C1.p1.fg
MVKRSDNMDSSSECSRGAHKRLLQDSRSYDQENAMKKVCIGTRTEYTYAPYHDGYQWRKYGQKMIRGNSFPRCYYRCTYHQDHGCPASKHVEQHNSEDPPLFRVIYTNEHTCGTSNSASDYMASSMQIQQIADASLRKAQAAERLRKAEVETPRLMHSPPPRCSGGYNMAMKEEKDVIVSSLLTVIRGCHIAESAGNNSAAALPVNRPPPAVARSDHYSCSYAISPELLPASDDLTLDFMLDSVLDPHWVEPLDLAWLKESTHTG

SEQ ID NO: 18093 - protein, 1882 aa, Oryza sativa
  Clone ID: TF_OSC401547j.C1.p22.fg
MDNQSGQPQYGMADHGFRPFSASISAPSTAQQHTGSSSNTAVIQVATPPSHTDYGNIYLADDGYHWRMCGQNTIQGEPCQTIFYYQCAQANCMVQKSVARSADGQTTQTFSMGVHNHPQRGPTPPRSPSVDPPVPFSSPSCSPPRSPVECAERGCASLSPARANPPSEFEHVPPGDPELRVNREICVLPFSAAMREREAQLRRAVVAVVVGAARTPSAAQVHDELCSEFSLSPHSFSVRRFFPEDFLVTFQSDEIFDRVARRRSIPLGQFRLLVAPWSRQLHAREGSMLFRVRLHLEGIPGHAWDEATAAAVLGSSCRIISCDPVSSSASDMAVFKLYAWTSDPASIPKEKWLRIVEDGGPVVTPQGTCERYLDYVVLIHLTAMEDHISPPEPYLPFAPSSGDSGRPSSDDSDDGPPRRHFFHTSRGRRDGSPPPPQSGQGSTGGGGGGGHRAAPVAVMPAELCSGRLLRRAGALAPEKPVRAVAGAEAAMARRRRPRGRRRQQKVLKWKSKFLKLSPVRSCCRWQPRKGQDTSEPVSVAKAKESSALQSLSLGSVVGQEDREFVLPVSAASEADSAVSSRRDMVGLAASPVGLEAQQGGLVLSTVAGPAVESAGSRPEVQSQPSPLAMEEAHHDASTFLQGSVSAHADPFLSVVLAAKPSMAMAAPGESALPPPDSVPDATLGVEAVSAPLVCPEQHLAASSTPLSQVFSPVSALPTASAVVVVAEIGGPFPDEVVPVDEMAASPPAPSTAVFAAAVEEASAPPPTLITFSRRAKKAIPPALLPPPAPQQPPQPAPLQTPRRSVRQALQATHGAPTFSRCQSVLAKKMGEKDTAVPAAPAPTVCTIQQYNELFEKELSQDQMLALADLFGICLPPPASAVETKLDAISVPLATQFLGPNLADFCYLPSIQTRGGVLLAWDRSVVSCDSHSLGEFSLTARLSFCDGNSCWITVVYGPQPDADKVRFLQELRDTRSTRDGPWMVVGDFNLIYQDQDKNNSNLNRRMMGRFRRAINDLALNELHLNGRSFTWSNGWEHPTLERLDRIFVTSDLEELFPQSFLKALPSVISDHCPLLLSTLPSLPAKGRFRFENFWCKLEGFEEVVQEAWSADCRLQDPISRLDFKLRSTGRALQSWSDKKVGNVKLQLEMARELIGRFDRMEESRGLSGQERFLHRELKRKYLALASLERTMARQRSRISWLREGDANTRFFHQHAAWRRRRNFVQQLEHGSQVATAPDEKAALAHDFFDGVLGSVSHRNFSVNLDFFESRGQHIEELEDPFTEDEVRKAIADSPHDKAPGPDGFSGMFYHRCWVIIKDDPCLVHSFVKLFTKILSRRLSPKLDSLVAKNQSAFIKKRCIQDNFMLVRQSAKYLHDRRTPSVLLKLDIAQAFDSISWQFILEVLEHKGFGVRWRSWIAMLFRTASSRVLINGEPGCPIIHRRGVRQGDPISPMMFILAMDVLSSILAKAENVGLLRPLGIPFRVSLYADDVVAFIRPAVEEIHVATEVLSIFGEASGLRTNFAKCSALPIQCNEADLQILHDELPCQVASFPCTYLGLPLSIFRLKKEDLQPLIDKIGRRLPFWMSHLMTPIGRTTMVKAVLSSIPIYLLMAINAPKWVIKGIDKIRRGFLWAGKATANGGVCRVAWARVCSPIEYGGLGILDLERLGIALRSRWLWQQRTSSDKPWQGLNIPVSQKERNLVSISLVCSVGDGKLVRFWEDCWLQGSSIRSLAPAVYAAVPARFRNRRTVAEALQDRRWIRDICAALGIQAILEYLKLWDILRSIQLGEEPDTISWRWESSGSYSARSAYRLLFAGRTSLEHKPIWKSLAPPRCRYFLWLVALNRCWTADRLRSRGLSHPARCPLCDQCDETIDHLLVACSESR

SEQ ID NO: 18094 - protein, 128 aa, Oryza sativa
  Clone ID: TF_OSC4096j.C1.p6.np
VNLTPIPHTDGHLWRKYGEKKIKNSSFPRLYYRCSYRDDRNCMATKVVQQENDADPPLYRVTYIHPHTCNPSPPAPTPAHVFTEPPPAKAEVHHAVLFSRSVVPLDLSWNYFGAIVFFSFLFVSISPN

SEQ ID NO: 18095 - protein, 225 aa, Oryza sativa
  Clone ID: TF_OSC900242j.C1.p3.fg
MENHKDHTCKIATTTLVIVPLLLSLHQLYLFFLHLLPYACVVSVAEMTKMSSMKADGSVPKRRRQDVQKVVVSLKDHKVEQGPPADSWSWRKYGQKPIKGSPHPRGYYKCSSYRGCPARKQVDKCRNDASLLIITYTSDHNHDNYAATTTNSVQEQAHNPDTSDPLSNGMSLAEVVTVASSKLSGEEESCDFFDELEELPVSASPLPSLSFMVQECSFSDARTLL

SEQ ID NO: 18096 - protein, 310 aa, Oryza sativa
  unsure (1)..(310): unsure at all Xaa locations
  Clone ID: TF_OSC418164j.C1.p6.np
SQPRPPPGPGPGPTPPSWAPPPPRRASRWFAGPTASPSSSTSPAPDTASPASSTRIHVQCQYLLTXQKSTSGKLFDIIRTCXQXQQLAXRELTFPKFKVSDHTGFHLAATXRQRSLMFTSYRXKRGGILNINCGKEPNTCIHSANDPQCYLCGELNTKPSSLAIYYRKNEVKKVVCIPAPPATSSRGGGGEVIPSDLWAWRKYGQKPIKGSPYPRGYYRCSSSKGCMARKQVERSRSDPNMLVITYAAEHNHPWPMQRNVLAGYARSHHSTHATASSRQATAAAADQPAAACTDHNGLLPPPHSISTPTS

SEQ ID NO: 18097 - protein, 142 aa, Oryza sativa
  Clone ID: TF_OSC418197j.C1.p1.np
ASLASVSSSMDHNFLHIYYRKNEVKKVVCIPAPPATSSRGGGGEVIPSDLWAWRKYGQKPIKGSPYPRGYYRCSSSKGCMARKQVERSRSDPNMLVITYAAEHNHPWPMQRNVLAGYARSHHSTHATASSRQATAAAADQPA

SEQ ID NO: 18098 - protein, 563 aa, Oryza sativa
  Clone ID: TF_OSC900002j.C1.p20.gm
MRELKEVDDDAARGGHGRDATETRKSEHATMDMMEEEAANAATAQAAAAGDLADVVARANARAFLVSTPHHHPSPLHPLPPPPMPQAPHQYYPAPQITIPYHHHHHGELRRPTTIAYTDAPVPFETAGPPSTVVDSYHHLTPGDAGYGMPRPLALQISQHALCGGGDVVMGGGGAGAADDGEEAIRISPLTPSAHHQMMKRKNEVKKVVCIPAPPATSSRGGGGEVIPSDLWAWRKYGQKPIKGSPYPRGYYRCSSSKGCMARKQVERSRSDPNMLVITYAAEHNHPWPMQRNVLAGYARSHHSTHATASSSRHKQQQQQQTNQLQPALITSSSSSSSSPFNLYADVVLGGQQANMMMTTEGAGAGLGIQPSAADEVFAELEELEPDNPTMINANMQVYSTTSRPGASVDTRTGCTNIGTQLDGYKGTWLKMFKASRLAVERAHGEGLTGVGSTRPSWRLRGAYVAATRAGGRKTKAPAANGPRAAAVSPGRLATMRGDGAYTGMTRENKSERANGLDSPEGVRRRRIAAAAPGGGKRGKRRRGHEGPIPGGESIYAATGIRC

SEQ ID NO: 18099 - protein, 625 aa, Oryza sativa
  Clone ID: TF_OSC413566j.C1.p5.fg
MESYVGVKGKNVVGGGDVGREMPVAPPSSSSAAVGMVEFPAAAAGLGYAGMTAKEAGGGYQERRVVVGEMDFFKTAEKRGERKEPPPATATAAASGHAGASPDDLSLNKDDLTINMGLLVGRRRNSGSEESIVDDGGVSSNDEEHREAKAALAVTKAEIGRLSEENKRLKNMLSNVTTKYNSLQMQFVTLMQQRRSVLAAPIHQQELLDPEKKEQEGSQQQQQQLIPRQFISLGSASLQPDVEAPHSVVVVGGDVCAPSSSNPDAAVPAMMPLPHFDHHNHHHPIHGGRERGSSPAEADHHRHHQQEQPPPPPQQQQQLPPSWLPADKVPRFLPGKGPEPVPEAATMRKARVSVRARSDAPMISDGCQWRKYGQKMAKGNPCPRAYYRCTMAAGCPVRKQVQRCAEDRTVLITTYEGNHNHPLPPAAMAMASTTAAAASMLLSGSMPSADGSLMAGSNFLARAVLPCSSTVATISASAPFPTVTLDLTQTAPPPPPASSTQPQPPRPEPAQLQAALAEAARPVALPQLFGQKLYDQSKLSAVQAVAGTKGSDGGALADTVNAATAAIASDPNFTAVLAAALTSYIGSRSGSGGAGAGGSSGTVQPLMSGGGDSCSRDDKIGEQNS

SEQ ID NO: 18100 - protein, 335 aa, Oryza sativa
  Clone ID: TF_OSC419984j.C1.p2.fg
MAVTESACLSYEQEAVAVREVAQVYELIKTQQPLLLVHQQPQQLAHGLLNHALRALNVALSVMNQPHASSSAAAAAVPVMSLIKAEAATPANSSSPAADVAADNHVVGKPRRSSSAAKRRRINGEEYKSSSWSQFTPVPHEDGFQWRKYGEKKIQGTHFTRSYFRCTYRDDRGCQATKQIQQKDKNDPPMFQVTYSNEHTCTTTRLINNINNPAALHNLTANPNGHHDSDDDDTIFTKMIKQEEQAAWLPPPPPADLATISNNFDETPGLHVCQEVPPSSSNSSVISHYADEFDHHQMLETTVMEEALGLGADLDDPYFYDPNLLLIYESLMNCY

SEQ ID NO: 18101 - protein, 265 aa, Oryza sativa
  Clone ID: TF_OSC400524j.C1.p2.fg
MSSAPETFSLDHLSQHQQQQPPPLAEQEQLCYVHCNFCDTILAVGVPCSSLFKTVTVRCGHCANLLSVNLRGLLLPAAASTANQLPFGQALLSPTSPHGLLDEVPSFQAPASLMTEQASPNVSSITSSNSSCANNAPATSMASAANKATQREPQQPKNAPSANRTSEKRQRVPSAYNRFIKDEIQRIKASNPDITHREAFSAAAKNWAHFPHIHFGLMPDQGLKKTGIQSQDGAGECMLFKDGLYAAAAAAAAATAASSMGVTPF

SEQ ID NO: 18102 - protein, 273 aa, Oryza sativa
  Clone ID: TF_OSC400297j.C1.p6.fg
MSSSSSSSASSAAAAAFRPAVVQREQQVVEEKFPAAAAAMREMVLPPVAAAAADSEQEQLCYVHCHYCDTVLVVSDLRSNHAHFLSICVHLALDSRAFLVHPWRRVLQDEISTANSPTQLLLEQHGLGGLMASAASCRNNNSPAAAAAPPPPTSQGKAAAKEPSPRTNTAVINRPPEKRQRVPSAYNRFIKDEIQRIKAGNPDISHREAFSAAAKNWAHFPHIHFGLMPDHQGLKKTSLLPQDHQRKDGLLKEGLYAAAAAAAAAANMGVAPY

SEQ ID NO: 18103 - protein, 256 aa, Oryza sativa
  Clone ID: TF_OSC401780j.C1.p15.fg
MSSSSSSSAVFPLDHLAAPSPTEQLCYVHCNCCDTILAVGVPCSSLFKTVTVRCGHCANLLSVNLRGLLLPAPAPAPANQLHFGPSLLSPTSPHGLLDEVAFQTPSLLMEQAASASLSSITGRSSSSCASNAPAMQMPPAKPVQQEPELPKNAPASANRPPEKRQRVPSAYNRFIKDEIQRIKAGNPDISHREAFSAAAKNWAHFPHIHFGLMPDQGFKKTFKPQDGSEDILLKDSLYAAAAAAAAAAANMGVTPF

SEQ ID NO: 18104 - protein, 77 aa, Oryza sativa
  Clone ID: TF_OSC29392j.C1.p1.fg
EEIQRIKAAKPDIPHREAFSMAAKNWAKCDPRCSSTVSTSNSNPEPRVVAAPIPHQERANEQVVESFDIFKQMERSG

SEQ ID NO: 18105 - protein, 194 aa, Oryza sativa
  Clone ID: TF_OSC400152j.C1.p13.fg
MDLVSPSEHLCYVRCTYCNTVLAVGVPCKRLMDTVTVKCGHCNNLSFLSPRPPMVQPLSPTDHPLGPFQGPCTDCRRNQPLPLVSPTSNEGSPRAPFVVKPPEKKHRLPSAYNRFMREEIQRIKAAKPDIPHREAFSMAAKNWAKCDPRCSSTVSTSNSNPEPRVVAAPIPHQERANEQVVESFDIFKQMERSG

SEQ ID NO: 18106 - protein, 158 aa, Oryza sativa
  Clone ID: TF_OSC423581j.C1.p2.fg
MAQASPGKELAKLSKGRHTWEKVNVPNNCSYNIVTVRCGHCTMVLSMDLAPFHQARTVQDHQVQNRGFQAPEKRQRVPSAYNRFINSTIRDEYTYIFKGRRKPQLRMGLVEEIQRIKTSNPEISHREAFSAAAKNWAHLPRLHFGLSVADGGGGGGSN

SEQ ID NO: 18107 - protein, 337 aa, Oryza sativa
  Clone ID: TF_OSC400415j.C1.p6.fg
MRVQCDVCAAEPAAVLCCADEAALCSACDRRVHRANRLASKHRRLPLVHPSSSSSGDGGAAAAPLCDVCREKRGLVFCVEDRAILCADCDEPIHSANDLTAKHTRFLLVGAKLSPAALAEQPLPSSDCSSDDDAAAAATEEEYHSSAASTGAAVSAPLDASSNGAGGGGGVGGSSISDYLTTICPGWRVEDLLPDDDAFAAAAAVSTTNPSLRRVLATSPSMKPRLTYDSLEQQAGKEKDERVPFLDADLFDVVAGRPEKKGGAWAPHVPHLPAWCLDEVPVVVAASAAPAATPVKAKQGHVRDSHWSDSDAFAVPEFSPPPPPAKRARPSSQFWCF

SEQ ID NO: 18108 - protein, 250 aa, Oryza sativa
  Clone ID: TF_OSC101266j.C1.p1.fg
MKVQCDVCAAEAASVFCCADEAALCDACDRRVHSANKLAGKHRRFSLLQPLASSSSAQKPPLCDICQEKRGFLFCKEDRAILCRECDVTVHTTSELTRRHGRFLLTGVRLSSAPMDSPAPSEEEEEEAGEDYSCSPSSVAGTAAGSASDGSSISEYLTKTLPGWHVEDFLVDEATAASSSSDGLFQGGLLAQIGGVPDGYAAWAGREQLHSGVAVAADERASRERWVPQMNAEWGAGSKRPRASPPCLYW

SEQ ID NO: 18109 - protein, 384 aa, Oryza sativa
  Clone ID: TF_OSC28112j.C1.p11.fg
MLKLEPEFPGLPQRCDSCRSAPCAFYCLADSAALCATCDADVHSVNPLARRHRRVPMGVVAAPGAGGAFVVRPAGGVNSSWPIREGRRCDYDDDDADAAGEEDEEATSWLLFDPLKDSSDQGLPPFGDALVADFLNLGGGAGEKEDASSSKDCSSSHGKSSEGSHEFAVPGEPVPERQGFGAVSMDITDYDASNFRRGYSFGASLGHSPPATTKLVARASVDGRSTGGLVDGRSTGDSRGGGSGGGDSRGGGSGGDDSRGGGSGGGDSRGGRSNGGDSRGGVAQRRRLAGRRGAASPATVTRRRGDSWGGVARRIQRRRLALRGGRSDSHRWMAARRRGAVAGLYGSDPPPRRPWASLSPAMEDGHAGDFDFFFQNLDSNFLLF

SEQ ID NO: 18110 - protein, 365 aa, Oryza sativa
  Clone ID: TF_OSC900353j.C1.p17.fg
MLKLEPEFPGLPQRCDSCRSAPCAFYCLADSAALCATCDADVHSVNPLARRHRRVPMGVVAAPGAGGAFVVRPAGGVNSSWPIREGRRCDYDDDDADAAGEEDEEATSWLLFDPLKDSSDQGLPPFGDALVADFLNLGGGAGEKEDASSSKDCSSSHGKSSEGSHEFAVPGEPVPERQGFGAVSMDITDYDASNFRRGYSFGASLGHSPPATTKLVARASVDGRSTGGLVDGRSTGDSRGGGSGGGDSRGGGSGGDDSRGGGSGGGDSRGGRSNGGDSRGGVAQRRRLAGRRGAASPATVTRRRGDSWGGVARRIQRRRLALRGGSKWMIMDAYTGNLKDWVLAVVYLTGCRCCQYDRRSTLDCP

SEQ ID NO: 18111 - protein, 460 aa, Oryza sativa
  Clone ID: TF_OSC401426j.C1.p7.fg
MDTFFPLICFTENMRLQYPGRIPLNSTVEQKARKVAVLVALSASGSAPVLYRTMDALCDFCREQRSMVYCRSDAASLCLSCDRNVHSANALSRRHTRTLLCDRCVGQPAAVRCLEENTSLCQNCDWNGHGAASSAAGHKRQTINCYSGCPSSAELSRIWSFSMDIPTVAAEPNCEEGINMMSINDNDVNNHCGAPEDGRLLDIASTALMSDLPTGDKFKPLIGSSSGDGMNLLPLNSDQPAEPVSTTPKAPCVTDKDMFNDGSVYGDFCVDDADLTFENYEELFGTSHVQTEQLFDDAGIDSYFEMKDVPADESNEQPKPVQPECSNVASVDSGMSNPAARADSSHCIPGRQAISNISLSFSGLTGESSAGYFQDCGVSSMILMGEPPWHPPGPESSSAGGSRDNALTRYKEKKKRRKFDKKIRYASRKARADVRKRVKGRFVKAGEAYDYDPLSQTRSY

SEQ ID NO: 18112 - protein, 448 aa, Oryza sativa
  Clone ID: TF_OSC401365j.C1.p4.fg
MSSTAKAAAAGAVGAKSARACDGCLRRRARWYCAADDAFLCQGCDTSVHSANPLARRHERLRLRPSSPPPLVPPSGSGRRDEAVPAAWFKRKARTPRSHAAKSAAAFGQLLSRRLVVVPEAAAGSGGDSPEERKDEGEIVEEQEQLLYRVPIFDPALSEFCSPPPLEDAAAAVSCCNEDGAVENPTKPSMTTTTATTPPLQFFPDGQANFGPTDAELREFAADMEALLGRGLDDGNDEDSFCMETLGLIEPVDDDAGRVKVEADGDAGMTLAWCHELDTETSSGEMLDIDFDCGSPQAATTPDEKVGSSGPAAADDDAQLQQSNLALSLNYEAIIESWGTSPWTDGERPHVKLDDSWPRDYSGVWMAAAGVFGHGGEEQALTPRLGMDGGREARVSRYREKRRTRLFSKKIRYEVRKLNAEKRPRMKGRFVKRAAAAATAAVATACVA

SEQ ID NO: 18113 - protein, 452 aa, Oryza sativa
  Clone ID: TF_OSC401751j.C1.p9.fg
MSCSSEKAAGAVGGKAARACDSCLRRRARWYCAADDAFLCQGCDTSVHSANPLARRHERLRLRVSSPPPLTARASVEEEAAAAVGTTTTTTSKREGGVTPAWSKRKARTRRPQVKSVGQLLSRRLVVPEMAVESSDERKADEDGAHEELEGQLLYRVPVFDPSLAEFCSPPPIDDAAAASSSCFKEDAADGAVEDAKYPAAAASSPVQQLPDSFVNFEPTDAELREFAADMEALLGQGLDDSNELQDSFYMETLGLITPPVEESGRVKMELDGGVASNSRVSLPSCRAHPKPEDVESADVLDIDFNCTSPDEQKSSASNGAAADSQFFHRSLDLRLNYEAIIESWGNSPWTDGRPPHGQLDDFWPNDHHYSGLWAAGGGGHGAEVGMMTVRPRMDGPGREARVTRYREKRRTRLFSKKIRYEVRKLNAEKRPRMKGRFVKRPSAAAAPCAVT
